United States Patent Application Publication US 2005/0228172 A9 - sequence listing, part 116

SEQ ID NO: 541837 - DNA, 625 bp, Homo sapiens
ttcttagttacctcaagtgaaaattatgttgacacttttccacagtcccacttaacataaatgtagtagttgctggggagttaaagatgacccggcactcacacttacaatttgtgtgatacaactgaaggtatgtagagggctctgggaaccctctatgctatagagtcactggggctcatgaggcaaaccattaatctctgaggagacaaaaaggggatggggaggaactttagaycagtcaggctcttctgtaataccctcatccacaattgtgtcttaattagtgtatggcatctaaaagtgatactaaaacatttacagtagtcccttcatatccatagtttcgcttcctgctgtttcagttacctgtggtctgaaaatattaaatggaaaattccagaaataatccataagttttaaattgtatgctgttctgagtaacgaggtgaaatcttgcaatcttacgctgcttctgtcctgggcatgaatcatccctttatgcagtgtagatacatactgtggatatagtagtgtatctacaccgtctacactacccaccggttagtcacctagtagtcatcttgattcttagatcaactgttggcagtcttgcagtgcctgt

SEQ ID NO: 541838 - DNA, 625 bp, Homo sapiens
ttcttagttacctcaagtgaaaattatgttgacacttttccacagtcccacttaacataaatgtagtagttgctggggagttaaagatgacccggcactcacacttacaatttgtgtgatacaactgaaggtatgtagagggctctgggaaccctctatgctatagagtcactggggctcatgaggcaaaccattaatctctgaggagacaaaaaggggatggggaggaactttagaccagtcaggctcttctgtaataccctcatccacaattgtgtcttaattagtgtatggcatctaaaagtgatactaaaacatttacagtagtcccttcatatccatagtttcgcttcctgctgtttcagttacctgtggtctgaaaatattaaatggaaaattccagaaataatccataagttttaaattgtatgctgttctgagtaacgaggtgaaatcttgcaatcttacgctgcttctgtcctgggcatgaatcatccctttatgcagtgtagatacatactgtggatatagtagtgtatctacaccgtctacactacccaccggttagtcacstagtagtcatcttgattcttagatcaactgttggcagtcttgcagtgcctgt

SEQ ID NO: 541839 - DNA, 589 bp, Homo sapiens
atatgttttcactctggtgtgctcaacagtgcggatcggacagggagcggaaatgggaaagataagtgggaaataaatcacccaacttgatttagtcataatagtaaggagagggggattgcagagctgtgatcagagcctcaatcagagtctgggcaggagggtcggagggcagaagttgaagctccctctgccctgcaccagccttctgaaacctcctgtggayggagtcactctggataagggatggacggcaggtgaacataagtcgtgcactctgagcttctgggagtcccaaggcacagaggcctgtactgcctggcaagcctctgccctctaagggcagcagacagggaagacagtggtgtggagggcccagatccaacttgcctcccgtccacggagaccggcccagctatgcctggggaaggggctctgctgattgagtttctcagaggcagtcaggattggtggggaggcaagggaagtgcttggggaagcaaatccctcctatttttagtgctttccagaaagcatcttagccatttcctttttccagttagtactgggcccacctctgccagtctag

SEQ ID NO: 541840 - DNA, 589 bp, Homo sapiens
atatgttttcactctggtgtgctcaacagtgcggatcggacagggagcggaaatgggaaagataagtgggaaataaatcacccaacttgatttagtcataatagtaaggagagggggattgcagagctgtgatcagagcctcaatcagagtctgggcaggagggtcggagggcagaagttgaagctccctctgccctgcaccagccttctgaaacctcctgtggatggagtcactctggataagggatggacggcaggtgaacataagtcgtgcactctgagcttctgggagtcccaaggcacagaggcctgtactgcctggcaagcctctgccctctaagggcagcagacagggaagacagtggtgtggagggcccagatccaacttgcctccygtccacggagaccggcccagctatgcctggggaaggggctctgctgattgagtttctcagaggcagtcaggattggtggggaggcaagggaagtgcttggggaagcaaatccctcctatttttagtgctttccagaaagcatcttagccatttcctttttccagttagtactgggcccacctctgccagtctag

SEQ ID NO: 541841 - DNA, 509 bp, Homo sapiens
acagggtggcaaggcgggccagtccacagcctgaactccaggctccatgcttctatctgtttatttattgtttcgtttttctttttagttgccatacaattgtatatgtttatgrgatacagagtgacattgtgatacctgtaacaatgtgtaatgatcaaatcagggtaattagcatatccatcacctcaaacatttatcatttctttgtgttgggaacattcagaatcctctcttctagcttctataaaacatacaataaattgctgttaaatatattcaccttacagagctttagcgcactagaactctttcctcctatctagcagtaactttggatctgttaatcaacctctccctggctcccctcccccttatctttcccagcctctaataaccacagtttcactctctacttctgtgagctcaactttttttttttttttttagctcccccatatgagtgagagcatgtggtatttatctttctgtgcctgacttagagaaat

SEQ ID NO: 541842 - DNA, 559 bp, Homo sapiens
ccgcaagaggaagcatcagtagaagcaataaaggctggggtggtgaagactcaggaagggcaagggagggagagggcggtgaaggccagagggtggcaaggagtctggctgctgggctcaggggtggcagttagatggcaagctcttggtagactggattcattcttcattcattcatctaccacttatggagggctctcggggagccgctgtccagaggcaggacaaatctcgctgacccatactttctaacccagtgttattttgtgctgtgttggaggcatgtccaaagctctaagggagcccaggcttcccagggaggttccatggaagacctgagatttcagccgagtcctgaagcctgagcaggagtttctcaggcgaagagtgggactggagagccattctaagccatgggaacagtgtgttgcaaaggcctggaggagtaacagagccctgtgtgtttggggagcaccctagggtccctgggtcagggcatggcaggaaaggttgtcgtcccaggttgccartagcacactggaagctgggagtgtcagca

SEQ ID NO: 541843 - DNA, 608 bp, Homo sapiens
tgagttggagctgagaattcaagagctccacaggatttggaaagagaggagaggtcaatctagataaagaaggcagtatagggcacagagttaaataaaccaagtggctttcaggacagcgaagaaacaaaactagctagagtagaggacttgagtagaggggaaataagactgaaaaggcacgatggctccagattgtgcaggaacccaggcaaactgaatttactctggcaaagagaagtcactgcaagtgcttaagcagaataacttgattaaagttttaggaagattcatctggcaatgacgtaggatggattgagccaagagagatataagggaaggcagggagctattcatctaataagagtaagaataaagrataacaatactatacaatatctataatgtatttagttattattacttggtagacactgtgctaacatgcactttttaatttaattctcaccacaaccctacaaaggaaattgaattagtgaacattttttcccctccactctcacataccactcaacacaacacttcccacaccacatgtgtgggagttatttccccacacaccaagcaatcagctctgcagtggacat

SEQ ID NO: 541844 - DNA, 618 bp, Homo sapiens
tacgttgtctttttttaattttctagtataattattaagatccaaccgagtttattaaaactcaaaacaatacatgacaactcacttctttgcataggaatctgagccttatgaaattctagcatcctgacaagtcatttgactactgtactgtaaaggggagagcaagctaggttagagagagagataactctctccccagccttttgttttttccagagactttgggtttttgaggtcctggatgtacaaatatttgtagagtgtgtggtactctttaaaactataatgagagttggtgcgggtttcctaaatagtttgggttgtgagttgctggcagcagtggtcacagtgggagcatctttgacagatatggttgtactccctccctgtttaattagtttccacttagagtcattaaatttatttacattgccrtagttgcatcaatctcttttccgattcaaaaaacattctaccttaaaagatgctagatgcctgttctacccatttcatagagttctgaagataagttgagataatacatgcaaaaacaccggggaagtactggtaaggtcttttcagttgtattgagtgtatctcccaagtgcccagatt

SEQ ID NO: 541845 - DNA, 384 bp, Homo sapiens
gatcaggtctctcccaaggaaggcggcgctctgtctgcctagtgctctggggtttgactctcctgccaaatcccctgtttctggtgcagaagacaaaaggttggttatcttggcggcttggggctgaaggggagcatgccgtaaaatcaggaattcccaggatggagagggggcagcaggaagctgagagcctgcttgtagccctggaggggagactgaggcacagagtcggctcctgttcttagtcaccagcaccttttccttcctctctattctgatcacatgaattagggttcctaaccctcagcctggagcctcccaagccccccagggagggacaggaaagagtcrtggagattatctgaggggagagtggagagagag

SEQ ID NO: 541846 - DNA, 493 bp, Homo sapiens
tctctactaaaaaatacaaaaaattagccaggcgtggtggcgcatgcctgtaatcccagctactcaggaggctgaggcaggagaaccgcttgaacccgagaggcagaggttgtggtgagccaagatcatgccattgcacgccagcctgggcaagaagcgcgaaattccatctcaaaaaaaaaaaaaaaattcgataaaaagtactgggcacatcaggagacaagaacaagagaaaaacaagtgatgcagatagtgagtgagcaaagactttaaaaactggatgaatacattcaataaagtagatgacaagaattttaacagagaactagaatctaataataataatcacttggaaattctgaaattaacagtaaagtaaccgaactttaagaactcaagacatggggataagagcatgctgggcacaggcgaacagaggattgctgaccacgaagcacatcagttcccacracaagggatggaaaatatgaaa

SEQ ID NO: 541847 - DNA, 472 bp, Homo sapiens
gacaagtgtgtgagcaccccttttccctttgccctaagggcataaactcctaggactgttttttttttttcaattttatcccaacctcctccactgcaacacacacacacacacataagcatgtacacacacacacatacacagagccacagtcacaccgaatattcatgctgttggrgagtgaatcatgctaataacaactttcattctcaacatcagagaggctaaccaggagggttgaggtgagggtgttgatggggcagggatgagcacacagcaggcatccagttaatcaccttggccaagcaatggcagaagccagggtgagctcaggagcagccatatttgcttggaaaggcaggggttttaatagagcaaagctgctcctttttctttaacacttcttccaaatcccccaacagccctgcctttaaatcaagactactctggggccttctgggagggagtcagc

SEQ ID NO: 541848 - DNA, 500 bp, Homo sapiens
ctgggcatggaaggaaggggaagggagccaaccattcccaatgctggcagtggcctagaattcctaggcttcctgaaagatatcaaaccccaactttgtttttgcagatattcatatgtattcttgggcaagatttctttccctgggctagatgtcccaaggaccacactcctctgtccctttcaaagaaaagacagacctcactgggaartcctggattgtgtccactgctgctgtcaccggagtctgaccccagccctgcccatctccagggatcgcagaacctgccagccaacttcctttgagtcagccggtcagggctgcatcttagaagccaagctgctttggtgtgatttctgaagtctgtgcatttgccttaactgtcaggccactggcttccctgagactggcttctgccgtttgctccctgacagtgatagtgatagcaggacagactaacagtcggagcaccctgtgcatctctttccaaggaatccatc

SEQ ID NO: 541849 - DNA, 532 bp, Homo sapiens
attaactctgtaaaatcttcaagttttatttctccttgaacctctaagctatgtaacatcactttatgccataatttaagtaatgttaccaccatttttcttttgatttgaaayggaattattgaaatagagtgtttttctcttcctttggtcactttattttgcagtcaagagttaaaatctataaaaatatagaatatgtttagacaaataattcatcatgttttctaaataatttatcgtgttgtctaaaaccatgaagttttcgattaaagaggtggagtcctagtcaatatattttgaaagtttttgaagagatctattcatgagtattgactgcaaacaaaaatgtcaaactgctgtgcatcagtgttttttaaaaaaatttaaaaaagtacagagtgtagcctcccattttcatatagcattgtggttttcttctctacctttggtagttgcttcaaggaatgacagagtggaagccaaaggtctaacaatggtctgaaacattgagtgccacctggcctggtca

SEQ ID NO: 541850 - DNA, 370 bp, Homo sapiens
ttcaaagtgaaactggaagattgtatttacagaggagttgggagaagagacttgaggcaattaggcagacaagtcaaatcttccaaagttctggcttcactrttggataagtgggtatttttaacttgattaatctggataattggtaagggagaagttctatcacttctgatgtggacagagattgcagcagcaggtgcagagtggtcatggccttgttgggactctggaccctctttcccccaaggtctgggtatttgttcatccttgctacccctgtccctctccatgtctgaccttcaggggcaatttccagatacaaacttgagtgttgccttctagcaaaacctaattatccaggcacggttac

SEQ ID NO: 541851 - DNA, 501 bp, Homo sapiens
tggagagggaagttagagatatttcacagccagggccctgagagcagcctgggagcacagctctgtccggcagcagcagaaccttccatggctggtcctcagagccctgtgaaccagcccacccctacgaggattttcttgctctggaaattcctgaaattgattcctaacaaagttggggggaaaggggctgggcaaatgatttttttgtatagcaggcactgtgttcactgtggggaaagagagaaactgcccctgccttcacagatcttaccatgaagtggggagacaggcgaaaacatgcaattacacaaataatggcttccaattgagatctgtacttccaaggagaggtgcgtgctctgagagggtttatggcggcaaagcctagattggggcatctggaagctccatgaggatgaaaaggaggcagctagggaagggcmagatagagaactgcctgtgagcaaaaggtgcccaggccaccagatgtggggcaca

SEQ ID NO: 541852 - DNA, 625 bp, Homo sapiens
tgagctgtgattgcaccactgcacttcagcctgggcaacagagtaagactctgactcaaataaatacataaatacatacatacatacataaaaataaagttaccttcttcatagggatttactaaaactgaatgagttaaattgtgtaaataacttacaatagtgtctggccaaacacatacatacacatacatgtatatatataattatatatgtattttcaaagaaaacaaataataatttcttttttagctttataattttgccttttccatttaggtaattaagatgaagtctatcttacataataaaaaataatcttaatgtaacaaaaggtagggctatagctttgtttcctcccacgttgtgagccagttttccagtatcatctactaaactgtctgtcattcccattgctttgagggactactgttttcatatgttgggttcctgtatttacatgcttctttttctgtgtttctgctttggcctccacattrcttttctgttcatctgtgctgatggaacccccgcataatgtggctctcttggtttccataaggctctcaataaccaccctggaacagaggcagtgtcagggtattaacataaacatgtttttaaa

SEQ ID NO: 541853 - DNA, 625 bp, Homo sapiens
tgagctgtgattgcaccactgcacttcagcctgggcaacagagtaagactctgactcaaataaatacataaatacatacatacatacataaaaataaagttaccttcttcatagggatttactaaaactgaatgagttaaattgtgtaaataacttacaatagtgtctggccaaacacatacatacacatacatgtatatatataattatatatgtattttcaaagaaaacaaataataatttcttttttagctttataattttgccttttccatttaggtaattaagatgaagtctatcttacataataaaaaataatcttaatgtaacaaaaggtagggctatagctttgtttcctcccacgttgtgagccagttttccagtatcatctactaaactgtctgtcattcccattgctttgagggactactgttttcatatgttgggttcctgtatttacatgcttctttttctgtgtttctgctttggcctccacattgcttttctgttcrtctgtgctgatggaacccccgcataatgtggctctcttggtttccataaggctctcaataaccaccctggaacagaggcagtgtcagggtattaacataaacatgtttttaaa

SEQ ID NO: 541854 - DNA, 459 bp, Homo sapiens
tcagacccttgtcgggagtgttatcctgtgcgttttaaatgggaaatccttcattatttgtgttaatccaatttttagttatttgtattattccatttgacggtggagttcttttaatggatcagtttaaacagattatcaagttttcaacactatgtggtttgtatataaaatattcttttgttgactcatgacaggtgcagttcagctttacaaatrttatgccacatggcttttttgaatgattgtgtactcattagtgttaggtttccaaatctttgatattctagagagaagtgccttatttagaattaaaacagcaacagttttcattcttcagataagacaacttgtgtgctgaagcatatcaaaatctgaaaatcaaaatttctgggaaatttttgaaaaaatgtttaattcttttatttgcatctgtttggactccagtaacgtttttta

SEQ ID NO: 541855 - DNA, 542 bp, Homo sapiens
ttttttttttcaaaccatgcctcctagttagccagtttcctctggataatatatttctggggtcctttcctgctattcgaaacatgtcccagcatcccaaacttgagtacacagacagagacttccctgatatccctccctttacatagatgggagaaatagggcccagtcctcctcgtcccccttcccacctcggtgtcttgcttctwtggggctaatgaggaaggcaagtggggagaaggcactgggggcagaagggacagtgaatttccctgaaggaagcccaaaaggaactgggaaatgagatgaggtgggcatctatctctatactcaagggcaggatgttgtcctggcggctctttcaccctctgccttagggacctctgacatctggaggctgggagtgaggagagtgtttcctgcttttgttcctggagacaaactttctcctgacattcagcatctgttcagcccaggaggctctgcaatatttaatagaccaagctctgcaaggaggcacttgattcaacatttggaagatc

SEQ ID NO: 541856 - DNA, 520 bp, Homo sapiens
ttcacgaagctgagtttatatcattgatgaaagcaagataactaattgcatggcaatccctttcaaaactagcatctgattccttatgggtttgggcaaacatcagaaacctgtttaccatggtctcaaaatttctcaactaatcttggagagaagatcaagtaggtacatggactacctacaaaatattattctttagctgccatgcctctaataaaacatgccatccccaaagaaggccttcatrcagaacaccttgatgaaggtctctgggtcctggcttatgataaccgctaaagaaaatcacagagcaactctgctccaagctgctttaactccttgcatattgggcagcctcacacagcccattcttttcctttatcttctttaatggcccagctacatggatcttttctttctaaatagtcagatttcactaattctagcaaaagccctaaacaataattcaataaaaagggatggaaaacagaagtgtaatatacctgaattgctattggtt

SEQ ID NO: 541857 - DNA, 520 bp, Homo sapiens
ttcacgaagctgagtttatatcattgatgaaagcaagataactaattgcatggcaatccctttcaaaactagcatctgattccttatgggtttgggcaaacatcagaaacctgtttaccatggtctcaaaatttctcaactaatcttggagagaagatcaagtaggtacatggactacctacaaaatattattctttagctgccatgcctctaataaaacatgccatccccaaagaaggccttcatacagaacaccttgatgaaggtctctgggtcctggcttatgataaccgctaaagaaaatcacagagcaactctgctccaagctgctttaactccttgcatattgggcagcctcacacagcccattcttttcctttatcttctttaatggcccagctacatggatcttttctttctaaatagtcagatttcactaattctagcaaaagccctaaacaataattcaataaaaagrgatggaaaacagaagtgtaatatacctgaattgctattggtt

SEQ ID NO: 541858 - DNA, 496 bp, Homo sapiens
gcctgggtgaggagccagcaatcttggagagcagcatccaggcaggtgccgaatgttccgtgccagtgtgagatattacattgtttataaaagtgggtgagaatttttctttcttggaccagatatgaaaagccttatttaaatatcggctggaaaaaaaaaagatagaaaagcagaatkgcaactgtaaatatacaaaatgattcagatgggagcctcactgaaagggtatcaacttctgctgctccaggactcaagtggcacatgaaacttatatgtagacgttcctaattagtggcgtgtctgataccaaactaggtatcttttaaatttttattattctactatcagttatattcatttttcccctcataaaatattccttaaagtaaagaataaaatttcacaattcatttcagactcttcttatcctcctcccctccaaaatttctacataactgcatggggtcagttacagatacatccagagcttaca

SEQ ID NO: 541859 - DNA, 592 bp, Homo sapiens
acagagggcaattttcttagcctccctgagcctcattttactcatttgtaaaatgagaataataatcatgcttattttatagtgttgataaattgggacagtgtagaggattaagcatggtccctagcataagtgttcaataaatgttacctctttgtttattccaaaggtgattctgttcttatcaaaattatatgggaattataaggggtaagaattcgttacatgtgaaatatttgtttactataccactaacagtgagcctcttgagaatagtgatctctgctgtctctttcctttggaacttcctgcagtccttgtaacaattcatacagaagctgcttgtagcaagaatgtcaatcatttagctacaactggggaaaatgcgcmaattttcacaaaatgggtatctgtttctttttcgtataccccaaaggtcaccaatgtggtcttggttttaatgggcgactacatctttagaactaattgatgatgtgcattttttacaaaatccagtagattttttttttttttacaatgggttacctttgacatgagaacattcttgtttctaaaggagagaaaattcaca

SEQ ID NO: 541860 - DNA, 649 bp, Homo sapiens
caagtaacactgccccaacccctwaacccaacccaaacaacccccccccccacaatgtgttcgtagacttcttcacacttgtatgaagaggttacttccatccctgtagggtaaattcctagaagtagcattgctgagtcaaagggtatgtacattcccagcgtttctatatcctgccaattttccctctgctaagcatggacctgtttacatccccaccagcagcacaggagggtgcttcttcccacaatgtggccagcacaattagaaaagacagaactccctgcatggccaacaaagctctgtgtgttctggcccagcctacctcatgtcagcctcctcagggagctcattctacccgccctcctcacttgctggccccaggctttgcatgggccattcccttactcaggatgttcttctcccctttctgtctcgcttatcctgcagatcccagcccatgcgcagctactttggggaagggaagccatgtctgaactcccaggccgctctcagccccttggccaaggtcttggagtatggtgagtattattcttgccacaggagcatctttacagtggcttgtggggtcatctgataaatatctgtctctccactggactcttaagctccatgatgctcatgagct

SEQ ID NO: 541861 - DNA, 649 bp, Homo sapiens
caagtaacactgccccaaccccttaacccaaccmaaacaacccccccccccacaatgtgttcgtagacttcttcacacttgtatgaagaggttacttccatccctgtagggtaaattcctagaagtagcattgctgagtcaaagggtatgtacattcccagcgtttctatatcctgccaattttccctctgctaagcatggacctgtttacatccccaccagcagcacaggagggtgcttcttcccacaatgtggccagcacaattagaaaagacagaactccctgcatggccaacaaagctctgtgtgttctggcccagcctacctcatgtcagcctcctcagggagctcattctacccgccctcctcacttgctggccccaggctttgcatgggccattcccttactcaggatgttcttctcccctttctgtctcgcttatcctgcagatcccagcccatgcgcagctactttggggaagggaagccatgtctgaactcccaggccgctctcagccccttggccaaggtcttggagtatggtgagtattattcttgccacaggagcatctttacagtggcttgtggggtcatctgataaatatctgtctctccactggactcttaagctccatgatgctcatgagct

SEQ ID NO: 541862 - DNA, 452 bp, Homo sapiens
tgggagccccacttgacagatggggacactgaggctggggaggggcagcggccagttctgggccacgtggctgaaaatgctgtcatgatcaaataacagaagtgactaaggccacatctgaatcagcaggtctgaaaacagcacatgtgctggctttttacccacccagaagcctcttctcccatggtccccttccttgtgtggacacacagccggccaggcactcaggcacaagtgtaggctgcccctggtattccagccgttgcagccaagtggggacagaggtcagctccaggggctatatctgtcacagccctggaatgctgaggcacggtggccctccgatgggtgggcgctaattataggcctgctggttcacctttctgagtccttccacccctgggaggcaggaggcctctgaacccacygaggagttcaaagacccgctccga

SEQ ID NO: 541863 - DNA, 540 bp, Homo sapiens
gcatcctctcatggctgtgtatgcagctattatttacagaccttttaccatctgtgtggcctcagcagctctcaatgaccactgtgggagccccacttgacagatggggacactgaggctggggaggggcagcggccagttctgggccacgtggctgaaaatgctgtcatgatcaaataacagaagtgactaaggccacatctgaatcagcaggtctgaaaacagcacatgtgctggctttttacccacccagaagcctcttctcccatggtccccttccttgtgtggacacacagccggccaggcactcaggcacaagtgtaggctgcccctggtattccagccgttgcagccaagtggggacagaggtcagctccaggggctatatctgtcacagccctggaatgctgaggcacggtggccctccgatgggtgggcgctaattataggcctgctggttcacctttctgagtccttccacccctgggaggcaggaggcctctgaacccaccgagragttcaaagacccgctccgagcag

SEQ ID NO: 541864 - DNA, 553 bp, Homo sapiens
gtgccagacccctgagcgggaaaggtgggtccttaggtaacatggrggagccctttccttcttggccttccactggcttctgtgcaaggaatgggtcactttagcagcccttaggtgagtcccttctggctctgaccattttttatttgaaatattaaagagactgccgggagttggaggcttggtggtctgttttgtgatcctccaaatgaacaaatcaactggggttatgatatcaattcatggagcttaagccccactctgatgctgacagaagagttcacctgcacagtttgagcccctgacatccctctgaggcagacaaggtccagaccaccagctccattttgctgcaggggaaactgaggcagacagcagcatggtcaggggcctgactttggcgtacacagcaggagtttgagttttggcttagctctttgctagttccatgaccttgagtgagctgctcagaggctttgagtctgggttaattcttctgtaaaatggtgatgaccagcagggccacaccctgcagggctgggtgagaagaaaa

SEQ ID NO: 541865 - DNA, 553 bp, Homo sapiens
gtgccagacccctgagcgggaaaggtgggtccttaggtaacatggaggagccctttccttcttggccttccactggcttctgtgcaaggaatgggtcactttagcagcccttaggtgagtcccttctggctctgaccattttttatttgaaatattaaagagactgccgggagttggaggcttggtggtctgttttgtgatcctccaaatgaacaaatcaaytggggttatgatatcaattcatggagcttaagccccactctgatgctgacagaagagttcacctgcacagtttgagcccctgacatccctctgaggcagacaaggtccagaccaccagctccattttgctgcaggggaaactgaggcagacagcagcatggtcaggggcctgactttggcgtacacagcaggagtttgagttttggcttagctctttgctagttccatgaccttgagtgagctgctcagaggctttgagtctgggttaattcttctgtaaaatggtgatgaccagcagggccacaccctgcagggctgggtgagaagaaaa

SEQ ID NO: 541866 - DNA, 553 bp, Homo sapiens
gtgccagacccctgagcgggaaaggtgggtccttaggtaacatggaggagccctttccttcttggccttccactggcttctgtgcaaggaatgggtcactttagcagcccttaggtgagtcccttctggctctgaccattttttatttgaaatattaaagagactgccgggagttggaggcttggtggtctgttttgtgatcctccaaatgaacaaatcaactggggttatgatatcaattcatggagcttaagccccactctgatgctgacagaagagttcacctgcacagtttgagcccctgacatccctctgaggcagacaaggtccagaccaccagctccattttgctgcaggggaaactgaggcagacagcagcatggtcaggggcctgactttggcrtacacagcaggagtttgagttttggcttagctctttgctagttccatgaccttgagtgagctgctcagaggctttgagtctgggttaattcttctgtaaaatggtgatgaccagcagggccacaccctgcagggctgggtgagaagaaaa

SEQ ID NO: 541867 - DNA, 608 bp, Homo sapiens
tggggtcattgacccctgagcaacactctcttaagctggaggatctcgccttgcaggttgaagaggttacaacacagagcaggggctggggcctggcatgaggcacrtgatcaatcagtgccacagatactgctgttcttaggatgagagcagaagctggggtgtcccaccacaagcaggacagagaggacacctctttgtcatcagagattaatgggacccttgtcaggcccagggtgcagtgggggaagggcagaagggaccctgccctctcaaaggcacagtgaagctctgaactgaaggagcttacaccaacatccccaaggcctggccgtgggagtttccctcaagggctgcctcatggggtcttcttagtctgtggcgtagggaagaggtgggtatgccttatgcagacccactaggcttcagtcccagctacaggcaagtggtaatgcctagggccacctccctcaggggatgactgacaggagctgctccctccaaaccagaaagggtggtgggaggtggaagcagcaggtgcaaggcagacagcaggatctctctttcctcctggggactggccgcagggaggagtcggaggccctcat

SEQ ID NO: 541868 - DNA, 608 bp, Homo sapiens
tggggtcattgacccctgagcaacactctcttaagctggaggatctcgccttgcaggttgaagaggttacaacacagagcaggggctggggcctggcatgaggcacgtgatcaatcagtgccacagatactgctgttcttaggatgagagcagaagctggggtgtcccaccacaagcaggacagagaggacacctctttgtcatcagagattaatgggacccttgtcaggcccagggtgcagtgggggaagggcagaagggaccctgccctctcaaaggcacagtgaagctctgaactgaaggagcttacaccaacatccccaagrcctggccgtgggagtttccctcaagggctgcctcatggggtcttcttagtctgtggcgtagggaagaggtgggtatgccttatgcagacccactaggcttcagtcccagctacaggcaagtggtaatgcctagggccacctccctcaggggatgactgacaggagctgctccctccaaaccagaaagggtggtgggaggtggaagcagcaggtgcaaggcagacagcaggatctctctttcctcctggggactggccgcagggaggagtcggaggccctcat

SEQ ID NO: 541869 - DNA, 341 bp, Homo sapiens
ttgaagaggttacaacacagagcaggggctggggcctggcatgaggcacgtgatcaatcagtgccacagatactgctgttcttaggatgagagcagaagctggggtgtcccaccacaagcaggacagagaggacacctctttgtcatcagagattaatgggacccttgtcaggcccagggtgcagtgggggaagggcagaagggaccctgccctctcaaaggcacagtgaagctctgaactgaaggagcttacaccaacatccccaaggcytggccgtgggagtttccctcaagggctgcctcatggggtcttcttagtctgtggcgtagggaagaggtgg

SEQ ID NO: 541870 - DNA, 528 bp, Homo sapiens
tgtgctgggattacaggcgtaagccaccgggccaggcctaccctgggatttttacatggaaaatgaacaagtttcctttgcctaggacagtgcataaaagtactttgggaactatgaggagctctgcaaaagtgaggtaaggaccccagatccaatttccagggtaaaggacaagtgagtttaccctctgctgctggtttttcaccttcacagtgggtccagcttgaactattattcagcttcccgtctttggcccctcccagcagtgatgcctttgaacccactgtcaccatttggcatcctcactctgtcctctctggacacccagccctccccatgaccccctgcactgtgctccctgccccaggccaattgtcctcccctgttttcagcattcagagtgggactcttacataatcctgggatctgagggggacttcagagagcattkgttgcagctctccccagcatgggctgtgccacgtgacatctcccagcctctactgaaatgctttcagggacgtggcg

SEQ ID NO: 541871 - DNA, 535 bp, Homo sapiens
ctttaaccatggagactaagtgctgtgtgacctggggcagatggcttcacctctctgagctgttccctcattggtaaaatggggatgatagtgactgcacacatctcctgggataatcctgaggcctgagtgagagagcacacttccaggacccagtgaggcargcgtcacatcacactgtggcttttagctctggcctgcgggactaggaccgtgctcctcatccagtgctctcccccctctacccaacccctcctgggtcatgacaaggctgcccctgggggaactgcatccctaagatcatggagggaagctgatttctgaaaggctgatccctgtctttgttcaggcataggaatccagggcctcagctctgggccccaaaacccgatcaccatccctgtggggtctccaggtgggtggagcatagctggcacctggccagcagggtttagagtctcacacctgtgccgggctgggtttgaagtcatgctctggggaaggagaactgcccggtcccctctgccagggagaa

SEQ ID NO: 541872 - DNA, 535 bp, Homo sapiens
ctttaaccatggagactaagtgctgtgtgacctggggcagatggcttcacctctctgagctgttccctcattggtaaaatggggatgatagtgactgcacacatctcctgggataatcctgaggcctgagtgagagagcacacttccaggacccagtgaggcaagcgtcacatcacactgtggcttttagctctggcctgcgggactaggaccgtgctcctcatccagtgctctcccccctctacccaacccctcctgggtcatgacaaggctgcccctgggggaactgcatccctaagatcatggagggaagctgatttctgaaaggctgatccctgtctttgttcaggcataggaatccagggcctcagctctgggccccaaaacccgatcaccatccckgtggggtctccaggtgggtggagcatagctggcacctggccagcagggtttagagtctcacacctgtgccgggctgggtttgaagtcatgctctggggaaggagaactgcccggtcccctctgccagggagaa

SEQ ID NO: 541873 - DNA, 599 bp, Homo sapiens
accatttgacttccctttttctggtaactctatttttttttaaattttgttctgaaatattttagagtttaaaaaacacaaaagaacaatacaatgagcatacttgtacttagcatacttgtacttaataccattataacacaaatcctgatcatgtctgccttctccccttcatcccattgctccagaggccaattaaacwatttaaactatatacatatattaaaacagtaaataataatatttctgaaacaagatttataactgggatgagctttaaatgcaaaggaagtatgtatctacttagatcctataagttcctcagctatgccatataaatttgtttaggatatggacaaggaagatttagaaaggtgtatcgattgaggagttaacatttgggaagaaagggaagaaaattttaataattggtagaagaaaaggggaggacaagtgagggaggacattgctgtaactaagactgttccttcatctaaaagtagcccaagtaaagaagaatatattgaaattaatccaaaaggctctcactaactatattctcacttctgatgttaattttggccttcatcatccatgac

SEQ ID NO: 541874 - DNA, 623 bp, Homo sapiens
tgtattttaccacaaattttaaaagaagcttaaaaatgagactcaatagtttgtttatatttattttataattattggagtgagaatgttgagaacaaaagtaattcagggctgggtgcggtggctcacgcctgtaatcctagcactttgggaggctgaggtggacggatcacctgcggtaagaattcgagaccagcctggctaagatggtgaaaccccggctctactaaaaataaaaaaaatagccaggcgtggtggtgcccgcctgtagtcccagctactcgggaggctgaggcaggagaattgctcgaactcgggaagcagaggttgcagtgagctgagatcgtgccactgcactccagcctggggtgacaagagctggagtccgtctcataaaaaaaaaagtaattcagaagtaatgggggttcagcatatatagtagggttatggcagtgtaagaaagcttgtattctgtcctgtgggcagtktgagccattggaagttttcaaggaggactttatcagcatgtgattcacaaagtcccctggatcagtgtagagaatttatgggaaacgggcaaccccacagacaggctagccagctcagaggctgtttctatagcc

SEQ ID NO: 541875 - DNA, 539 bp, Homo sapiens
ctgccacatactccttgcagtcctcctccttgcgagcgaagtagctgagggcctgctcccacaaggaggggtcctgctccccatggcgctcacacacgctgatgacctgccggtactgctcgtgctgcatgtggtagtgcatgatctgctggaacctgcggccggggcaagggcacacctcagtggctgtctctggaaaatgacttggattcttcccctttccctgaaattccccaaactcttacagcttcccctgctcataaaggtaaaggacaccatcctggaagtcgtgcatctggcacaggaccagggccttgtcaaagacgtcrcagaagcgaccactcttcagcagggaaatggcctctgcgtgaagcttctctttgacctggagaggaaggagggcagagctgctggacaaaaggggaaaatcacaaggtctcttgggacaaagccagtcaactctttccctcagtccattccctcttcacagaggaccattgagccccgaggtaaggtgttactggtctaaggaatgcagt

SEQ ID NO: 541876 - DNA, 648 bp, Homo sapiens
agagaatgctttaatttctaaagtaaaaataattaacaacatttgtatgtagtaatgattaaaggaggtactatgaaataactttgctatgcagaawatcattggcattaaattagttctagttgctttttctttagtacctatacacaataagaaatgtaaagatttagacagttctttctgggcaagaaaataatttttataaggtatattctctagaattagaaaataaaaatgtgaattttttttctgagagttgaatttttaaattaatatatttagttggattaaaaatatatatgttttaaaataaaacaatttccaggcaactgtgctgggtcctaatctgaaacaaatgcatgaaacagaaatgtatggtagagtaggggaactattcaaccagaaaattgtggaaaagaacaagcattgttaacattcatttaagaggacctttctaaaaggataattcaatctattgacttaaacaaattggcgtcactagctggccataccctatgaaggatacacatgcatttatgtgacttagcctccaccactaaatatgaaaacaggctaactcaatttgcttacatacgtacacaccaagcaacctattgctccttttaggaagcggatgagctcgtcata

SEQ ID NO: 541877 - DNA, 629 bp, Homo sapiens
tatgtactctaagacagagggaaaggaaccaaaaaaggaaagaagagatttaaccaccactactactctgaacctgcagagccaagctcctagcatcttgaagggctgggatcaccaagcctggcttcctgtattatgatgagtacaatttgctaatgaggtcccctgagtctatcactttacatagctaatataaaaataaccccgtgagatatgagttatcacatctcttttttagataaggaccgagagactcaggattaccaaagtaaccatgattcaaatctaattgtctcttattccaagcgtaggcatttcaacacattaagaaggtgcccatgtgccagcctgatttggggaaccccaagatgggtcctgtatcccactccccacttttaggtgagacagtttactcagagccagaatgactgagttcaaatttcatgggctgtaaaatctcatacaaattccctaatatttcttcatctcctttctccatctatcaaagagggatgatgattataacctatcatatgaggatattgtgggattaaataaataaatatatgaaaagtgcttagacaartgccaaagaatgtctagctctactatgcattcaggatcggtcc

SEQ ID NO: 541878 - DNA, 634 bp, Homo sapiens
ctggcttcccatctcactgggaaagtcctacacgatcttttcactgtgacatgctcttgacctttctctcttcagccacactggcttcttagatgttccctaaaatgccaggcaggcttctagctcagggcctttgcatgtgcactttctgctaccttttccaacatgtatattttgtttatgtgttttaggtctttactccaagccatattctcagtgagaccttcactaaccatcttatctaaaactctaaaccaacccatcccccaatgcacacttccaatatccttccatgattttttgacttagcacttaycactatgtactatgtattttacttaactgtcttatgttctacctacctcactagcaataagttctatgagggtagagattattgtctgttttattttaccctttatttataacacctaggtctgtgcctgacccgtaataggtactatatcaaatatttggtgaaggatgaacgcagaatacaaaagaaagcctcaggcctgactctggccaacatgtattagaaagaagccaagaaaaggaatggcaaggtcatgctatgtaagacatatgcaattttattgtttacttaattccttacctaattttaaaaaaagat

SEQ ID NO: 541879 - DNA, 638 bp, Homo sapiens
aaacagggtgctgcaccagtatagcctggaatatagtgcagagctcatattaaacctcccaaggaagaagggtttcctcttcatttacagtctgcgaagcgatccccttgtaaagtatttaataggataacaccggggctctccagaaatataagtaactcattggtgtaaatttcaattyttcacctttccccccctccttcctgagtgagctcattcccccctccttcttcttcttcttttttttttttaatccagtgatttaaaatgctagaaggaaaagcaactgaggtcttaactttcagacgctgaattctcatctaattgaaattactgggcataatgctatatatagccaatgaagagattttgagctctcactcagtgccttcaagacatgtcgttttgtagtcagagaaaacagagatcaatgcattttcaaactgacagagggaacggatgctctttagtagcacatgcccaggatcgtgtgtgtggggcttgcgctgtgctgagaagctgaataccggtccatatgctccttatttactgcaatgttctttgcatgttactgtgcactccggactaacgtgaaggtaagaggaggcgagccggcaactgggcacaatatacatgtt

SEQ ID NO: 541880 - DNA, 498 bp, Homo sapiens
ctccagaaatataagtaactcattggtgtaaatttcaatttttcacctttccccccctccttcctgagtgagctcattcccccctccttcttcttcttcttttttttttttaatccagtgatttaaaatgctagaaggaaaagcaactgaggtcttaactttcagacgctgaattctcatctaattgaaattactgggcataatgctatatatagccaatgaagagattttgagctctcactcagtgccttcaagacatgtcgttttgtagtcagagaaaacagagatcaatgcattttcaaactgacagagggaacggatgctctttagtagcacatscccaggatcgtgtgtgtggggcttgcgctgtgctgagaagctgaataccggtccatatgctccttatttactgcaatgttctttgcatgttactgtgcactccggactaacgtgaaggtaagaggaggcgagccggcaactgggcacaatatacatgtt

SEQ ID NO: 541881 - DNA, 483 bp, Homo sapiens
gtgagcagcagcaagtggtgattaaggaagagatttgctccccagaaagggaactctccaggagctgcttcctggtgggagatcttttcagtgaattcatttaggcagttcttgccttcctgcagaggtagaagtccctgggtgttgctttttactgtttctctctctctctctctctgaagaccagagaagaagaatatatccaatgacaggagagcacatactcataggtgggtgtctgttgaataattaattcattcatccatccatccatccatccaaccatccatccatccatccatccatccatccatccatccatccatccatccatccatctatccgttccctcaatwatatatatcgtgcaccctttctgttgggttctgaggacacagcagcgaggaagatattcatttgtctctccattctttcctccacaccaggatgtagtctgggtccagaatataagtcaaaacacgt

SEQ ID NO: 541882 - DNA, 433 bp, Homo sapiens
ttgtttggaactgagtggaaaaataaattagtgaacaaaagaacaaattaaattgggtgggttgcaatttttacctcaatctttcaccccctctctgtatccacacacctttctccatgtgtctctgcaattcttcccactgaaggagtggagtatattcttcctccccttgactttgggtttactacactgaaggagtggagtatattcttcctccccttgactttgggtttactatgtgagtttctttgggcawataatgaagcagaagtgacagcgtcccagctctaagcctaagaggcattgaccctctggcttcattatgaaaagaataaaccctggactgaccatgatcctaaaaggaggatgagagtcacatgagcagagccatcccagctacttgcagatttgaaatgagaagcaaagccaacca

SEQ ID NO: 541883 - DNA, 433 bp, Homo sapiens
ttgtttggaactgagtggaaaaataaattagtgaacaaaagaacaaattaaattgggtgggttgcaatttttacctcaatctttcaccccctctctgtatccacacacctttctccatgtgtctctgcaattcttcccactgaaggagtggagtatattcttcctccccttgactttgggtttactacactgaaggagtggagtatattcttcctccccttgactttgggtttactatgtgagtttctttgggcaaataatgaagcagaagtgacagcgtcccagctctaagcctaagaggcattgaccctctggcttcattatgmaaagaataaaccctggactgaccatgatcctaaaaggaggatgagagtcacatgagcagagccatcccagctacttgcagatttgaaatgagaagcaaagccaacca

SEQ ID NO: 541884 - DNA, 433 bp, Homo sapiens
ttgtttggaactgagtggaaaaataaattagtgaacaaaagaacaaattaaattgggtgggttgcaatttttacctcaatctttcaccccctctctgtatccacacacctttctccatgtgtctctgcaattcttcccactgaaggagtggagtatattcttcctccccttgactttgggtttactacactgaaggagtggagtatattcttcctccccttgactttgggtttactatgtgagtttctttgggcaaataatgaagcagaagtgacagcgtcccagctctaagcctaagaggcattgaccctctggcttcattatgaaaagaatamaccctggactgaccatgatcctaaaaggaggatgagagtcacatgagcagagccatcccagctacttgcagatttgaaatgagaagcaaagccaacca

SEQ ID NO: 541885 - DNA, 534 bp, Homo sapiens
tatcctcacaatgttttgtaaaactaaagctattttaaaattaaaagtttcttaaacaaaaaaaagaggggtgattcaggcctgggaagtggaagaaacgagctcagtgttttaccagccaggaagcatggggtgctccctccactgcaaagccaagccccccaactccaggagactcagggcttcagggagttaacctgccctggccattcttccataatccattcttagagctgctcctttccatgtgtgccctgggcaggaaactgattgtttaaaataataataataaggtaagaaaagcttgatgcaaaaaattatttctaaatgactttcactaatgtcctctgggcttctgggtgggtaatctgcgccccttctgtgtacaggcaaatgtgattacaacagggcctgcactggccggtctctgagctcccagccccccaggctgttgccygccctaaccacattagcagcacaagggccatccatcagactaatagggggcctgggacagcccagccctgctgtaag

SEQ ID NO: 541886 - DNA, 618 bp, Homo sapiens
tgctaaaaggtgacccttttagcttgttgtctgcaatataattgccaggggtctggctatacataattaggcttgcagagttggaaaagccacattctccacctccagctcaattttctgcaagtggaggcaagargtaagaaacccagcagaggacagatcaggacccaggaaaagcctaattctccaggtatttctcaagtacatctgttaattatcatctgcctaagacaaggatgtgtcctctgacaaaaatgtagctgtgagcaagaagatttagagatgcatcctgatatggtttggctgtgttcccacccaaatctcatcttaaattgtagtcccataattcccatgtgttgtgggagggacctggtgggaggtaattgaatcatgggggcaggtctttcctgtgctgttctcatgatagtgaataagtttcgtgagatctgatgattttataaagggaagtttccctgcatgtgctctcttgcctgctgccacgtaagacatggctttgctcctgcttcatcttctgccgtgattgtgagtacattaaacctctttttctttataaattgcccagtcttgggtatatctttattagcagtgtgagaatgg

SEQ ID NO: 541887 - DNA, 542 bp, Homo sapiens
tcgtgtatatgaaaataaatcagaagaaagtatccaaatagcagcataagtagacaaaaatgtacaaactaaagagatacccagcacatttgagaaggtttaatgaatttagctggaattccaggatgagaggagtgagacaacacaggagaagcaacatttgaagaactactacctgggaacacacacattctagaagcccgacaaactggaataataaataaaaagacactcagaaagagacatagttcaactgcagaaaacaaaaaaagaaacaaaaaattcttagtaataaaggagaaaagaaagcctgacagaagccctccccatcacagcagtgaagtcagcagactgtgtgctgaaagaaaactgccacattagaattcagagccgggaagagactgaagcctggaaacagrgagtctgccataaacagacatcactaaagcatgtacttcaagcagaagaaaactgatcctgagtagaatctccaagatatgaaaaataataaaaagcaaaaagataaatattgggctaaaact

SEQ ID NO: 541888 - DNA, 671 bp, Homo sapiens
ctggccactcttctacagcacttgctcaggaacaggttgtattgactccttcatttgagattcggtgaaattcgcaagtacctctggaatcatttgatgaacctctttggagcrttagtgatgcaacttaatgtctttggcagggacatttcttctcacatcttattgatactgggtttgaggagcaggctgacttctggttgtgtagtcagctctcggtttttttctactaatggagaagggaggcattatagggaatggaaaattcaagttgcaaagcattaaaaacaatttaaaattatgtttcatttaaactaacaattgctgtatttctgaccaaataatgtttacttcaggataatgttttcttgatttatttttatattacaagttgccactttataaattctacagatcatggaaagtagtttaaaagagtgatcttcagatttttaaatttaaagtctattcttaattttcttttatatatatgtatatatatatttatatacacacactttgcactgtaagatattgagtttatgacattaaggactctggcccttcagttcttgaaaatttagtgcttataaaattgtgaggactatattctaatcattttcagtcagtgaaaaacctatatactttatgaagcacgcaggaaacatctc

SEQ ID NO: 541889 - DNA, 453 bp, Homo sapiens
tcacctgttcaaagcgagccaaaatttattgagcacctactctgtggcagcccctggaagatctctgttttcttcctcttgagtgataaaaatacagggtgaaattgacttctgttgaaactagactctgaaagatgtttcccgaagcactctgtcagctgatgtgccccatcacttcttcctgcccaacatggacttccctgttggatgtctttctctaaggaaaatatttaatgtctttagaatgaagtgcagctgcctggaagcttagagacaatgcaacaaatccaaagacagctgcttttttttttttttggggcgggggkggggcatgtttttcctttaaagcatctctgtcagggtactgaaacttaatcagccaatccatatttatttggtagtctccattttcatggcagataatagcattccatggggcaaagcaggagaaca

SEQ ID NO: 541890 - DNA, 511 bp, Homo sapiens
cttcctcacatcacatatacctgttgagaggtcactgatgccagacaccatgctagatgctgggtatgcagaaataagagacatcatgtctgttttcaaacagctcatggtctggttttggagacagaaatacaagcagacacacaactcctacaacattggtgtatgtgtgtgacgtgttagcacataggaaagcaccttatttcagtttcacatttaggaaatgtgaatctcttctttcctgaagagatgccctctaatctgcattctgaggggatgaacagagctgtttctggcagaggcataagtaactgcctcggctcagagatgctggagattatggtggtgacttagaggctgtataacatggcggatattagtgctgayagagggaggaagaaacatctgaggtgacaggagtcaacaagccccactcagatcatggactgcttctaaaatatacacctcttcacaacacccctctctgaagaaacctactacattggtgctc

SEQ ID NO: 541891 - DNA, 521 bp, Homo sapiens
ctgttctaatctgcccaggactgaagggtttctcaggatgggaaaaaatgggacagtcccaggcaaaccttgatgaggtggtcaccctactcaaggccaagactcatttacagtagcgaccggaggagacgttccacaggaaaaacagcctgccacagccagagaagggttctgaccttggtgtttgattatatatgctgccaraaaatggtataataatttccttcaagtttttctataactattaagagtatggtaaccaggtttttacaagttttccaaaggttaaagaagaaatgatttgggctgatttatatttcatcaagaagaatgtaggctggatctcaggaagagttttctcacactaagttacctagaagaaaaaccaagtgttgtccacatccaaaacctttttcccttggaacgaaacagctctggaagtattaactttttacattaatttattgtgaacgcaataatgaacatgcacttatgaagcataagtttgtaatataaataac

SEQ ID NO: 541892 - DNA, 391 bp, Homo sapiens
cccacgaatgagctgcttatgtaggacaaggtctacccgaaatgtagaatcttgaaaacataggggaatgcctaacacatgttaattctctctagttgaaatgaggagagaaaaacaaatctttctctcaaattcaatctatattcacaggtaaaatcttcagaatggcattgatgatgggataggcatttcccaaataaaatttggtgwtcttaaaagaggttgtatctaagagaattcagacatatagaaacaatttgtgtattttcataagctggaaagtccaataacatactgagatttacgtttttgtcactgactgttttaaacctgattattttaacaagcactttctaacttttgccactgtactgcctgacagtttttattg

SEQ ID NO: 541893 - DNA, 565 bp, Homo sapiens
gttaggggtttatatagcagggggttagagagaggtaaagaagaggaattggtcaacaggcagcaggtgcatctcatgactggatgccatcatctgaaaagtttcagttccctgatmctatctgggagccctgatggttggtttcccgagaaagaaactcagacaaaacaaatataagttcctcaggcttcagttctatgggaaaatcaagccaggttcagcaactctgtaggtagagaaatcagcaatggtgaattatgataagagcaaacatggtgagatgtagaatgttctcaattaacccattaatttctcttaaattttttggaaacacatgctgctgaccaggaaaggtagagaacttgattagttttccttacataacaacgtatttttcctgtgcaacaagcttagaatcccaggataatttttgaaagtttagcagttatgttttaagagaaaaagagttcaaatgttcaatttcaaggcaatatgccaaaaggttgcaaacatgtagcaaacatgccaaaaggttgtataagggaattctgcctcctctgatgaa

SEQ ID NO: 541894 - DNA, 628 bp, Homo sapiens
gcataggttatggggggcaggatacacaggctagggcatgcttgagatgaggattataataaaaatatcctctacaaaaagctgatactccatgaaattacaaccactgagtaagggtaaaaatgaaataaactctgctgtgtcacaaaggggaaaaattctcccctgaaaacgcataaccaccagagggcattcatatgcatttgggcttgcattgataaaatttgtgtgtcaaaaaatatttgagtagagaattgtatttggggtgtccccagttggctacaacagcagaaaatagaatcaaattctcttaggaggcttcagaaagtttctacaaagtgtcaaagaaaaccagcatcagatccattatcaaaaatcacaaaacacatatataaacaaagcatcatgagtgagcaccagcataaacaacagacagcagaacaagacccacaaaagcttcagctttcagaaatagcaggcacatataaaaacctgtttaatgtatgtaaagaaataaagtagaagctggaaatatcamcataaattgtccatagtgaatgaagaataaacattctttttaagcatggaatattcataataattgataacattataggccataaaatag

SEQ ID NO: 541895 - DNA, 511 bp, Homo sapiens
acattgtagtactttaggtggcctgcaggggaatgcgtctcataaagatatataataacataatgatcactcataaagtctgggtttatactgttgtatctaatgactaacaaccaatccaggaagcacagaatatgacccccatctccctgtcctttcattgcttctaaaacagcacagtcagccagctagggcagttggtcaaatactttgaagtgtgtgtgtgtgtgtgtgtgtgtgtgtgtgwgagagagagagagagagagagtgtgtgtgtgtgtgtgtgtgtcagagagagatttcttctgtttaaaaacatttgttatttatgaaaccacataattaaaaataattccatcaacttactataaagctccatttctaatgcaaaaaagttttgtggaagtagcaaagtaataagaaaagacttgaagcttttcaaattctgcccagaataccaagattatttctgatactttaatcttttctgatactttattgagcattcaaa

SEQ ID NO: 541896 - DNA, 511 bp, Homo sapiens
acattgtagtactttaggtggcctgcaggggaatgcgtctcataaagatatataataacataatgatcactcataaagtctgggtttatactgttgtatctaatgactaacaaccaatccaggaagcacagaatatgacccccatctccctgtcctttcattgcttctaaaacagcacagtcagccagctagggcagttggtcaaatactttgaagtgtgtgtgtgtgtgtgtgtgtgtgtgtgtgagagagagagagagagagagwgtgtgtgtgtgtgtgtgtgtgtcagagagagatttcttctgtttaaaaacatttgttatttatgaaaccacataattaaaaataattccatcaacttactataaagctccatttctaatgcaaaaaagttttgtggaagtagcaaagtaataagaaaagacttgaagcttttcaaattctgcccagaataccaagattatttctgatactttaatcttttctgatactttattgagcattcaaa

SEQ ID NO: 541897 - DNA, 424 bp, Homo sapiens
caccccatcgctccctgtcctgtcccgtccaargctccttcagcaggagctgggatacgggccagatgggccaggggagatgacagtctccatcttagcactttttctcttccatccccagtaactgccaaggactggggaaatccgccggggctgactcagagagcacagtctggggaaatcccgcagtgcagagctcagctcaacctgcgacccgtggggccaggatgctgcctcatcttggtggaaggaaactccagccaggaagtggggaccatggggatggggaggcacggttatagggggaaaattgaggcagactttttctggtgaaatcaagactgaactggcggactggtgagactttgaagccagcaacaagtgtggccataaatttcaatacaggaccaccgagttccagcag

SEQ ID NO: 541898 - DNA, 589 bp, Homo sapiens
ggacacacgtacaccctcaggctcaggatacccaggacagagtcctagatgcttgaagtcatgataagtatccagaatgacacagaattccagccagrcaaggtggctcacgcctgtaatcccagcactttgggaggccgaggtggatcacctgaggtcaggagttccagaccagcctggccaacatggtgaaactccctctcttctaaaaatacaaaaaaattagccaggtatggttgtgggtgcctgtagtcccagctactcaggaggctgaggcaggagaatcgcttgaacctgggagacagagactgcagtgaaccaagattgcaccattgcactccagcctgggcagcaaaagtgaaactccgtgtcaaaaaagaaagaaagaaaaaagaatgacacagaatttgctaaagggggagaaaaggctttcttccaaagctgggcctggtttctacagagagtctttcagatgaaaattaggcaactctttgcaagcagctctttgcaagcacctcagaggagaacccctcaccctgatgaatcaggcacacaggcggatccaagacaattggctgcgcgcatgtga

SEQ ID NO: 541899 - DNA, 589 bp, Homo sapiens
ggacacacgtacaccctcaggctcaggatacccaggacagagtcctagatgcttgaagtcatgataagtatccagaatgacacagaattccagccagacawggtggctcacgcctgtaatcccagcactttgggaggccgaggtggatcacctgaggtcaggagttccagaccagcctggccaacatggtgaaactccctctcttctaaaaatacaaaaaaattagccaggtatggttgtgggtgcctgtagtcccagctactcaggaggctgaggcaggagaatcgcttgaacctgggagacagagactgcagtgaaccaagattgcaccattgcactccagcctgggcagcaaaagtgaaactccgtgtcaaaaaagaaagaaagaaaaaagaatgacacagaatttgctaaagggggagaaaaggctttcttccaaagctgggcctggtttctacagagagtctttcagatgaaaattaggcaactctttgcaagcagctctttgcaagcacctcagaggagaacccctcaccctgatgaatcaggcacacaggcggatccaagacaattggctgcgcgcatgtga

SEQ ID NO: 541900 - DNA, 619 bp, Homo sapiens
agaggtatacctcaacccttcccgtgttacctctgagaagcaagatccaggaaagcaaatcaagaggatgtttgtttttgtttttatatattttttttttttttttggaaacatagtctcgctctattgcccagtctggagtccagcgacacaatctcggctcactgcaacctcctcctcactgcaacctcctcctcactgcaacctgctgcttctgggttccagtgatctcttgcctcagactccaaatacaagattacaggtgtgcaccaccaagcccggctaactttgtattttttgtagagacagggtttcactattttggccaagctggtctctaactcctgacccacctgccttagcactccaaaagtgctgggattacaggtgtgagccaccatgcgtggccttgcattgcttgaattctcagaccacatggaccctctcatctggtcctactgcaagagtccaaggcaggaaaggcaraaggcaggggcttacccctacatcaggacaacatagaacagagtcaaaaaagaaaaacatgaatggatcagtcaagagggccctgcacatgccctcccaggcacctacaccttgcaacttaagccgacaagct

SEQ ID NO: 541901 - DNA, 624 bp, Homo sapiens
tgccactgtgacagaccctgaggtcccctcaagccagtagctgctgtctccacttgcaactttcctctcctcccactcctaacagccagttttggcacctcttctcagcacctgcgttacttttagcaggagtatacctacttcttgagtgtcttgattaaaaatttgtttttgtgccatggataggctgtgttccttcagaaaggtgtcagtctaattttagtttttctgaacaatgaatgttctcatcttctaggcgctttgataaccctgtctgccttggaatctgtactgacctccccagagggagactcttagacccagcctttcttgaacaaccttggtcctggggagcagcgctagatcccaggctctcamttagaggctgggcttagaactgttgctttttctctatccacgctctgcaggtgacacccagggcagctacactcagaagccacaaggaatgctagtggagcccctcatccctcccagcttctcttccaagctgccccgtggggcttgatccaggaagctacttcagaaaggttgtgggatagccttgggaggaggtttgttggtgggagcgtgtgaacgcggagcagtctgggataactttctgct

SEQ ID NO: 541902 - DNA, 540 bp, Homo sapiens
tgttcacatgaaccactgaaagagtcaattaaaaaatgacttccataatggtcttacttgaaggctctatagcagttatttgcttatttcttgaaactyaggcaataaatggcggaatcaaagaaaatttataagatggtatactagaaaaataaaaaagattgtatgctatgagcctcggaggagttttatcagaaaccagagaaataatttcttattgaaagcagaaattgggagcaaaataacaaaaacaacaaattattatattatcataaaattaataatatagtataaatatactatatacttatataacaaatttatatataaaagtataaacacattgtacacttatgtaatgtatgtcatatagcatatcacataatatataattgatagaatataaatataaaactacataatatttttatattgttataatgtccctgcagctatgtaactctatcgctcttgtacatggaaagaaggatgtgcgttcaactcagtggaaccagtgtcctcaagtgaaagtcaggttac

SEQ ID NO: 541903 - DNA, 540 bp, Homo sapiens
tgttcacatgaaccactgaaagagtcaattaaaaaatgacttccataatggtcttacttgaaggctctatagcagttatttgcttatttcttgaaactcaggcaataaatggcggaatcaaagraaatttataagatggtatactagaaaaataaaaaagattgtatgctatgagcctcggaggagttttatcagaaaccagagaaataatttcttattgaaagcagaaattgggagcaaaataacaaaaacaacaaattattatattatcataaaattaataatatagtataaatatactatatacttatataacaaatttatatataaaagtataaacacattgtacacttatgtaatgtatgtcatatagcatatcacataatatataattgatagaatataaatataaaactacataatatttttatattgttataatgtccctgcagctatgtaactctatcgctcttgtacatggaaagaaggatgtgcgttcaactcagtggaaccagtgtcctcaagtgaaagtcaggttac

SEQ ID NO: 541904 - DNA, 361 bp, Homo sapiens
agctggcagcttcagacctacctgtcccatctgggctggtgctttyactttgttctggcctcagaaatttcccctactgtctggcaagtccacctacacaatttgaagagtcggcttttattttaatattatatgttatccagcaaaaagctgattagaggccgtgtagcaggtaactttcagcatttcaagactacaatattgctagaagcagtaaaccaagattgatacgtttaacaactttaaaattaaaacttctatattacagatgaccccattcagcaagtggaagtagaaaaaaaaaagactgggagataatattttcaacacaaataaacaacaaagaatctatatgcacatt

SEQ ID NO: 541905 - DNA, 434 bp, Homo sapiens
tggttatatgtttgtctacagtgctgcaatttcttaactgagttctgggatctcataaaagtattttgtcccatatgtgaatagtaaatcagtgtttccatggggagatgagggctgtacttcctaatttaccatcttgctcgtgtcactttcaatttctctcttgatgtgctactttgcacatggccccaaagtatatcaagttgtggtgcttcataaatattcacaaataatacattctttcaaaagttgtcagaatcatcacttgtggtgggaccttggatctcacgataaycatcctttgttgatgggttagtctatgacttttgtattaataatttaaattctgccccaaagctgtgacttatttatgttggatatgggatctagactcccagattaaatactgcattattttgttgccgttaccactt

SEQ ID NO: 541906 - DNA, 586 bp, Homo sapiens
gctgtctaggatagattaaagcgatatggatggagcccttttgagatctgctactgcaacccgttgcacccttcagatccactcaaccctcacactatgttcactctatgttgtcactgattcttcaaatttttaaggtacaggtacctgaaaaagagaagaataaaaggcttaaatgtagatggagtaagtacactccctactgctgtagttggtcctgaggccatcagttgatattcatcatctcccacctttaccacccayggtagacttccctggtcagaatatctcttggatgcttctcttggtaggtgacccagtcctttatctttgagggaattgagtttctggttaccttgcccttttcaagactaggtagttgcaattgcccatgtgctattatcactgggcatggaatcaccaagaggtaccctggggaattctgagttagaaaaagttgctgactttatactatagatgcttcctgtcaaagagcatggtaattatctatttggtctttaaaaatgttctttattagaatttgataattttatgcatgtaaggctcaatacacacacatatacat

SEQ ID NO: 541907 - DNA, 603 bp, Homo sapiens
tgatctttagaaatctctcatagtcccctaccctctctagtctgttggccaaatccccaccacagggcttagttttttccatccttgacaatcaccaagccaagagacatgctgatcacatcacttgcttgaatgtctgatttttttatttttatttttatttttcttgagatggagtctcactctgttrgccaggctggagtgcagtggctcaatctcagctcactgcaatctccgcctccagggttcaaatgattctccttcctcagcctcccaattaggtgggattacaggcgcacgccaccgcacccagctaatttttgtatttttattaaagaaggagtttcactatgttggacggctgatcttgaattcctgacctcaggtgatttaaatattaacatagtttgctttatcattagatcaaagtaataacacattattatcaaaagttctctgataaaattcaagattgctttttgttaggactaaactaaattgagctaaatttaaaaatacttggtaatcctttagaaaggatttttccttgatgtggcaaggaatgtctgtcccagacaacaccagtattataattaatggtga

SEQ ID NO: 541908 - DNA, 603 bp, Homo sapiens
tgatctttagaaatctctcatagtcccctaccctctctagtctgttggccaaatccccaccacagggcttagttttttccatccttgacaatcaccaagccaagagacatgctgatcacatcacttgcttgaatgtctgatttttttatttttatttttatttttcttgagatggagtctcactctgttggccaggctggagtgcagtggctcaatctcagctcactgcaatctccgcctccagggttcaaatgattctccttcctcagcctcccaattagstgggattacaggcgcacgccaccgcacccagctaatttttgtatttttattaaagaaggagtttcactatgttggacggctgatcttgaattcctgacctcaggtgatttaaatattaacatagtttgctttatcattagatcaaagtaataacacattattatcaaaagttctctgataaaattcaagattgctttttgttaggactaaactaaattgagctaaatttaaaaatacttggtaatcctttagaaaggatttttccttgatgtggcaaggaatgtctgtcccagacaacaccagtattataattaatggtga

SEQ ID NO: 541909 - DNA, 463 bp, Homo sapiens
cactataaagcctataatctgacaagttgcttctgattctccaactgtttactccaatggcctagttgacggcctgggatttgttaataaaagatgacccttcaattcagtcctggaaatgggcagccacttatttttcatgaacaaaatgaataaggagtcagctgtgcaggtaggaaggcacagaggagcctttttgagaacaagttaataagcttggtgctgacagaaggaccagagctgttctagaaaggagcagatgacttttaatgccatgtcacagaattaaatatgtttatgacagcatctccctacaacaggtctgaytcctagaggggcgaagggaggggggaacccaagctacattttgccttgtctacattatataccctgggaagctactttaacaaaatttgttagttgtgttgtgttctaagatgtatctcctggaaaagaagtgtgt

SEQ ID NO: 541910 - DNA, 336 bp, Homo sapiens
ggaacttgtgcaagatgtcattgtctcagtgtcacttgtgctggattattcagcatggttaagcagggataaagttaatggtggagaaactaatgatgcttatctacttttttcctgtgcttggattttacaacctaggcactgtgacatttttcctgaatcwttccatgtctgtgaagtgatgtctttgtaattattgtagattttgatctccccaagtgatgggttgctgtactcaaagaacattctgtaccttcccatttgggctcagagaaaaatgcttccttttgttatgcacatgtacgtgttattgctattatgttgtctaatagcacc

SEQ ID NO: 541911 - DNA, 336 bp, Homo sapiens
ggaacttgtgcaagatgtcattgtctcagtgtcacttgtgctggattattcagcatggttaagcagggataaagttaatggtggagaaactaatgatgcttatctacttttttcctgtgcttggattttacaacctaggcactgtgacatttttcctgaatctttccatgtctgtgaagtgatgtctttgtaattattgtagattttgatctccccaagtgatgggttgctgtactcaaagaacattctgtaccttcccatttgggctcagagaaaaatgcttmcttttgttatgcacatgtacgtgttattgctattatgttgtctaatagcacc

SEQ ID NO: 541912 - DNA, 521 bp, Homo sapiens
acaatcttatctgtaaaattcaaagtttggaaccttataatgcctgcaaaaaagttgagactaaacaagcccatgctatggaataacctccatacacactactatgcaaattatttaaccttaagtatacatattaataaaaccaattataaccaccacagtggagtaggagggggtcttcaggaatggtgaaatccttgatccttagctataccttcaggtatgtctaaaggcacatttctgccccattcttgtccagaaggtccccatttgtcatcctgattctgcattacaatccttctctaggcctcagagggcccacattctacacatctgcctttaatggccaccttccagttttgagagtttgagaatttttagtctgtctgtttgtagcagttccaagttcataccttaagtgtgaattgggttactacctcaatattctaatgggtctagtggctgttattcctaatataccmatgccaatgaccataaaatgttaaaagaggttaaaagcc

SEQ ID NO: 541913 - DNA, 521 bp, Homo sapiens
acaatcttatctgtaaaattcaaagtttggaaccttataatgcctgcaaaaaagttgagactaaacaagcccatgctatggaataacctccatacacactactatgcaaattatttaaccttaagtatacatattaataaaaccaattataaccaccacagtggagtaggagggggtcttcaggaatggtgaaatccttgatccttagctataccttcaggtatgtctaaaggcacatttctgccccattcttgtccagaaggtccccatttgtcatcctgattctgcattacaatccttctctaggcctcagagggcccacattctacacatctgcctttaatggccaccttccagttttgagagtttgagaatttttagtctgtctgtttgtagcagttccaagttcataccttaagtgtgaattgggttactacctcaatattctaatgggtctagtggctgttattcctaatatacccatgcmaatgaccataaaatgttaaaagaggttaaaagcc

SEQ ID NO: 541914 - DNA, 471 bp, Homo sapiens
tgtccttacttcctaacatctttctgacaacattttttgttgccttcttgtttctcactttcatatttagaagatgttcaatgtactgtttcaatgtgctggtaactgctttgcttcttgggtagagccaccaccaccatagcccagccagatgagtgctctgtggacccacagcctcagctgaatatgaccccagaagccacgatgttgtctgtatccagaatacacttggcagatggaggaagcatctgagtttgagactgtggctgttacagggatcatgtaaacttgctgtttttgttttttcctgccgggtgttgtatgtatggcaacttgagratttatgtttcagtgtactggaaactttccattttattcaagaaatctgttcatgttaaaagccttgattagagaggaagtttttgtaatctaaaaaaaaaaacaaacattttcttagcattagctgagaat

SEQ ID NO: 541915 - DNA, 629 bp, Homo sapiens
gccaaggacagagcaatttcaacttgaaacctaaccaggaagactaagaacaagtgctcaggtgggaaattgtattaagcagtacacctgatttgctttcccatatgtgaatatgtaccccaaatgaagaaaagtagttcaggccaggtgccgtggctcatgcctgtaatcccaggactttgggaggccgaggtgagtggatcacttgaggcaaggagttcgagaccagtctggccaacatggacaaaactctgttcctactaaagatacaaaaattagccgggcgtggtggcgcatgcctgtaatctcagctctgcggaggctgaggcaggagaatctcttgaacctgggaggtggaggttgcagtgagccaagatcatggcactgcactccagcctaggtgacaaagcaagactctgtcttaaaaaaaagtagttcacagaaccaaaattactggcagaggttgtattgttttgatgacttgctgmagagaactctctttttgtttggatgagatggtagagaagaccaaaattgaatggagacagcttgcactgggtatgttcttaagtgtagtttcctaattttggtatttgctgaataggcatttatcacactatacacttcca

SEQ ID NO: 541916 - DNA, 457 bp, Homo sapiens
actggcaaccaaataattaattgtaaattaactaataactgcttcacggataactgaggccgtatcagaggccatatcaaaacatgaatcaaggttcaaatcctatacctcatcctttattggttgggtgacaatagkgaagttatttaatcttccttatttaatctttccacataggcatataatgctgtctgttatataatgatgcctatttgatagggttactgtaaggacagtaaggactgtgaggacatagaaagaattttgcagtgtttagaacgtaccaaccattaaatgagtagtagtaattaataataatattgttattgttattattattatttgagacagagtctcactgtgtcacgcagggtgaagtgcagtggtgtgatcacggctcactgcagcctcgacttcctgggttcaaatgattctcccacctcagcatcctgaatag

SEQ ID NO: 541917 - DNA, 436 bp, Homo sapiens
gtgcttgagagagggcctggacacagacaagtccccttgaagytaaaggaacctcccaggctctgcaactaccatctccccccgtgggaaaacaccaaattccacaaagccacaggccaatcctctcccctcccactccctgggcccggggagaggaagtcccacctttcccaagggtcaaggcttgcctgctttccaaatggccacttccaggatggctttccagaaaagtctccatgcaggcacacctatatgtttccagaaaagtctcaacgcagtccctgcagtctaaggccagcatcggcccatctcccaaagtcagtgtggtgtggcttaacacaccggctcaccctaaatgtgcactgaaggggccctgaactacaatgaaggggacgccccgagccagcaaacccccgaggggctgggcgtgccaggc

SEQ ID NO: 541918 - DNA, 593 bp, Homo sapiens
agaaaccctcccagcttccctctcaggaaactgagttccttgaagccagaacattatcctgttatgcatcttggtcttcccagggcgtgcatggcaccttacaggtgctctgtgagtcactcaggcacatagtgacagatcrttacaaaaacattacaaagaaatgaagcttcagaatttggaaagtgatgtcagcaagatggtacaataggagtctccaatgctcgtctccttgcagaaaagtaagtttgaaccacaatcaacacataaacttaccttcagaagagttaaggaatctaggtgtgagattactgcacttgtgtgaagcaaataaaacacatattgaagagggtaggagggacaatttcacattacttgtgtcacctttcccctaagcttatgcagcacacagaaaaagaccctctacatgggagaaggagagtgaggtgaacacctgactttgttgtggaccccagcaccaggcttatcccagtgaaccctgatgccaggccagttcccacagccccatgctccaggttgtcacccatgaacccagtttctaggcctgtcccagcaccagggtatctcccaag

SEQ ID NO: 541919 - DNA, 593 bp, Homo sapiens
agaaaccctcccagcttccctctcaggaaactgagttccttgaagccagaacattatcctgttatgcatcttggtcttcccagggcgtgcatggcaccttacaggtgctctgtgagtcactcaggcacatagtgacagatcattacaaaaacattacaaagaaatgaagcttcagaatttggaaagtgatgtcagcaagatggtacaataggagtctccaatgctcgtctccttgcagaaaagtaagtttgaaccacaatcaacacataaacttaccttcagaagagttaaggaatctaggtgtgagattactgcacttgtgtgaagcaaataaaacacatattgaagagrgtaggagggacaatttcacattacttgtgtcacctttcccctaagcttatgcagcacacagaaaaagaccctctacatgggagaaggagagtgaggtgaacacctgactttgttgtggaccccagcaccaggcttatcccagtgaaccctgatgccaggccagttcccacagccccatgctccaggttgtcacccatgaacccagtttctaggcctgtcccagcaccagggtatctcccaag

SEQ ID NO: 541920 - DNA, 504 bp, Homo sapiens
agttgcaatccctatcttaagttcaagactgggactgggcgcggtggctcacacctgtaatcccagcactttgggaggcygaggtgggtggatcacctgaggtcaggagttcgagaccaacctgggcaacatggtgaaaccctgtctctactaaaaatacaaaagttagccgggtgtggtggcaggtacctgtaatcctagctactcaggaggctgaggaggcaggagaatcacttgaaccgggggaggcagaggttgcagtgagctgagattgggcccccgcaatcccccctaggggaaagagtgaggctgtttttccaaaaaaaaaaaaaaaaaaagaggaccaagactgccccatctccttccatcatgtgcctatcgtgactctccttagtggtacctcagttataggcttcatttgcacccttaacaatggcctaacaactgcaaacaaaatgaaataccttatatgcttggccttttttccaaaaaaatttggaattg

SEQ ID NO: 541921 - DNA, 504 bp, Homo sapiens
agttgcaatccctatcttaagttcaagactgggactgggcgcggtggctcacacctgtaatcccagcactttgggaggctraggtgggtggatcacctgaggtcaggagttcgagaccaacctgggcaacatggtgaaaccctgtctctactaaaaatacaaaagttagccgggtgtggtggcaggtacctgtaatcctagctactcaggaggctgaggaggcaggagaatcacttgaaccgggggaggcagaggttgcagtgagctgagattgggcccccgcaatcccccctaggggaaagagtgaggctgtttttccaaaaaaaaaaaaaaaaaaagaggaccaagactgccccatctccttccatcatgtgcctatcgtgactctccttagtggtacctcagttataggcttcatttgcacccttaacaatggcctaacaactgcaaacaaaatgaaataccttatatgcttggccttttttccaaaaaaatttggaattg

SEQ ID NO: 541922 - DNA, 504 bp, Homo sapiens
agttgcaatccctatcttaagttcaagactgggactgggcgcggtggctcacacctgtaatcccagcactttgggaggctgaggtgggtggatcacctgaggtcaggagttcgagaccaacctggscaacatggtgaaaccctgtctctactaaaaatacaaaagttagccgggtgtggtggcaggtacctgtaatcctagctactcaggaggctgaggaggcaggagaatcacttgaaccgggggaggcagaggttgcagtgagctgagattgggcccccgcaatcccccctaggggaaagagtgaggctgtttttccaaaaaaaaaaaaaaaaaaagaggaccaagactgccccatctccttccatcatgtgcctatcgtgactctccttagtggtacctcagttataggcttcatttgcacccttaacaatggcctaacaactgcaaacaaaatgaaataccttatatgcttggccttttttccaaaaaaatttggaattg

SEQ ID NO: 541923 - DNA, 531 bp, Homo sapiens
tggtaagagaagtaacacaggtcatttttggggttctagcattttaaatgagcacagaggcatttttctagttaattacataacagagagcaaagacactggaagctggagctgccctctatggtgtggcttgttaggccatgacagtttgcacgtccttaggtgctgttatagcttcagcatcatcgcctttccgacattctgaatgactgacacacaagtaagaaagcattstcttccagccccactgtgaatggggaaagagccccggggctgggagacctggggcaggcagggcctgttggtgagcctgcatccttcatgcacctcctgccctggaggctcaggccactgctgtcactggcaaataataatgggacatgaactcacctcttattaggtctccaactgatcccttgacaagccatccagaatgtgcacccagatgcttttatgagaaaactcattaggttgctctgtacaaagaagcatatgctgaaagttgatgaaacttctgcggtccctaataac

SEQ ID NO: 541924 - DNA, 377 bp, Homo sapiens
ctggccacgtcactcccgtgactcatcttaagcttgtaggtgacaaactcccaagtctttctgacgaactgttgttacctggtcctccctaacttatccctggacgggtaatgttttaaacctgagtcctggcttgtatatttttccccatgcaatttcatctggttaggttggacccatggttccagcttgtaaagaactctgtgttgcctgagagtgcccccaaagctgggctgagagtgctgaagaggaggggacccaggatagatccctgaggcatgctaggcacccctgcccaatgcacctgctgacakagaatccccattagcaaatgtgagctgagctccatgctggccagtgctgggcagtggggcagc

SEQ ID NO: 541925 - DNA, 522 bp, Homo sapiens
tgactcaggagagaagtcaggaactctagcagagctctcccaacactgaaaygtgccttgcctggcttggccctggggaaagaattggcgtgatatcaattggtcccatgtgggctaagcatgggtcaggcactctctcctacctcctggcaagggctgtgaagagaccagctcttcatgtgtcttctcacctccctttccctcacagaatgaaaaggagctccaggaagtgatacagcagcagaatgagaagatcctagaacagatagacaagagtggcgagctcatagtatgttcaccatcatgcccaggcctttgccttctgtgttactggtcagccaggatcccaagtatgagaaatggtttgcttttgttcaccacatgttgtctatccttatgtcctattggacacctctccattctcattcccagagccttagagaggaggtgacccaccttacccgctcacttcggcgtgcggagacagagaccaaagtgctccaggaggccctggcaggccag

SEQ ID NO: 541926 - DNA, 507 bp, Homo sapiens
tgggcgtggctgacaagagggaacggatcctttactaacatagagggaaagccagtgttgggcatcttcatactccagagagagggacattcaatattacgtagcccctgggatgccaggtgaaccatactcccagggatcccaagtccagcaggaattcccttcagggtaggtgggaatgaaaaggagtaacagtccccacaattagccttggtgcacaacagaggcgacctcatgcacgygctgtaaggtgcaaccacactgaccactatttaattttataaaacatgctccccactttttgggagacagggtctccctctgtcacctaagctgcggtgcaatggcatgatcatagctcactgcagccttgacctcccgggctcaagccctcctcccatttcagcctcccaagtagctggggctacagacacacacaaccatgcctggcgaattgtttaatttttttgtaagagtcaggttcttgttatgttgcccaggctacac

SEQ ID NO: 541927 - DNA, 219 bp, Homo sapiens
cagaaggacgagccgccgtgcaaccaccacaacaccaaagcctgcccagacagcctcggcagcccagcccccagccatgcctaccacgggggcgtcctgtagctatgccagcggggctgggcaggccagccgggcatmctgaccgatgggcaccctctcccagggcaggcggcttcccgctcccaccagggcccggtgggtcctgggttttctgcaaac

SEQ ID NO: 541928 - DNA, 614 bp, Homo sapiens
gctgctggaaacctggatggagaaggagcggcagaaggacgagccgccgtgcaaccaccacaacaccaaagcctgcccagacagcctcggcagcccagcccccagccatgcctaccacgggggcgtcctgtagctatgccagcggggctgggcaggccagccgggcatcctgaccgatgggcaccctctcccagggcaggcggcttcccgctcccaccagggccyggtgggtcctgggttttctgcaaacatggaggaccactttctgataggacattttcctttcttctttctgttttctttcccttgtttttgcacaaagccattatgcagggaatattttttaatctgtagtattcaagatgaatcaaaatgatggctggtaatacggcaataaggtagcaaaggcaggtgctttgcagaaagaatgcttggaaacttgagtctccctagaggtgaaaagtgagcagaggcccgtagaaaccctcctctgaatcctcctaattccttaagatagatgcaaaatggtaagccgaggcatcgcgcaaaagctggtgcgatgcttcagggaaaatggaaaacccacgcaagaataatgattgattccggttcca

SEQ ID NO: 541929 - DNA, 614 bp, Homo sapiens
gctgctggaaacctggatggagaaggagcggcagaaggacgagccgccgtgcaaccaccacaacaccaaagcctgcccagacagcctcggcagcccagcccccagccatgcctaccacgggggcgtcctgtagctatgccagcggggctgggcaggccagccgggcatcctgaccgatgggcaccctctcccagggcaggcggcttcccgctcccaccagggcccggtgggtcctgggttttctgcaaacatggaggaccactttctgataggacattttcctttcttctttctgttttctttcccttgtttttgcacaaagccattatgcagggaatattttttaatctgtagtattcaagatgaatcaaaatgatggctggtaatacggcaataaggtagcaaaggcaggtgctttgcagaaagaatgcttggaaacttgagtctccctagaggtgaaaagtgagcagaggcccstagaaaccctcctctgaatcctcctaattccttaagatagatgcaaaatggtaagccgaggcatcgcgcaaaagctggtgcgatgcttcagggaaaatggaaaacccacgcaagaataatgattgattccggttcca

SEQ ID NO: 541930 - DNA, 459 bp, Homo sapiens
catccatccatccatctgtccaccacccaaacgttcatccgtctatcccccatccatctatccatctaatcctygcttgcttattcattaattcagcactttctggtgcctcctctgtgcctggcactgtgccagtacttccttctggcctgttttctggtaagtgttagcatttatgttctttgctgtggctcttacaaaacatgggcaggtaaatgttgcctgacatgtgaggacacatatcacctggggtcaggggcacacaaatgactcctgggggcctgaagatgagtgtgtaggatttggtgatgtgagtgctttgggcagggctctgagtccagccttggggtggagacagccctgcttcaagcacacactttggccaagctctcaatcccactgctggttccagatccacagacagggaccttggtctgaggcttgtctagggaggcccca

SEQ ID NO: 541931 - DNA, 509 bp, Homo sapiens
gtcgacccagggcagagacgagggaggtcggcgggggtcctggaaggagggcggtttcctctaatgccccaagcccctgttctggatctggaggagagggctgggcttgggggttgcttccttctctctggtggcatgtcctgtccgctctaggaatcaggacctggtaaatgcatccagtgatgctcatggctccacccctactacatttataagcaagggcccctgtgagctgaggcacctgttcgtcctccctgtctgcttttccatgcccccgaccctgtgaggccagcactgtccaggagccctcctgcccsccagagcttccatccaaagtccctctgggttcccatgactcaagctttctattcccacctctgctcacactccagctccgcccagtgaggccagcagaggccttgcagtcactgctgacccaggtggctacgccccactgcccctcgggaggagggaagtttccagaatagacgtggccctgccaggcaagc

SEQ ID NO: 541932 - DNA, 586 bp, Homo sapiens
tgctgcctccccctgccagggcactggaagagtaggaccacctgggccctgtyggggagaggggtggcttgggttgtgggggattgattccaggtgtggactgaggtctgctgcatccctgggctggactaggagccacagagcccaacatgtcattcatccatccattcatccattcattcaacagtcacttagtgaaaacccacaggccctgttggaggcatggagggtgagaaggaccagacaaacctggtccctctggtgtctccattctagagggaagggcaacgggcaaggacatacaccaattaaagattgcatccatgtcaccaagggccggtggcagccatgtgagtcctggcagggggtttcgacaagagagacgcctgagggttgttgggatccctccagggtccggatgctggaaggctcccaggtcacagtgactggagccgcctggctggccttgttctccagcccacagcccccatggctggacgcccccctgcctgctcaccggggctaaggtgccaccttggattccttccagcacttcagttggatttctttgccttgacagtgcaga

SEQ ID NO: 541933 - DNA, 604 bp, Homo sapiens
atggcataaatcagcagcttgactctaggtgagaggaggaagctgcccaggttagcgatggctgctttgcttttgcagaggtgtggctccgcttcatcaaggtttgctggccgaggcttccctatgtacacagtaaaactgtggccttttcatcgttatctgcctaaggaaacgcactgatgcagaaacaccctgtacctttcgcacatcactaactcgcatgagcccatctgccttctctccatgccctgggaggagagatcgcatccttcagtgtaaaggaggagacagggatgggggaaggggtctgcccaggactctcgattcgggggtgggggaaccttcccagggccgcagacaagtcacaagcccctccaaccatggccatgcttagctgcaggtgaggctggtggtttcggggggctgtgcrgcagcaggcggcccctctatggatctcaggaatacgccctccacctgtgagtttgggtgggggcagccgtgggtacacctgcactgtttcccctccctgtttgtcagtggggggtctctatagtgcacagcccgtgttaccccagaggagacgctcaggcacgcgaggctatgt

SEQ ID NO: 541934 - DNA, 604 bp, Homo sapiens
atggcataaatcagcagcttgactctaggtgagaggaggaagctgcccaggttagcgatggctgctttgcttttgcagaggtgtggctccgcttcatcaaggtttgctggccgaggcttccctatgtacacagtaaaactgtggccttttcatcgttatctgcctaaggaaacgcactgatgcagaaacaccctgtacctttcgcacatcactaactcgcatgagcccatctgccttctctccatgccctgggaggagagatcgcatccttcagtgtaaaggaggagacagggatgggggaaggggtctgcccaggactctcgattcgggggtgggggaaccttcccagggccgcagacaagtcacaagcccctccaaccatggccatgcttagctgcaggtgaggctggtggtttcggggggctgtgcagcagcaggcggcccctctatggatctcaggaatacgccctccacctgtgagtttgggtgggggcagccgtgggtacacctgcactgtttcccctccctgtttgtcagyggggggtctctatagtgcacagcccgtgttaccccagaggagacgctcaggcacgcgaggctatgt

SEQ ID NO: 541935 - DNA, 528 bp, Homo sapiens
ctgcaggcagtttgtgaaagccagaacattgcagagcaaaggaatgccatttccagcctttcctcccctccttcttgagctgtcttatgacctgctgagagccgtgccatagggtagcatccatcactctgtagaagcctctgaaaggatgaggccatggctcccgggggacacagcagktctggtgaaagctggagtctgtgcatacaggagggaccatcttgctgccttggcttcccgtggtggcaggaatgctgtgggaagtaaaatgaagagcagtgggagtcaagggctcggaactggaattcctgaggtcaggcccgggagacagagagaagacgaaccctcgacagctctggtggctgcttggccccagaccatatggcctgtgttcactcacagggatacccttgcaggcctgaagtctctaagtccatgtcctaaggcaaggggagtgtggaggagtcccatccagggtcaaaaggactgagatcctctagaatggccaagccctagtacacacgactg

SEQ ID NO: 541936 - DNA, 528 bp, Homo sapiens
ctgcaggcagtttgtgaaagccagaacattgcagagcaaaggaatgccatttccagcctttcctcccctccttcttgagctgtcttatgacctgctgagagccgtgccatagggtagcatccatcactctgtagaagcctctgaaaggatgaggccatggctcccgggggacacagcaggtctggtgaaagctggagtctgtgcatacaggagggaccatcttgctgccttggcttcccgtggtggcaggaatgctgtgggaagtaaaatgaagagcagtgggagtcaagggctcggaactggaattcctgaggtcaggcccgggagacagagagaagacgaaccctcgacagctctggtggctgcttggccccagaccatatggcctgtgttcactcacagggatacccttgcaggcctgaagtctctaagtccatgwcctaaggcaaggggagtgtggaggagtcccatccagggtcaaaaggactgagatcctctagaatggccaagccctagtacacacgactg

SEQ ID NO: 541937 - DNA, 623 bp, Homo sapiens
gtggttgcaagggcaggaagaggccaagttgctatggaaacaygacagacagaaaaggcaaagaaaggtgaaggagagaatggagataaattaaactcatagctatatatgtatacatacatgggtgagtatatattatacatatgtaggcatcattataaagatggtgaaggaggtattctctctcttctctatcaatattaatatacatattatttattattttgagatggagtcttgctctgtcactcaggctagagtgcaatggtgcgatcttgtctcattacaacctccatctcctgggttcaaacaattctcctgcctcagcctcccaagtaactgggattacaggcacatgccaccacgcctggctaatttttgtatttttagtagagacaaggttgcccagaccggtcttgaactcctggcctcaagcaatccacccgcctggccctctcaaagtgctgggattacaggcctgagccaccatgctgggccttaatatacatatttaaaagactcttaatatacatatttaaaagagatgatcagagattttgctgacaaatgactttcatgcagcaagagataacataactctcatttattcttactattaattc

SEQ ID NO: 541938 - DNA, 513 bp, Homo sapiens
tttggagaagtgaaaaaacgtcttgactagatgtacacagtgtcattgtaatggctgtcaacacatgcttgatagcatgtccttttgtcagaacactggaaaacttatctctggcaggaattttgtttgaccattcattcatgaaaggtgtataattataattcctagtacttaaaccaaaaatattttgggttgtttgggaatctgttcaactaactagaacatattgaaagaagaaaaaaatgtaaatcaagtcaataaggccttcgtatacacattgtaattgcaatactgctgtgagtactcttgtackctaaatatccctcaatatttcagctattttcaattgacctattttattttttttgtacaccttaggtaggaggtagagactttgggacagggccaaatgcctttggctgtggtctctggtcatacatactagtttgtgaccagtagcctctgcctcagtggtcacagtcaaggagacacacagacaagatttctgctgta

SEQ ID NO: 541939 - DNA, 620 bp, Homo sapiens
tatggtactataaactggtacagtatttttggagtgcactttggtatgctttacaaaamataaaaaattaaatgtccatttcctataatcaggaaaaggcaaaagtcaattttaatgctcatcaagactgaatactatttatcagttgggataagctatgttgcagtagcagatgaatgacaaaatctcactgaaaacagagcaggtgcttatttcttgtgtaaatcagaaattatcggagacaattctcaatcaatttagaagtttattttgtcaacattaaggacatcccctgaagaaaggaacacagaaatcacagaaacagtctgtcctgtgtgcctttctccaaagagaaaaaggcttcagtatttaaaggggaaacgcagtttggaggggaaagagagaaggtgtggtcacattactgaatccacgtgttgcacgagaaaaggagcaggtaggggaaaagccaattatgtatttgtctggtgctcagtaaatcagcactttacataagataaggtgaacatagagtagctacctgtggagatatctggccttttatctgcagccgtgtgcttagggacaaaaggaagagcagtttcttgcatgacttagatttc

SEQ ID NO: 541940 - DNA, 628 bp, Homo sapiens
gaggagcagggcaagcattgagggatgggcatccctgtccattcttcactgcagccacgcctgcaccaaaccctctgggctccacactgcctggagtcctgttcctgccaactctccaagcagttctccttgccaactccaatttccatggrggttgtggggtctcctgcggctaggattccagagttccatgcagaagtaggccactccatgcctgtctaactcaacccttccctaggagttgcttggggctaggaattagtcccagtgcttggcaaccccattcagggcttccagcttctctctacttcagaccagagtctggtcatccatttgttcaccccctttttatctttaaatgatgggtattcttcttctagcagagtcactctcctcttttgatattttgtaatttaaggaaattaaagaaattgaggataaataaaaataattacatttctaatgcaagaataggggggaaggggggtggggggaaggaagaattgattcacatctacacatatatattaatagacaataaggaataaatattataactatttgcagactcttgtttctgctattatttataattttctttattacccattctactttctctttgccc

SEQ ID NO: 541941 - DNA, 551 bp, Homo sapiens
gcccaggtttgatagcaaatatgcttgcagaaaacccaagctaaagacatgtcaaacaaactgggcataaaacacaacatcgaatcctatttttttttttctgaatctccaactcccaagtaatgtgtagttaaggagcacagacaacaagttaattcggtgctccccataattcccaagccatgttcagggccctgccttctaaaactttcaggggttaccaaagtatctctctcaatggacctgtgcttcccatttcgcttgctgaatttgcagggaagcaatacagtgtcaaactgtggttctcaacccaggtgatgtgcctgcctcccaaccccacctaggacacatttggcaattttcacattgygtgcgtgtgtgtgtgcgcgcgcatgcgtgtatatgtgtgtgtgtgttttgagggtaccagtgctactggcatctagtgggtagaaaccagggatgctgttaagcatcttatgatacacagtaaagtccccatcttcaactaataattcagtccaaatatcaattgtgctgaggttgttagg

SEQ ID NO: 541942 - DNA, 317 bp, Homo sapiens
acataatcatgcccagctaatttttatattcttttcttttttatttttagaggtgaagtgaagtcttactactttgcccaggctggtcttcagctcctggcctgaagccatcctcccatctcagcctccctattagctgagattacaggytcaagccaacatgaccagctcttccaggaattgtgtataataatttttctgccacggtatggctgtggttgagaaaaccttcactgtgccttcacattcaggttggttaggtactttttagactaatgagttcatgcattctctggaatgagtagagaaatgttcct

SEQ ID NO: 541943 - DNA, 612 bp, Homo sapiens
ttggtgcttcatagtgcttcagagagaattcatagtactctgggtatttggggggtgttttgaagacatgatagtcacatattgatgcttctggatagttgctcagttcattaggttctccaaaggcttactgttaaaagactatttcttaatcccactactggatatgtaacaaaaggaaaggatatctgtaggttgaagagatatctgccctcccatgtcaattgcaggactatacataatactaaaatatggaatcaaccaaagtggtcgtcaacagatgaatggatttttaaaatgtggtgtttatgattcagccataaaaaaggaacaaaatcctattattcgtggcaacatagatgagcccagaggacattatgttaagtgaattaaacyaaatacagcatgttctcacttatgtggaagctaaaaacattgatctcatagaagtagagagtagaataatggttactagaaactgggggtagggtggaggtgggtagccagaagtagggtttgagcttttttcccacataaatgtcttttgagaagtgtctgttcatatccttaatagcttaccaaccaaaaaacatccaggaccaggcggattca

SEQ ID NO: 541944 - DNA, 627 bp, Homo sapiens
tttaggtttgaaagaagtgtctgattattcaaaayttaatgtaggcttataaatatgaaaactaaggtttagaggcaagaaagctagtaagtgacacagaagtaatattcctatttcaaatcttaattgttaagtttgattcagattatgataaactagcttgcagcagaacaatcctcccatcaagaaaaattttatcatctctattagggaaaacaaaaacaaaaacccgtttgaaggcacaggagagcaaccaagatagctaggacttgagtggctaatatcctacagagaagagacactcactagagtgagcttaatcttctgcaacacatttctgctcaagtcgtttgatagtttataagacaggtggatggaaaggcagagaagtcaagctaaagctgacgctaaaaggcaaaaatactgagaagagattttggcagtcattgagattggagacttcattcatattcagcattaccaaagtggctaataattgagaatccaagatcctgaaaagaaaagtaacatagagaagtgagctcaatggttgagccactttcccctcaaggcattagttcattcagatgtggttcaaaccaagagctggagaagcttagtacaaca

SEQ ID NO: 541945 - DNA, 334 bp, Homo sapiens
aaaatctcatttaaaatgatgttaaaaataacagttcaacaagattaacagtagacatatggctgagataaaattcaggctgagccaatgtgtgattagggtaagaggcacagagagggccggggaaaggcttcaaaaaataggggatacagatgtcacaaaatcaaaatatccaggagagcaagcaaataaggcaaataatgaaccagaatgaaattaacaacagtggcatgatcatgatagtamgtggaactggcattctgcttcattgtcaggaagtctctagggcaagattgaactgagaaccagaagtgtgtgccctgtctaaagggaa

SEQ ID NO: 541946 - DNA, 623 bp, Homo sapiens
agatacagagggcaaactatacttttgctgttgtgttatatgactatgttaccccgttccataaattacaaaagggattccactgattgtgaagatctgtattcatagaagtgctagtacttttggggtctctgtgagttacaagtcactgtgactgatgattttgttattggagcacttagcataggtagacgcctccattcactgaatgccacttggagtcttgttaatagtattctaacctgaatgatatatgagatatattaaatagatttggttgcagcctctattggtcagactaatcrgagtggtcagtggaatgtcattctcatgggaaaattcaccaggagcagtgcagtgtagagataagagttgggtattgtttcagggaaaataatccccatgggtctcttgcatttctgcatgtcttcagtgcagtcactggctccctttgttctaaattaacttttcaagcatgtttttagagaaacagtcttggaaaatagatacagtgtttctctcagggtcaaatgtcaaacatgcttactcttcatgatgtctatgatccagggttcctaaactcaacattcctctcctgtgaaacaacctgctgcatatgcagg

SEQ ID NO: 541947 - DNA, 607 bp, Homo sapiens
ttatgatgaaagagaagaatggaaggaagggatcacagccttgtccagagaaatggtaaaagcatgagtagcctttctaagaacttgaggaatacaactttgttgggttttccatttaatactaatgaagtgraaaacggtccgggcgcagtggctcttgcctgttttcccagcactttgaaaggctgaggtgggtggatcacttgaggtcaggaactcgagaccagcctggccaacatggtaaaacttcatctctactaaaaatacaaaaaattagccaggcatggtggcacacacctatgatcccagctattcaggaggctgagacatgagatttgcttgaaactgggaggcgtaggttgcagtaagccaagatcgtgccactgcattccagcctgggttacagggggagaccgtgtctcaaaaaaataaataaagttgaaaacgcttatggcatttaacagtgtcacaatataaagccaagcacattttctaaagccttatttttttcaagtataaaatcatttaggctatcatttggaaaaacaaaaacaaaaaactggccatttgctgttatagattttagctctcttcgctaattaaggtt

SEQ ID NO: 541948 - DNA, 607 bp, Homo sapiens
ttatgatgaaagagaagaatggaaggaagggatcacagccttgtccagagaaatggtaaaagcatgagtagcctttctaagaacttgaggaatacaactttgttgggttttccatttaatactaatgaagtggaaaacggtccgggcgcagtggctcttgcctgttttcccagcactttgaaaggctgaggtgggtggatcacttgaggtcaggaactcgagaccagcctggccaacatggtaaaactycatctctactaaaaatacaaaaaattagccaggcatggtggcacacacctatgatcccagctattcaggaggctgagacatgagatttgcttgaaactgggaggcgtaggttgcagtaagccaagatcgtgccactgcattccagcctgggttacagggggagaccgtgtctcaaaaaaataaataaagttgaaaacgcttatggcatttaacagtgtcacaatataaagccaagcacattttctaaagccttatttttttcaagtataaaatcatttaggctatcatttggaaaaacaaaaacaaaaaactggccatttgctgttatagattttagctctcttcgctaattaaggtt

SEQ ID NO: 541949 - DNA, 607 bp, Homo sapiens
ttatgatgaaagagaagaatggaaggaagggatcacagccttgtccagagaaatggtaaaagcatgagtagcctttctaagaacttgaggaatacaactttgttgggttttccatttaatactaatgaagtggaaaacggtccgggcgcagtggctcttgcctgttttcccagcactttgaaaggctgaggtgggtggatcacttgaggtcaggaactcgagaccagcctggccaacatggtaaaacttcatctctactaaaaatacaaaaaattagccaggcatggtggcacacacctatgatcccagctattcaggaggctgagacatgagatttgcttgaaactgggaggcgtaggttgcagtaagccaagatcgtgccactgcattccagcctgggttacagggggagaccgtgtctcaaaaaaataaataaagttgaaaacgcttatggcatttaacagtgtcacaatataaagccaagcacattttctaaagccttatttttttcaagtataaaatcatttaggctatcatttggaaaaamaaaaacaaaaaactggccatttgctgttatagattttagctctcttcgctaattaaggtt

SEQ ID NO: 541950 - DNA, 629 bp, Homo sapiens
atcttggctcactgcagccactgcctcctgagttccagcaattctcctgcctcagmctcatgagtagctgggattacaggtgcacgccaccacgctcaactgatttttgtacttttagcagacatggggtttcgtcatgttggccaggctggtctttaactcctgacctcaggtgatccacccgcctcggcctcccaaagtgctgggataacaggcataagccatcgcgcccagctatcccctttaatttttaataacttctatttcttagcatgttctgctttagaaaaatgggaaaatgtggtttagttccagtgaggttcacattattatttatagactatttattatgccatttatagggcctgtgctggaccataacaatttttaaagtaattgtaattattttacactataaaatacaacacaccagccattgaagtctaaatcagtagaactctagtacctgctgcaagggcctcatcctgacaagtgcttttgatgacagcaagaggtaggccatgtgcatccaaatatttttttccctcctcataatgggacttatctgatgtataatttatattctactttgatttcatctttcttagccttttcaaaatgtctgctta

SEQ ID NO: 541951 - DNA, 503 bp, Homo sapiens
tctttcaaaggagggatccacaaggcttggtgattaagacgacgcagagggtgggtcaaggacagcatgtttgtgttgtgagtggaagaaatgtgattctcttgacagaaacagcagagtctgagttgaagcggggtgatgtggcttctaggtgatgcattcgttttaagtatgctcaagttaaatagaaaccattatactaaaaaatataatcattgtgaggttaatttcttcttggcctcgtatttatcagctcaaaacatagcacagggctcttaaaagcatgtgtatgggttgaccatcgcctttcttttattttattttattttatttttattttttatttgagatggagtcttgctctgtcgctcaggctggagtgcagtggtgtgatcttggctcactgcagccactgcctcctgagttccagcaattctcctgcctcagactcatgagtagctgggattacaggtgcamgccaccacgctcaactgatttttgta

SEQ ID NO: 541952 - DNA, 629 bp, Homo sapiens
atcttggctcactgcagccactgcctcctgagttccagcaattctcctgcctcagactcatgagtagctgggattacaggtgcacgccaccacgctcaactgatttttgtacttttagcagacatggggtttcgtcatgttggccaggctggtctttaactcctgacctcaggtgatccacccgcctcggcytcccaaagtgctgggataacaggcataagccatcgcgcccagctatcccctttaatttttaataacttctatttcttagcatgttctgctttagaaaaatgggaaaatgtggtttagttccagtgaggttcacattattatttatagactatttattatgccatttatagggcctgtgctggaccataacaatttttaaagtaattgtaattattttacactataaaatacaacacaccagccattgaagtctaaatcagtagaactctagtacctgctgcaagggcctcatcctgacaagtgcttttgatgacagcaagaggtaggccatgtgcatccaaatatttttttccctcctcataatgggacttatctgatgtataatttatattctactttgatttcatctttcttagccttttcaaaatgtctgctta

SEQ ID NO: 541953 - DNA, 608 bp, Homo sapiens
ctgggattacaggtgcccgccctcatgcctggctaatttttgtatttttagtagagactgggtttcrccgtgttgaccaggctggtcttgaactcctgacctcaggtgatctgcccacctcggcctcccaaagtgctgggtttacaggcgtgagccaccgcacctagcagatctttgatcgtaatctggagaattattgaggcagagagacagagaccctgtgcttggactcatgctttcctagcatctaagtagcatgaaaagtttctcctctagtctgttaacctgatgaactacatacatagattttctgatgttaaactattcttaaatccttgggatgaaccctgcttgattctgcttttttaactgtacactttcttatgttagataatatttacgaaggatttttatatctatagccttatgtaaaattggcctgtaattttcttttcttacattgttcttatccagttgggtaacaagatattagtctcataaaataagttaggttatttttattatttgaagcaacaggtataaggattatctgtcaaatattattttaatggaaaaaatacaataaagaacagcgtaaagaaagaaaa

SEQ ID NO: 541954 - DNA, 608 bp, Homo sapiens
ctgggattacaggtgcccgccctcatgcctggctaatttttgtatttttagtagagactgggtttcaccgtgttgaccaggctggtcttgaactcctgacctcaggtgatctgcccrcctcggcctcccaaagtgctgggtttacaggcgtgagccaccgcacctagcagatctttgatcgtaatctggagaattattgaggcagagagacagagaccctgtgcttggactcatgctttcctagcatctaagtagcatgaaaagtttctcctctagtctgttaacctgatgaactacatacatagattttctgatgttaaactattcttaaatccttgggatgaaccctgcttgattctgcttttttaactgtacactttcttatgttagataatatttacgaaggatttttatatctatagccttatgtaaaattggcctgtaattttcttttcttacattgttcttatccagttgggtaacaagatattagtctcataaaataagttaggttatttttattatttgaagcaacaggtataaggattatctgtcaaatattattttaatggaaaaaatacaataaagaacagcgtaaagaaagaaaa

SEQ ID NO: 541955 - DNA, 608 bp, Homo sapiens
ctgggattacaggtgcccgccctcatgcctggctaatttttgtatttttagtagagactgggtttcaccgtgttgaccaggctggtcttgaactcctgacctcaggtgatctgcccacctcggcctcccaaagtgctgggtttacaggcgtgagccaccgcacctagcagatctttgatcgtaatctggagaattattgaggcagagagacagagaccctgtgcttggactcatgctttcctagcatctaagtagcatgaaaagtttctcctctagtctgttaacytgatgaactacatacatagattttctgatgttaaactattcttaaatccttgggatgaaccctgcttgattctgcttttttaactgtacactttcttatgttagataatatttacgaaggatttttatatctatagccttatgtaaaattggcctgtaattttcttttcttacattgttcttatccagttgggtaacaagatattagtctcataaaataagttaggttatttttattatttgaagcaacaggtataaggattatctgtcaaatattattttaatggaaaaaatacaataaagaacagcgtaaagaaagaaaa

SEQ ID NO: 541956 - DNA, 608 bp, Homo sapiens
ctgggattacaggtgcccgccctcatgcctggctaatttttgtatttttagtagagactgggtttcaccgtgttgaccaggctggtcttgaactcctgacctcaggtgatctgcccacctcggcctcccaaagtgctgggtttacaggcgtgagccaccgcacctagcagatctttgatcgtaatctggagaattattgaggcagagagacagagaccctgtgcttggactcatgctttcctagcatctaagtagcatgaaaagtttctcctctagtctgttaacctgatgaactacatacatagattttctgatgttaaactattcttaaatccttgggatgaaccctgcttgattctgcttttttaactgtacactttcttatgttagataatatttacraaggatttttatatctatagccttatgtaaaattggcctgtaattttcttttcttacattgttcttatccagttgggtaacaagatattagtctcataaaataagttaggttatttttattatttgaagcaacaggtataaggattatctgtcaaatattattttaatggaaaaaatacaataaagaacagcgtaaagaaagaaaa

SEQ ID NO: 541957 - DNA, 596 bp, Homo sapiens
tagaaagattgtaaatttgatgagcaaaatgctctctttctggtaaaaaagtttaaattactattaataatgaggttaaacagtttcaagcatttactgggataggtrcgtttatgtcactggcctattttctgtggcttgataatagcatgtttttactaaattgtaagagctctttatatactgaggataataattttttcagtgttacttattactaatatttttaggcttaatttggccagttaattttatgctgttttggatattatgctttgaagtatctcttacgagttttgataaatcattttttatttgaaaaatattttctaagcacatgttaaatatctgctgctatgcttagtgattggacttcagtggtggataaaataaatttatctactttttctttgagattcgctttaaaatgtgatgtgccttaatctctgaaaggtagcctttgaatgtaaaccaaatgtgtttttaatagcactattgtactgacatccttagagtagagtggaatttctgttattagaagctctgcatgtatttttataaaatttatttaatttgggaatttgattgggggtaat

SEQ ID NO: 541958 - DNA, 647 bp, Homo sapiens
  misc_feature (1)...(647): n = A,T,C or G
tgggtggcagctggcagccagagatcaggggagccttgtgggtacagccccaagggcccaactttctgggatgcagagcaagcctggcagggcagagagtcgtcatggtgatgcggcatgggcatagggggtgggggcagagagaaaatgtgcactgtaggcttcccggttattttctctgtggatggatgaatttaccttactgattatggaaggccagacaggtcttttccttttccttggataagaagttagaagagaaggagaaggaaactcagctaccccgagtcccacccatgtggcaggcatcagccagaagctnnnnnnnnnnnnnnnnnnnnnnnnnnnnnnnnnnnnnnnnnnnnnnnnnnnnnnnnnnnnnnnnnnnnnnnnnnnnnnnnnnnnnnnnnnnnnnnnnnnncacatgctcaggtgcgcacctgggatgctgaaccaggatgatgagaagttcatatcctttccactgcacttcctcccacaagctaagcctctcctttaggaaatccaactgtcttcctgtcagttaaarcagaatccatccaaggaggttaagcatctggtcttcctgctacgagtctctcacctgcttcagtccaacttccatgtctgatttatcttttgaataa

SEQ ID NO: 541959 - DNA, 621 bp, Homo sapiens
tataaggagtgactggtacacggacaaggaccagaaaaagagctgtaggacaaaattgatggtgttgcagagctcattctagctggatcaacagggcactgtctgttcgrtcatctttttggccttggaaatgctgcctttatagaattctacttcagagaagacaacagaattttatgtttgcctgatgcatgcatgtgtctggattacagatgaagtgattccgtccgtccgtttgaaacagctccagcagcatcactcccttcctctctgggaggaacgccaagacaactttgcccagttcttactttccttgaatttcgactctccaaactgacttctttccccttcttcttcttctttttctgcatcttattaagtgtttaaagataaaataacatttgagaaagcaaaaataaggtgggaatgttctgaatagcagagagaataaaaataattttttccacccatttctgccaaaaactcttaaaaagcacattctacctttgttttatgagggcaaacacaaacaatttttagctataaatttattacttatgcaaagaaatgtggaaagatgtctgtcagtacttaaggtagctacaaaagttgctcaaaaca

SEQ ID NO: 541960 - DNA, 173 bp, Homo sapiens
ctttaggatttcttcttctttttagtgtgtgtttgtgtagtgtgtatgtgcagatagataaatggatagatgaatggatggaygggttgattgattgataatagatagatagatgatagatagataaacagatagtagaatggcctgaattctttccccctgcctcgtcagca

SEQ ID NO: 541961 - DNA, 401 bp, Homo sapiens
gctgcgtcagcagagcttcctagagatgtcacaggtgmttgtgcatgaaattcttatgccttaccttttcatttaactgtcaccgcaggtgcgcagcaacccccgctgggaagagcagggcaatattgcaaatcctggaccaattttgtatccgttagggtcaaccttgcgtgttgtaactgtctggatcttaagcacttcattttctgttggtgggtgttttttgtttgtttgtttgtttgtttttgttttgagacagagtttggaatttcgctcttgtcacccaggctggggtgcaatggctcaatcttggctcactgcaacttccgcctcctgggttcaagcgattctcctgcctcagcctcctgagtagctgggattaaaggcatatgccaccatgc

SEQ ID NO: 541962 - DNA, 401 bp, Homo sapiens
gctgcgtcagcagagcttcctagagatgtcacaggtgcttgtgcatgaaattcttatgccttascttttcatttaactgtcaccgcaggtgcgcagcaacccccgctgggaagagcagggcaatattgcaaatcctggaccaattttgtatccgttagggtcaaccttgcgtgttgtaactgtctggatcttaagcacttcattttctgttggtgggtgttttttgtttgtttgtttgtttgtttttgttttgagacagagtttggaatttcgctcttgtcacccaggctggggtgcaatggctcaatcttggctcactgcaacttccgcctcctgggttcaagcgattctcctgcctcagcctcctgagtagctgggattaaaggcatatgccaccatgc

SEQ ID NO: 541963 - DNA, 546 bp, Homo sapiens
caaacaaaagattgatgtctgcatgygagcaatagggggcccattatttctgatgcttattttgaaaaacttccaatccggcctcccataactaaggctttctctccatttcagcgtctcatccagcttttttttaaaaaagttatattcagtaggctttaaagtcaatcttgatattttccactgttatggtttaaaaccctaaatagattacactgacaatactgacaaatttaatcttcctcatatataacttgaggataaaaggtcaaaaaggaaacatgtttctctcctctcctacagataaaaatgcaaatagctagtttcctttgaagtttgtaaatacagcatgtattctgtgttcttgtatagcattaagtaggccactgtgatacagtaaaagttaactcttcaaagtctctgcctggctgagaaaaagggctgttttcttctaacatagatttcatgactatgataaaatcaattctgtgacagtgtgttctttgctttataaggagtacaattcctaaagcaactattttggac

SEQ ID NO: 541964 - DNA, 658 bp, Homo sapiens
gttttcacctggagtcgggctgctcagcagcctgggatctcctccaactgcctcagccacactccacatcgttctgccagtcagtggccaacatgctggtggctgttggtgtgttcctgtagacatccagcccccggtgtgttcctctgctgatgtgctcctctcaacgtccagccgcctgtgtctgcctgctaggctctcrgggtttttataggcacaggatggggatgtggaaggccagggtggtcttgggaaatgccaacattggggcaggaaaatgaaaataattgtccacacctaggtccctgggcacaggcccaagagtggagccctaggcagggaccatgccctcctctacccagcacttcccttccccaccttccatattggttaaagcgaccatgccattcccttcccagcacttccatatcagtatggcctctttcaattctgtcctgtcagtaataatattctgtgtccaaagcagttagtactgatgaatttcatggtgtgtgcggggagaacctaatgcattaggagaccacaaacaccaagtgaggtttgctattagttccagctctaagaggctgtggtcagcatcacagagactggaaatgggtggtcctgcattgtagattgtgcgcctgcagggagcctg

SEQ ID NO: 541965 - DNA, 558 bp, Homo sapiens
gttgtaattccaggaaataatgtgtaagatactatactatggcgtctggcaaatagtatcttgttatatgttatatattctgatgattgttatattttctatcttatctcacctcccaccctagtccatacggaaccacttaacttcttgtagggctgaaatatatattcacttatttatgactaaatcctgtggaataaaaccaaggactttatgaagctaagaaatattaaatctcctgcctcttctaatctacacagtgagtcataaagggaatttacctgatcgagtatgatttgtctttcaaagctgtgctttatttcctcctacaaatctgtatttttaaccatcataaattatttttccctatcttcccaaatattaataataagtgtcattatccattcaggctgccataacaaaatatcacaattaaatggcttataaacaacagatatttatttctgacagttttgaaggctggaagtccaagatcagggtgccagcaaggtcaggctctgstgagagctctcttctgggttgcagaccactttctcc

SEQ ID NO: 541966 - DNA, 530 bp, Homo sapiens
atcaggagaatgactcatgccctgtgctgccttgccctctgctgggctggcttgagtcctcaggttccctcacagatgcaattcctgataataatcacttgcattctcctgttctaagctacagcttccttttctcttttttttttttttttttgagatggagtctcgctctgtcacctggttggagtgcagtggtgcaatctyggctcacagcaacctctgcttcccgggttcaggcgattctcctgcctcagcctcctgagtagctgggactacaggtgcacgccactgcatctggctaatttctgtatttttagtagagaaggggtttcactgtgttggttaggatgatctcgatctcctgatttcgtgatccccccgcctcggcctcccaaagtgctgggattacaggtgtgaaccactgcgcccggcattagctacagtttcaacatgatgcactagaggggaaaaaaaaagaaggcgtctgccaaactgacacacacacacacacacacacacacacacacaca

SEQ ID NO: 541967 - DNA, 530 bp, Homo sapiens
atcaggagaatgactcatgccctgtgctgccttgccctctgctgggctggcttgagtcctcaggttccctcacagatgcaattcctgataataatcacttgcattctcctgttctaagctacagcttccttttctcttttttttttttttttttgagatggagtctcgctctgtcacctggttggagtgcagtggtgcaatctcggctcacagcaacctctgcttcccgggttcaggcgattctcctgcctcagcctcctgagtagctgggactacaggtgcaygccactgcatctggctaatttctgtatttttagtagagaaggggtttcactgtgttggttaggatgatctcgatctcctgatttcgtgatccccccgcctcggcctcccaaagtgctgggattacaggtgtgaaccactgcgcccggcattagctacagtttcaacatgatgcactagaggggaaaaaaaaagaaggcgtctgccaaactgacacacacacacacacacacacacacacacacaca

SEQ ID NO: 541968 - DNA, 530 bp, Homo sapiens
atcaggagaatgactcatgccctgtgctgccttgccctctgctgggctggcttgagtcctcaggttccctcacagatgcaattcctgataataatcacttgcattctcctgttctaagctacagcttccttttctcttttttttttttttttttgagatggagtctcgctctgtcacctggttggagtgcagtggtgcaatctcggctcacagcaacctctgcttcccgggttcaggcgattctcctgcctcagcctcctgagtagctgggactacaggtgcacgccactgcatctggctaatttctgtatttttagtagagawggggtttcactgtgttggttaggatgatctcgatctcctgatttcgtgatccccccgcctcggcctcccaaagtgctgggattacaggtgtgaaccactgcgcccggcattagctacagtttcaacatgatgcactagaggggaaaaaaaaagaaggcgtctgccaaactgacacacacacacacacacacacacacacacacaca

SEQ ID NO: 541969 - DNA, 624 bp, Homo sapiens
taaaaatatactgttacatatacaataaaaatatgtatttataagttatttcccattggattccacctaaaggaggtttcgaaacatggcagcctctttcttcattataaggtgattttgctgtaaaccargacagtggcagatagacattcaaatacaagtgtagccttgaaggaataaacaacatggaaaatgggcttatagttacaagtatttcatatacataattatggctacaatttatcaattgcgtctaaagtgtctcttttctgctaggcacttattatgtctaatttaatcttctctacagctttgtcacatagatatcattgcttccatttttagaaggagaaaaaccaaggcttaaatggaaaataacacactcaggatcattgcgaggagccagaatttgcacgcatgtgtataagcctttcctattctgtatgtgtttaaggagagagagagagatttgtttcatctgagacatttattatctactgaggagtcaacttttctaaatgaatctaagtttatatatttgatatttgggaaaaggactttttttccatgtaagaagtaaaccaagtttcatttcagccctaacagtgataaagagttagctgt

SEQ ID NO: 541970 - DNA, 624 bp, Homo sapiens
taaaaatatactgttacatatacaataaaaatatgtatttataagttatttcccattggattccacctaaaggaggtttcgaaacatggcagcctctttcttcattataaggtgattttgctgtaaaccaggacagtggcagatagacattcaaatacaagtgtagccttgaaggaataaacaacatggaaaatgggcttatagttacaagtatttcatatacataattatggctacaatttatcaattgcgtctaaagtgtctcttttctgctaggcacttattatgtctaatttaatcttctctacagctttgtcacatagatatcattgcttccatttttagaaggagaaaaaccaaggcttaaatggaaaataacacactcaggatcattgmgaggagccagaatttgcacgcatgtgtataagcctttcctattctgtatgtgtttaaggagagagagagagatttgtttcatctgagacatttattatctactgaggagtcaacttttctaaatgaatctaagtttatatatttgatatttgggaaaaggactttttttccatgtaagaagtaaaccaagtttcatttcagccctaacagtgataaagagttagctgt

SEQ ID NO: 541971 - DNA, 624 bp, Homo sapiens
taaaaatatactgttacatatacaataaaaatatgtatttataagttatttcccattggattccacctaaaggaggtttcgaaacatggcagcctctttcttcattataaggtgattttgctgtaaaccaggacagtggcagatagacattcaaatacaagtgtagccttgaaggaataaacaacatggaaaatgggcttatagttacaagtatttcatatacataattatggctacaatttatcaattgcgtctaaagtgtctcttttctgctaggcacttattatgtctaatttaatcttctctacagctttgtcacatagatatcattgcttccatttttagaaggagaaaaaccaaggcttaaatggaaaataacacactcaggatcattgcgaggagccagaatttgcacgcatgtktataagcctttcctattctgtatgtgtttaaggagagagagagagatttgtttcatctgagacatttattatctactgaggagtcaacttttctaaatgaatctaagtttatatatttgatatttgggaaaaggactttttttccatgtaagaagtaaaccaagtttcatttcagccctaacagtgataaagagttagctgt

SEQ ID NO: 541972 - DNA, 624 bp, Homo sapiens
taaaaatatactgttacatatacaataaaaatatgtatttataagttatttcccattggattccacctaaaggaggtttcgaaacatggcagcctctttcttcattataaggtgattttgctgtaaaccaggacagtggcagatagacattcaaatacaagtgtagccttgaaggaataaacaacatggaaaatgggcttatagttacaagtatttcatatacataattatggctacaatttatcaattgcgtctaaagtgtctcttttctgctaggcacttattatgtctaatttaatcttctctacagctttgtcacatagatatcattgcttccatttttagaaggagaaaaaccaaggcttaaatggaaaataacacactcaggatcattgcgaggagccagaatttgcacgcatgtgtatragcctttcctattctgtatgtgtttaaggagagagagagagatttgtttcatctgagacatttattatctactgaggagtcaacttttctaaatgaatctaagtttatatatttgatatttgggaaaaggactttttttccatgtaagaagtaaaccaagtttcatttcagccctaacagtgataaagagttagctgt

SEQ ID NO: 541973 - DNA, 500 bp, Homo sapiens
cgacccacaccttagtggatgtggggaaatctcctcagtgaagagtggatttgtggagaccatgcatccacactggtggcacttgcttttcaataattttattgtcgtgggacatacatgagtaaaaatggaaattccaaataggatcaggcataggggcgtttccttaatttgacctaaaacatgcatgcctggagattctcattggtttrataagacaaagaaagaaagtcaaagaattattgggaatattcagctaagagtaacaggaattcttccttctatagacagccctgtgatttttgtggtgtttaaactttgtaaaatctggattttatcaggacaagtgaaaaattgcagaggactaattcctaaatattagtgagtgtttaaccctccgccaaaaaaaaaaaaaaaaaaaaaaaaagggaaatggtggatgtagtgtctgttcttatgtctgggaggctgtctaggcaaaactcttctttttggtgtta

SEQ ID NO: 541974 - DNA, 362 bp, Homo sapiens
aaaatggaaattccaaataggatcaggcataggggcgtttccttaatttgacctaaaacatgcatgcctggagattctcattggtttgataagacaaagaaagaaagtcaaagaattattgggaatattcagctaagagtaacaggaattcttccttctatagacagccctgtgatttttgtggtgtttaaactttgtaaaatctggattttatcaggacaagtgaaaaattgcagaggactaattcctaaatattagtgagtgtttaaccctccgccaaaaaaaaamaaaaaaaaaaaaaaagggaaatggtggatgtagtgtctgttcttatgtctgggaggctgtctaggcaaaactct

SEQ ID NO: 541975 - DNA, 357 bp, Homo sapiens
tatgtatgagtagtaatgcagctttaagagcctgcaaagttgtacaccaaaatattaacagcactttcccctggagagtggaattaggagggggttgggtggagaggggagtcactttcatttttaaagtgtatgcacgtttcaaaaataaaagagcaattcattttataatttaagaaaaacaaaagactgaaataaacccctcttaatgtcagatattaatttgttagcgatttgtgtgaatgcaacttaatagccactgacaatcatttgacgtaaaacaggctttgcatatgcgatagaagattatggttctttaggattttctarcaagcctttagctccttcaggttctcc

SEQ ID NO: 541976 - DNA, 470 bp, Homo sapiens
aagcagctgtctccttggtgagttaaaccacgtgtggcatcccagtaccctgctactgcatcaaattgagttactagttgtggagaggaagataaataccagygtgcaggtgggagtcaagtgctaatttactattttgagaaaaaccaatcacatttattttggctttctgctgtaacatttaagtctacttctgacctcaaaggaaataattacctattttataagtcattagttgtgctgagtagcatttaaaaaatagcagtgtctctcatactactttggtgttttctaaaataattgcacaaagtcactgtgcccacatgttttaaaaataagctatgcaaacacaattgttatctctagctgagttttaatgctgtaagtaaaaaataatacgtaccattcctctaaagaatccttagttgatcatgagctttgaattgaagaatatccctaaatatccaatt

SEQ ID NO: 541977 - DNA, 458 bp, Homo sapiens
ttatttattgaaacgaggtaaccagtgtatataatatatccataaacgtgctcttagttaccttacttagcagtgatgaattacccaaatccacctagcctttaataaatgggtagtgattaaaagaaaaaaaaaaggaaaacaaagagcatagtggtatctgttttattcttcagtagaaacagatgcaacaatggcacattaaaaaaaaagcaaaagtgaaatggatgtggtggctcatgcctgtaattccagcactttgggagaccgatgcaggaggatcctttgagcmcaggcatatgagaccagcctgggcaacatagtgagactcctgtctctaaaaaaaaaacaagaataaaaaaaattgccctgtgtagtggcacatgcctattgtcctgcttactcttgagggtgaggtgggaggattacttgagcctgggaggtcaaggctgcagtga

SEQ ID NO: 541978 - DNA, 550 bp, Homo sapiens
atctatttttgtgtaatagcagatccctgattcccatttatagagatatagtcaattttgattaaagaaagacctaagtgtaaaaaaaatagtaatcgccttttaatcagcatctgcaaatttaagtgaaaaagtaaacaatgattgatttcttctaagctggcatataaggcatcaagaattgttagaattttttgttgaaagtacttgttatgtataagcatttacaaagcttaaacgtcacctcatgatctcatctcaaaaaaaggtcagggcagtctttgattaaaataaaataaagactggtattttgatttcagtttaagctttatttttatctttaaaatgtgcttattaagtccccaaaaacaacaacaaaataacagcytcagagagtaagaatgtaatgcctaagtcaaggaaatgatagacagtgtcaggaactgtgaagtatctgagactttatccctcttgcaggctgctcacagtttcatggatgccaatcttgaactcgagatgcctttgtgagaaatcatatacagtcactcag

SEQ ID NO: 541979 - DNA, 586 bp, Homo sapiens
cataaatattttgaaatttaatttataaatttatttagcaaaatactacctttaagatgcatgtatttggattaatatatcaacattattctagaaagagaactctctttatattatattacattattatttatattattattctttctctctagaagagagagaatgatgagaaattgctcagtgtttacctttgtggagagggctcagagggaaggggaagaagcttttactctttattttgtatctttatgtatggtttcagcttcctagttaaatttgttttacttctgtattttttgtccttggctgtggacttatgagccatttttgttttctttcttataatacaatcatgtgccacataataatgttttggtcaatgacagactgcatatgtgacagtggtcctgtgagattataagactgtgtttttaatgtaccttctccatgtctagatatgtttaggtacacaaatacttaccrtgtgttacagttgcctacagtatgcagtagagtaacatgctgttcagcttgtagcccaggagcaggaggctctaccatacagcctaggtgtgtagtaggc

SEQ ID NO: 541980 - DNA, 432 bp, Homo sapiens
gaatttgtctcctttcattctggaaatgacaagaatggggtttggtgggagtcttttgagaagacacgtagagtacgtgaatagaagcaaggtggctatcaaacaatctcatcagttatatccgatttgttgattattacttttatgtgaatactttttccttgaaagcacaatttagttttcaaaagacaatttttgagtatttcaaaaagcactttttttttcttccttagcatttcatgtagtggcccatacagctaaacaactatgccagcaaaaaatttataggatcaragaaataattaaggaatccctgactttgttttttccatgctatgaaagagaaaactctatgaaagaagagctgcaattgacctcttttattgtagctcttagctgtcttctgtaagacaggtaaggtttgccatagct

SEQ ID NO: 541981 - DNA, 559 bp, Homo sapiens
aaactctaacccgaagaagagttgctaggagacttttgaccttgctggggtggcatgtgcattgcatcagagaccttctgtgctccttccagtcactctgcatctgtgagtgcctgccaagggtgtmcataggtctgtgtgcaggtctaaaaaaaaaatccatctcatggaaattgaggaagttaaatttgagatggtatcttgaactacatagcaggtatactgctgagtatatagctgaaattttgggtgaatgtgaaatgtaccagtataacatttataatattatgtggcaactgtaacttgtcagagaagcactagtgaacattatcaaaaaaaataagccaaaacatagaactgactcaccaaaaattgttaattgtatgcttaggttgcgtaattttctaagtcacatgttggtgggaaattttttttgatatgggctgacaaagcacaataaacttggagacaaaataaattgtactattgctacttaaggtatgtgctcatattttgcaataagcacatttttattgtttttaatcctctcattaagaca

SEQ ID NO: 541982 - DNA, 639 bp, Homo sapiens
ctgtcctgcctgtgagctctcactcctctcctcttctagagcacctctcataaagtctgtgacatgtaacatcagacattcacacctaatgaagcttccaggatattaaatgtgaatagagattaatttgttttagataaacatataaatggaatttctagaatattcttctaaatcccacaagccatacacacttcactttagaggccactgcactagggcatgttcctcaaaggctggttcttagactacttgcatcagaatcactgaagtgcttggttaagtggtctccaaccccactagacataacgagtcaacttaaagcacatataaattttaattctctgaacaccagttggttacagtgtgtgctccaaaatctctggggccagggcccagtaacctgcatgtttaacaagcaattttgctactttttgcaagtgttcaaccactgaggaaaaagattgtatgttatttgtcaacatagacctctttaaaaatcatccccagagtgagaagctgccagatttctagtatatttggaattctcatttcaagggaagtattttaattttataaggtgcaaggaccaagaagcagatgattcaaakttcagattattaaattattaaagaataa

SEQ ID NO: 541983 - DNA, 586 bp, Homo sapiens
tctttcctcccggtgcccacgatcgcaccgcccagaccaccctactctccctgccccggaagttacacactgccgacaccgggacgtaacttccgggaagggcttacttccaagacagacacggaagtgctgggagkcgccgggagcccgttcggttgcgggtgtctctggccctgcggtcagccctgggaacgtcccggagagctagattcctagaggcccgattccgctagcccggaacagacaaagccagcgctcccgcccgctccccgacttaggatccgatgccggcagcgtcctggggcccccgtagcggggctggaccatgagcctgctggacggcctcgcttcctcgccgcgggctccgctgcagtccagcaaggccaggatgaaaaagctcccgaagaagagccagaatgagaagtaccggctgaagtacctgcggctgcgcaaagcggccaaggccacggtgtttgtgagtctgacccacgttcagccggtcccctcctggagactccctcacaaaatctttccccaagctgttaccccttcccagtgtgacagtattaatacagtgttggctttt

SEQ ID NO: 541984 - DNA, 613 bp, Homo sapiens
aatgcaacagggaagagaattatgaccacagagagaatatcaatacgacaagcatgtttgagggctcccggctcagagtttattccactccatcaatcattttcttcttctttcttatttttattttttatttttttttgatacagaatctccctctgttgcccaggctggagtgcagtggygggaccttggctcactgcaacctctgcctcccaggttcaagtaattctcctgccttagcctccccagtagctgggattacaggcacccagctaatttttgtatttttagtagagatggggtttctctactggccatgttggccaggctggtctcaaactcctggcctcaagcagtccacccgccttgggcctcccaaagtgctgggattacaggtgtgagccgctgcacctagcctcatcaatcattttcaaactcttctgaggaacctgatggttcttcagcgatgcctcaggaatgattctttcaatcagggcgactccattttcatttgttgagacgtgggggcgtgggtggggtggatgggggcagtgacaaaagtatattttatcaataaaatttgactaaaaaaagtggtgttgcttgttttttg

SEQ ID NO: 541985 - DNA, 613 bp, Homo sapiens
aatgcaacagggaagagaattatgaccacagagagaatatcaatacgacaagcatgtttgagggctcccggctcagagtttattccactccatcaatcattttcttcttctttcttatttttattttttatttttttttgatacagaatctccctctgttgcccaggctggagtgcagtggtgggacctyggctcactgcaacctctgcctcccaggttcaagtaattctcctgccttagcctccccagtagctgggattacaggcacccagctaatttttgtatttttagtagagatggggtttctctactggccatgttggccaggctggtctcaaactcctggcctcaagcagtccacccgccttgggcctcccaaagtgctgggattacaggtgtgagccgctgcacctagcctcatcaatcattttcaaactcttctgaggaacctgatggttcttcagcgatgcctcaggaatgattctttcaatcagggcgactccattttcatttgttgagacgtgggggcgtgggtggggtggatgggggcagtgacaaaagtatattttatcaataaaatttgactaaaaaaagtggtgttgcttgttttttg

SEQ ID NO: 541986 - DNA, 613 bp, Homo sapiens
aatgcaacagggaagagaattatgaccacagagagaatatcaatacgacaagcatgtttgagggctcccggctcagagtttattccactccatcaatcattttcttcttctttcttatttttattttttatttttttttgatacagaatctccctctgttgcccaggctggagtgcagtggtgggaccttggctcactgcaacctctgcctcccaggttcaagtaattctcctgccttagcctccccagtagctgggattacaggcacccagctaatttttgtatttttagtagagatggggtttctctactggccatgttggccaggctggtctcaaactcctggcctcaagcagtccacccrccttgggcctcccaaagtgctgggattacaggtgtgagccgctgcacctagcctcatcaatcattttcaaactcttctgaggaacctgatggttcttcagcgatgcctcaggaatgattctttcaatcagggcgactccattttcatttgttgagacgtgggggcgtgggtggggtggatgggggcagtgacaaaagtatattttatcaataaaatttgactaaaaaaagtggtgttgcttgttttttg

SEQ ID NO: 541987 - DNA, 482 bp, Homo sapiens
gggatggaccaggatgacttaagggagatgaaaggagagaaggggagaaaaagagaggcaggagggcactacaatttttccaaktttgctattttgtcacaaaccaaattatctaaaagtgttgaacgtattcaatacttttttttttcccagtagaggaagcatatgaatgaaatagaatattatagatcatctaaagcagtcacaattctctgtgtgtaaatcaaaacgacgacaacaacaacaacaaaacttattcggagtgttggttacagtggtctcatttaggtaaagaacagggtaagcaccaagaagatcccacggctatacccaaggccactcagctaactgggccagacaggacctggatccctgttcctgtccttggctgggcagccttttctctccatcaccctgagtctttgccatttaaatggggttcctggagtgcatacactcaatgtctgtgagtcatgtgtgta

SEQ ID NO: 541988 - DNA, 482 bp, Homo sapiens
gggatggaccaggatgacttaagggagatgaaaggagagaaggggagaaaaagagaggcaggagggcactacaatttttccaattttgctattttgtcacaaaccaaattatctaaaagtgttgaacgtaktcaatacttttttttttcccagtagaggaagcatatgaatgaaatagaatattatagatcatctaaagcagtcacaattctctgtgtgtaaatcaaaacgacgacaacaacaacaacaaaacttattcggagtgttggttacagtggtctcatttaggtaaagaacagggtaagcaccaagaagatcccacggctatacccaaggccactcagctaactgggccagacaggacctggatccctgttcctgtccttggctgggcagccttttctctccatcaccctgagtctttgccatttaaatggggttcctggagtgcatacactcaatgtctgtgagtcatgtgtgta

SEQ ID NO: 541989 - DNA, 618 bp, Homo sapiens
ctatgtgctatggaaagtgtggcagtgagaagaacagccagaaggaccttaattccccccactcattagtagttgaaagcctggcccctggagttggaatgttggttcttccatttactcactgttaccttgggcaagttatttaattctctatgcctcagctttcttacctaaaaattcctcatgggatttttctgaggtttaaatacgttactttatgtgaagtgtttgaaacagtacagtaaacagtaatcataataaaaattattccatctaaataaaaataccyctccccctaaaaatagaagcaaaggaaaggaatagcttctactgggctctaaatatataatttgatttacttgattacatagtaaagtaaaattgggtgtcagttctgttttaccttcaggtttagtgggctagaaatatgccttctaccagaataacaaaatttaattttactataacaaaatacagctatgcatcgcttaatgacagggatatgttctgagaaatgcatcgttgggagatttcgtcattgtgtgaacatcaatatgcttacacaggcccagaggctagagcctacctgacacctaggctgtgtggtatggtctacag

SEQ ID NO: 541990 - DNA, 366 bp, Homo sapiens
ctattctatagtcttactcttaaatactagatatgcattctctttatggcctaacttttcatttactccttcagaaactagtatttaaactggtcttgccaaattcaaaacaggactatgcattgccaaacgtaatgaccgctaaaaatagttgatattattggccataaatctcaatgtagaattcctttcctttctggcctctatcactcccatttttgtttgtttcgttgatmtctggtggcttcctcttagccaccgttttggatttttcttctctttgcccgaaacacaatacgacttatccactttcttcagcttcagctcttttctctaaaaacattttattttgatgacatcatctaa

SEQ ID NO: 541991 - DNA, 614 bp, Homo sapiens
ctgagacttttaaataatactgcaataatactgcatgttacacttaaagttggtgaagatggtagatcaaattttgtgtgcttaccaaaatataaaaataaaattaatataaataaatagataaattctgtggggacatataccaatattaatataatccagatttctccagacctacatatcctgtgactacaaatggggtctggttgataatcagtaaacttagagataatttggtgcaattggttttccaattttcaaaactttaggcttgattctgagatcattgttccaataaaaaactattaaaacattataacattgaacgtcaatttaactgacttactcaagattgttactaatctactgtgtgtctaatttagtattgggttatgcttgaaggaaaataaactaagtagcttattgtgaaaagagaagctttttatatagattrggctattgaaaatgtacccacagtcttctggggaagacacataaaccagttatgtaaaaatgcaaaggtattataaaaaagataaggacaatatattcttcagagatttagaggaagaaagactaccagagacaggcatgaataggaaaggcttgttatt

SEQ ID NO: 541992 - DNA, 614 bp, Homo sapiens
ctgagacttttaaataatactgcaataatactgcatgttacacttaaagttggtgaagatggtagatcaaattttgtgtgcttaccaaaatataaaaataaaattaatataaataaatagataaattctgtggggacatataccaatattaatataatccagatttctccagacctacatatcctgtgactacaaatggggtctggttgataatcagtaaacttagagataatttggtgcaattggttttccaattttcaaaactttaggcttgattctgagatcattgttccaataaaaaactattaaaacattataacattgaacgtcaatttaactgacttactcaagattgttactaatctactgtgtgtctaatttagtattgggttatgcttgaaggaaaataaactaagtagcttattgtgaaaagagaagctttttatatagattaggctattgaaaatgtacccacagtcttctggggaagacacataaaccagttatgtaaaaatgcaaaggtattataaaaaagataaggacaayatattcttcagagatttagaggaagaaagactaccagagacaggcatgaataggaaaggcttgttatt

SEQ ID NO: 541993 - DNA, 571 bp, Homo sapiens
cagtcacctgcagctcattctagaacgacccccatggtccccgcttcccagtgggccctggggaatggtgtgggctcaggtggggcctgattcaagttggggaatcctaaagtggcatggcttcctggtgtgtttaaaatactcatttgctcctcactcagaagggcagttgctataaatggcctccagcagcctggagatggcactgatggtgtcatcagccagctcgggtctgagaggcgcctcctccctggagcccccgtggtggtgaaaggagcaggggccctgaggccgggcccccaaatctcyctggccattcatgtggcctctcaggggatgtggtggtgactcagactccgaggtcatggagaaggcccctctgataagctgagctacgaatgtgcctgactctccttcaggaggctaggacagaggacagaggacacccagggacaatggcagaccagggcaaagggcagagaggaggctgcggaggcagccaggcagccagactcccgcccatgctccttcaccgggcgacccagaccttgccagggactcaggtgtctca

SEQ ID NO: 541994 - DNA, 602 bp, Homo sapiens
tcccaggtcacggttgagggtgaggccccagggaggcctgggatcatgccagggcaggcagggtgactgtggcatgcagcagggctgtgaggacaagtctagggctaaggtcccatctcagtgtccccaggccttgctgtgtggccacaggcattttgctgcgcctctgcgtcctaggagtggggataagcagcacctcggggctggcatggggactgggtaggagcgcagagacacwgagcgccttgggaagtcctgggcctgcatgtcactcggggctggaagtggcttctccacacctggtcacttgctggctggccccccactgatgagacggggtccttgcagctccacttctccccatacatttctttcctgcctcgcagctctgggtgctggggcttgtctctgccaaaccttcccggagctgacagtagggaccagatctctccttgtctgcctggaccgtggtgtgtagtgacagttctgggatatatgcccctctctaggacagaggctgggtacggagctctgagcattttcctccaacctgggcttcttccctctggatcactgcacctgggcagagaggcccaaggaaa

SEQ ID NO: 541995 - DNA, 602 bp, Homo sapiens
tcccaggtcacggttgagggtgaggccccagggaggcctgggatcatgccagggcaggcagggtgactgtggcatgcagcagggctgtgaggacaagtctagggctaaggtcccatctcagtgtccccaggccttgctgtgtggccacaggcattttgctgcgcctctgcgtcctaggagtggggataagcagcacctcggggctggcatggggactgggtaggagcgcagagacactgagcgccttgggaagtcctgggcctgcatgtcactcggggctggaagtggcttctccacacctggtcacttgctggctggccccccactgatgagacggggtccttgcagctccacttctccccatacatttctttcctgcctcgcagctctgggtgctggggcttgtctctgccaaaccttcccggagctgacagtagggaccagatctctccttgtctgcctgraccgtggtgtgtagtgacagttctgggatatatgcccctctctaggacagaggctgggtacggagctctgagcattttcctccaacctgggcttcttccctctggatcactgcacctgggcagagaggcccaaggaaa

SEQ ID NO: 541996 - DNA, 510 bp, Homo sapiens
tgtgggccccacctggggatgtggtgtctctgctcgtccacctggtccctggcctggagtgatgtgaaactcccgcaggcctggactctgggttctgtagcaggcacagtcaggagtgctgggctaggaccctgccgtatggccttgaggctggagggctggggagcgagactctctatgcgccaagcctgtgctgccagcttcccagcccgaggcacgggggagcccgtgggggtgtgagcttcctccctcctggggtctgtacattttattggagagcatggatgaaacttaaatgcgatgagtaattccaggcagtacccaagaccacgtttaccagtgacaatgcctgaggtcagggtgattcccaggagggctgcatggaggaggaggctttgacctcggctttgaagaataatatgagtaggtgaggtgacagttggaaggggcaaccggcatttcccaggtacagccaggctgcstgcgaacaaacgcacacaggcgagcaga

SEQ ID NO: 541997 - DNA, 609 bp, Homo sapiens
  misc_feature (1)...(609): n = A,T,C or G
nnnnnnnnnnnnnnnnnnnnnnnnnnnnnnnnnnnnnnnnnnnnnnntggggctcacacgctgccggaatcatccatgtcccaccaggagtgcccttttagtcactagcaggcgtcccttccgcaggcttcccactcagkgccctgtcccctccctccccctgcccaggcccacccatgagggcctgcactgcagttcagggatatggcaagatcctcctgagcacctgtcctttcccatcataagcacacctgcacaatccctgaccaccgcagccaaacagcctgagacccacctgccagccacagggccactgctagccttattcccatatctggaaacatgggctggggtctcacacccatctctcctctgccctccagctcccccgcctccaaagcgggcaccgaccacagccctcaccctgcgctccaagtccatgacctcggagctggaggagctcggtaagtcgcacacccggcccagccctgtacagtcaccatgccggtccctgagctgccctttgcaaagcaccaggctgtgcatgaccccacgcttgctcgctacccccctcctgcccctgtacccagacgtgcatcaggaaatgcc

SEQ ID NO: 541998 - DNA, 502 bp, Homo sapiens
ggggttctggcccctgaccttcyttaccttgccccctccccagagacagcctgctaagtgcagggaggtccactctggggaactcggtcacaactgtgagcccctcttggctcatccctggaagcccacttaccctgctcagggccaccaaacaagggctgacacagggtcagaggtccaggaccctgggagcctgggggtgaggtcacatggttattgtgacctttagaaaatgatggggctctctaaacctcagtttccctgcacagcaagagtgggtaagaacaaacctacaggcctcttgggatcaccatggggtcagatgaggccatgccatgctggtgtggtgtaataggatgcctcaggccgctgtccctgtgacggctgccattaacctccagcaggcctggtaggtggccaggactctgcagccctaaggaggctgagcagggagagctggggctctactgccatggatttaggggtccatgaggcattgatg

SEQ ID NO: 541999 - DNA, 606 bp, Homo sapiens
gggtccacacgtgtctgctcatgaggctagacaagttcctctccrtaaccatccatccacacctcgatgtttctcagacctgctccatggaggccctgaggctggactcacatttccaccacctctgggccctcctggagcttgtcctgccctgagattcacccgctgactgcctgggagagccccgctggcccaggactgaagggaggtttgggcgctgagcctacagggtatacccccttcaccaccgggcacctccccagggttctccttcacgtgggaccttcgctaacaacatcgctcagttcttagcccaccaacccacgcgaatccgggaccaaatgcgagccgaccccttggatgtggtctttcctcctgaacggaggcctcgccagcagatccagcagatgagattttcactgagcagcagtagcagtgggctagactttagtcttgaatagaaagaccctggtatagtgagaagcagggtccagggtgtagaacgcagcatttgccaaaaaccgaagagcatcccctgccccagcccacctgggggtacgcatgcagcaggctccagcaggggaggggtggcgtctgctccaagac

SEQ ID NO: 542000 - DNA, 474 bp, Homo sapiens
gagggatgtctgtgaggggcctgcaacagcctttctgagcatgaggaggaggcagaatgggggaatgtcatgtgggcgctggggcagaggcaggtggccatcccgtctgtcaccactccgcattaccctgaaccctagatgcaggcccagtggacagacacggacatgaggtctggaggggcctgtgggggaccccaactcaaacttgggcttgcaaaagccaggaaagtggcccygaatcttgcacttaatatagaaaccacatcgtttccatcaatgaagagccagttccagcaccaagcatgtggtcccagtgacgcgcgtttgtaattagaccctaaataccatcaagacactaaaaatgccgacttccccaaagcagctggggctgggaggaacccgcaagagcggggcttgtgattttttggagtgtttagaggctctgcaaatgaactcagaccggtagtaactcct

SEQ ID NO: 542001 - DNA, 617 bp, Homo sapiens
tgtgccgtttttatcttgcatgccatattttctaagtcttctatgccatcatatgtttagatacgttaatacttatcattgtgttgcaattacctacagtattcagtacagtaacatgctgtacaggtttgtaacccaggagcaatagggtataccatacagccaacatgtcttataggctctactatctaggtttgtgtaagtacactttatcatctttgcacaaggatagaactgcctgaacaatgcatttctcagaatgtatccctgctattaaaagacacatgactatatgaccaactgtaacctttaaattggataactaagatttggattacttctttgaaaattcttattcaattatttgatttgtccattacatgatactccaacctgtcaaactgggtgccttaaattaataagacaacttgctttctgttattttgtattgcatgtgatggctacaaatamactttgaaacttatttactatattctctgatgcatctgaccttgccctcagccactccctttagagtagtaagagcttaccattgcccccagtatcatgcacaaggttccattgcattggaggaaaaacatgaatttataaacaaa

SEQ ID NO: 542002 - DNA, 473 bp, Homo sapiens
catggtcaacagccttcacattcatttcaagaagatccaaatgcatgcacctgaaatgaaagactagcctcttccccagatgcatgttctcacgtgaagagaatacataagggtactccaaagaacaaaagtgaaggctgtcgttstgccatggatgcctgggtaaagtattccttttctgaacttcagtttcctatgttgtaaaatgaggataatgccacccaatctaccaggcccatcacgagaaccaaatgatacagaacaaaaaagcaaatgttgttgactgcttagtgtcatttatatgtacaagattactttgttttctaaggcagactgatctgaaaatactgtgctgccacttgcctaagatttagactttttatcttactttttttagagaagaaagctatatggaaagctagatttgatgctttaatgtgctgggtctgatgaactatattttggattacctc

SEQ ID NO: 542003 - DNA, 561 bp, Homo sapiens
ctgggtacagttttctatgttgacctagttttttcatagatgaaattgtacctaagcaaaagtaaaatttgccttatgcttaaattgtttactgatagttgtattggaacaaatttgcattttcaaagtaaacgtaattgtactggaacaaatttacattttcaaagtaagcattgtaacagaacttactgtacttttttcccttgatgtctatggagataaaattcccaagtgtggaaaaataatttatcaaaattccaggcttttgaggtagttagaaataagcattcctccatgtctggagagctgacattcatagactcttagtacggagtcccaattagccaaatttttggagagttaacatgtttggcactatgtaggagttgctcttycataccggtatacaccatacccatcttgtgtttccaaacataagatctggtaattcaaaaggattatttagccacgggttcaactgacctgagttttaaaatcttatttggaacaatgcttgttctagccagctttttttccccttcataatgagggaagagagaa

SEQ ID NO: 542004 - DNA, 609 bp, Homo sapiens
aggattgtgtgtgagacactcattcctcctctttcccactgtggttaaagttatcaccaacttcttggctgtctaatggtctcctcaccttttagaataagctgctggagccatttcttccctccattacattctgctatctattaaccaatgaaaaagaagaagatacaagaagtttggtcctgcgcaaacaggcgatattgtgttagctttgtctgagatatactttcttctttaaggtttggctgaaaatagctgtagtatatcacccctcaagatgcctacctagtcccaacctccagatttgactcactcattaccagtatctcctgcagatccaggaggccaggtctccatgtttctaccttgggacgctcctctaccaactgctacaggttttgttatatcaggaagtccatttgamccaactgagttggtgtgatgctctcttctgggaaactcctacagtaagtttgaggcactggagctgacagaggtcacttagactcaaggctggaaagaccatttttgtcatatgtgttccatgtcagagaaagctagtttttagagagatagacaaatgagccaagaaaggcagaaaagaagggt

SEQ ID NO: 542005 - DNA, 508 bp, Homo sapiens
ctgagaggaaggaggggatgggaacmaacagagacaatgacagaaaacctggctttagaatggagcaagtgaccagagagcaaacatgtgccgcaggaggtttcagtgagtgtctggttcagtaacttcctcgttccaaaagaaggtgcttagctcagtgcccacttcaaggtaaaagttgttgaaatgcaaaagttggagaaagggattcctgtagagtggcattgctggcactcagaactaatgagaggcttcacaaagaacccgcagagagagcttctccttggggatgccttgtagcattgggctggtagacgctgcatgaagccacgtggccaacaggtaggtgggggctgaaatccagccagttcccttcaccaagccttgcacaccccagacatctttttctaatctgtacctgcgctggagtgcatacacatgcaattttggggattatcaggggccctgctgacactcacctgagattgcagagtcctggggaaagaga

SEQ ID NO: 542006 - DNA, 565 bp, Homo sapiens
acatttccaagcaaaagtccccaaagtattttttcccatacaggttacacgaatttatgcagaagaacaaagaaccaaaactagtcaggagcctattttacaaacaaggtgtagcaactttttaagaaagctcaaccagatatcaagacttgttaaaaagcaaaggctgtagtaattaagacagaatagtattgacacagggatagaaacactgaccaatgcaacagatgagagtataacagaacagaggaagaaatatgaaagaaatggcaatgggatcaataggaaaaggatgaactgttaaataaagtatcaagacaactagtcatctagacaaaaaaataaaataaaatkggatccatacttcataccatgcacaaaagttatttatagctggactaaagatttaaatgtaaaaataaccaaacttttagatgaaaatataggaaaatatcttcatgacataaagtgagagaataatttcttaaaacaagacacacacaagaaaaaatccccacaaattatgaggagaataatttataaattaagctacaagaaattgtaa

SEQ ID NO: 542007 - DNA, 585 bp, Homo sapiens
tgctgtagtttcctgctccatccatggggtcggaggtcttacctcctgacgttagagtcatttgcagcaggtgggagtgaaagtgggccgggtgccaggtcttctttacctgaacytctcctgtcttcctggcacattaggaatgtccaagcttatttctattggtgaatgctcccacatgggatggataatggcctgtggaacattctctgaatgctttgtgttcttggaaaaccaaggactgaagagcgttgggtttgtttaggttacctgttataaattcttggctcacatttcatgtgtggactttcttgggtttattccacatggggacagcccagcaagcctttgtgaacgccctttcctggcctgagccgagtcacctgtggaagtcagccgtgcaggagggtgtgcttgatagggggaagcaccctgggcaggaccccatgagtttccttcttaccaggaaagtgtcattcgtcccactttgtgatctgaactggtattatgaaacatgaagcttaaaggcaacaaagtatgttaacaacaacaacaaaaaatacttaacaaaaacaacactgaggc

SEQ ID NO: 542008 - DNA, 609 bp, Homo sapiens
gacattggtatcattgatgaccttgcggagcccatggatgtcactcttcacagactggtgcatggccagttctgtctcatacttgactctaaagtcatcaacagcaagacgggcattgtcaatctgcagcacgatgcaggcattgtccacrgtatttgcgaagatctgagccctcaggtcctcgatagtcttgaagtaacggctccagtctcttgacctggggtcccttctccaagtgctccccgattttgctctccagcctccggttcttggtctccaggctcctcactccatccaggtaggaggccagacagtcgttcaggctttgcaagttctccttctcgttctggatgcctcccattcctgccaggcccccggccattcccacagccaggcccccggaccccatgccgccccagaagctggaggagtgggacatagagatccgggaaccagagcccccggcacctgcatagacgctggtcgtgcctggacggagcccagagaccagtagttggtggagcgagtggtgaagctcatgctgttccgggaggagggcgagaggacaggactcgggctttgccgaggactccttcttagttttaatgc

SEQ ID NO: 542009 - DNA, 570 bp, Homo sapiens
gcagttttcatctatagaagcttgctttgagtctttttgatattttccttgtctctacttaccttttgaacatatgtaatacagtttagtgccttgtcttctaattctaacatctgtgtcagttaaggatcaaatttaatttgtttttctcattataggttgtattctcagggatctttgcttgactggtaatttttgattggatgccagactttatgaattttacttrgtagggtgatggacatttttatgtttatataaatatttgttctagaacacaattatgtcacttgtaaacaatttgatattttcaggtctttctttttgaattagttcggcaggactgattagcatttagtctaattattcccttgtactatgtaccatcccgttaaaaggaaaactttaggcaaattaaattgagcagagtttaattgagcaaagaatgattcatgaattgggcatcccccagaaccagcagcgcaactccagggccaccatgtggccggataacatttatggacagtaaaagggcagtgacttacagaaaatggaggtgaagcacagaaa

SEQ ID NO: 542010 - DNA, 549 bp, Homo sapiens
caagtgcatcatggaaggcagcggtgcaagcacagccctggttccaatgacttaacgccgcctgggccactgcaagaccggtgtggcagacagaccccctggcgaggagctaactgtggggtgggtggtgggatattgtgaaatgtgtatttggtcttcatccctgtttcctaaaacccttagaatctctggagcraagagtattttttgcctgctcatgatggactgatagctggcagcccccaggtagctttaggatggggctggtcacaggaaagaccaaggcaagatgggagggttgggacttttagccccaccaccaatctccagggaagggacctccagggaagggaaggggcggaaggttgagttgatcaccagtggccattggtttaatcaggcatgcctacgtcatgaagtttccataaaaacccaaaagggtgagtttggagagcttctggatagctgaacatgtggaggctcctggagggcggcgcaggggcacactggggagggcatggaagtcccacaccccttcccacatgcctt

SEQ ID NO: 542011 - DNA, 666 bp, Homo sapiens
tagccatgtgggcccgtatgccctggtgctatgtagataatagcactttctctgtttgctgggatgtgaataaggttggaaagcagtgtcttcagaggccttgtaaaattgattaaaatgagaagcatattacttttattttgcttygttttgtttagagacagggtctctctctgtcgtctaggctagagtgcagtggtgtgatcatagcttactgcagcctcaaactcgcaggctcacacaatcctcccacctcagtgtcctgagtagctgggaccacaggtcctccagcacacttggctaatttttaaattttttgtagagacagtgttctcgttatgttgtcgaggctggtctcgaactcctggcctcaagggatccttttgccttggcctcccaaagtgctgggattataggcatgaaccactgtgtccggcctgagaagcatgttaattgtgtataattaagccattttaaagtgctcaagggtgtttgaaaacagttctctcaaatattaaaaatgtcttgtttccatttttaatgaacaaaacctttctatgaagaaaatctttgctaagatcagtctttcctcttaccccagctttactgaggtatagttgacaagtaaaaattgaatgtccacttttaaggtatgcaatatgatgt

SEQ ID NO: 542012 - DNA, 666 bp, Homo sapiens
tagccatgtgggcccgtatgccctggtgctatgtagataatagcactttctctgtttgctgggatgtgaataaggttggaaagcagtgtcttcagaggccttgtaaaattgattaaaatgagaagcatattacttttattttgctttgttttgtttagagacagggtctctctctgtcgtctaggctagagtgcagtggtgtgatcatagcttactgcagcctcaaactcgcaggctcacacaatcctcccacctcagtgtcctgagtagctgggaccacaggtcctccagcacacttggctaatttttaaattttttgtagagacagtgttctcgttatgttgtcgaggctggtctcgaactcctggcctcaagggatccttttgccttggcctcccaaagtgctgggattataggcatgaaccactgtgtccggcctgagaagcatgttaattgtgtataattaagccattttaaagtgctcaagggtgtttgaaaacagttctctcaaatattaaaaatgtcttgtttccatttttaatgaacaaaacctttctrtgaagaaaatctttgctaagatcagtctttcctcttaccccagctttactgaggtatagttgacaagtaaaaattgaatgtccacttttaaggtatgcaatatgatgt

SEQ ID NO: 542013 - DNA, 600 bp, Homo sapiens
gggtgtcgtttatattaatttgcctttgggacttttagattttgtcttttaagtggatgtctcttatccttagggttagagtgacagctatgattttagatgaacatttttgggtctggccacaattaacaattaaattgatttactgacaagcacccttcagtttcctggtgagtttgcttggcagaatcccagcaaagggggtgggaggctgggtaaatattgggtaaattggatcaattgtccacagcctacctgggttgagccaactggaagatcctttttttctcaaaaaaatatgtatttcctgcataacctagatatcttgtaacagaaattctcagactttcggggtttatagatcagtaaaatttaaaagaaaagaaagggcagaagttaggtgccaatttttttttattttgccaagtaamagtgtctacttcttctcatcattaattcttaaaaactaagggtgcattttaattccatagagagagaggatataatttcagaaaggacagttgttgacatgatggctccctctggctttgttctcccaattgttttcattcctcacaggcgtgggacttcatcatgggc

SEQ ID NO: 542014 - DNA, 326 bp, Homo sapiens
cactcaagaaggcctctgagcattacaaaatagtttggggatctaaaaacggaaagcgggttcaggccatgaagatggttgcagaattattttagattttcatttccgacaaaaaatggaagggccatacagccgtgagattagttccgtccaatttcgagtcagtgacgcaccactgaggcctggggatcttccatggctaagcagagaaacctgaaggaaacagttctccaaacggactcgaacgaagccgggggctatagatcggggggctgttaagcatttagaggctccygaagctcctttggagtccagagcttgaaaat

SEQ ID NO: 542015 - DNA, 629 bp, Homo sapiens
ttgggggacaaaaaaggagaccaccttgccttgaatatagagttcacacaagagcagcaggggagaagcatgaacgtcagtttggcatcagggggctggtttttcctcattccaagctcttctcatttttctactttatttacttgaaaactctctttctccttaatctttcagtcagttaatctttacacctccatgatccttcatttcttttcccctttgatgatttctgatgctctgcttctgaactcttcctaagttctgccatagtgattcccctctgtctgtactgctgttcctactgctttgctttgcagctcttctgcatttgactgtgagctcactgaaagaaaggaccgtggcatgtgcatctttgtgtctccagaatttaattagcacagggagtaatttataaggggtgaatgaatcrgtatggagatttataccaaggaccctcaacttcactgaaggtctttaatgatggtgctgatgttagtggtggtcgtggcggtatttaattattttttctaggtagggatcccttctttcctcctcttcccgttcacctgctcttcatcacagacaagtatggagctcctcaggcaccatccaaattagggtcatcctaa

SEQ ID NO: 542016 - DNA, 383 bp, Homo sapiens
cagtaggtctgagcacactactttyccccctgtgagcctgcctcattgggcaaatttaatatggtcttgtttcccagtattttttcctttcattatatgggagggttttttttttaactttgctccttcttaattaaaaaaaaaagattatatggaaggttttcctttgaagaacttattaagcaactactatttcttcaaggacattttgtcctttgttatgagattcttttaaagtatatggagtttcaaagttctatagactttatggtgaagaactagatttattttattaagtcttgggtaaatatgagttctgggagaaggtgccaaacaggtgctaaaacaggccctgggactgaaaaaaatattttgtttttcat

SEQ ID NO: 542017 - DNA, 383 bp, Homo sapiens
cagtaggtctgagcacactacttttccccctrtgagcctgcctcattgggcaaatttaatatggtcttgtttcccagtattttttcctttcattatatgggagggttttttttttaactttgctccttcttaattaaaaaaaaaagattatatggaaggttttcctttgaagaacttattaagcaactactatttcttcaaggacattttgtcctttgttatgagattcttttaaagtatatggagtttcaaagttctatagactttatggtgaagaactagatttattttattaagtcttgggtaaatatgagttctgggagaaggtgccaaacaggtgctaaaacaggccctgggactgaaaaaaatattttgtttttcat

SEQ ID NO: 542018 - DNA, 383 bp, Homo sapiens
cagtaggtctgagcacactacttttccccctgtgagcctgcctcattgggcaaatttaatatggtcttgtttcccagtattttttcctttcattatatgggagggttttttttttaactttgctycttcttaattaaaaaaaaaagattatatggaaggttttcctttgaagaacttattaagcaactactatttcttcaaggacattttgtcctttgttatgagattcttttaaagtatatggagtttcaaagttctatagactttatggtgaagaactagatttattttattaagtcttgggtaaatatgagttctgggagaaggtgccaaacaggtgctaaaacaggccctgggactgaaaaaaatattttgtttttcat

SEQ ID NO: 542019 - DNA, 383 bp, Homo sapiens
cagtaggtctgagcacactacttttccccctgtgagcctgcctcattgggcaaatttaatatggtcttgtttcccagtattttttcctttcattatatgggagggttttttttttaactttgctccttcttaattaaaaaaaaaagattatatggaaggttttcctttgaagaacttattaagcaactactatttcttcaaggacattttgtcctttgttatgagattcttttaaagtayatggagtttcaaagttctatagactttatggtgaagaactagatttattttattaagtcttgggtaaatatgagttctgggagaaggtgccaaacaggtgctaaaacaggccctgggactgaaaaaaatattttgtttttcat

SEQ ID NO: 542020 - DNA, 613 bp, Homo sapiens
ctggttttgctttctgctatgacaggacagcactgagttcaatacaaagtctcacaatcactgcagtctccttctctccagtgtacaaatttctccatgctttgcagctactacagggggaattgggaaggtatagtgtcaacaattgaggactgtctttcccacagtcttcagtgcctctttcagcgatatgaagtttaaatcagatactgtgagtattcacctgattctggttcttatggaggtatttgtgtgtgtgtgtgtgtgcatgtgcacacgtgcttgttgaatttggtgtccctgtgaaggagacagtcagtggaaacttctgttcttccatcttgatccacccctcaataattcatttyttaaaggagaccatcttaacccataaatcctacaatttttatatatctacggaattactatcttttattttcagaataaatatagatttaaaaaagggctccccctagtccctcttccagaagtcaaatttgtcacatgcttccaagtccacctctcatgccacatcttttctgaaagtatccccagtcctcagcagaataatacatttgattcctttagaacaccaataaaatttggtttttat

SEQ ID NO: 542021 - DNA, 559 bp, Homo sapiens
gcactgggaaaagtcaatggctcggttttgagagagtctgagctatttgtagaacaccagagtatagatgttccacagccagttggcaaaacacaggtctagagcccaagagctgggggcggggtgggagatccatgtttgagagtatctagataagtttgccagtgagataagtgccatctaccaagcacttactacatgccaggtattgtgctaagcactttgctacatcccttatacatatatttttcccttcacattgaccctgcgaggaaatatttttcccattttacagatgtggaaaccaaggttcagaggaatatgcccacagttgcagggctgctcagtgacagaacaagggtttgaattcagtgatgacgctaaatcctgggctctacagcatcccaaaaggtaaggtgagctctaagagttatttggcagatgaggaaatgggaggkatcatgatgcatcaaagtttcagagaagaggaaaagagctgcgtcctctgatcaggagtgtggggaagtgcggaggtgggaagagggaagctgaaggagtt

SEQ ID NO: 542022 - DNA, 559 bp, Homo sapiens
gcactgggaaaagtcaatggctcggttttgagagagtctgagctatttgtagaacaccagagtatagatgttccacagccagttggcaaaacacaggtctagagcccaagagctgggggcggggtgggagatccatgtttgagagtatctagataagtttgccagtgagataagtgccatctaccaagcacttactacatgccaggtattgtgctaagcactttgctacatcccttatacatatatttttcccttcacattgaccctgcgaggaaatatttttcccattttacagatgtggaaaccaaggttcagaggaatatgcccacagttgcagggctgctcagtgacagaacaagggtttgaattcagtgatgacgctaaatcctgggctctacagcatcccaaaaggtaaggtgagctctaagagttatttggcagatgaggaaatgggaggtatcrtgatgcatcaaagtttcagagaagaggaaaagagctgcgtcctctgatcaggagtgtggggaagtgcggaggtgggaagagggaagctgaaggagtt

SEQ ID NO: 542023 - DNA, 539 bp, Homo sapiens
tgagagagtctgagctatttgtagaacaccagagtatagatgttccacagccagttggcaaaacacaggtctagagcccaagagctgggggcggggtgggagatccatgtttgagagtatctagataagtttgccagtgagataagtgccatctaccaagcacttactacatgccaggtattgtgctaagcactttgctacatcccttatacatatatttttcccttcacattgaccctgcgaggaaatatttttcccattttacagatgtggaaaccaaggttcagaggaatatgcccacagttgcagggctgctcagtgacagaacaagggtttgaattcagtgatgacgctaaatcctgggctctacagcatcccaaaaggtaaggtgagctctaagagttatttggcagatgaggaaatgggaggtatcatgatgcatcaaagtttcagagaagaggaaaagagctgygtcctctgatcaggagtgtggggaagtgcggaggtgggaagagggaagctgaaggagttcaaatgca

SEQ ID NO: 542024 - DNA, 539 bp, Homo sapiens
tgagagagtctgagctatttgtagaacaccagagtatagatgttccacagccagttggcaaaacacaggtctagagcccaagagctgggggcggggtgggagatccatgtttgagagtatctagataagtttgccagtgagataagtgccatctaccaagcacttactacatgccaggtattgtgctaagcactttgctacatcccttatacatatatttttcccttcacattgaccctgcgaggaaatatttttcccattttacagatgtggaaaccaaggttcagaggaatatgcccacagttgcagggctgctcagtgacagaacaagggtttgaattcagtgatgacgctaaatcctgggctctacagcatcccaaaaggtaaggtgagctctaagagttatttggcagatgaggaaatgggaggtatcatgatgcatcaaagtttcagagaagaggaaaagagctgcgtcctctgatcagragtgtggggaagtgcggaggtgggaagagggaagctgaaggagttcaaatgca

SEQ ID NO: 542025 - DNA, 650 bp, Homo sapiens
ggggagacgcagccttcttgggggacatgcaaatctaaaacactgtacgcctcgtgtttgagtgacatatatagttcatccagcccttttatatgctttatcttatttgtataaaaactcaatattgttcttctccaaataatgactaaaatattattatttgttcaaatgtatcaaggatgcaaggatttgtgctttgacaagctctatccatgcaaaacaggcgatccagatcataagacatgktaaattatacttgatgagccagtccttggagaaagttctgagattgcatctccatgaagcacagagagcaaggatttctgtgaatatttccaatgagcttacatcattctggggaagctactacaaaaaaaaaaaactgtacaattcaaatctgggacactgtcgtggaaatccgtccctgcataacaaagtgggcaatcacagagaacaatgaaacccaatgcattattcatcattataattctggatcatatgcaaccatcatcaatgctgaggatgctcttagtttatattacaagtaatttagacatcatatgcctatttataaaatgccaaatcagctctcagatgcagtatgaggagttcacagtttcattttctgtaaagatgttttaaaatattga

SEQ ID NO: 542026 - DNA, 545 bp, Homo sapiens
aactaaataggccaaaatagattaagcaagaaaaattattttgttggttagagaagaaagatgagataaggcaactagacctttctggaaaccctagagcaaagactgacctcttccaattctggtgaggtattaagaaaaataaatctatatgatagttagatggagtatacagttagtaagttgacaatatccagacaaygaggtcctgttgttacagcataacacccaaaaagattgtaaaggtgacttgtacaagaaaataactgtttgataggagaatgataagtcaggaaatgccttccactagagctttcctgctctctgctttgtgtgttgttagtccaactggcttccagaggaaaaagttaagcctgaatggtgtcacagatttaagtgctttaatgaatgacaaaaagaataaaaagtgatgtcattgagaagttaccagcctctaaatcaattgaggaggctgaagttagaccagaactaaatatattcaggtaggtgtgctacagtggaaactgggaaactgttctccatat

SEQ ID NO: 542027 - DNA, 628 bp, Homo sapiens
ctgcagctaaggccctcctctccgtcccattactctgactccctagagataaacatgtcctggagatgcttgtgccatttttgagacgtttttgctgcttcattcatatgtaacatcataacatagtatcatcataaaaatagtattgttaaaagtgttttcaaattttgcacattatattatgtaaatccttttacaacttgctttattaatttaatattttaaaaatatttatctgtattgatagttgcagatctagttcattcatactaacatgtgattctaccatggcttatttatctatttcattactgatagacgtatgaagttygttttcaaattttcccatctatgaacaatcaagcagtaaacattctggtatatatcttgttgagtaaatatgtaagtttttctaagatatatgagtccagaaaaagacatttctggactttaggttaatcatatctttagctttccaatgtgctatgccaatttataccaccaccatcagtatataaccattcctattccctcatctcactaatatttggtgttaacagactaaatttttgtcagcatgacaggtgtaaaaatatcgcatcattgttttagtttgcatttcactgaa

SEQ ID NO: 542028 - DNA, 628 bp, Homo sapiens
ctgcagctaaggccctcctctccgtcccattactctgactccctagagataaacatgtcctggagatgcttgtgccatttttgagacgtttttgctgcttcattcatatgtaacatcataacatagtatcatcataaaaatagtattgttaaaagtgttttcaaattttgcacattatattatgtaaatccttttacaacttgctttattaatttaatattttaaaaatatttatctgtattgatagttgcagatctagttcattcatactaacatgtgattctaccatggcttatttatctatttcattactgatagacgtatgaagtttgttttcaaattttcccatctatgaacaatcaagcagtaaacattctggtatatatcttgttgagtaaatatgtaagtttttctaagatatatgagtccagaaaaagacatttctggactttaggttaatcatatctttagctttccaatgtgctatgccaatttataccaccaccatcagtatataaccattcctattccctcatctcactaatayttggtgttaacagactaaatttttgtcagcatgacaggtgtaaaaatatcgcatcattgttttagtttgcatttcactgaa

SEQ ID NO: 542029 - DNA, 595 bp, Homo sapiens
aaaagacattttccgagagctggaaggagaaccaaaagagtgtggtgttatggaagccgagagagttttaaaaaagaaagtccttgtgttttcatcagtaactttgttgtgtatcagtgttttcccttyatgtaacttaaatgtccactaatgcaagtgaaggcaatctatgcctaatttcttcactaaatattctactaataaatgatttactgacaaaatgaaattatataactgaaaaggtttaaaaatgataagaaatatcccaatggaagctgttttttaaataatgttattactgtcagtaacaaaattatgatgacacaggtccaacaccttttaaaagagaggaggtaaaaaggagagttggatatgaagaatctcagactgcagtgcagctctgagaaagtctcagccaggtacatgggtgcccgggagcagagattgcctgtcagaagggccccatgagggcagaagtgacctggctctcgtgtccctgccatgatcagtcattggctgtaagcagactccgcccggactgtgtggcctcggcaggaatcacggtggcagattgagaggggcagtgctggaggct

SEQ ID NO: 542030 - DNA, 544 bp, Homo sapiens
agctgtcaaggtgaaaataaaatgaaataatgaaataaaatagaagctacccttagtgcctgaaagcaaaaaaaaaaaaaaaaacaaaaagaacagagtgtttatgagcttgtgcagcaacaacttgaattcagagttgagaaaacagcaacgccgcatgtggaaacacatgtgatgtcctacgtggaaggacatttgaggtttgctttcaaactgactgaaattttaactcaatgtcaaggccaagtacgggtggctcactggctcgggtttctgaaatgccaggatacccacgcggctggtaaagctgtcacaagctccagagatgcctgaatatgaacaataccagagctccaagcagcccggggtttgtgctgtcagtgacacctctaccccacggtccccaggcccacggttctgggagccttgaaaacctgaattttctaaataagcagttcaaagaggatggaagactttaaatcactgtgctgtttgtgctytggcaaaccaaactgtaggcctgagaagtgcccagcccagtttc

SEQ ID NO: 542031 - DNA, 622 bp, Homo sapiens
ttggttaccttccctaatgcgggtgggtttcattctgtcaactgatgacctgaataaaacaaaaaggctgattcttctctgaataaaagggaactcttcctgcctgactgccttcaaagctgggacattatttttctttcttttttattttctcctgccttcagactcaaatggaaacattggctcttcttgggttttgagccttggctttcagactgaaactagcgccatcaactctcctgggcctccagcttgccgactgcagatcttggtacttaccaggcttcgtaactgcatgagccaatcccttataataaatccctttctgtatatacactacctattggttctgttcctctggagatcactgactaatacacttcctttttaactaagacctctaggcacttttgctatctctgaggtttttcatattttatatccctagagacaaaatcaaagaaaatttctttaaaatggggtttagatggacatctctctgaggttccacctcaacastgacacagggcagatgtggctcagcctcaggaagctgaaattctcacccctgtgtttccctcagccagcggaggcctttcgactgtgcccatctagcagaagc

SEQ ID NO: 542032 - DNA, 586 bp, Homo sapiens
ctgagcgacctcggggaaggtacataagcttgagtctatcctcagaaatagcggggaactgagtgaaatgatcctcaagacttactgtgtgagtattcaaagctcttaagaatgtttgtaaattaaagaacccttaaaatggggatgatgaacctgtttgaggaaaaattatatttcttccatgtaaccagtggagtccaaatcacttatgggagaaacagtgtttctttcctgagcattgcccttttctcaggagaatgcatttttgttcaagattttctttagagcaactttgacgtccttattcctcaggctataaattaatgggttgagcatgggcaccacagtggtatagaatagggaagacaccttgccctggttcatagctaaaagagaaaagggtttgaggtacatgaatgctcctgacccaaagaacagagaaactgcaattatgtgggagctgcaggtgctgaaggctttggacctgccctccgtggaatcaatgtggaagatgctggagaraatgagagcataggaaatgaagatggtgactgtgggcacaccaatatcaatgcccacaacaaca

SEQ ID NO: 542033 - DNA, 263 bp, Homo sapiens
tggtttgtaaatgatacatttctgctgtggaagtgtgaggggagaaagggcactacgcatctaagctaagagttaacgctgagtctgccacggacatcctctcatytgcctcttgagcacagggaaaccacgtccttttccttccaaagatccactggaagttctccttgtactctcgctcttcctacttggagggtcacttacctatattctcccacatggttagaaatgtgagagacaacagtttactcctcctgatactc

SEQ ID NO: 542034 - DNA, 607 bp, Homo sapiens
ttggctctactttcaaaatacatcctgaatccgaggatttcccgccacctttactgttatcatcctattcttgcccactattatctcttgactggattcttgaaatagttttctatgttgctactctgccctcactccctacatgcctgttccgtgcagtaaactaagtgctcctcctaaatcacaagttagagcatgacattcctctrcccaaaaagaccctatatattttgttgtttgttacttttccgacctcttcccttcctattatcacctttgtttgctctgctctagtccactggcccccttggtctttctaggacgtgccacatacatgtcacaggaccttagcctttgttgttcctccagcatgggtagccacaaggataacactcccccttcaccattcaggtgcccacatgacacctttatagatgaattcttatctttccacgccttgctgttctccaaaggactcatcatctgtctgtctgtctctctctctctctgtgtatatacgtgtgcgtgtgtgtgtgtgtgtgtgtacgatataccatttctttctttgttctttctctttgtttttttccttttttttttttttttt

SEQ ID NO: 542035 - DNA, 539 bp, Homo sapiens
tgaactgtgtgtgtgcaagcgtgtatgtgtgtgtgtgagaatgggaaatgcataacagtgacttccgagctcttggaaatgcctggcttgtatggcagagtcacagacctttgaaagtttaatatgttgggaagtgaacaattctttctattcaatcactggatggattcagaatttatgatgtcagaaacttctgccaaagttatactcacaccagatcacctaatctttaagtaatctagataaccattgtcaaggaaattatattttaagtgtacttcagatggttttaggttratagtttagtgccccaatgcacaatgccaagttcgaacacctgaaaacccagggctctgctctgtgtccaataagcgcctgatgaatctgttaaataaaattaattccacctctaccgaggatttacagagagaaacacaacccattaagaatcactgaccaagtgctcagaatcgttcttgaaatacaccctgactttcttacaagactgttcttttaagactgaaggccagttattcttc

SEQ ID NO: 542036 - DNA, 622 bp, Homo sapiens
ggtataaccattacacaaaggttaacttaagtaatagtttaatatctttcattattaattataaacagaatgttgaactgattacagttcttaatgattttacttmttgcatttctctctatttgccagtcaggttaaatgttccctgtaacagcatctgtcacctcatgtacagaggtcaaaactgggcatattttagccttgatgggaacagacaagaattaaattatcagaaagtttcatgacaaggttttattttcattttgggaaatgaagggagaagcattaaagagaaatgtgggaacaggaaccatttagttttacagagctatgatagtttgaaacaagtttggccatgtgaatgttgtcggggctgaggaagggagttggggcccccttttgagggtgctgcttaccgttttaggatctccttaagccacacatgttattttgaaatttaacgataaaattgaacactagtttttcttgctctgtaccaggttctatttctgaagaaaattaatgttctggtacattattgagcacaggaaaattaaactattgtttccagccattttccttaaaggctgtgctctgtagcataattatattgggcattttc

SEQ ID NO: 542037 - DNA, 481 bp, Homo sapiens
aagaaaaacctacacaaatatcttcttcctgaatgaatcttccctaaaacaaacaaaagtcaaccagcctatggtctgttggttagcatttcagtcaaatatggggacaagtcctggtatcaacaacagaatttagattacaaaagtttttacagctttgtcaaaacaaacaaaatgtggcattaattaatttcctttaaaaaaaaaaatatggccaggtgcggtggctctacacctgtaatcccagaactttgggaggccgaggccgaagccggtggatcacttgaggtcaggagttcgagaccagcctagccaacaaggtgaaaccccgtctctactaaaaatacaaaaaattaggggggcatggttgcaygtgcctgtaatcccaggcacttgggaggctgaggcaggagaatcgcttgaacctgggaggcggaggttgcagtgagccaagatcacaccgctgtactccagcctggac

SEQ ID NO: 542038 - DNA, 584 bp, Homo sapiens
ggcagatatccagcaaatggctgtatgaatgctaccatgttgagtttgcctggatacttggtcctgattacatactcagcatactcagtgcgttagagtgcctggtgagccctgttttgtagatgtgatccaggtgtagtcttcgtgcattgggaaaacacaccttagttacatcactgtgcctttaggtgtcccaaaaagtgaggctgctggcctggcctagaggagatggacacaactctgaaaggatctaaataaaaatctcagttgggcatggtggctcacacctgtaatcctgcactttgggaggcccaggcaggtagatcacttgaggccaggaagtgaggcaggaaaggaacaggaactactacaccacccttcttcagctctgttcactgtcaagaaaacaagagggtttgggagtcattccacctacctgtggtcctgaggcacagcttgagatgtgctacattctgggatcatttggaggctttcaaaagtacttgcastagaatctgcagatggggtggcctgatcatgaggattccccaagcacctcagtgactgcaacgtgcaccgggggt

SEQ ID NO: 542039 - DNA, 613 bp, Homo sapiens
ctagagatcctggtgtgtgtgggaggtgcagggcacagtgtgattgggagtaggccaggaagctgctgatgccactatgcatgtgctcagaggggctgtctagtcccaggccaccttctaagagtcactctaatgagaccgattctccaataggctacactggacacacagaacacagcagaggaaaaacacacacatttggcagataacagcagagaacaccaagggctgtacgctctgtacctctcagtaatgggtcgttggtatctgatttaaaaggaattgcctatgtgatatggatggatcttaactcatgagggctctgtgagctcatcccagactagaggtttgagctctcatcaggtaagtctcctctctgartccacagcaagcctcagggtggaaggaatgagggacaaggtgatggttctctctaggtgtcagcccctggaggggtctgtgagacccaaaaaaggaagtgacccagggcatggagagaacagatgccatccggtaacattcaccatggggaaactcatcctggcctggcccttagccagcacctacaagaggcagcactgccatggggggcccaggcaggatgccactggct

SEQ ID NO: 542040 - DNA, 473 bp, Homo sapiens
agcccctagctctgtgggggaaaccttcctgagtcctgactgtcctcggccccggggctgcccacctgccaccatatgctgcctgccagactccagcccccagcagatggccgagcagccacctctggcaccagtccctggagcttgtcattgccctctcctggttccaccaacttcaaaatgggaaggcttgtgcagtctgggtctgagtcccctgcccggcagccagcttcctgggggctggaatgtgtgcttggccatcttyctgacaggccgctagtattttagtggggcagagtggtgagagaagctccagatttgtaagtggaagagctgaatatgaacactcactgtctacataatgctttttaggttcagcctcgacatctgtaaaatgagactgaagccagccctacactgtcatttgcaagaattggaaaaatagacatgcatcattctgagcgtgactgagt

SEQ ID NO: 542041 - DNA, 588 bp, Homo sapiens
ttctgacctacagaactgtgagctgataagtgggtgctgtttccagccactatgtctgtggtcatctgttatggcagaaatagaaaatccagtacagaaagggaagtcggatcataaacagttaggaaggctgactctggcatcagatgacctaggttcctattttgcctggagctgaggcacatttggaaaagttacttctctaagcttccgttgctttatttgcaaaatggggataacagtactcaccaaaaagagctgctgcgaagatgaaatgaaaggtgtgtgtacagtgcctggtttacaggagccctcctgagaggtagctcttaggattttccaccagggggcagggctgggaaaggggctggaggggtgggggtgaggggcaggagtgcttcaaacgccttgaggataaggaaggagaatcagcaagtcccgagttcctacggtgtgtcagcatcgtgctcccactcccgggagagaggcattatcttcagtttacaaaaggggaaaacaggtgagagtttaaaaacctcgcccggaatcgcacggctagtgstgcaggctccccggattccgcagcag

SEQ ID NO: 542042 - DNA, 553 bp, Homo sapiens
tggactccttggagctgagccccttggagagggagatttgcaccaccggytgcaggggccaggagctggggtgcgtctctacccagcgcactcttgactgcttgggtgttctggaagacatcggtatccttcagacaagtgggaaaccccaaggcttgtgcagtggcagaagaaagttatttactaggagttatttactacgttgttaccatgtccgaggttctgtttacagcattttatatgcagtccctcatgtaattttcccaacaatcctatgaggtcaagactatgattatacctttattccacttgaggcagctaaggtaaggaaggtgtccagagacattacctggaaaatggcagggctggcatgcaaaccccgggcagtccgctttgaaagcccatgagtttaaaatccctcgtcgacatcctaggagggaccatcctctgagcagattccccagggccatcgcacacttccctgaaacccacggatgactggcgcatgctcttgggatgcgtcttatactttgggagaaaccactcattgctc

SEQ ID NO: 542043 - DNA, 553 bp, Homo sapiens
tggactccttggagctgagccccttggagagggagatttgcaccaccggctgcaggggccaggagctggggtgcgtctctacccagcgcactctygactgcttgggtgttctggaagacatcggtatccttcagacaagtgggaaaccccaaggcttgtgcagtggcagaagaaagttatttactaggagttatttactacgttgttaccatgtccgaggttctgtttacagcattttatatgcagtccctcatgtaattttcccaacaatcctatgaggtcaagactatgattatacctttattccacttgaggcagctaaggtaaggaaggtgtccagagacattacctggaaaatggcagggctggcatgcaaaccccgggcagtccgctttgaaagcccatgagtttaaaatccctcgtcgacatcctaggagggaccatcctctgagcagattccccagggccatcgcacacttccctgaaacccacggatgactggcgcatgctcttgggatgcgtcttatactttgggagaaaccactcattgctc

SEQ ID NO: 542044 - DNA, 522 bp, Homo sapiens
gattgggggccctagtggggctggggtcaatggggatggtaccatggaggggcatgagctgggacatttagaacagaaagagaaacatgccsagtgaggaggcaagatgtgagcagcagggctagcgggtatccctgggacctcagacagaaaggaagctgcaagggagcttgtacccagtgatcacaggctcatttatgggatagacccaggcaacctgaagaaaggcagaatcagagcaatagccagaggtgactgtcgtcagaaacatacccctgctcctgggagccactgcagagcgggataactggggctcgccttcctggtgcaagcccaggagtgagggccttgtgataagatttccaaaaacaccagccccgtgccctgcctgtcggtaagcggccaccggaacccctcccagaaagatagatgcaggctccgtgtctgtagaagtttgtgtccatttcccgctgaaatggactcctgcctctccacacccctaaaacccaagcttcttcctga

SEQ ID NO: 542045 - DNA, 432 bp, Homo sapiens
gttctgcaaaacatgtcacgggataggtgtttttatccttactttacagaacagcaaacagagggctagtgaggtcaaatgacttaaccaagctcaccacactagtaagtagccagccctggattcacacccagccagtctggctcctgggcctactctcttgcctgttattttataccacatttataggtcctagtggttattaataaatacaactctttggattgtacatgtacattaaaatttctcagaggaagccaaaggtagtcaacaactccaataatgcactgactgtagcatttatgataaataagcaatcagtgaagcagaataattcataagtgttctttcttgctattagaagacttggatgctataaaatatgtacatttcactacaccatcttakgcatatttatcaccttagatggtt

SEQ ID NO: 542046 - DNA, 462 bp, Homo sapiens
gagagtgcttgaaggccggggctatggggatttgagagtttaaaatcaataattcgcagaatgatcggatcaaggcagaggggagtgtgagggaggaacccgggcctctggcttgcagaagcaaatggacagaacatttgaatggacagaggcatcctcctytccagcctctgtccattcagtgagtgagcccttgaagcgtcagtcccagccttcctctctgtccatgctctgcttccttcgaggacagtcttagctaggaactcagcttcaggtcccacttacagcctgatgactcccaaacttaggactttcaccgttctgtcttcagaggtctaggtatatgcaaatgctggcttttgagggtcctcagatgcaaacgtgcaaatgcaggggcttggctcaaagccaaactcacgcaattctccttccaactcctttaaattagattctactccagtg

SEQ ID NO: 542047 - DNA, 462 bp, Homo sapiens
gagagtgcttgaaggccggggctatggggatttgagagtttaaaatcaataattcgcagaatgatcggatcaaggcagaggggagtgtgagggaggaacccgggcctctggcttgcagaagcaaatggacagaacatttgaatggacagaggcatcctcctttccagcctctgtccattcagtgagtgagcccttgaagcgtcagtcccagccttcctctctgtccatgctctgcttccttcgaggacagtcttagctaggaactcagcttcaggtcccacttacagcctgatgactcccaaacttaggactttcacygttctgtcttcagaggtctaggtatatgcaaatgctggcttttgagggtcctcagatgcaaacgtgcaaatgcaggggcttggctcaaagccaaactcacgcaattctccttccaactcctttaaattagattctactccagtg

SEQ ID NO: 542048 - DNA, 621 bp, Homo sapiens
cctctccatggtaagtgtctcccacctgcccctcacggccaaacaactcgtcaggggctcagggaatgtggactggccttagaatgagaatgtgcatgttgccggttctcaacatcattgtcttcgaggaaaacctcatttgtgtktgtgtgtgattttttatttaatttttaaaatttttgtgggtacatagtaggtgtatatacttatgggttatctgagatgttttgatacaggcatgtgaggtgaaataagcacatcatggagaatggggtatccatccactcaaacatttatcctttgagttacaaataatcaaattatactctttaagttattttaaaatgtacaattaagtaattattgactatagtcaccctatttttgctatcaaatagtaggtcttattcattctttctatttttttttgtacccattaaccatccccacctcccctccacaacctcccccacctacccttcctagcctctggtaaccatccttctattctctatttccatgacttcaattgtttttttagatcccacagataagtgagaacatgtgatatttgtctttctgtgcctgccttatttcacttaacgtaaagacctccagttc

SEQ ID NO: 542049 - DNA, 549 bp, Homo sapiens
ctggttagtggcagagcagagatttgaactcatatctgtaatgtgtactaccaagtccctccagcccctctagaacctactgtaaaaaaggagaaaccaagaagatagccatttttgctatagaagaacaacacagatctaacatgaggacccaggcttacttagcattcttgggggacaaaacaatctatgtcctgccctagagtgaaagtattcagcctttagagtcagaggggctgctttgaatacgggcctttctaattagttgagtggtgttggagggagaaaaaagtactaaactctttataaaaatgtataaagatatgcaaaatctttataaattaaacagagaytctgctaacatctactcacaagtttggtctgaggaataaaggagataatttatttgaaagtgaaaatcactcttcccgtgtaaggcttttttgcctcactcaacccgtccctgtcctttcaccatcagaatgatctgctctccacctgatctactatctatttattccttacatctcacatgatgcccttaagcct

SEQ ID NO: 542050 - DNA, 549 bp, Homo sapiens
ctggttagtggcagagcagagatttgaactcatatctgtaatgtgtactaccaagtccctccagcccctctagaacctactgtaaaaaaggagaaaccaagaagatagccatttttgctatagaagaacaacacagatctaacatgaggacccaggcttacttagcattcttgggggacaaaacaatctatgtcctgccctagagtgaaagtattcagcctttagagtcagaggggctgctttgaatacgggcctttctaattagttgagtggtgttggagggagaaaaaagtactaaactctttataaaaatgtataaagatatgcaaaatctttataaattaaacagagactctgctaacatctactcacaagtttggtctgaggaataaaggagataatttatttgaaagtgaaaatcactcttcccrtgtaaggcttttttgcctcactcaacccgtccctgtcctttcaccatcagaatgatctgctctccacctgatctactatctatttattccttacatctcacatgatgcccttaagcct

SEQ ID NO: 542051 - DNA, 296 bp, Homo sapiens
actaataacggcatgcacacaagggaacagttctcctgactcrattctatttcctctctctctgcccccactctgtctttgcccaggcatcacaccattgctcacaaagcttcgccacctggacagtttcccactcagcttgtgataatccttctcttgcctggcctgggcctcacccagattaagcactcaagaaaaatcttggattgaactcttcttgcttggtaataagcacattttagactacctttatcttttcccccaaagtttcaagtgctcggggtgcttaactgatg

SEQ ID NO: 542052 - DNA, 639 bp, Homo sapiens
aggtcgctgccaggacgtgcagaggaaagcaagaccatcgcgtcagtgtgggaaaagtgaagagcgaggcccaggactctgagagaaaggagtcctggcccagaggttgtgtgaggaaagcgtgggataaatgggatgcccgaaagcagagtttggggtgattagataggaaaataaagattggtgggtgtaaagaaaggaaagaaataacaggtgtagacagaaaaattcacaataagaatgaccgtgggcgtgggacacaggccggtcaggcagatggtcagacacctggagaggtgcccagcagcttggagccctcgggagctcagggcaccagctactgacccggacggagcagcacagggtcttccccaccgctgctctcatggggcgcacaccggctgaatgtctgcaaggggtataggaaagaggagagagaaacatgaatatccgaggtcaccaaaggacatgcaagccagtcagtgacaaaagggaacgtggcacagcatggaggagccgcccttaggtcagatcaggcctgtcatcgtcactggtgaccctccctrccgggggaggtggccctggcagcaagcacctgtcctgctggctgagcggcagcccacgtgtccggggcagggt

SEQ ID NO: 542053 - DNA, 418 bp, Homo sapiens
tgatcctccctcatcagcctcctaaagttataatcatttatgatgaccattgggctggtcagctggttttccttgaaccagtcaattctttttctttttttttttctattgagacagagtgtcactctgtcacccaggctagagtgcagtggcatgatcttggctcattgcaacctccacttcccgggctcaagcaattctcctgcctcagcttctcaagtggctgggattacaggcatgtgccaccatgcctggctaagaatcagtcaattcttatgaattctcactgaaagaaataacatttaacctttactgggctctctatacctttaacatacaaaactattttatcctcacaataatcctgtggaatagttagggtggatactattatttscatttcataggtgaagaaact

SEQ ID NO: 542054 - DNA, 336 bp, Homo sapiens
tgataaaaactaaaaaagtctctttttctgccaaataaaggtaattaatctgtctttaatgttcactttttactaaggttgccagatttggcaaataaaaatataggacactataaatttcagataaacaacaaataattttttggtatatatatatatcccttaaaatattttgtatttatttataccaaaagttagtcattstttacttgaaatcaaatttaactgacattttctgtttaatgatcatgatcttatcagattactagcctttgagagcacttgggggctgaaacttaggagaacatgtccaaacatacttcattttaaaaattt

SEQ ID NO: 542055 - DNA, 488 bp, Homo sapiens
ctactccctctgctcagaaagcctcctgctctcaccacttaacttggcaaatttctcaatcctcttgaaaatttaagtcagatgtaactgctatgggaaatcttctccaatcctgccagctttcttcctccaggcagccatccttcatacccatataaaatcttttctcttattgcaacattttatatagtgagtgttttaacatatttgccctctagcttattatctagcacttgaaatagtcaatagccattatrgaatcttacttaataagtgtcatatcatataattccatgattatcaagaagtgcaaagaaaatgatttaaaatggcacactgccatacagcttgaagtgtattactttgcttagaaacaatgaacatctgatttttttgtgtgtgtaatgatggaaaataaagtagctggttggaaaataatatcccagccctatacctaaaaatagcagtggctagaataaatgaaattt

SEQ ID NO: 542056 - DNA, 271 bp, Homo sapiens
accttccttttgccttcttcttgtcatttctcctttcttataatstaaggccaggtattctaattatactcttacctggccattcttcttacttttcttttctctaaattaccatttgtgtccttctctctcacttgacaatcttgtgtatttccacaagtccaactgcgaaaaccctcctcaccctcacctctcattagggtagagacaagaatcccagattgtatttctatctagcatagatcaatcgacagaaacatagccagggtac

SEQ ID NO: 542057 - DNA, 271 bp, Homo sapiens
accttccttttgccttcttcttgtcatttctcctttcttataatgtaaggccaggtattctaattatactcttacctggccattcttcttacttttcttttctctaaattaccatttgtgtccttctctctcacttgacaatcttgtgtatttccacaagtccaactrcgaaaaccctcctcaccctcacctctcattagggtagagacaagaatcccagattgtatttctatctagcatagatcaatcgacagaaacatagccagggtac

SEQ ID NO: 542058 - DNA, 271 bp, Homo sapiens
accttccttttgccttcttcttgtcatttctcctttcttataatgtaaggccaggtattctaattatactcttacctggccattcttcttacttttcttttctctaaattaccatttgtgtccttctctctcacttgacaatcttgtgtatttccacaagtccaactgcgaaaacyctcctcaccctcacctctcattagggtagagacaagaatcccagattgtatttctatctagcatagatcaatcgacagaaacatagccagggtac

SEQ ID NO: 542059 - DNA, 620 bp, Homo sapiens
cttacattcttgctgatgtttgtcaagaataaaaatgattatgctatataaccattgtatagaagccttctgttgccataaattcacttgacatttcactttactgagtgatgtgggaatgacccttagcaaggctatgcatactttgtgtgtttaaacttcatgcatacagaatatttgcagatacactaataatttaacatctcagtcggacattctactgtttaaatttaagcaaaggaaatagtctagttttaaacaaagcatcttctgaagcagttgcaaagggtatttctagaattacaaaattgtcasatccattagaactgtttctggtctctcaaatttgcgttggcccatgtacttaatactttctttcttgattgctctctctttcatttatgctcattatacgaggtagtttccatgtcacgaaggtaagaaaatatgtggagaattgttaaaattaggccagagtaaaagaatcaacctatgaagacccaacagcaatattgtaaaaggttatcatattttattaaagtgaatttttttgcctgttttaaaaattatctaaaggtataagtattcatagttgtaaggaaatacattgtattactcct

SEQ ID NO: 542060 - DNA, 480 bp, Homo sapiens
ctgggcctacagctggactgtttctatgccacccttgcatttaggtgtggtcatatgcggagttctaactaatggaatgaacagaagtaataggcaccacttccrgccctggcccataaaatcacccatgaagatccctcagagttcttttttccttctgtctagctggaatggagaccgccttcaggttaaccttggaagccacacattaaagatattaaagcctctttgaatttcaaaagtctgcattcatctagttctgctacgtgagcaagaaataaacttctgttgagtttgaatcataagttttggggtgtatttggtaaagcagttagagttcccatgttacaaggaacatgttaactcatgctctgctttttctttagagaagcataatcctctcctgtaatagccttagaaacaagggatagcaatgggatatatatatatatatatatatatatatatatttatgatcat

SEQ ID NO: 542061 - DNA, 657 bp, Homo sapiens
cctcctccaagaagtcctctgcaatcggatccagcagcaactctttcttgtcctgcctcatctctgtggaatttacaaggttcaaatgctgctgattatgtgaggtggatgctgcatcttaagtgtatactttctgctgttccttctctattttgcatattgcattagattaggagtcctttaagaataaaatgttctgggtctcattcccctcaacgctcttgcacctgccctccctgggttatgcagcatctactcccggctttgcacagaacgtgcggcatccaascattcactcaggattggggcatatgagaggggtagtggggaaaccctgctcttcagggacccatgaatatgaaagaccaccataagagagggagggacagaacaaagctctggtccctcaaaagaccaagtgtctatttttgcactctgaaaatgaggtgtcaggtccctgctggggaatccctggaggcagctgggctccccaaagcagctgggctccaaatgtccaggaggaggtgcaaagaggaagagattttgctttggctctgagggcctctgggattcccagaggaatccacaagcctcatatatatttatgtgaacttaagatgctaatgagcattgaggagccaagagccctgctgggtt

SEQ ID NO: 542062 - DNA, 515 bp, Homo sapiens
ggttctctcctagcttgtcaaacatgaaacttggtttaggaagcacctgctcactacgtaattcaagtggggttcttactgcactcatcacaaagactgagttttaatagctttcctggacaatgaacctggctcatcataagaatgcatctttagggtattttaataagaaaattgttcaatctggattcattcctaatgcttcttttaaagaactcacctatgccttcaaatgaattgaatgaatggagtccagaattccaaaattcagaaggttttggactgaaaattarttttatttatcatatgttttaaataaataagaaatcatttatcctatattaggcttccttttctcaatctgttaaggggttctctgtcttcatctgagcaaatatagaccagtggttacaaatacggactttggattcagtcagatctaagttagactctcaactctaccattcaccagctccaggaccttgtggaaatttatttactcacatagcaaacat

SEQ ID NO: 542063 - DNA, 515 bp, Homo sapiens
ggttctctcctagcttgtcaaacatgaaacttggtttaggaagcacctgctcactacgtaattcaagtggggttcttactgcactcatcacaaagactgagttttaatagctttcctggacaatgaacctggctcatcataagaatgcatctttagggtattttaataagaaaattgttcaatctggattcattcctaatgcttcttttaaagaactcacctatgccttcaaatgaattgaatgaatggagtccagaattccaaaattcagaaggttttggactgaaaattagttttatttatcatatgttttaaataaataagaaatcatttatcctatattaggcttccttttctcaatctgttaaggggttctctgtcttcatctgagcaaatatagaccagtggttacaaatacggactttggattcrgtcagatctaagttagactctcaactctaccattcaccagctccaggaccttgtggaaatttatttactcacatagcaaacat

SEQ ID NO: 542064 - DNA, 561 bp, Homo sapiens
ctggcctaagatggactcactccctgctcacctggatcaacgtctccagctcctgggggctcacacagacatgatcccgcaggaattccgccttctccaaggcgatggtattcttctggctgctctcaaagggctgctccaatgcccggaagacaagaccgccagtgacaaggtagaccaccacaaccacaaagatggcaaccaccgtcttccacttcatgacggtctgcaagcccccttgggaggtgccttccatcctggctaccactgtggctcgggaggaaatggacaggcgcggagttggagtcggagccggagccgggggttgcccgttagtggcgctcttgggctggcacaccggtgctgctgcgggaacggccactgaggagtcagggtgggggacaaagaagaagagagtttgtttataaataaatacaaaacgtgtcagaaacaaagcacagatgtcttctttgagccagctttcaaatgtgaggatgaaacgctggttcaccmagcctgcagttagggaatttgatcagttgctaggtacccatttgagtt

SEQ ID NO: 542065 - DNA, 598 bp, Homo sapiens
tcagagaagagctggggtaggctggtaaaaaacatgtatcaagacttcagacataaaagttgccctgaattggtgacttttagccccatccagtctgtatagtcattagacagcctgaatgtcagatattcaggggacaaagccttagaatgaaaaagataaatggttgtttcagtaatgttcccctacatactctaaaagaaagtcagcattagataccaratcaatcttttttgttttcaccatttaataggtctgtgggaagacagaagtttcaagtcaatgaaagtctttgtaatcaaattgcattgaacaggaaagtcatacaaaaggttacattgaggtcctatgctctgaatatagttagtaataggatagtagaatgaaagaagaaagggaagaaaagggagaagagagaaatctgagaatatgtggattagaaatggtgcaaggacaagcacctcagaaggcaaggaaggcattaatatccaaggatggagtagaatgtgatattttggggatgaaaagagtaatgctgatttccaatcactgtctttcccaaattagggaatgatcctcatgttgatttaatgttaga

SEQ ID NO: 542066 - DNA, 398 bp, Homo sapiens
aaaaaaattaggacattttcggtgtggggcatgacaagataaggaagctgcctggaagctgggtgccaactccatgaaattgggggaaactaattgctggtcacgtgggcctcaccagggtgacagagatcccttctttcagtcctttaagatctttggagaaagtcaagtggccatacataacgacagggtctgggttttgtttataaataacccaggaacatyttgttgttttcagttttctagggctgggttttcccagcacacagggctctggggagatttgaaaaccatggcgcgtcaatgagaatgctgccggggcgccagtttggagcagcctcattgagacgactgaacaactacttcattcaggatcctcagccctgggcccttcccta

SEQ ID NO: 542067 - DNA, 555 bp, Homo sapiens
ctgttcagacaatctgtgtcaaacactcctgtccacggggtcaaccccaaccacagccgggactgtcactcatggctgactcgtctaggctggctcacgatagggtgctatccaaagtcagacacgccaagggcatgtgttctgtcattctgtgttggaagggcccgctggtggcattaaccttygtttcctggccccacccacaccggctctcactcaagtacttggtcagccactgagattccaaaccctttggccattcagaggctgctgataggtgccaccaggcctgggctgccaggagacctaaggatggtctgcaaggcctgctgaactgacactgcctcagcgtgaccttggcttccatgcacagtgctccccgggctgcaggctggcaccctgtctcctcacgagctgcttcctgtcacagcttaagcttcagctcctgccaggcccccccagcccttctactccactgggacagcccctagcgccagctcccgcagcagcctgtgctcgctccgagacgacacaaataactgatgtttatttttt

SEQ ID NO: 542068 - DNA, 555 bp, Homo sapiens
ctgttcagacaatctgtgtcaaacactcctgtccacggggtcaaccccaaccacagccgggactgtcactcatggctgactcgtctaggctggctcacgatagggtgctatccaaagtcagacacgccaagggcatgtgttctgtcattctgtgttggaagggcccgctggtggcattaacctttgtttcctggccccacccacaccggctctcactcaagtacttggtcagccactgagattccaaaccctttggccattcagaggctgctgataggtgccaccaggcctgggctgccaggagacstaaggatggtctgcaaggcctgctgaactgacactgcctcagcgtgaccttggcttccatgcacagtgctccccgggctgcaggctggcaccctgtctcctcacgagctgcttcctgtcacagcttaagcttcagctcctgccaggcccccccagcccttctactccactgggacagcccctagcgccagctcccgcagcagcctgtgctcgctccgagacgacacaaataactgatgtttatttttt

SEQ ID NO: 542069 - DNA, 555 bp, Homo sapiens
ctgttcagacaatctgtgtcaaacactcctgtccacggggtcaaccccaaccacagccgggactgtcactcatggctgactcgtctaggctggctcacgatagggtgctatccaaagtcagacacgccaagggcatgtgttctgtcattctgtgttggaagggcccgctggtggcattaacctttgtttcctggccccacccacaccggctctcactcaagtacttggtcagccactgagattccaaaccctttggccattcagaggctgctgataggtgccaccaggcctgggctgccaggagacctaaggatggtctgcaaggcctgctgaactgacactgcctcagcgtgaccttggcttccrtgcacagtgctccccgggctgcaggctggcaccctgtctcctcacgagctgcttcctgtcacagcttaagcttcagctcctgccaggcccccccagcccttctactccactgggacagcccctagcgccagctcccgcagcagcctgtgctcgctccgagacgacacaaataactgatgtttatttttt

SEQ ID NO: 542070 - DNA, 580 bp, Homo sapiens
ccagctgcctgggatctcctccctccagctccacccatccttgagggatggcctctcttcctccatgaaagcccttccctctgataaaacccaagctctccacccaggacagagtcaaaagccgcagcccccgggccacctctgtgatccctttctcaccccagagggtgggccatccctgggggragggagatactccttcagggcccctgaggtctgaagcacacagtttgcctgatgagttttcacctaatctaaggtgggaaggatgccccccggcctgggcaaagcctggccctccccattttctctctatggggaggaatcctgaccccaaacttcccctgacctcttgactggaatccagttgtccagtagaagaagcccctaaatgcagtgcccagggccagtgtatttgttagaactgctggacctaggccaggtgcaggggctcatgcctgtaatctcagcactttgggaggcagaggcaggtggattgcttgagcccaagagttcaagaccagcctgggccacatagtgaaactccatctctacaaaaaatagaaaaattagctgggca

SEQ ID NO: 542071 - DNA, 580 bp, Homo sapiens
ccagctgcctgggatctcctccctccagctccacccatccttgagggatggcctctcttcctccatgaaagcccttccctctgataaaacccaagctctccacccaggacagagtcaaaagccgcagcccccgggccacctctgtgatccctttctcaccccagagggtgggccatccctggggggagggagatactccttcagggcccctgaggtctgaagcacacagtttgcctgatgagttttcacctaatctaaggtgggaaggatgccccccsgcctgggcaaagcctggccctccccattttctctctatggggaggaatcctgaccccaaacttcccctgacctcttgactggaatccagttgtccagtagaagaagcccctaaatgcagtgcccagggccagtgtatttgttagaactgctggacctaggccaggtgcaggggctcatgcctgtaatctcagcactttgggaggcagaggcaggtggattgcttgagcccaagagttcaagaccagcctgggccacatagtgaaactccatctctacaaaaaatagaaaaattagctgggca

SEQ ID NO: 542072 - DNA, 587 bp, Homo sapiens
tggacgtgtgaagcataggccctagacatcctgtgatgggcatggcagtatgtgtgagaaataaacctttcttgttttaaggcactgagattttggctttgtttgctactgtggcataacatagtctatactaactaatacctaaattggtactgagaagtggggagttgccattaaaaaaatccaaaatatgtggctttggctttgggctagacagcctgttgtgagaaacatggaaggatgatgctccatattaagcaatggcaatgcttttgataaaataatcacctgtattcagtggtgtgctagagctggtttatgcccaagacagctaattgtgagtatctcttcccaactccaagttttatgatgtgatgttgttaacttggatccatcatartagaagaatttataccactgaaattgggagcaccataaatcatggagtttttgcttttgttttcctggagagctggctattaaacatttaccaccacacattgactgcaataatttataaagcagatcctgcacctgatgaacttgtatttctgagggacaaattggagcattagcaatgtgtccca

SEQ ID NO: 542073 - DNA, 335 bp, Homo sapiens
gaaaaagaggaaaaatagataaacaacaagatcttgggtttttttttctttgtggtaccagcttkctaggatagtaattcttgatttttaatgttctgccttttagagtatccaaactctcaggattctcataattcttataataatattatgaggtaggtaagagtggcttcttttccccttatactaattagaaaactgaggctcagtattaacatgactggttcaaggcccacccatacctagttcaaatctgggttgttccatggttgcctttccatcaccagctttcttagttatgatctgtattcccatgtggttgtgaactaagctag

SEQ ID NO: 542074 - DNA, 621 bp, Homo sapiens
aaaccatgtcctgggataggctgggtagaggcactgcacattcttggcaagcctgtcctgtgtcactgaaaaagcaggctgtcgagggagcccaccaggaagagcagtgcaagagaagagatgagatgagaccaggtgagtcagatcttgtgaccatggcctcaggaagggatgcccttctgtgtggacgctgttgccagcaggccaagacagaggaactaacaataacagtggtgggtgattgtcacggattatctcattttatcctcacaatgatcctatgggaaaagggtgatgagccactttacaggggcaactcttgaggcctcagtccctgtagacttcaaagcctcaggacaggctcacaattaagcattttataaaaccacacattcttaaggttggtgaaggccttatatctcctagttcacctcccctccaagagatgctcaaattcctacaacattcaacatcccaacaagcttcttgcttccttcccatgctggagggtgcaccatctactccatccttgggcagctctgtctactaaaaacgctttcttacagattcctcatttctacccatcaaccccacaygttctctttgtatctacccagaaca

SEQ ID NO: 542075 - DNA, 171 bp, Homo sapiens
taagcagcccaaccctgcagaaagcatcctgggctgagagagtggagctgtggccctttggggacaacatttgtttccattaagcctttctcatcaattaaggaggggcttggctttccagtgcagatytgcggaaacccaggaaacttcacatgtgcctcagaaacccca

SEQ ID NO: 542076 - DNA, 527 bp, Homo sapiens
ttcttttcattcataaaaggagaattgaaacattagtcctggtctgataaaatgctttgggacttgacttccattgcttggttgactgaggtggccttttccctcccttttcatcaacattygttttctttttttttttttttttatattagcaaaacccttttatttattaacccaagggatgatcctaattaatccaacacactttgaaatagctgcatgtaaaatgtttatgataaagataattgaacacagtaatgaaaaaaaaaagaaagaaacagtatggagatttgctcattgaactgagcttggtcattctcttaattaactcctgtccaaagtgatgatggaatttttattctactttttcatagatccgagtacaggtgacattgttcatgacacactccaccactaatttcccatctttcaattttcttgttattgtgctttccttcccatcccactcctgatgctgaaccaatgcaccatctgtaaagttgcagacagtctgagtttttctgcca

SEQ ID NO: 542077 - DNA, 469 bp, Homo sapiens
ctgcaggtctgttggagtttgctggaggtccactccagaccctgtttgcctgggtatcacagcagaggctgcagaacagcaaatattgcagaatggcaaatgttgctgcctgatccttcctctggaagcttcgtctcagaggggcacccggtcgtatgaggtgtcagttggcccctattgggaggtgtctcccagttaggctactcgggggtcagggacccacttgaggaggcagtctgtccgttctcagatctcaaactccgtgctgggagacccactactctcttcaaagctgtcagacagggacgtttamgtctgcagaagtttctgttgccttttgttccagggctcttgagaattaagtgaactgtttcatgtagagatgaggcactcagtaaatgttgactaccgtgcatcttccgtgctctgcctgcactggcattgtccttgagatttaactgtattgaca

SEQ ID NO: 542078 - DNA, 496 bp, Homo sapiens
tttaaaaattatagtagaaatgtatagttgatcccaaccatgaaactaagaatgtcagaatcagaaatgactttggggatcatgatcgggtctaatgcttccatttcacagatgaggaagtgggggcccgagataggaaaggacttgccaaggtcacacagtaccgttagtagaagcagccgggtctcctccctctccagrcagtcctccatctactggcagtctcctgccaactcctgctgaatggtcaggaatgttcccagttccttctgccaactctatcacctgtaggggtctctatccccacaatagcatcacccaccagcttttcctgatggttgctctaccccactgtcatggcccaaacaggtgacagagaagtctagaaaaataactcctccaaaaatatccagaaagagttaagggagtagtgagaaagtggcaacagggctgacctgccaggaggagcagggcttttgcaacgggctccatgaag

SEQ ID NO: 542079 - DNA, 496 bp, Homo sapiens
tttaaaaattatagtagaaatgtatagttgatcccaaccatgaaactaagaatgtcagaatcagaaatgactttggggatcatgatcgggtctaatgcttccatttcacagatgaggaagtgggggcccgagataggaaaggacttgccaaggtcacacagtaccgttagtagaagcagccgggtctcctccctctccagacagtcctccatctactggcagtctcctgccaactcctgctgaatggtcaggaatgttcccagttccttctgccaactctatcacctgtaggggtctctatccccacaatagcatcacccaccagcttttcctgatggttgctctaccccactgtcatggcccaaacaggtgacagagaagtctagaaaaataactcctccaaaaatatccagaaagagttaagggagtagtgagaaagtggcaacagrgctgacctgccaggaggagcagggcttttgcaacgggctccatgaag

SEQ ID NO: 542080 - DNA, 652 bp, Homo sapiens
gctttccttggctcatgacttccttccatctttaaaaccagcagtgtaacattttcaagcctcgatctgactctgacactctgcttttgtcattacttctcctgctctgacttctttagagacccttgtgatgacattgagtccttgtgatgacactaggaccaccagagaatccaggataacctcccgatctcaggtctttcaccatgtctgccttgcaagggatcccattccagattgaggcaggggcggggattaggatgcagatgtcattggaattattctacctgccacacccacaatcaccaagcatgagactcttcagtattgtgttggacatggaaacaggtagtttataattttttaaaacattgcccaattccttagagttcaaaaggaaccaacaatctaaaccacttaaggaaagtggagtgatctcctctctgtttaagtaaggattcatctgtacttcctgtcagggcgtagggactcagagggctctcttacttccactacacccagagaggcccattgaggagactcctccctacccaagtggctacagtgctgtctgagtggatctggtggcaagcttgactacactgcagagactgctgtgtgctgggmatgagctctgtcctccatatgatca

SEQ ID NO: 542081 - DNA, 642 bp, Homo sapiens
tttccttgtcattcaacattcattcaacacacatttaccaggtgcctattaagtgcagagtgtagtgaggggttctcaagatgtcatgccaagtgagtgcgaggtcaggccagagtgcagatgccctgccagaggtgacctctggctcagaccgaggatccgcaagagttggaagtgagcatggagccccaggctgctgctggcagtgggcagagtgggagaaggcgggactgtttgagtgtaagaacaggccgggggcagcaggactccctggggcaggaggggacggcaagaatggcaggacaagcaagggtggaaaaggggacttgtgaagggcgccagggggagmcagggattgttgtaagctgggcagagacatgcccagagttctgccttctccaccacgttcctcacgatctggactctgttgctctgcacacacaggtgggaatggaactggggccatgatgccagggggccatgagcccagtgacaaagagggcagaggagacacactcagtgtctccaatttctgggtgggctttggcctgcctgttccttggccccaggcttggaaggcggacttaaaccaagattaagctgactgaagtaagtgctccaggaacattgtgtgactaattt

SEQ ID NO: 542082 - DNA, 649 bp, Homo sapiens
tttccttgtcattcaacattcattcaacacacatttaccaggtgcctattaagtgcagagtgtagtgaggggttctcaagatgtcatgccaagtgagtgcgaggtcaggccagagtgcagatgccctgccagaggtgacctctggctcagaccgaggatccgcaagagttggaagtgagcatggagccccaggctgctgctggcagtgggcagagtgggagaaggcgggactgtttgagtgtaagaacaggccgggggcagcaggactccctggggcaggaggggacggcaagaatggcaggacaagcaagggtggaaaaggggacttgtgaagggcgccagggggagacagggattgttgtaagctgggcagagacatgcccagarttctgccttctccaccacgttcctcacgatctggactctgttgctctgcacacacaggtgggaatggaactggggccatgatgccagggggccatgagcccagtgacaaagagggcagaggagacacactcagtgtctccaatttctgggtgggctttggcctgcctgttccttggccccaggcttggaaggcggacttaaaccaagattaagctgactgaagtaagtgctccaggaacattgtgtgactaatttaactgca

SEQ ID NO: 542083 - DNA, 610 bp, Homo sapiens
tgttgtcccagctactcacaggtgaggcaggaggatcacttgagcacaggagttcgaggctgcagtgagctaggattgcgtcactgcactccagcctgggcaacagagcaagacccccatttctaaaaaacaacatggcaaatcagtcaaactatccgatactaaggctaataaataattggtaataacatcggcaaatcagccatagaatttcctcagttatctttcttggcttcaaacaatggggaccatatttaagaacacayataggagataaagactggttagatagatgatatttgcagatgttaaaccatcacaagctaatttcactcatttcaacattgctcttccccttcacctccaaagcacaagacagaatcagtcttctattctaagaattgtttagagaggatttgtcaatatataaccaaatatctgcttagtgacgggaaaaacctctgttcgccagccaaaggacttgtgagaatgagagctacatgtggcttctcccctctctggcctcctaattccacatcagtttgtagttattcttgtactacaagagtatcagtttcagaatgtaagcctcataagctcccaggaaagc

SEQ ID NO: 542084 - DNA, 610 bp, Homo sapiens
tgttgtcccagctactcacaggtgaggcaggaggatcacttgagcacaggagttcgaggctgcagtgagctaggattgcgtcactgcactccagcctgggcaacagagcaagacccccatttctaaaaaacaacatggcaaatcagtcaaactatccgatactaaggctaataaataattggtaataacatcggcaaatcagccatagaatttcctcagttatctttcttggcttcaaacaatggggaccatatttaagaacacacataggagataaagactggttagatagatgatatttgcagatgttaaaccatcacaagctaatttcactcatttcaayattgctcttccccttcacctccaaagcacaagacagaatcagtcttctattctaagaattgtttagagaggatttgtcaatatataaccaaatatctgcttagtgacgggaaaaacctctgttcgccagccaaaggacttgtgagaatgagagctacatgtggcttctcccctctctggcctcctaattccacatcagtttgtagttattcttgtactacaagagtatcagtttcagaatgtaagcctcataagctcccaggaaagc

SEQ ID NO: 542085 - DNA, 521 bp, Homo sapiens
acaacacttacgacaagccatataacagactgtcctaatcacacttagataaataattagtaagctactcttctccgcatattacagtaagtaatctactccattattttggcatctgtttcttaaaatytgctgcacctatcccttctaaaacgcatatactgtgtaaaaatgtatgaactctaaacttcacaggtagaaaatcatccagtttaaactttttttatatgaggaaactagagttcaaatgcgttaaatgatttagccaaggtcatacgttctgtggcagactcaggatgagaattagggtgtcctgacttccagtctaatgttttttatgatcacatcaactagacaatgagagaaagccctaccattcattggtggtaagtgcagtgggcactgttcctatccatctgtctttcacaatatacaattcctcactgttctgcacaatagcctatgtggtaacacagcacatatgagctaaactaccactcaagggtcattttaacaagcat

SEQ ID NO: 542086 - DNA, 560 bp, Homo sapiens
ttttagtacctacagatgtgaaaaagtgcttaataagttattataaacttgtagtgactttaaatattttattaacaccagcagcacctgtatacatttgaaaaccaataggcctatatgtgtttctcacaatgttcggtgcttatatgatattcaaagacccttggagtaattctatggcaccgtttaccccaacaagatgttttgggaaaagaagagatgtctagggaagaataacccatcatctaaaacaggaaaataaactgaaagtagacaagcatcccaccaaccaaattttccatgaaggtgcagtcccactactgtgttttacatgtttttgttaatatttttgacagctgtgttgctgcttatgcttcatgaaatctgcagccttggaggagctctgattttctttcttaactatgagcagtcatcagaacagatctctttaaaaaaaatacttatgtccttcagtcccctcagtgaaccggacattgaagagtcaatatagttcacactcattcgtgayagatacactaaacaggtgagtaaaggtatgt

SEQ ID NO: 542087 - DNA, 422 bp, Homo sapiens
cttgccctcttcagtttttcttaacttacttatttgtaaatatctcctttgcgatacaaagctaagaagtcaaaaatctccttgtcctttgaacctaagacagaccttatcaactgactgattagatgatactctcaaggactatggccattattttaatcatctttcatgagagatacggggaggaaatgtttctatattgattaggggtgtgtaccttcatacrttttacactatcacctgagagtttcaaaactgtgaaaaattgaaatcacatggaaaaaaagggttttcagaattcatgcagtagagttagtgtactgttcaaaatatggcaccctcacccacttagctgaatgatcttggacaaacaatacacccctctatgttccatgttcttctctgaaaattggaatcactca

SEQ ID NO: 542088 - DNA, 500 bp, Homo sapiens
acgcccctggcctcccaccctccaaccccaaaaagctctggaagccgggggagggacggagcgaagccccggctccctgagttgaacagcacttggcgacagccggtgcgcgccctgccacttcttgcttgctatagttagaaaaawatatatatatatgcatctacccggcgcccaataactagccagacccggctgaaggaaagctaactcccctgacgcgatgccaagcgaaagaatcagcagtcgagtgagccggtcgctttggtaagattttccctcccttacccttcaactcctcccgctgccaggagagctgccaggtaggacggcgggcaaagcgcttcttcaagttcctgcgctggagtcaccacccgagaggcatcgccgtctggcgttggtgtctgagcagaagccgcaggaaccagcgggagcagcaggaggagctgcgggactcgtttgccgaggctcgtgttctgctcaaaagtttgtagacgcgc

SEQ ID NO: 542089 - DNA, 500 bp, Homo sapiens
acgcccctggcctcccaccctccaaccccaaaaagctctggaagccgggggagggacggagcgaagccccggctccctgagttgaacagcacttggcgacagccggtgcgcgccctgccacttcttgcttgctatagttagaaaaaaatatatatatatgcatctacccggcgcccaataactagccagacccggctgaaggaaagctaactcccctgacgcgaygccaagcgaaagaatcagcagtcgagtgagccggtcgctttggtaagattttccctcccttacccttcaactcctcccgctgccaggagagctgccaggtaggacggcgggcaaagcgcttcttcaagttcctgcgctggagtcaccacccgagaggcatcgccgtctggcgttggtgtctgagcagaagccgcaggaaccagcgggagcagcaggaggagctgcgggactcgtttgccgaggctcgtgttctgctcaaaagtttgtagacgcgc

SEQ ID NO: 542090 - DNA, 604 bp, Homo sapiens
tgtttgtttgttttttgagacagggtcttgctctgtcacccaggctagagtgcagtggcgtgatcttggctcactgcagcctcaaactcctgggctcaagcaattctcccaccgtagcctcctcagtagctgggactacatgtgtgcaccaccaggcccagctaatttttgtattttttgtagaaatggggtttcaccatattgccccggctggtctcaaactcctgagctcaagcgatccacctgcctyggcctcccaaagtactgggattacaacatgagccaccatgcccgcccaaaagagtgttgtttaactgacacaggataatatgattcacacaaaatagaacatttagtaattcaagggtgtacctagaacattctgccaaggggacatttaacgctgtgacacaggaagtgtcatgatgactcaggaagaggggatccacatgtagtcccatattccagcagaagagtgcttctggacaaatgtgttaaaccttccccccatcttcaaaggaaacagagactacagctctgtggcaaaaggcaatgaatccctctgagggatgtgtgtattctagttagagagtaacacagacta

SEQ ID NO: 542091 - DNA, 604 bp, Homo sapiens
tgtttgtttgttttttgagacagggtcttgctctgtcacccaggctagagtgcagtggcgtgatcttggctcactgcagcctcaaactcctgggctcaagcaattctcccaccgtagcctcctcagtagctgggactacatgtgtgcaccaccaggcccagctaatttttgtattttttgtagaaatggggtttcaccatattgccccggctggtctcaaactcctgagctcaagcgatccacctgccttggcctcccaaagtrctgggattacaacatgagccaccatgcccgcccaaaagagtgttgtttaactgacacaggataatatgattcacacaaaatagaacatttagtaattcaagggtgtacctagaacattctgccaaggggacatttaacgctgtgacacaggaagtgtcatgatgactcaggaagaggggatccacatgtagtcccatattccagcagaagagtgcttctggacaaatgtgttaaaccttccccccatcttcaaaggaaacagagactacagctctgtggcaaaaggcaatgaatccctctgagggatgtgtgtattctagttagagagtaacacagacta

SEQ ID NO: 542092 - DNA, 694 bp, Homo sapiens
ctgtaaatacagatgaagcttcgcttgcttgcccactgctcacctcctgctgtgcaaccctgttccagagctatctaaaagcctcccatgccgagaacaactaatgagataaaaaaaaaaattgtagcatagtggttagcctgcccacttgttaacaggagggtcttgcttctgccttcatttgctcctagctaggctatagtatatcttataagagacccaccttagccgttactacataaagattcaacctctcaaatggacataaaaagtacaaaacatttaaggcasaatgactatatggatagtttcttactgccaggaacttttttttaaaaaatgaccaaaagtcctaactagaggcctcttcacacaatgcagagaccaagcaaaattgtgaattttcttttctccatgaaaatgaatggcctaatgaccacactagggtcaacagtacataactgtgggtaacctcaccctggtaactgctagccactgagtattccatctgatcatttgggtcattgagtctcagatggaaagtgagaagtgtattattctgaaggactgggtaaccctaaagcctatatctaattagtgttattatactcttttctgtgagaacttaaaagatccaaaaatatattcctttaaccatcatggtaatactcatggtacttaaacattttgaaat

SEQ ID NO: 542093 - DNA, 665 bp, Homo sapiens
tgtaaatacagatgaagcttcgcttgcttgcccactgctcacctcctgctgtgcaaccctgttccagagctatctaaaagcctcccatgccgagaacaactaatgagataaaaaaaaaaattgtagcatagtggttagcctgcccacttgttaacaggagggtcttgcttctgccttcatttgctcctagctaggctatagtatatcttataagagacccaccttagccgttactacataaagattcaacctctcaaatggacataaaaagtacaaaacatttaaggcagaatgactatatggatagtttcttactgccaggaacttttttttaaaaaatgaccaaaagtcctaactagaggcctcttcacacaatgcagagaccaagcaaaattgtgaattttcttttctccatgaaaatgaatggcctaatgaccacactagggtcaacagtacataactgtgggtaacctcaccctggtaactgctagccactgagtattccatctgatcatttkggtcattgagtctcagatggaaagtgagaagtgtattattctgaaggactgggtaaccctaaagcctatatctaattagtgttattatactcttttctgtgagaacttaaaagatccaaaaatatattcctttaaccatcatggtaa

SEQ ID NO: 542094 - DNA, 685 bp, Homo sapiens
aggggatctgtagcatgctcgaaggcctgagagatggaacatacaaacacataaggccaaccgtatattaaaatagaactctgacacacgacctgcagtagcaacctggaaggccaaaaccatgcaccctgcaccaaccagcccaggaagccaaaccacaacctctgtggcaattggctcaaaacagcaagggcttggtcaataactgacagccttcctaatgtctctctccacttcaaatgtgagacgacacaaagaaagtcaaatacgctcccctgaccaagcacgtagggtgcctacttctagtaagtcgccctcagctttcccacaccaacggcctctgctcagcatgtacctgaagccttccttatttccaggatgaagcttttcaactcctctgcctgcttttgagtctctgtcaaatgcaagtgactgtggccaactcctgtgctacagcaagctctgaataaacagctttgctttttctcatcttggcagccttcattgaygtccaaaggttcttttagtaaatgaatatttgctgaccaggtgcgtggttctaggaacaggaattatcactgcgatcttcctggttacaatattttgcatcaacatctgatgggattctttaaacttaggttttattatggcaacaaaaaagatgaaacacaaatgaatttatact

SEQ ID NO: 542095 - DNA, 685 bp, Homo sapiens
aggggatctgtagcatgctcgaaggcctgagagatggaacatacaaacacataaggccaaccgtatattaaaatagaactctgacacacgacctgcagtagcaacctggaaggccaaaaccatgcaccctgcaccaaccagcccaggaagccaaaccacaacctctgtggcaattggctcaaaacagcaagggcttggtcaataactgacagccttcctaatgtctctctccacttcaaatgtgagacgacacaaagaaagtcaaatacgctcccctgaccaagcacgtagggtgcctacttctagtaagtcgccctcagctttcccacaccaacggcctctgctcagcatgtacctgaagccttccttatttccaggatgaagcttttcaactcctctgcctgcttttgagtctctgtcaaatgcaagtgactgtggccaactcctgtgctacagcaagctctgaataaacagctttgctttttctcatcttggcagccttcattgacgtccaaaggttcttttagtaaatgaatatttgctgaccaggtgcgtggttctaggaacaggaattatcactgcgatcttcctggttacaatattttgcatyaacatctgatgggattctttaaacttaggttttattatggcaacaaaaaagatgaaacacaaatgaatttatact

SEQ ID NO: 542096 - DNA, 639 bp, Homo sapiens
tgtagacggggctgtttgcccctcctggcagagtaggtgctaaaccccatgtttatccctatctgcgttagggctctcagcagagaaaggcagcacaggcttcacattcctggacctgtgaccacaggagaaaggaccaagggcagtgctcaggaggattatttaggagttctactgaaatagaatttgagctgtgggtgagtaggagtgtgcacgtgcatgtgtatatgaagtgagtgaggagctaaacgtttgctctcagaggtcatctacactgaagatgaaaaagacaaaacggcaaggaacaattgttgagcacctactgaaaggagagcactgtgctttacatacacaacttcatttaatcctcagtataacactagaaggtgatattttgatgctgagggagctgaagtcctgagtgtttgaataacttcctcatcctcaaacagcgagtaaatagcagtactagatwctgacttctaaggcctcacctttctgggacattacaccagggaaattcaagaacagcccttctctaaccttgtgattgaaaaaggtcaagtttaaagatgggaaccggatctcttctccaaggaaatgatcctccactgaatgctgtcagtgtattgacaccaa

SEQ ID NO: 542097 - DNA, 639 bp, Homo sapiens
tgtagacggggctgtttgcccctcctggcagagtaggtgctaaaccccatgtttatccctatctgcgttagggctctcagcagagaaaggcagcacaggcttcacattcctggacctgtgaccacaggagaaaggaccaagggcagtgctcaggaggattatttaggagttctactgaaatagaatttgagctgtgggtgagtaggagtgtgcacgtgcatgtgtatatgaagtgagtgaggagctaaacgtttgctctcagaggtcatctacactgaagatgaaaaagacaaaacggcaaggaacaattgttgagcacctactgaaaggagagcactgtgctttacatacacaacttcatttaatcctcagtataacactagaaggtgatattttgatgctgagggagctgaagtcctgagtgtttgaataacttcctcatcctcaaacagcgagtaaatagcagtactagattctgacttctaagkcctcacctttctgggacattacaccagggaaattcaagaacagcccttctctaaccttgtgattgaaaaaggtcaagtttaaagatgggaaccggatctcttctccaaggaaatgatcctccactgaatgctgtcagtgtattgacaccaa

SEQ ID NO: 542098 - DNA, 454 bp, Homo sapiens
cagaacagaacgatgattatgttaactgttgattaggtaactaacacccaccatattcccaaagatgtggagaaatgacatgaaattttgcatgccacttggaaactcttagatttgagcatctcaagacttcccccttgttacacaacaatctttgagagcatagttttctttcattgatttttgtcaacatattggtttaaattttgccaggtaaaagctttggaactgcagaacagggcctttgttccttttacatcatgctgcctttcattttctrttatagcattctctctaaatgatgtgccttaagattcattcagaatgccacggctgacagatggcattctccctgtctgacttggtgcaacacagccgggcactctataaaaactgagaagtcagagctctcctaattctctgctcaaaattgagtacctgttgaggaacctgg

SEQ ID NO: 542099 - DNA, 613 bp, Homo sapiens
gccttttcttttatctctttgtcttgtgtctctatttctacactctctcgtctctgcacacggggagagacccaccgactctgtggggctggtccctacaaaactctgtctcagaaaaaaaaaaatagaattccctttagcacttcttgtttggcagatctagttgtgataactccctgtttttgtttgtatgggaaagcttttatcacaccttcattttttaaaaaaawtatataatatatggtttatttgtaaaagtcacataattgcacatcatgaaattattttcctgggattctgtttcaaaagttcacttttaagaaaagatgaacacattttattattgttgctgaatttccaaacaaaaaagcttggaacttgccatttattactaagaaagtagaagttattattttttttcatttcagtcagtttttggggaacaggtggtgttcagttacatgaacaagttatttagtggtgatttgtgagatctggatgcactcatcatccgagcagtgtacatggtacccagtgtgtagtcttttatccctcatccccctcccatcctttccccccgagttcccagagtccactgtatcattcttatgcc

SEQ ID NO: 542100 - DNA, 685 bp, Homo sapiens
aggggatctgtagcatgctcgaaggcctgagagatggaacatacaaacacataaggccaaccgtatattaaaatagaactctgacacacgacctgcagtagcaacctggaaggccaaaaccatgcaccctgcaccaaccagcccaggaagccaaaccacaacctctgtggcaattggctcaaaacagcaagggcttggtcaataactgacagccttcctaatgtytctctccacttcaaatgtgagacgacacaaagaaagtcaaatacgctcccctgaccaagcacgtagggtgcctacttctagtaagtcgccctcagctttcccacaccaacggcctctgctcagcatgtacctgaagccttccttatttccaggatgaagcttttcaactcctctgcctgcttttgagtctctgtcaaatgcaagtgactgtggccaactcctgtgctacagcaagctctgaataaacagctttgctttttctcatcttggcagccttcattgacgtccaaaggttcttttagtaaatgaatatttgctgaccaggtgcgtggttctaggaacaggaattatcactgcgatcttcctggttacaatattttgcatcaacatctgatgggattctttaaacttaggttttattatggcaacaaaaaagatgaaacacaaatgaatttatact

SEQ ID NO: 542101 - DNA, 455 bp, Homo sapiens
tgtgttttacggcaggctgcgggaagcctttaaaaaatatatactaatttggtcccttcctctcctgaaggcaagttattaatggcacaacgtttcattagccaatccacaccagacattagacgtaagctccaaaagctacacatggggccacaaactaaccaaaatcagcttcttggtactgccttcatggtgtataacaatcgtgacctggaggaaggagaagggaaacagagtaaagaaaaacggcaagccaaaattatgttagccatcactggtgatgccctaaatgcacaaagattgtccaagggaaactcaaagggccataaggataatgccagcaaaggctcttgcttcaartgcaataaaagtgcgattgggcacaggaatccactaagcccccgccagtcccctgccgtcaatgtaaaagcaccagttgtggctcctggccctgg

SEQ ID NO: 542102 - DNA, 597 bp, Homo sapiens
ctaattttatgtcattttccttcctaatgagaataaatatgaaaatctaaggaaatggctttgctgttcctctgaaaayatatcttcacactgactcacccaattgattccaattctcactgagggaatgaactctgaaaacatttctactcactgtaactatgaatttcctaaagaacagggaccatagagtaactgctacccaacgaaaacctttaataactgctaaaaaaaaaattacctgctaaaaaaatttaccaggtttcgatgtgaggggaatataatagaatgcaataattattttcatgtatatattgcatagttattttaagagtttattgtttaggaaattcattttagtttgatagaaggtaatcatatatataagtccattaccaacatgtataagcaaattcattttttaagaaaaaatatttacaatactcccaaatttacagatgggaaaatgcagatcaggagagggaagggtttgtacaagtcacactgctaggaaatagcaaagccagacctaggccaggagtggtgaagaaacagaaaccttagatttgtctttgcattgcatcctgctatggatag

SEQ ID NO: 542103 - DNA, 595 bp, Homo sapiens
ggtttccatttgcatggaatattttttctatccttttactttcaatctatrtgtgtccttacagctgaagtgaatctctttgtaggtggcatttagttaggttttcttttttatccatttagctacactgtgtcatttgattggagaatttaatccatttacatttaaaatattgataagtgatgactcactattgtgattttattcattgttttctggcttttttgtagattgtttctttattcctctctctctgtcttcctttgtgatttgatgattttctgcaatagtatgctttactcctttctcttttttgttttgagtatctactatggatttttgcttcataattaccatgagtcttacataaaacatcttatggttataacagtatattttaagctgataactttatcacatacaaaaactcctcacttttactttctcccctacattttatgttttagatgtcatgatttgcatcttcttatattgtgtatatatgcattaattatattgtgtagctgtttttattaattgtattgttattttcttatgtagctatattttaaaatactttgatcttttatcccta

SEQ ID NO: 542104 - DNA, 573 bp, Homo sapiens
gcacaacccatgggacctcactgatgtgatccctgccttctccagcttcaattctgtgctcattacccactccccgactccctcccctgaccctgtgacccttgactctggtcctactgaactgtttacctataaagaacatgttctttaaagactgtacatttgyacacactgttcccttgacctggaatacttttttttagttttatttttctttcttaagtcatcaagactaaatctaagggtcttctgggaagacctactcaagcagaattaattactacacccctcctttccctacctgctccttcatgcactcactataaccaatgtagttggcccttattagcatttgcaggtttaaattccaaatattatcaagcaaatggaacatccattacatataaaaatttggtaattttgtaggactccagtttggattacatctgctgggaggtaggtttctaggaagtggtcaatagttgttgagggaacttagtcaaccatccagcatctgcctctcagtgtgatttgtcctctgtgcttgtggtcatgtgggcagcaatctcatgg

SEQ ID NO: 542105 - DNA, 573 bp, Homo sapiens
gcacaacccatgggacctcactgatgtgatccctgccttctccagcttcaattctgtgctcattacccactccccgactccctcccctgaccctgtgacccttgactctggtcctactgaactgtttacctataaagaacatgttctttaaagactgtacatttgtacayactgttcccttgacctggaatacttttttttagttttatttttctttcttaagtcatcaagactaaatctaagggtcttctgggaagacctactcaagcagaattaattactacacccctcctttccctacctgctccttcatgcactcactataaccaatgtagttggcccttattagcatttgcaggtttaaattccaaatattatcaagcaaatggaacatccattacatataaaaatttggtaattttgtaggactccagtttggattacatctgctgggaggtaggtttctaggaagtggtcaatagttgttgagggaacttagtcaaccatccagcatctgcctctcagtgtgatttgtcctctgtgcttgtggtcatgtgggcagcaatctcatgg

SEQ ID NO: 542106 - DNA, 550 bp, Homo sapiens
cttgctgcaaaggacgtgatttcattctttatggaagagccccacccctacaccccatggtccgctgcgtccgactggtggaagcaggatctgtggtgagatacctcagcacaagcatatgcaggcctgtggtagacgccggaagtagggccctttgtctccaagaatgggcagactctcaacaggtgaaagaaaaacagtactccaggtaggggccaagcagaagcaacaggtcaaagaaaggcctggaagtggaaaagccctgggttcagtttgctaagagcccaggagactagctggatacaaggccggaagaagggtggggctctgatgcaccagcttctccaatcttcctggctccagggaggagatgcatttgaacaatyctgaaaaacttttggatcccaagtctgactcaacattgtgacttgcttactccgtgtcactcttctagatgcttttgaaatatattatcataacaatgagtaagttctatttccattctcagaaaagaaaactgattcaagattgtgtaacttgctgcttctgg

SEQ ID NO: 542107 - DNA, 546 bp, Homo sapiens
aaaaaagaagtatgacgctggacaacaggagtccaatgggactttatttaacatgtttgctcaagttatcagctctttgcaagtgactgacagacaccacctcctttgtaacctcaaagcaggttcacagactatctcctggttcttagggatttcttctgtcgaaaagagttctcaaaaataacagcaacctgagataccatctgttaaatccttaagcaatttcgcatgccttatgagaccctgctgattaaaaacatctagttttgttttcttttttttgagacgaagtctcgctctgtcatccagcctggagtgcaatggcgcgattttggctcactgcarcctccgcctctctggttcgggtgattctcctgcctcagcctcccaagtaactgtgactacaggtgcgtgccaccatgcccggctaattttttgtatttttagtagagacggcgtttcactgtgttagccaggatggtctcgatctcctgacctcgtgatctgcccaccttggcctcccaaagtgctgagattacaggcatg

SEQ ID NO: 542108 - DNA, 628 bp, Homo sapiens
aaattagaataatcacatttttctgagtagttgtaaagattagacattatatatatgtataaaatgtccatatgtataaatatatatgatgtctagaaaatttgttgttacataatagacattccattcattcattcattcattcattcaactgatatttatgttgagccccttctataagtcaggaactggagatgcagaaaaaaaaacacactctcctccggaatggaatmtacattgtggtacaatttctgataaactcagtagccccaaaagatgggatctttctctcttcggtgtcacagagccaatacacaaaaccaaaaggccaaggaacggagaagcaagagcatggctcgcaaatcaacttctcaactaccaaggggtaagggggttaagacagagaatttctctaatgaagagggtggacagtaaaaacgaggggaggaatacctatgtcttttctggaaatggctggtggacctctcagaaccagcatgccaccttcctttttgtccttttacagcttcttctggttattgtcatggtgattgtcaactgtcatgatgctggtaggagtgtcatttagcatggaaatgaaattaaaataaagcatcaggtatttggg

SEQ ID NO: 542109 - DNA, 642 bp, Homo sapiens
ttcattgacagcagatttagtactcaaattgatatctaacttcctcaaattcatgttgttagttaccacatgaccagtatcgtccccattgttatgcacgagaaacctaaacctggagggattaagtgatttattcaagatcacatcattaacatactgcagagccagaaagagaacccagattttccacatcttaccagttgtatttccatatcgcccatccattttctgtcttgaatttcccattcatccacagaaagtagtagtcttgaagttgtgccrtggaattaatggagttaatattcccagttagaggaaaaatttcattatttaacactattataaaataaaaatggtatttccacagtaatcatccgtatttacttatgattttatcctatcattttcaaaacaactttcagggcaacacatattaataatacaataacaatgatgactatatgataatctcaaataatgccacatgtaaaattgaatattaatgaatatttctatgactttgacaacagaaaaaaacgacgtttttggcgtacaaaatgccctaatcattgctctgatattatgaaaaagctagcatacctcccaacgtgccttctagttttttagaaatgattctctcca

SEQ ID NO: 542110 - DNA, 664 bp, Homo sapiens
tatacatatatgtgtatatatgtagtacatatctatagcatatatatgtatcacagctcttggatattaaaatgcatgttttaggggttttctcaaggaagtttcatatatatrctatatgtatatatatgtattacactaggatatacacatacggcacattacatacatatgtatatattacatatgtatgtaatatgtatatattcacacagcgtgccagtttcttcataatatctaatttagtcactcctttcaacaaaacattactgaattcctactgaatagcctatgtgaacatatatgtatatattacatatatgcaatgtgccatatgtatatatcctagtctatatatgtatatatccttgtataatatgtataacatatgtgtatatatgtattacatatatgtgtatatatatttgcatataaggataaagtgatagccaataatattttagggtttgccaattattaagtcttctgactcttttcaattccttatcttggctagaacttattttgataaccatacttctttttttaatttgccttcaagaagcagaatacgtagtgtttaatggcatcccttatgaaggtaaactattgcctaatcagacaaggttttcctttctatatgtttctacaaagctccttcact

SEQ ID NO: 542111 - DNA, 600 bp, Homo sapiens
gttattgctgaagcatatttgaatcttgctccatgccttcttttacttgttccatcagttctagctgccgactcaattctctcctccatgatgtattttgtgtttatcgctaattcaaaatgtatcacattgtatcataatttatggcttatctattctgttaaaaacttaatccattaagtaaagagttttattgactcatctattttcagtgcccaggaagatgcttagcatatagcccaatacatatactgaacgaaataattttaaaaatgaaattacattgttaatttttgtataatgagaaatgattaaattgaataaaagaccaatgtggaaaacacatctaaggattagcaaacgtgagcatgtcaaattattcctaraacatgaaggtatacgtggaaattgcctaattatctaataaaaatataagtcaaataaaaattaaaaagctctttcattgcctttttaaaagtagaaatgcttaggcgaaattctatgccaaaagtcaataataataaaggtagatggccaaattaacatataaacatttaacatttgtatatgtgtacatatatatgtgtgtgtgtgtgtcag

SEQ ID NO: 542112 - DNA, 568 bp, Homo sapiens
tgtttctgaaataaaagcaatatgatggagtgaaatttactaaacagagacaaatgtgttaaaaactgccagtgtcataaatatgttttagggtttatcatttgcagtcttacctcttttttttcacacaatttctctgttattatttttaactcttcacccttatgcaaacatattgtttacaaattatgttctaaacacaggagataatgaagttattttgtttttgtgtgatttttaggggcagtaagtagaactaatgcaggagagacttcaggtaggcctaaactctgaacctggtaggaatatacaatattcaagaaattgtctttgggagacagaccttcagcttagccattttagcagagataatacctaaaagccaagtgctttcatccaagctgytataacaaaataccttctcctgggtagtttataaacaacaggaatctatttctcaccattccggggactcaaaagtctaagagcaaggtgtaggtacatttggtgcctggcaaagaccccccttcttgctgcatctttacgtggtggaaagcaaacaaattcc

SEQ ID NO: 542113 - DNA, 645 bp, Homo sapiens
gtaagctcttataacctagttgtgacatgacttagatttattattctgttacaactctttctatatatagcaaaaccattagttgtggtaggtgttgctcattgccttttttgctataaaatgattaacttgtcaaaagcagtattgtttgaagtagcacaacaattagtaagatattcactcaatctacatttgggcaaaagcattggaagcaaggaaagtaactaatattaacattaattttattttctaacacaaaaaataaaatattgaaaaaggttcaatattatcaacctgccaccatgtagccagtttgttctttcatggagagggagcatactagtggttccgctttggctcctacccttggcagattgggcactcagaaatagtgacaggtgtcatgagaggtcatgaattaatgaacaagyatggtatggctgagaatagaagctgacaatcatatagagaactggataattggttctcttgattatcaaaaccctcccctacagtgggtgaactttgatgagcttccaaatagaacacaaatcatgctcaaaatatccatcttactatcagcataaaaccatcacaagtattcatgtcaacaatccatgaccatgcactaaactattccttatt

SEQ ID NO: 542114 - DNA, 639 bp, Homo sapiens
ctatgacatgctaataggtaaatgtattattgctattaatacaaaagtgacctgaactcttattacatgtgtagctaacatcctgcctatataagaagaatatagcttattatcctgatgacatagaataaatataaaaayaaaaacaattttatagtttgatagatagtggaaagacagtattttgctttggaagtactaagagatatgaaagtcaatagtgccatctttgtaccatttatctttaactatttcttctgtcagatactggtgacagaaaaaatgatcaagatgtctttcttccctcagaaaatctagagtcttattttcatgttccctattttctgtccttctctcccaaacatattttccctgcttgccaatatttcaccttcgtttctggcaacagacacaagcacattcatacagcagcattgtagaatttccttaaagcgaccttgattgtgtcaagcatgtcaatgacaatacttttgtggtagtctctttacatcctaagtaatctaggactagctgtagtcagagataattcatttataagaataagaaaatgcttaggagtcgatgtgttttctctaatgaatagttcaaaaattcatttgttttagaaatagatgtgtt

SEQ ID NO: 542115 - DNA, 639 bp, Homo sapiens
ctatgacatgctaataggtaaatgtattattgctattaatacaaaagtgacctgaactcttattacatgtgtagctaacatcctgcctatataagaagaatatagcttattatcctgatgacatagaataaatataaaaataaaaacaattttatagtttgatagatagtggaaagacagtattttgctttggaagtactaagagatatgaaagtcaatagtgccatctttgtaccatttatctttaactatttcttctgtcagatactggtgacagaaaaaatgatcaagatgtctttcttccctcagaaaatctagagtcttattttcatgttccctattttctgtccttcyctcccaaacatattttccctgcttgccaatatttcaccttcgtttctggcaacagacacaagcacattcatacagcagcattgtagaatttccttaaagcgaccttgattgtgtcaagcatgtcaatgacaatacttttgtggtagtctctttacatcctaagtaatctaggactagctgtagtcagagataattcatttataagaataagaaaatgcttaggagtcgatgtgttttctctaatgaatagttcaaaaattcatttgttttagaaatagatgtgtt

SEQ ID NO: 542116 - DNA, 639 bp, Homo sapiens
ctatgacatgctaataggtaaatgtattattgctattaatacaaaagtgacctgaactcttattacatgtgtagctaacatcctgcctatataagaagaatatagcttattatcctgatgacatagaataaatataaaaataaaaacaattttatagtttgatagatagtggaaagacagtattttgctttggaagtactaagagatatgaaagtcaatagtgccatctttgtaccatttatctttaactatttcttctgtcagatactggtgacagaaaaaatgatcaagatgtctttcttccctcagaaaatctagagtcttattttcatgttccctattttctgtccttctstcccaaacatattttccctgcttgccaatatttcaccttcgtttctggcaacagacacaagcacattcatacagcagcattgtagaatttccttaaagcgaccttgattgtgtcaagcatgtcaatgacaatacttttgtggtagtctctttacatcctaagtaatctaggactagctgtagtcagagataattcatttataagaataagaaaatgcttaggagtcgatgtgttttctctaatgaatagttcaaaaattcatttgttttagaaatagatgtgtt

SEQ ID NO: 542117 - DNA, 539 bp, Homo sapiens
aaggaaattcatttccctctcctgtgaattttggctgaccttgttatgagtttgcctggaagaatggaacagaaacaataatctgcccattttggacctagattttaagagtcctggatgctcctttaaaaaaaaaaaatcaaagatggtgtattagtccattcacactgctaataaagacatacctgagactgggtaatttatcaaggaaaggggtttaattgactgacagttcaccatggctggggaggcctcaggaaacttacaatcatggcagaaagggaagcaaacacatccttcttcacacggcagcagcaaagacagcaaaaggggaaagcccgttataacaccatcagatcttgtgagaactcattaactatcattagaaaagtctggggtaaactgmccccatgatccaattatctccacctggtcccactcttgactgatgggaattcttacaattcaagatgaaatttgggtggggaggcagagccaaaccatatcagatgggatttctctgagaagagtattctgat

SEQ ID NO: 542118 - DNA, 626 bp, Homo sapiens
agccagtttctacatgtttcacctcgacttaacattcagacattgttcagatcccctgaagttacttatgttctgaatatttactaaagtgctggactggatattatgtttttaaagaagaaaaatgatgtagattattataaaagaaggaagcttctttctctaaagatcaagttttaaaaatttaggagtggtggaagtttctaacatatttccgtagtgatataccactaggataaaaccattattataatattcaaccagcacctttagatatatcattttacttatgaaccttagtgaatcaatacttgtttttcacaaaagaggtacttaaaccttaatcaatacaaaatctgatatttatatttgtttatccagcaaagtattgtggtagaatattttccttaaaatggaacatggaatccaatactccaatcatatgtggaaaaatgaggctatgtgtatgtgtatatatatatatatatatatatatgtatatatatatgtatatatawacaagcatatgtatatatacacacatatatgtatatataattttgttatgcaaagaaaaaagaataattctttttatgaatatttatgtaatgtaaaacccaaagact

SEQ ID NO: 542119 - DNA, 536 bp, Homo sapiens
gaaatatgattagggatgattgatgaacaaaactctgaaattagggagagaagggaaaactacaaatcaagagagtgacgctagagaccctctgagtagcagtttatgatttgtgtatgtgtgttttttccttgcactactacagtttaacacwggctttcaaatcgtagctatttcaaaattccctctagttaaccctaagctttcagtatttacatttgcaagatttatgttaatagaattctgtggaattaaccaagcaggttgttaaccaacagtttgaatttcttcgcatcactcttaccctgaaactaatgcccatgggagaaacatcatgtcatgtggacttgagtcccagagtcacacaaagaggtagataaaaatgcaaagaatgtccaagcagatctgagagcaaaaggaagagggacatggcagaagcagtcacaatattgacaactctgtagtatacctgaggcaaactagcccattaggatgaaatacttgtataaggaaaatatcactttgaagacaagaca

SEQ ID NO: 542120 - DNA, 597 bp, Homo sapiens
cactacccacattgcaatttyatatttcactatggaagaaaaaatgtccacctattacttccacaagccccacagtaaagcatttagaaaaagagagttctccagtgcagtgttacttatttaccattgatctaaacaataggcaaagtgaactatcgttaatcatatttatttcccttctttgaaggaagatctcattattacaagtcaactaacaataagggtttattactagagagtcaaagtttttaacatgcaatagtaaattttgtagatctatatagtaatttcaggtaataagtaataagacagatataattttacaaatcagtaaatcaaaaatacagagcccatgcaaactgggctacaaaaatcctgatcgctactattatatatgtaataaactcaaacagtaaatgacatgagcattaatgcatcatctgattccagaattcctaagttcattagcctttttaaaataaaatttgacccttatgtaatattaatgataacctgctacatgcatattttaaaatacattttaatgttggtgtcactgtttcaactgtaaagacagggcacattttaaaaacctat

SEQ ID NO: 542121 - DNA, 460 bp, Homo sapiens
caatgtaaagttttatgagcaggggatgctgaaaatactttgcagaaagaaagagcttttcttcttggtctaaggtgctcctcrtggcagtatctcacagtacatagggtatccccagtgtccagctctgcagtgcagacgacttctctagtactgagtcatgctgcacacacttctccagaaaacagctcctgcaatggatagaagccagcagcccaaagcctacaggataagccaaaagcatccacaggttgttttgtagaggacttactccagtgggtcaccttcgagtgaatggctttacttgacactctagagggcagtttctggcaagttctacatgtgtgatgcctcagctacttctctgccattcaacaactgtgccctccctaacaaggtctgactttgtcaggagagatcttgatagggagggtctctctaacaaggagagaatggggac

SEQ ID NO: 542122 - DNA, 460 bp, Homo sapiens
caatgtaaagttttatgagcaggggatgctgaaaatactttgcagaaagaaagagcttttcttcttggtctaaggtgctcctcatggcagtatctcacagtacatagggtatccccagtgtccagctctgcagtgcagaygacttctctagtactgagtcatgctgcacacacttctccagaaaacagctcctgcaatggatagaagccagcagcccaaagcctacaggataagccaaaagcatccacaggttgttttgtagaggacttactccagtgggtcaccttcgagtgaatggctttacttgacactctagagggcagtttctggcaagttctacatgtgtgatgcctcagctacttctctgccattcaacaactgtgccctccctaacaaggtctgactttgtcaggagagatcttgatagggagggtctctctaacaaggagagaatggggac

SEQ ID NO: 542123 - DNA, 423 bp, Homo sapiens
tggtgtttagataaaatatacaaaatataaatgctaatgagatgcccaatatgtgatgatgaatcgcaaaaagcaatataatgtgacaaatatttattaaatagctaattctgtcaatataaatatttctgaggagagtattcttttcaccttcagaaagccgtataataccaacaatttatgaggggtgaaaccaatcaatggtaaaatactttcggatttttaaaawctaatttagtaattggcaatatattcaggaacattattaagttggtttttttgcatcacaaagattgaattctgctatttctgttgatagaacatgtactaaatgataacactgattaataagggtaagttaggtaatttttagaagtgcggttccaggaagaaaacttcctaaatgatggaagaaaaaaataa

SEQ ID NO: 542124 - DNA, 423 bp, Homo sapiens
tggtgtttagataaaatatacaaaatataaatgctaatgagatgcccaatatgtgatgatgaatcgcaaaaagcaatataatgtgacaaatatttattaaatagctaattctgtcaatataaatatttctgaggagagtattcttttcaccttcagaaagccgtataataccaacaatttatgaggggtgaaaccaatcaatggtaaaatactttcggatttttaaaaactaatttagtaattggcaatatattcaggaacattattaagttggtttttttgcatcacaaagattgarttctgctatttctgttgatagaacatgtactaaatgataacactgattaataagggtaagttaggtaatttttagaagtgcggttccaggaagaaaacttcctaaatgatggaagaaaaaaataa

SEQ ID NO: 542125 - DNA, 423 bp, Homo sapiens
tggtgtttagataaaatatacaaaatataaatgctaatgagatgcccaatatgtgatgatgaatcgcaaaaagcaatataatgtgacaaatatttattaaatagctaattctgtcaatataaatatttctgaggagagtattcttttcaccttcagaaagccgtataataccaacaatttatgaggggtgaaaccaatcaatggtaaaatactttcggatttttaaaaactaatttagtaattggcaatatattcaggaacattattaagttggtttttttgcatcacaaagattgaattctgctatttctgttgatagaacatgtactaaatgataacactgatwaataagggtaagttaggtaatttttagaagtgcggttccaggaagaaaacttcctaaatgatggaagaaaaaaataa

SEQ ID NO: 542126 - DNA, 624 bp, Homo sapiens
gtgaatagacaacacaatagttaagtaatgagccaatggaaaaatgaatgaatgaaactgacaagcaaagacttgaatgaattcatattagatattatggttttatgcttgatacattatagaattcaaataaaaatggaaaatatctctaggatatcaattattcagttatgccaaagttattcagctgctttaaatcattataaycttctcacttctacagtgttatacaaaggagagaattcaaatagaggaaaaagacacatggaaaaaagtattcattttaacactatacatttgatccccaatatttttggggggtgggggggacggagtctcactccgttgcccaggctggagtgcagtggcactatctcggctcactgcaacctctgcctcccaggttcaagccattctcctgcctcagcctcctgagtagctgagactgcaggatcgtgccaccacacccggctgattttttgtatttttagtagagacggtgtttcaccatgttagccaggatggtctcgatctcctgacctcatgatccacccgcctcggcctcccaaagtgctgggattatgggcgtgagccactgtgcctggccatgttcccaaatttgaa

SEQ ID NO: 542127 - DNA, 588 bp, Homo sapiens
gattgcatatgtttccagagaatttaaaacaataactgtggatgacaataaaacagaacaaccatagtaaaaaaatctaataaaaatttacaattgacaggaaaatttaggtatatctgtggatacaaacatttttaatcataatcataataattgaatataataatcataatctgataacatcacaamatattcaaaattttagaaatgtcatacagttttggagtgcaatggcacgatctcagctcaccacaacctctgcctcctgggttcaagcgattcctctgcctcagcctcctgagtagctgggattagacatgcgccaccacatctggctaattttgtatttttagtggagatggggtttctccatgttgttcaggctggtctcaaactcctgaccttaggtgatccgcccaccttggcctcccaaagtgctggggttacaatatttttaatgtgaaatctcaatatttacaggctgttataatttctattaattattgccaactaagtcatacagcaaatttctttcacaaattctctttcacaatccttatcatgacttacacagatcatttatggcgt

SEQ ID NO: 542128 - DNA, 586 bp, Homo sapiens
ggattctgggagtggttggatgttggctcattcatctctgccacatgctcatgtgtatatagtcatctatatgtttgtcttggctctgctgtgagcacattacctctctgggtactgaatctacttcctttaatctcaaaaaacattgaccaaaaactgaaaatggacatatatatagctcctgtccctgagtccgttccacatacttaagcttctttcattcttctgctcagaaatcttcagttgcttgttatrtttaactgtaccattgctggactttccaggccttttataatctgattttaacatgtctggccattctgctccctttgcttcctaacactcgccttctttgtcccactggaacctgtgtctctcaatcacggcttgcttctcccagctctggtgccttcacctccagttgtccctgttattcctcttttaaaaatcctactctttctttaacgtggctcaagtctcacctttcccttttttgactcctggagtccttattggtctacatgtctctgaactcctgtgatacttaatattttagaatctataagatgctctaaactgaagataa

SEQ ID NO: 542129 - DNA, 640 bp, Homo sapiens
aataagactatacttagtaatatatttctcttttgtattatgtctctttctgatctccccccatgaagtttgggcttcattgacagggaatctaatgacctttgttttaatttcctctagctctctgcatactgtccacagtaattactcaaataaatattaagacattacttttctttttaatttgcatgtgcttgcatatgctactacctgcttgttcatcttgaaaactacttacccttcaagacaratcaaagttaccacctccatgaagccttccataacttccataccccaggttaaagttgcagcagattcaatgattattcctaactcttcatttcctccctgtaacagaactatactatcatgttcccaccagagtaagcaaagaattcatccctatcctcctaatgttgggcttggcctgtgactcgctttggccaatggaatgttagcaaatgtgatgcaagcataggctgtaaatgtgcttttgtggtttgatctggcttcttgtattcctgccacatgccatgagaagagcttgtcccagttattcattgcctcttcatcctgggttccagaaagagataaaaggacagacctgaacctgacctccctgaagcaggtatccctgctg

SEQ ID NO: 542130 - DNA, 640 bp, Homo sapiens
aataagactatacttagtaatatatttctcttttgtattatgtctctttctgatctccccccatgaagtttgggcttcattgacagggaatctaatgacctttgttttaatttcctctagctctctgcatactgtccacagtaattactcaaataaatattaagacattacttttctttttaatttgcatgtgcttgcatatgctactacctgcttgttcatcttgaaaactacttacccttcaagacagatcaaagttaccacctccatgaagccttccataacttccataccccargttaaagttgcagcagattcaatgattattcctaactcttcatttcctccctgtaacagaactatactatcatgttcccaccagagtaagcaaagaattcatccctatcctcctaatgttgggcttggcctgtgactcgctttggccaatggaatgttagcaaatgtgatgcaagcataggctgtaaatgtgcttttgtggtttgatctggcttcttgtattcctgccacatgccatgagaagagcttgtcccagttattcattgcctcttcatcctgggttccagaaagagataaaaggacagacctgaacctgacctccctgaagcaggtatccctgctg

SEQ ID NO: 542131 - DNA, 384 bp, Homo sapiens
agcaaatacctgtgctcagttccacaayagggtcacatctgtcccctgcagaatctgaccggtagagccacgtctcctccacacccttggctcctggccacacattattaatagttcaagtgcagatgcaggtgactgtcttcacattgaggcacctctagtaaccaaggctaatctccccagtggctttccccaaggaacccaggtaatgtcgggttttccctccagcatagataaagcaggcaactatccggaaaacataaacacagggctagaaacacagaaacacacatctgtgtgtacctgggtctgatcctgactgcttagggagaagggccacctagcttcttgccatttcccatagatgatagttttgtagtctga

SEQ ID NO: 542132 - DNA, 531 bp, Homo sapiens
aggacctgtcatagaaaatgaagaactgacagatcagacaatagagactcaaacagatggccaagtgcatgggctgaaagagagtccaaactaccttctgaggtttcttatgcctgtctggaaaatatccccccatgaatacatcctctgggaatcagaggatgccccacctttctctgttctgctttgggacacaggctctggaacgctacaaattgcatttctcttttgccagttagctcctgcttggctctgcatctagcgggagctagagggagatgagaaagctgaaggagatgagaaaggatttgttgctccctatttgcctggtgcttctgccagtgtcgtgcctggagagaagctctgtccagtaattgcttccaactgacagcttcrttggctctcccaataccagcctcactgcacgccccccaagaggtcacagcaccagccaggcagtgcccccttcttggacatctgagtccccactccacagagccccttcccaagctcctaagatattagcagcag

SEQ ID NO: 542133 - DNA, 531 bp, Homo sapiens
aggacctgtcatagaaaatgaagaactgacagatcagacaatagagactcaaacagatggccaagtgcatgggctgaaagagagtccaaactaccttctgaggtttcttatgcctgtctggaaaatatccccccatgaatacatcctctgggaatcagaggatgccccacctttctctgttctgctttgggacacaggctctggaacgctacaaattgcatttctcttttgccagttagctcctgcttggctctgcatctagcgggagctagagggagatgagaaagctgaaggagatgagaaaggatttgttgctccctatttgcctggtgcttctgccagtgtcgtgcctggagagaagctctgtccagtaattgcttccaactgacagcttcattggctctcccartaccagcctcactgcacgccccccaagaggtcacagcaccagccaggcagtgcccccttcttggacatctgagtccccactccacagagccccttcccaagctcctaagatattagcagcag

SEQ ID NO: 542134 - DNA, 511 bp, Homo sapiens
tgtgaaaagcccagagcctcgggccagggtctgtccccagaggacctggcctctctccttccccttagaaaggctcctaccttagtgacaaggccttgaatgggcagagggtagactggtgttcaagactctcctcccsgcaacctagccaccctcgcctcttctccgaagtggcaggccagcagcatgggcggggatgcctgtccccaggggcagggacccaggagctggcattgactgacagctccaacctacaaaggggtttgtttgatgggaaaccaacgcttgggctccccatggctgtcaagccactccccaactctccactcatttaaactaaaaacccaagtatatttattccctagtagacctgatacactccagtactcctgccaacttgctttgcaacattgtacacagcagatcaatgtgtgcaatttagaacagagaaatgaagacttcagtgaagaggaggggtgggatgggggctggcaaaggggggccttggctc

SEQ ID NO: 542135 - DNA, 511 bp, Homo sapiens
tgtgaaaagcccagagcctcgggccagggtctgtccccagaggacctggcctctctccttccccttagaaaggctcctaccttagtgacaaggccttgaatgggcagagggtagactggtgttcaagactctcctcccggcaacctagccaccctcgcctcttctccgaagtggcaggccagcagcatgggcggggatgcctgtccccaggggcagggacccaggagctggcattgactgacagctccaacctacaaaggggtttgtttgatgggaaaccaacgcttgggctccccatggctgtcaagccactccccaactctccactcatttaaactaaaaacccaagtatatttattccctagtagacctgatacactccagtactcctgccaacttgctttgcaacatygtacacagcagatcaatgtgtgcaatttagaacagagaaatgaagacttcagtgaagaggaggggtgggatgggggctggcaaaggggggccttggctc

SEQ ID NO: 542136 - DNA, 470 bp, Homo sapiens
ttttgtgccttcaacagcttggaatgcaaatagatcattgaagttcttgcatctttattaaaacatgagtgggactggagctggaaatttgcactgaggatggagagggagaaagttaggatcctgacccatggagctctctgcctggccctgcaagttgtatctctagacgtttacataagagcaacatccatgtctattgtgttcaactcactgctttctgtttagttttgttttcttgtggtgtgattgagtggggcagagaatagtacagwactactgaatatagtaaaattcaagtcatggactacagttaggatatttcataatttcttattctatagcatttttaaccaaagaggaatctgactgacttcctcaatttttgtttttaaaattccagaaaagttcttagactggcctagctcagatgcagtactatccctggaccaaacagctgtagtcctgga

SEQ ID NO: 542137 - DNA, 539 bp, Homo sapiens
ggagggggtgagggccacgatggatacaggctgggcactctgagcccttttgacaagcaggagaaatgatgggtcaaggaatttgacctccctgctccccagtcctctccataggagagaaagcatgcacttcggaatttgaatcccggcttaacaagcttggtatctgactgaccttaggcaagctgttgggcctcagtttcctcatttataaatcaggtcttataaaatgattaaatgatctttcacaagactgttaaaaggattacatggaatactgcattataaaacacttagctcagggccctggcayatattaagaatgtaatagatggtaattcatttattcattattattatcatgattatttcatggatccaccaccagtcctgctgccatagatcagatcttagggggtgtcaagtttgggagcctagggaaggggtggggtttcaggccactgcaagcgacaatgaggtctatagaagtgaggggaggggagaccagggagagagcagatgaaagaaaatttgaagca

SEQ ID NO: 542138 - DNA, 622 bp, Homo sapiens
actcccagaggcctcctcaaaccctggctgagggccttctartctcacctctgtgttctcctttgcaggcagctacaggatcgggatggagcagcaaaagaactaggaaagccagagtgagaacagccacaccccttctctctaggtccagtttccattttaattcaatgtgatggatatttatagagtgtctaacacaggagggctcagaaccaagtgtgtgtgcgtgtgagtgtgtgtgggagagggcgtgtgtgtgccttgggaggttctgtgatgggatagatggagactcatcttttttggcttatatctcatatcttaaaaaatgaaattcagaactgctttgaatgttctacagaacacatcgcaccccgtcaatactgatcaatggatgaactgagttttttaatttcagggttttctcacaagttgggtccccagggcccagagggaacactaccccctcagctctcagcccctccaatctccacactaatccatggctttgcctcttgtggctctcgggctgagagctggaggtaatcatgataagtctgcaattaacacagtctccctcctcctctaaccttaacaaagacagagacagccagcacagggg

SEQ ID NO: 542139 - DNA, 591 bp, Homo sapiens
ggccaggcttcaagcccctgtctgtctgactccagagcccaaatcgtgaccacccactgtactaggacaggtgacagaggaggattaggatcatgtgggatgcttaygtcacaggatggggaaggccacccaccaagtgcatatgatagatgaggcagcttgttgatgtccctgccacctaaggaccctgtgaagtctgcagggggaaaaatgaaaatccactggccaagggccagcacagggagccctagagctgacaagggcaggacactggccccctagaaagggtggcactagacatacccaacaacagggttggcgggtggccaaccccagcacaggctgacagtgttttggcagaggccagcaagacttcggaggctggggcagggtccgcgagcagcgggggaagttaagtggaacctttctgggtaattgactctctctgcccataggaccccctgccaagcccaggcaggcccagcctgacatgctgcaacctgtctgaagtctgttctgcagcggcagagcgcctggttgacagcaggctgataattttgttataagactcaccctttcagttgcaagctc

SEQ ID NO: 542140 - DNA, 692 bp, Homo sapiens
ctgggccaggcttcaagcccctgtctgtctgactccagagcccaaatcgtgaccacccactgtactaggacaggtgacagaggaggattaggatcatgtgggatgcttacgtcacaggatggggaaggccacccrccaagtgcatatgatagatgaggcagcttgttgatgtccctgccacctaaggaccctgtgaagtctgcagggggaaaaatgaaaatccactggccaagggccagcacagggagccctagagctgacaagggcaggacactggccccctagaaagggtggcactagacatacccaacaacagggttggcgggtggccaaccccagcacaggctgacagtgttttggcagaggccagcaagacttcggaggctggggcagggtccgcgagcagcgggggaagttaagtggaacctttctgggtaattgactctctctgcccataggaccccctgccaagcccaggcaggcccagcctgacatgctgcaacctgtctgaagtctgttctgcagcggcagagcgcctggttgacagcaggctgataattttgttataagactcaccctttcagttgcaagctccttttgtctgaatccctgatgtggaactcagggaaccatctgaacgtatgccagtggtggcagcagcagccacagtgtaaccaacaggcagtatgggg

SEQ ID NO: 542141 - DNA, 644 bp, Homo sapiens
gattccaggtgagaccaaagcaagcctagagactcccaggagggggactgggaggcttttgtggagccatggctctgaactgaggagtgaggaagagagaagtgaattggcctaagatggtctctgcctatctgcctatctgcacagctaatcagctcccagcatcctttccctgtacacacagcccacttaagagaagttaatgaaaagtaaacaaactgattcttcctatcaactaccccttgatagaaggtcccttgggctgaagaggtcaatcctcagaaaagcaggatgtctgaggccacagcaggcacagagctatagcttaaggctatctcttgataagagcttcttcaacaaaggctgcaggctgtagggaagctccttcccctaagactcaagccctccatttacccatcaracaccatccctgtgatacagacgccaagaacagaaagacaatctgacttatccttctaggagtctatagtcttatgggaaaaatagaaacatgaccgctagacttgaagaatattagacatctccaagttcaacaccctgaaattacagaggggaggaaacagaggtctggagagtgaaatgacttgagtaaggtttcccagcttccagggtccgatctgcac

SEQ ID NO: 542142 - DNA, 495 bp, Homo sapiens
tattagacatctccaagttcaacaccctgaaattacagaggggaggaaacagaggtctggagagtgaaatgacttgagtaaggtttcccagcttccagggtccgatctgcacctggtggcctgactcccactccaatgttcttcccaccacgaggcagaatgaagcaggtgtcagcctctgtctccgagcctcgccagagagcctatctcctttgcctttgcctagccctggccaccttcctcacctgcttctttcttccaatttcaaatgcatgattaacagccactcctcaatccctcctgctcaaccagaggtttggggtttcatttccacccagcagaggaattgataacatttaagttattcaagttaaaaagaaacgtcctcctcaaaaccatctgttctcggggaggagagccttgaccaggagagacgtagagaaagtggggacaggaacagagsgggtacaggtggggaagaaggttgatgaacca

SEQ ID NO: 542143 - DNA, 651 bp, Homo sapiens
ttgtcaagttcctactgcagggccaggtgctttatgctaattttatttagtttattctttacaacaactctgagacatagatattattgttcccattttacagatgagcatatgagagaccayaggtttgttgaggaccaaaagacagatacatggaggagcctggacaaaagtgcagttctacccggaagcaaagctgtgctcttcatactactttgtaggaagaagagaacacaataaggagaaaatactcatggggtgaggaagaggtgttgagaaaggaagatgaaggcacaaggtgggaagttggggaggcgaaaaagcagaagctggaaaattgtgcacatctgacattaagtgaatatatgcaaatgagatgcaaataccacatgcaaatgagtaagaggttttttgggttttttttttttagccaacctctcaactccacttggcacaactgcagcacaaggctaaactgcccaaagctagcagtatccatgtgcagaaattgggctagagatgcccctttctcactcttgccgtggtctccttcctccatcctgctactcacgtcctttcccccgctcctgctcccatcccaagactgaggtcaatcacatcagcatccctccctccagacactccagaaga

SEQ ID NO: 542144 - DNA, 483 bp, Homo sapiens
aaaagtgcagttctacccggaagcaaagctgtgctcttcatactactttgtaggaagaagagaacacaataaggagaaaatactcatggggtgaggaagaggtgttgagaaaggaagatgaaggcacaaggtgggaagttggggaggcgaaaaagcagaagctggaaarttgtgcacatctgacattaagtgaatatatgcaaatgagatgcaaataccacatgcaaatgagtaagaggttttttgggttttttttttttagccaacctctcaactccacttggcacaactgcagcacaaggctaaactgcccaaagctagcagtatccatgtgcagaaattgggctagagatgcccctttctcactcttgccgtggtctccttcctccatcctgctactcacgtcctttcccccgctcctgctcccatcccaagactgaggtcaatcacatcagcatccctccctccagacactccagaaga

SEQ ID NO: 542145 - DNA, 310 bp, Homo sapiens
aatatcgtagttgataattaggagttacattctgtgtttcatatatttaaattgtatatatttcttaagtgagatgtttatgtattctaataattcacttttttgtgtgtaagcacctgttggaaataaaataatactagataattaggcaatatccagaattgcagaaatgtttacagtggcaagtaagtctccattttcagttcaccwgtctccctcagaactgccactctgagaatccactgcatagctgggtgaaacttactagatattgtggagaaaatgaagtctgtggtgtagcccttacagc

SEQ ID NO: 542146 - DNA, 310 bp, Homo sapiens
aatatcgtagttgataattaggagttacattctgtgtttcatatatttaaattgtatatatttcttaagtgagatgtttatgtattctaataattcacttttttgtgtgtaagcacctgttggaaataaaataatactagataattaggcaatatccagaattgcagaaatgtttacagtggcaagtaagtctccattttcagttcaccagtctccctcagaactgccactctgagaatccactgcatagctgggtgaaacttactagatattgtgragaaaatgaagtctgtggtgtagcccttacagc

SEQ ID NO: 542147 - DNA, 626 bp, Homo sapiens
ggctgggcatgctggtgggaacaggtagtcctggtgcttataataaggacatggagaattatacgtgaaaggtatatgtaggtactcagtaaaatttgctgatgtataaattattgggaataaaactgatcagtttccgtggagagctctttttgatctttaattttattttcacaccaatcaaaaaatattttacgttttttttgtgtgtgtcagggccctgattactgggacatagagtaaaacatgttgaagccctttggagctgaatatttaggacggtgagttatacctctcctggtttaataatctgtatgaaattagagcaaattctcatgatgcccagattctggaaagtatcttgagggctgggagaatactgcttcctgatayctccatccccatcaaagttcaaaagcacaagtcaaaaatatccttcttagaacctttgggatggttgtttcagtgactttggaaagtaacattctctctctctctcttctctctctctctttctctcacattactgtttcttaaattacattggtgttacttgcttcaaggaaagtttattcaaataattgacatctggctggagccacactatggccttttctttggaatga

SEQ ID NO: 542148 - DNA, 577 bp, Homo sapiens
cccatgcttgaggtgtgagctcccttttgggcagctcctgactacaccagcaatgttaattaagtttcttaatcaaatcctcagctctaayggtgtgcttttgctctgtgtgctttgtctagttaaaatacttctaaaagcaaatacctgatttctaaatgaaacatacaaaacaattgacctcagccagagcaaaaatgcttttcaaaatctttgtatcacactttaatgaaggagaatttgttcctacaaacatattaccctttctgaggaccaaacccatgcccggaagctcatttcaatgcaaaaatgatttctggaagcattcaaaatgccaaagcatggtatctcattcctgaccgagacaggacaatttggggttgggggaacaggttccagaataatgactaaatgggcacaaattccagttcaaccacttattacttacagggctttgaagtgcgattaaacttcttggtgcatcaatattctctgtacggatgcacagagggaatcatgatactaccttataaaggcctggtgaaaattggcataattcatataagatgtttgttcc

SEQ ID NO: 542149 - DNA, 577 bp, Homo sapiens
cccatgcttgaggtgtgagctcccttttgggcagctcctgactacaccagcaatgttaattaagtttcttaatcaaatcctcagctctaacggtgtgcttttgctctgtgtgctttgtctagttaaaatacttctaaaagcaaatacctgatttctaaatgaaacatacaaaacaattgacctcagccagagcaaaamtgcttttcaaaatctttgtatcacactttaatgaaggagaatttgttcctacaaacatattaccctttctgaggaccaaacccatgcccggaagctcatttcaatgcaaaaatgatttctggaagcattcaaaatgccaaagcatggtatctcattcctgaccgagacaggacaatttggggttgggggaacaggttccagaataatgactaaatgggcacaaattccagttcaaccacttattacttacagggctttgaagtgcgattaaacttcttggtgcatcaatattctctgtacggatgcacagagggaatcatgatactaccttataaaggcctggtgaaaattggcataattcatataagatgtttgttcc

SEQ ID NO: 542150 - DNA, 577 bp, Homo sapiens
cccatgcttgaggtgtgagctcccttttgggcagctcctgactacaccagcaatgttaattaagtttcttaatcaaatcctcagctctaacggtgtgcttttgctctgtgtgctttgtctagttaaaatacttctaaaagcaaatacctgatttctaaatgaaacatacaaaacaattgacctcagccagagcaaaaatgcttttcaaaatctttgtatcacactttaatgaaggagaatttgttcctacaaacatattaccctttctgaggaccaaacccatgcccggaagctcatttcaatgcaaaaatgatttctggaagcattcaaaatgccaaagcatggtatctcattcctgaccgagacaggacaatttggggttgggggaacaggttccagaataatgactaaatgggcacaaattccagttcaaccacttattacttacagggctttgaagtgcgattaaacttcttggtgcatcaatattctctgtacggatgcacagagggaatmatgatactaccttataaaggcctggtgaaaattggcataattcatataagatgtttgttcc

SEQ ID NO: 542151 - DNA, 515 bp, Homo sapiens
cccagagtcatagagtggatcctatttcttctaatggcatccctagtccctaaatacctaactaggtgaaggtttaattttgaaacacactggttctccaatgaaacaaatgcatgtaggtctgggggttgtttctcttacttatagatggctcagactatgacaagggcttcattcacccagtagttaagggaggaaagaactggagactaaagactgaaggcagacaggatactagagggctggaccagggtcctagcccrtacatgatgcacactggggttcccacccagctcactctaggactcaatttccgcttctctagtaggtctaaattatttaaatcatcaattttcaaacatgtctaaacttgaaaaaattttaacaaaatattgtaatgaagccaataataataataataaaagcaataaatattgcaagtattaatacaacagatggatacctcagtgtgacagtttcaggagtgaagggcgtttccccatagctgctagcag

SEQ ID NO: 542152 - DNA, 594 bp, Homo sapiens
cagttttttcaccaatatgaagacaataagagtgtcaatctctgtatgaaaatagaagtattcagtgaaacatatgcaagtttcctagattagagtttgacacactgtaggttcttaagtcatgtttattcttttagacactggacttttaggtgatatgatgagaattcacagggcagaggtctccatgacagtatatctgagcccagatagccaaccgttgcacagagtacagctcaaaataaccttcggatgctcttggaagctcagatgctagtgtcaactctccaacaaacaagatatgtgaccttaggtaattctctttattcctttgaaattttagtttactcatttaggaaaaaaatgagagttgggatgaaatggtttccaaagctctctctctctctttctctctctctaacayatacatattctttgtgtgtaactcatcaagatttcaaatcctaacaaacagttaatatatttttatttttaggaatggtaactccaatttaattgatataaataataaggaattttattacttcccataacaagaaaactgaatagaggattttagagttgagttgttca

SEQ ID NO: 542153 - DNA, 650 bp, Homo sapiens
gctgcaggtctgttggagtttgctggaagtccactccagaccctgtttgcctgggtatcaccagcagaggctggagaacagcaactattgcagaacagcaaatttttttttctaagttaatatatttgttatataaacataataaatataaattaatacaggtgtaattttaatgtaaacctaataattctattggttgtttttgttttcaaatctgatttttaaaatttgattatcattttattttgtattgaatttatttagacattttatacattttakattctatatctgataattgaaaatcttaagttcttgagagtctaacttgactattttatttgaattggctattttttttagccaaccattcatgttgttttgtgtccttgcatacataacaattgatgagtagtagctcaaaatttggcatcctaagagctcaaattttgaacagtttactctagagacagttatttgcatcaaacaagagctgcggaatgctatttggacttactttggtttatatattattgtatgcagaactaatacaaaagtattatgaccccattcccctctcttagagagacaaaaagaactacttttttcctttggtgtgaatattgacgtttactcataagtcaattttt

SEQ ID NO: 542154 - DNA, 650 bp, Homo sapiens
gctgcaggtctgttggagtttgctggaagtccactccagaccctgtttgcctgggtatcaccagcagaggctggagaacagcaactattgcagaacagcaaatttttttttctaagttaatatatttgttatataaacataataaatataaattaatacaggtgtaattttaatgtaaacctaataattctattggttgtttttgttttcaaatctgatttttaaaatttgattatcattttattttgtattgaatttatttagacattttatacattttatattctatatctgataattgaaaatcttaagttcttgagagtctaacttgactattttatttgaattggctattttttttagccaaccattcatgttgttttgtgtccttgcatacataacaattgatgagtagtarctcaaaatttggcatcctaagagctcaaattttgaacagtttactctagagacagttatttgcatcaaacaagagctgcggaatgctatttggacttactttggtttatatattattgtatgcagaactaatacaaaagtattatgaccccattcccctctcttagagagacaaaaagaactacttttttcctttggtgtgaatattgacgtttactcataagtcaattttt

SEQ ID NO: 542155 - DNA, 579 bp, Homo sapiens
gaaatattgagaaactagtgaaataattcttaaataattaagaatatcagtaaaacaaaacatactaggaaggaaactcccactgttagataaatgagataaaattagggtatttatcttcataggagaaaaatgtgtgcttaagtgctaatatgatttgtctcaccaagagccatttgaagattcttcttagaaaatgttttcacagaacattttactattccaggaaatcagaatatttcaccccaaaatatacttctttgacatagtttgagatggcttctcagacagccagctaacacaaatggccctgcaaagctgtcttttatggggaagatttgcatctgtagagaatcttcattgatgcagccaggttttctctgaggctgtgctttgtccagatctaggaaagattaactgacactctgacaccctaaaggtctaaaagaarcatttaccattcattctctctgagggctcctacctatgggatttcacctacatataaggccactttcataggtaggcctcaccttctccccctttcataacctgtcttgccactaaaacatgatttac

SEQ ID NO: 542156 - DNA, 640 bp, Homo sapiens
ctgctgcaccatcagaatccagtcccgtgtcgatcaatgtctcactgtcttcagtctgctcctggccaatgaccgagcatggcagaagtcctcgagttggtcatttctgatcaatgctgggcttttctaatgtactatattcttcggttccctagtggcatagaaaggactttcttagagctgcactatattttgaggctcttcttatccgattcttctttattcccttttccctctcacataagtcagacatcacagtgtgaggctctccccacttaactcctgtcacctctctcctttatgattaacaagataaagttgaactttttttgcgttttatttttagagacagggtctcatcctatcacccagggtagagggcagtggcacaatcattgcttaccacagcctcaaactcctaggctcaggggatcttcctgggtmagcttcctatgcagctgggactataagcatgaactaccacacccagcttaaagttacgctttacaatttatattggtgtctacttcatggagggtccaaactgacatacgctgcaatacaaaatttgttgggaatcatctccaatcctctcacttcactcctccctgaatccattcttcaaagatgcaaggagttc

SEQ ID NO: 542157 - DNA, 640 bp, Homo sapiens
ctgctgcaccatcagaatccagtcccgtgtcgatcaatgtctcactgtcttcagtctgctcctggccaatgaccgagcatggcagaagtcctcgagttggtcatttctgatcaatgctgggcttttctaatgtactatattcttcggttccctagtggcatagaaaggactttcttagagctgcactatattttgaggctcttcttatccgattcttctttattcccttttccctctcacataagtcagacatcacagtgtgaggctctccccacttaactcctgtcacctctctcctttatgattaacaagataaagttgaactttttttgcgttttatttttagagacagggtctcatcctatcacccagggtagagggcagtggcacaatcattgcttaccacagcctcaaactcctaggctcaggggatcttcctgggtcagcttcctatgyagctgggactataagcatgaactaccacacccagcttaaagttacgctttacaatttatattggtgtctacttcatggagggtccaaactgacatacgctgcaatacaaaatttgttgggaatcatctccaatcctctcacttcactcctccctgaatccattcttcaaagatgcaaggagttc

SEQ ID NO: 542158 - DNA, 610 bp, Homo sapiens
gctggcttgtttttgtagccttcctagctttctcagaggcagagtagaaaatatctccccactgtatgccaattagttatattgtattgaaacatattttcataaatgggtctctggacttttttgagctttctaagtcagctattgtatcttggcattttcagcacatagcatagmgtgcaactcagagtagttcttaaaaaacattttattgagtaagagaatgaatagaatgtaatagggaggtctctccagtttgcataccatttaaaggagagattgagtagagaaaatgcctattacttgtaaaattaagaaagtgagttatgaaataccttgagtgaggaaatatgacaaagaagttagggttgagtagcttcattactagcttcttttggagcttctgaaaagaaatacctctgatttgtttcatgaaatgtcttgagtatctgaatgtgttattgtgttaaaactcaaattctgtgtgcgtcgtaatgtttaccaggaaattagagaaaattgcaggactaagtcagtgcagaatttggactcatgagaaattaacatttggaacatagaatgattctgtatgtaggttaagtggattaaa

SEQ ID NO: 542159 - DNA, 636 bp, Homo sapiens
tggacatcctgaaaaataattcacataggaaagggagaaattctttctctatattattggttttccaaataatgagtttaggtattaaactgtttgttttctagttcttttcagattctttaagatgtctggcatatagcaaaaacttagtaaatattttttgaattgttttcataatgccttaatacacaataccaattttttaaatctcttttatagaataacattttctctaacttttctaacaggtctcacgttcagagattattctggttagtgttctgtggataatatttacccttaaaccatttagagaaaagttactacatgatgatacataatgaagaactctgagtcctcaaatcccttattattcaggatttgaacaatagatctttagctaccattttagcaagaaatctcccaattcaaaatacatccctacagcccatctgcctaaattgatcagcactttatctggcctggaatacaattcaactttcagattttcacgatgtaatatatttgccaactgcagattgtagaaactgcagccagattggctatacctcacrctgggtctttagcatagaggagctagttaagaacaacaaagcaaccatcatgtttttacag

SEQ ID NO: 542160 - DNA, 612 bp, Homo sapiens
ctgccatttgcctgtagttgtatgaaagctcccaagcaagaatcatcacctaaactcacaggaccattagagattataaattgttgtcttaagccactaattttagggtgataactggaacagaaatgtcgaatcaaggttttctatttttctggttctccaagttcccaatcctcttttcctttctgtttcccacttccttgcttttgatgatgcaacttttatgtttagagctgaatttgcagttcatgatattcacaattatctgatctttacctatcttggatttctgacctcatgtttaaaaaatctttcttaattaagatatatgtgattttcctttctacttttaaatagcccaacttggaaaagtgcttgcctttttcttcttcactaaagccataactaattaatgcaatctaacactgatctttttcaaccaattatcttgtaaaagtctaacctcagaaggcatatagtctatggtccaagatcagcattttaacagctactttgttaccagaagagaatggattggaaaggagggggattgtgttgggcatatactcaaaactrtgttagaaataatacctcttatgtatagtaataata

SEQ ID NO: 542161 - DNA, 476 bp, Homo sapiens
aatacatgttgaagtatttaagagtaaagggccagcacatatgtaacttctaaagtagtttagcggaggtggggaaatatatatatgcacgcgtgtgagtgtacgtatatgtatatatatatakagagagagagaatgagatttagaaaatgtaaacaaagttacatctaggtttacatattttataatctatatttatttaccttttatctttcaggaaagcaaaatagatgagcaccattttgttgcagttgctcttaggaaacccgatggatctagacatcaggatgtaagattttaggatttctcttttttctaaatagcatgaatcaatgttaagtttgctctttattgatggaaatagtcatttgccttatatcagtttagagagatttttttaagattatagatatagtagtactctttattagcaaatattaagatcactagggattttgtagaaacatttttaaaaa

SEQ ID NO: 542162 - DNA, 606 bp, Homo sapiens
ttctgggcaccagccctggctgactgagggggcactgcagcctcccactggcctggctctgagctgggagcccctggatgatgccaaaggtgatggaagacacagggttagggtctggcgagaaagacacatatattcaacagggaaagcattaaacaaactgtctgaactcgagccacttctagatggggaaaaatcagcgaagcagcctggcattgtggctcacacctgtaatcccagcattttgggaggctgagtagggaggatcacttgagcccaggagtttgaaaccagcctgggcgatatagtgagaccttgtctttacaaaaaaattaaaaaagtaaattatctgggcgtggtggcatgtgcctgtgatcccagctacttaggaggctgaggtgggaggagcacttgaagctgggaggttgaggcagcagtgagccatgatggtgctactgcactcccgcctgggcaacaaagtgacactctgcctcaaaaaaagaagaaaaagaaaaatcaatgagggtttgtaggggaggtggaagtggcccctgccggtrgggaggaactggggcagggagaggtttggggaaggacctcctgggg

SEQ ID NO: 542163 - DNA, 536 bp, Homo sapiens
tagtggtcctgccgcctctgctgccaccgcctcacctcagctctccagtgagatcgagaacctyatgagtcaggggtactcctaccaggacatccagaaagctttggtcattgcccagaacaacatcgagatggccaaaaacatcctccgggaatttgtttccatttcttctcctgcccatgtagctacctagcacaccatctccctgctgcaggtttagaggaccagtgagttgggagttattactcaagtggcacctagaagggcaggagttcctttggtgacttcacagtgaagtcttgccctctctgtgggatatcacatcagtggttccaagatttcaaagtggtgaaatgaaaatggagcagctagtatgttttattattttatgggtcttgagtgcatttgaaggtgtccttcagttcccacgtagagagagtgtggattatattacatgataacctacctggggaacagtccagaaagctatagaacaagtattttgctggaaatcctaattgaggacttaagacttc

SEQ ID NO: 542164 - DNA, 500 bp, Homo sapiens
aaattttcccatatttgtgaatttgttagtttttcatctgctgttggtttttcatttccattatgatcagaaaacatactttgtaagatctcaatytctttaaatgtattaagacttactttgtagcctaatatatggtctgttttggagaatgttccatgtacacttgagaagaatatattgtgctgatgttgggtgagtttaggtgttgacatgttacatttgagcatacatgtaggtggagatgtgagatattcatttaggagaaaagccaagggaagaaatttgttaatgaactgtaaagaggggttgacattcacaagaatatgtaatttttttttttgagaaacaaatttagagtgacagaacagccttgaatatattcttatttagaaggctgaagtttgaatatagcctggagtgttagaaaaggatggaacagtttatcatagaccagagccaagagagtataatatttagattttaaatatcaaaaagaa

SEQ ID NO: 542165 - DNA, 500 bp, Homo sapiens
aaattttcccatatttgtgaatttgttagtttttcatctgctgttggtttttcatttccattatgatcagaaaacatactttgtaagatctcaatttctttaaatgtattaagacttactttgtagcctaatatatggtctgttttggagaatgttccatgtacacttgagaagaatatattgtgctgatgttgggtgagtttaggtgttgacatgttacatttgagcatacatgtaggtggagatgtgagatattcatttaggagaaaagccaagggaagaaatttgttaatgaactgtaaagaggggttgacattcacaagaatatgtaatttttttttttgagaaacaaatttagagtgayagaacagccttgaatatattcttatttagaaggctgaagtttgaatatagcctggagtgttagaaaaggatggaacagtttatcatagaccagagccaagagagtataatatttagattttaaatatcaaaaagaa

SEQ ID NO: 542166 - DNA, 372 bp, Homo sapiens
tggaaagtttttgcaaggattcctgtttctggtctgattcctatgttttgctggcttctggtgataggrtgttttatcctaaactgaacagtttgaactgaagagctagagaggctgtgttgtgttataacaaaataagtgcagtagttcccccttaattgtgggagatacattccaagacccccagtggatgcaagaaaccacgaatagtactgaatcacaaactgttttttcctatacatacatatctatgataaagtttaatttataaattaagtctgatgtaatctgaagatagggtgggagaattgaattgtgccatcagcaggaatgattgcttgcttgttggtggggaaaaactctccacacatt

SEQ ID NO: 542167 - DNA, 372 bp, Homo sapiens
tggaaagtttttgcaaggattcctgtttctggtctgattcctatgttttgctggcttctggtgataggatgttttatcctaaactgaacagtttgaactgaagagctagagaggctgtgttgtgttataacaaaataagtgcagtagttcccccttaattgtgggagatacattccaagacccccagtggatgcaagaaaccaygaatagtactgaatcacaaactgttttttcctatacatacatatctatgataaagtttaatttataaattaagtctgatgtaatctgaagatagggtgggagaattgaattgtgccatcagcaggaatgattgcttgcttgttggtggggaaaaactctccacacatt

SEQ ID NO: 542168 - DNA, 372 bp, Homo sapiens
tggaaagtttttgcaaggattcctgtttctggtctgattcctatgttttgctggcttctggtgataggatgttttatcctaaactgaacagtttgaactgaagagctagagaggctgtgttgtgttataacaaaataagtgcagtagttcccccttaattgtgggagatacattccaagacccccagtggatgcaagaaaccacgaatagtactgaatcacaaactgttttttcctatacatacatatctatgataaagtttaatttataaattaartctgatgtaatctgaagatagggtgggagaattgaattgtgccatcagcaggaatgattgcttgcttgttggtggggaaaaactctccacacatt

SEQ ID NO: 542169 - DNA, 488 bp, Homo sapiens
gtgacagtcacacctaccaccttggggaaagggggagactctgtgaagagccargtgcctggtttatggttcaaattgaacatttggacaaaaatcttgaaaactaggctcctcattgagagaaaaaaggatttttctgcatagtaagttggagccgcggtgtggaagggacatccttgctgcacagggcccagggatgccctagggcacagggagggaagatcctggagaagaggggtcagcttggcccagaccccagggaggggccctcactgcttcttgtcctttgcccaaagtgaggagtctgaggggaaaaaccagagaccattcaatggagccctccctctccccctcctcccacccagggggcatgaaccgccagccctgcagggaggggaggggctgatgcaacccccaagttgctcactggttcctgggctgtgggggcccaacagggccacagacggggaattgcagagcccactcca

SEQ ID NO: 542170 - DNA, 462 bp, Homo sapiens
aagggggagactctgtgaagagccaagtgcctggtttatggttcaaattgaacatttggacaaaaatcttgaaaactaggctcctcattgagagaaaaaaggatttttctgcatagtaagttggagccgcggtgtggaagggacatccttgctgcacagggcccagggatgccctagggcacagggagggaagatcctggagaagaggggtcagcttggcccagaccccagggaggggccctcactgcttcttgtcctttgcccaaagtgaggagtctgaggggaaaaaccagagaccattcaatggagccctccctctccccctcctcccacccagggggcatgaaccgccagcccwgcagggaggggaggggctgatgcaacccccaagttgctcactggttcctgggctgtgggggcccaacagggccacagacggggaattgcagagcccactccaca

SEQ ID NO: 542171 - DNA, 385 bp, Homo sapiens
gcccactccacagctgtggtgccagcatgcgatctgtggggaccaggggaccaggggaccaggcagagcaggagcccagaggcagtgagagccccaagggcagcrcacacaccacagacccttccccatggccacagggcagacacctttgcagaaggaggaggtgaggcacatggtgggtgcagacagccgcaaaccagaggggacagagataagtcatgagaaatttacgtttttccgtcaacagtggaactggagacatgagaacaaaaagaaatcagtaacggagaataaagctagtttttccccactggagacacagcgtataaattgaaatacactgaatatacagaaacggctccaagcactgacaagtttcccatac

SEQ ID NO: 542172 - DNA, 385 bp, Homo sapiens
gcccactccacagctgtggtgccagcatgcgatctgtggggaccaggggaccaggggaccaggcagagcaggagcccagaggcagtgagagccccaagggcagcacacacaccacagacccttccccayggccacagggcagacacctttgcagaaggaggaggtgaggcacatggtgggtgcagacagccgcaaaccagaggggacagagataagtcatgagaaatttacgtttttccgtcaacagtggaactggagacatgagaacaaaaagaaatcagtaacggagaataaagctagtttttccccactggagacacagcgtataaattgaaatacactgaatatacagaaacggctccaagcactgacaagtttcccatac

SEQ ID NO: 542173 - DNA, 385 bp, Homo sapiens
gcccactccacagctgtggtgccagcatgcgatctgtggggaccaggggaccaggggaccaggcagagcaggagcccagaggcagtgagagccccaagggcagcacacacaccacagacccttccccatggccacagggcagacaccttygcagaaggaggaggtgaggcacatggtgggtgcagacagccgcaaaccagaggggacagagataagtcatgagaaatttacgtttttccgtcaacagtggaactggagacatgagaacaaaaagaaatcagtaacggagaataaagctagtttttccccactggagacacagcgtataaattgaaatacactgaatatacagaaacggctccaagcactgacaagtttcccatac

SEQ ID NO: 542174 - DNA, 385 bp, Homo sapiens
gcccactccacagctgtggtgccagcatgcgatctgtggggaccaggggaccaggggaccaggcagagcaggagcccagaggcagtgagagccccaagggcagcacacacaccacagacccttccccatggccacagggcagacacctttgcagaaggaggaggtgaggcacatggtgggtgcagacagccgcaaaccagaggggacagagataagtcatgagaaatttacrtttttccgtcaacagtggaactggagacatgagaacaaaaagaaatcagtaacggagaataaagctagtttttccccactggagacacagcgtataaattgaaatacactgaatatacagaaacggctccaagcactgacaagtttcccatac

SEQ ID NO: 542175 - DNA, 457 bp, Homo sapiens
tgtgtgctttttcagtttataatgtacctgatccacttgtctcatcacactagctgcaaacaaggccactgaatgtcacagcaggtggccrgcatgtctgtgaagggcagaaactggggcagccaaacagctggcagaggccagctaggaagtacctgatgcccactccatagaggactccacacttaaaagacaagatcagcaagtgtcaggctgcctcactagttatccccccaaataaaaaaataaaagtaacccctccagggaacgtgtatgtgtacacacaaaagtacatgcacacagctatatgcaaatgggaaaggcttggaaggaaccaaatccacctctgaacaccagttacttgtggggaaggggcaggtgaagccaactgtcagcattactcaccttttcaactgatgagcttacatcaattttggcaatttctcataaaaaggca

SEQ ID NO: 542176 - DNA, 457 bp, Homo sapiens
tgtgtgctttttcagtttataatgtacctgatccacttgtctcatcacactagctgcaaacaaggccactgaatgtcacagcaggtggccggcatgtctgtgaagggcagaaactggggcagccaaacagctggcagaggccagctaggaagtacctgatgcccactccatagaggactccacacttaaaagacaagatcagcaagtgtcaggctgcctcactagttatccccccaaataaaaaaataaaagtaacccctccagggaacgtgtatgtgtacacacaaaagtacatgcacacagctatatgcaaaygggaaaggcttggaaggaaccaaatccacctctgaacaccagttacttgtggggaaggggcaggtgaagccaactgtcagcattactcaccttttcaactgatgagcttacatcaattttggcaatttctcataaaaaggca

SEQ ID NO: 542177 - DNA, 214 bp, Homo sapiens
cctgcctgcctgttcccatttggctgcaatagaccattgacaacattcagagaacaagaaggggcctcacctgttttccctgacacgtmggaggcagatgggcattcccaggggacctggggtagagcctgttcatctgcccacccccaggctatgctggcttcatcttatctgtgcgatagggctgggggtgggggtgggaattaccaggaga

SEQ ID NO: 542178 - DNA, 214 bp, Homo sapiens
cctgcctgcctgttcccatttggctgcaatagaccattgacaacattcagagaacaagaaggggcctcacctgttttccctgacacgtaggaggcagrtgggcattcccaggggacctggggtagagcctgttcatctgcccacccccaggctatgctggcttcatcttatctgtgcgatagggctgggggtgggggtgggaattaccaggaga

SEQ ID NO: 542179 - DNA, 214 bp, Homo sapiens
cctgcctgcctgttcccatttggctgcaatagaccattgacaacattcagagaacaagaaggggcctcacctgttttccctgacacgtaggaggcagatgggcattcccaggggacctggggtagarcctgttcatctgcccacccccaggctatgctggcttcatcttatctgtgcgatagggctgggggtgggggtgggaattaccaggaga

SEQ ID NO: 542180 - DNA, 486 bp, Homo sapiens
aagggtctgtccccaaaggtgccaccctcaccaggctcatcctgacaatcttggattatttttgccctgaagttttggagtgggggacagggagagagcagacagtacwcattagccacctttccagagagcatcagccctccagactggggcaggtcagacctccactcaggcatttttctcactggttgccagttgggggaagcagtatttgtgagcacctgcctgtctccccaggtcctgttcagaaaccccatctgtgcctttggagggactgccctgcgcacacaggcccagcaaccaccatctacggcccccaggacctaatccccttctacttgggattcagtgcatgttagcagacactgggcttgattcctgcctagtccctgccagatatcccatgcccacctcattaagagaatgaggccacacaaacacacccaggccatcgtgatgatggagtgcctggggtcccacttgccc

SEQ ID NO: 542181 - DNA, 637 bp, Homo sapiens
aaacgcttaggacttagattctttaaaattataacttcagatttttacctggaatattttaggaatttcttcagtttcagctctatacacatctccttgggttacaggtctaacgtgaaacagtttactaaaatgaaaataaatayaggccatttacaaaaactcatttattgtaaaagacatttcactaaagaggacatatgggtgataaataagcacacaaaaagatattcaacatcatcagtcattagagaaatgcaaattaaaaccacaatgagtgtcactacacatctatcagagttaaaaaaataaaaacagtagtaacatcaaatgcttgtgagaatgcagagaaagtaaatcactcatatactgctgatggaaacataaaattacagagccactctggaaaaagaatatggcaatttcttagaaaactaaacatatgcttaccatataacccagcaaattgcactgttgggcctttaatttcaagaaacaaaaattcatataacattttatatctatttaaaaaaacctgcacatagatgttcataggagctttattcataataaccaaaacctagaaacaacccaaataaatgggtaagcaaactgtgatacatctatactatggaat

SEQ ID NO: 542182 - DNA, 637 bp, Homo sapiens
aaacgcttaggacttagattctttaaaattataacttcagatttttacctggaatattttaggaatttcttcagtttcagctctatacacatctccttgggttacaggtctaacgtgaaacagtttactaaaatgaaaataaatataggccatttacaaaaactcatttattgtaaaagacatttcactaaagaggacatatgggtgataaataagcacacaaaaagatattcaacatcatcagtcattagagaaatgcaaattaaaaccacaatragtgtcactacacatctatcagagttaaaaaaataaaaacagtagtaacatcaaatgcttgtgagaatgcagagaaagtaaatcactcatatactgctgatggaaacataaaattacagagccactctggaaaaagaatatggcaatttcttagaaaactaaacatatgcttaccatataacccagcaaattgcactgttgggcctttaatttcaagaaacaaaaattcatataacattttatatctatttaaaaaaacctgcacatagatgttcataggagctttattcataataaccaaaacctagaaacaacccaaataaatgggtaagcaaactgtgatacatctatactatggaat

SEQ ID NO: 542183 - DNA, 637 bp, Homo sapiens
aaacgcttaggacttagattctttaaaattataacttcagatttttacctggaatattttaggaatttcttcagtttcagctctatacacatctccttgggttacaggtctaacgtgaaacagtttactaaaatgaaaataaatataggccatttacaaaaactcatttattgtaaaagacatttcactaaagaggacatatgggtgataaataagcacacaaaaagatattcaacatcatcagtcattagagaaatgcaaattaaaaccacaatgagtgtcactacacatctatcagagttaaaaaaataaaaacagtagtaacatcaaatgcttgtgagaatgcagagaaagtaaatcactcatatactgctgatggaaacataaaattacasagccactctggaaaaagaatatggcaatttcttagaaaactaaacatatgcttaccatataacccagcaaattgcactgttgggcctttaatttcaagaaacaaaaattcatataacattttatatctatttaaaaaaacctgcacatagatgttcataggagctttattcataataaccaaaacctagaaacaacccaaataaatgggtaagcaaactgtgatacatctatactatggaat

SEQ ID NO: 542184 - DNA, 501 bp, Homo sapiens
tataaagggagaatgaaagataatgactcggccttatgctccacctaaagagtcatcaggcctcattaggcaatctaaatggaagagtgacatgatcatattaacaccaaaaatgaaattaggggaacacagaaaaattgctagggagtggggggcctgcaggcagagagaatgctgtatgttttatgatggtccttcaggtgacgtaagtgtgagtcttagtaagataaacactacggtgacagagtggaaataataaaatggtgtttttagtacattgaatcagcaaggatcaatggatatttcttrtagattgaatacgagaagtaagggataggaagaaataaggaatgacacttgcttttcaagcatgggcagttaagtaaatttgaggcaaaaagtctagaagtcaggaggaatgatgggtcgatttggaatatattgaatgtgacatccctgaaggacattcaaatgaatatatttggtagaaggtttgacagt

SEQ ID NO: 542185 - DNA, 501 bp, Homo sapiens
tataaagggagaatgaaagataatgactcggccttatgctccacctaaagagtcatcaggcctcattaggcaatctaaatggaagagtgacatgatcatattaacaccaaaaatgaaattaggggaacacagaaaaattgctagggagtggggggcctgcaggcagagagaatgctgtatgttttatgatggtccttcaggtgacgtaagtgtgagtcttagtaagataaacactacggtgacagagtggaaataataaaatggtgtttttagtacattgaatcagcaaggatcaatggatatttcttgtagattgaatacgagaagtaagggataggaagaaataaggaatgacacttgcttttcaagcatgggcagttaagtmaatttgaggcaaaaagtctagaagtcaggaggaatgatgggtcgatttggaatatattgaatgtgacatccctgaaggacattcaaatgaatatatttggtagaaggtttgacagt

SEQ ID NO: 542186 - DNA, 635 bp, Homo sapiens
cagcccttcgatatgtcttagctgaggaagggctttgcagtcagtagcacacttggtactcacaacactgtggggagaaatttgtaaccctacccccatcctgaaaatggggaaactgaggcttggaaagcttacatggcttgcccaaggcagcagttctkgaatgtgctccattccatccttaaatccttgtccccctgctctgaacctcctatgcctgcccccaaccgtgctgcctctcatccagccccacgtcttactggtgaggacactgggtcttggttcacatgatgagtcccatcaactcctgttcctaggtcaatgcccctctctgcactgaggttactttgtccctgggtttgaggcagggtggggtccaggttatcccacgcatgggacaaagcatccatgcctcttgtaataggaagagtggctctgtatttcatgcagacatttgtaagttatagccttacacagagagaaagaggcacataaattaaagcggccaacttgtatgcacacatgcacactggcacggacagaaggctcgctttaaatggaaaaattagcagcttgaaacagtaaaaaacctcaactttgcctcagaaagatgcagggcaacttcacagaatttt

SEQ ID NO: 542187 - DNA, 606 bp, Homo sapiens
caaccacagggggatccccttcccctccagtgcaatctgaccttccttatttccgtacaagtgtatctcctgagggcactcacaaataaatctgcatgtcactcccatctcagaacttgattccagagagccccatctaaaagacacattaaatcatcaagagtgagagcctttagtggggaaaggagaacagaaatgggatggggaaaataagaactcgggaaaacaagaattcagaaaattatcaacaatgatgacaacacaccatcaaatgaggagtatgatcaacttcattacgtgcccccagagtctaaaatgtaaaataaaaagatgggaaacataacatctgcctgtgaccatatgcaaggtgtccctcccttgttcaatttgtagctcaacgttagttaatcttctgcccacacgccagtggtgatgaagtaacaracttggaaacaagtgatgatcaaggactcatgctttttgtccttgtaactggggacatcttcaagaatcaggggatcgagggggtggttctcctttggccctagtctattcttgctgcaaggagctgtgagagatggttccatcctgcccagccagggaagg

SEQ ID NO: 542188 - DNA, 604 bp, Homo sapiens
gaaaaaggacacaaggtcacattgtactacttgacttggtagcaaattatatttgcatagtcattagcatagaaacatcaaatagtgattgaactaaagagtaagtttatgttgaagagataggaggaggggaagaacaaggatggagttgggagacaacaccatgagagaattaagctctctacatggcagtaaatcaatacataattcctaaaattggtcaattaagtagtaacaatataagcatattatttagaaacwcagcgatatacacaaaaaagaaatgagatgtaggagttgatggtaactgccttggggcaggacttgggagcgtggagaggtgaggcgaggccactgttgatttccaaactatctatatatattctttgataaataaaaattaaacttttataagagagtccacatgacatgcacacatcccagctcagcttttcaggctgtgggatcagatgaggatttgtggtcaaagctctgatcgaaataaacgatgcgtctttatccgcgtttctgcagataccccttggggacctgacacagtggttggagaccagtaggctacaaagataaagaatgctgaccctgg

SEQ ID NO: 542189 - DNA, 641 bp, Homo sapiens
aatgcatagaaagtaaattccaggaaaaacaatggattgtatgaaaaaggacacaaggtcacattgtactacttgacttggtagcaaattatatttgcatagtcattagcatagaaacatcaaatagtgattgaactaaagagtaagtttatgttgaagagataggaggaggggaagaacaaggatggagttgggagacaacaccatgagagaattaagctctctacatggcagtaaatcaatacataattcctaaaattggtcaattaagtagtaacaatataagcatattatttagaaacacagcgatatacacaaaaaagaaatgagatgtaggagttgatggtaactgccttggggcaggacttgggagcgtggagaggtgaggcgaggccactgttgatttccaaactatctatatatattctttgataaataaaaattaaacttttataagagagtccacatgacatgcacacatcccagctcagcttttcaggctgtgggatcagatgaggatttgtggtcaaagctctgatcgaaataaacgatgcgtctttatccgcgtttctgcagataccccttggggacctgacacagtggttggagrccagtaggctacaaagataaagaatgctgac

SEQ ID NO: 542190 - DNA, 613 bp, Homo sapiens
gaccagggttgaaccgtgaagcccatggtcagccaggccaagaaagctgaacttcaacctgtggatagcaaagaaccactggaggtggtccagcatggggatggcatggccgcatatcacagcagcattaattaggctccagctatcgcaagcacagcgctaggctcctccagatacrggaggctctccttggctagctctgatgataaatgggtctaatgaggtattttcctctttgatccatgcaactatccctggagaaatggctagctttggagcaatttttcctctctgaagagccagcttggctggctaactgcaaaggcaagaggaggggaccctacaccatcactagtccccccacagccaaggatactgggagcagcacttggaaacccttcagaaccttcttataagcctcccggttctccctctgaggatttgagaaggatctgagaatgggtaatggtggaagtgacaggcaccacagagaaagaaaaaagagggaaatcctttcaggctggacaaggatttagaactgcatttcagtggatgaagaaaggcgatttgggtggtggcagccaccttgcagcttccaaactctgctcaaagc

SEQ ID NO: 542191 - DNA, 613 bp, Homo sapiens
gaccagggttgaaccgtgaagcccatggtcagccaggccaagaaagctgaacttcaacctgtggatagcaaagaaccactggaggtggtccagcatggggatggcatggccgcatatcacagcagcattaattaggctccagctatcgcaagcacagcgctaggctcctccagatacgggaggctctccttggctagctctgatgataaatgggtctaatgaggtattttcctctttgatccatgcaactatccctggagaaatggctagctttggagcaatttttcctctctgaagagccagcttggctggctaactgcaaaggcaagaggaggggaccctacaccatcactagyccccccacagccaaggatactgggagcagcacttggaaacccttcagaaccttcttataagcctcccggttctccctctgaggatttgagaaggatctgagaatgggtaatggtggaagtgacaggcaccacagagaaagaaaaaagagggaaatcctttcaggctggacaaggatttagaactgcatttcagtggatgaagaaaggcgatttgggtggtggcagccaccttgcagcttccaaactctgctcaaagc

SEQ ID NO: 542192 - DNA, 613 bp, Homo sapiens
gaccagggttgaaccgtgaagcccatggtcagccaggccaagaaagctgaacttcaacctgtggatagcaaagaaccactggaggtggtccagcatggggatggcatggccgcatatcacagcagcattaattaggctccagctatcgcaagcacagcgctaggctcctccagatacgggaggctctccttggctagctctgatgataaatgggtctaatgaggtattttcctctttgatccatgcaactatccctggagaaatggctagctttggagcaatttttcctctctgaagagccagcttggctggctaactgcaaaggcaagaggaggggaccctacaccatcactagtccccccacagccarggatactgggagcagcacttggaaacccttcagaaccttcttataagcctcccggttctccctctgaggatttgagaaggatctgagaatgggtaatggtggaagtgacaggcaccacagagaaagaaaaaagagggaaatcctttcaggctggacaaggatttagaactgcatttcagtggatgaagaaaggcgatttgggtggtggcagccaccttgcagcttccaaactctgctcaaagc

SEQ ID NO: 542193 - DNA, 613 bp, Homo sapiens
gaccagggttgaaccgtgaagcccatggtcagccaggccaagaaagctgaacttcaacctgtggatagcaaagaaccactggaggtggtccagcatggggatggcatggccgcatatcacagcagcattaattaggctccagctatcgcaagcacagcgctaggctcctccagatacgggaggctctccttggctagctctgatgataaatgggtctaatgaggtattttcctctttgatccatgcaactatccctggagaaatggctagctttggagcaatttttcctctctgaagagccagcttggctggctaactgcaaaggcaagaggaggggaccctacaccatcactagtccccccacagccaaggatactgggagcagcacttggaaacccttcagaaccttcttataagcctcccggttctccctctgaggatttgagaaggayctgagaatgggtaatggtggaagtgacaggcaccacagagaaagaaaaaagagggaaatcctttcaggctggacaaggatttagaactgcatttcagtggatgaagaaaggcgatttgggtggtggcagccaccttgcagcttccaaactctgctcaaagc

SEQ ID NO: 542194 - DNA, 575 bp, Homo sapiens
ttccattacacaacaactttaggcagtcaaaatttcaaatttgagaaggaggcaagagtcttgtcgtgcaaggcactggtccattttctgcagcaggtttggttcaattaatttctgacatattctttcctttgtaaaggtacaaagataacacagagagagacccacagctttttcaaaggtacaaaaatttgggcaatttgagggaaaatacaaggaagagaggggagatttactctacacctccacacccccaaatagagaaagccagagatgtgtattatctgtgtgtrtgtgtgtgtgtaggtgtgcacatgcatgcatgaacatgcacacatgtgtgtgacttgtgactccaaagtaatgtagcagattttcagacgtggtttttggaacctttcttattacattaatatcttggactgtacatacgtgaattccacgcctgtaagtgtacctgcacccatacacaaaagctcacaatataagatccaaagtgctaacattacagattctgcagttgatgaaaagcgagcattgagatttgtgatgtatatgtttacatcaaggttttg

SEQ ID NO: 542195 - DNA, 358 bp, Homo sapiens
cagcttaacaactgggccgtgtataggttgtcaaaattcacaaggcaaggtgactttgaaaggttagaaaaccttacttttttttttttgtgggtagctatgtattttagtaaggataaaaaactggtatgcctttggatgcatatgatacattggaggttttactgttaytcacatatttatttaggttttatattatagaatttttatgattgatactcagaaatagaactatgtaatattgtgcctttccattaaacagctcattttgcatttcctgaggtatgtaggagttgatatgttgggtacctgagagcttttcccctttcctaactctgtatagcctctgtagcagtag

SEQ ID NO: 542196 - DNA, 538 bp, Homo sapiens
caatgcttaaaggaagatttatatcctctgctctgttcagcttcctttagacatttatggcagcacgtgtaagattcacacaaaaactcagagggtaaattaaaaggtggtattaagtattactttaatgtagtggttctcaaactttttggtcttaggatccccttacactcttaaaaattatgtaggactscaagtagcttttgtttatataggtttatatctattgatagttactgtattaggaattaatttcatatatattaattcatttgaaataattaaactacagcttaatataaataacattttaattttaattaaatttttttttttttttagtaacagtggctcactgtgttgcccaggctggccttgagctcttgggctgaagtgatcctcttgcctcagcctcccaaataggtgggactacaggtgtgcatacccagcttaatatatttaataaataacattttaatgaaaaactatattccaaaataagttagtgaaagaatggtgatggtattacatttttgta

SEQ ID NO: 542197 - DNA, 317 bp, Homo sapiens
tgttattttaagcatacggatattgtcatttgtgctgcttgcaattactttggggcttatttggaactttcctatttaggcttatttctactaattgtttttggggttttttttttkggttgttctagtgatggtgagcttaaggaaatccaaaatttttattatcgggaattttactaagcttttagattcctgaagccattgtccaaaactagttttttaaatcagcaaatactgaagatagaaaatgatattttttcataattttataattggtttatctgtcatttcagtttttagaacatcttgaacatgaa

SEQ ID NO: 542198 - DNA, 290 bp, Homo sapiens
gattcgatgagatgaccatggaaagttcaatagtggtgacgggtgagcagcccagagagaagctgagcaggtgagctcctcccggtgctggcctttgcctgggmccatgtccacagccaattatgagagcagactgcagtactccagacagccctggatccacttatcagattgcacaagctaggagggccttcagttgtagagcagcagaagctaagtttggttaatttaatcacaaagcatagagctggccttgtaaagacatagtcactgcaccatcagaccggaca

SEQ ID NO: 542199 - DNA, 617 bp, Homo sapiens
aacaatgtccgcctcccctcttcccagcatcctactgcccttgtgttaccttgctctctggaaggcaaagtgggtgaattacacaggcagcaggtggctaagtcctgtgtgcacagtgttaatggatctggcaggttgatacagcagatgcctgcacagcctggggaccaggaaaaaggagtttgcatcctgacagttaggaaaccatggttatcctgmtgagacaaaggaggagggtccatgttttcagaaaaggggcatttctggcaattgcgtagctttgcttctgcatgaataagggttctaaaagcagattttgtcctcagatgcaaaagaacatggaagaaaggacctcatagtatagaccagagttcagacagggcattgcttccataagcaccgcaggtcagtcatggtcctttctcttctgatgacaaggtgagtgtggcacctagtgccccacgttattcccagaacatggaacactttccttccatgaggctgacttgggttgccgcaggttctgcagcatgtgttcacactgctgctgcggggccctgcctcgaaagcaagtcaagctggacttaactggactggcttgggctcaaaacacaacg

SEQ ID NO: 542200 - DNA, 617 bp, Homo sapiens
aacaatgtccgcctcccctcttcccagcatcctactgcccttgtgttaccttgctctctggaaggcaaagtgggtgaattacacaggcagcaggtggctaagtcctgtgtgcacagtgttaatggatctggcaggttgatacagcagatgcctgcacagcctggggaccaggaaaaaggagtttgcatcctgacagttaggaaaccatggttatcctgctgagacaaaggaggagggtccatgttttcagaaaaggggcatttctggcaattgcgtagctttgcttctgcatgaataagggttctaaaagcagattttgtcctcagatgcaaaagaacatggaagaaaggacctcatagtatagaccagagttcagacagggcattgcttccataagcaccgcaggtcagtcatggtcctttctcttytgatgacaaggtgagtgtggcacctagtgccccacgttattcccagaacatggaacactttccttccatgaggctgacttgggttgccgcaggttctgcagcatgtgttcacactgctgctgcggggccctgcctcgaaagcaagtcaagctggacttaactggactggcttgggctcaaaacacaacg

SEQ ID NO: 542201 - DNA, 617 bp, Homo sapiens
aacaatgtccgcctcccctcttcccagcatcctactgcccttgtgttaccttgctctctggaaggcaaagtgggtgaattacacaggcagcaggtggctaagtcctgtgtgcacagtgttaatggatctggcaggttgatacagcagatgcctgcacagcctggggaccaggaaaaaggagtttgcatcctgacagttaggaaaccatggttatcctgctgagacaaaggaggagggtccatgttttcagaaaaggggcatttctggcaattgcgtagctttgcttctgcatgaataagggttctaaaagcagattttgtcctcagatgcaaaagaacatggaagaaaggacctcatagtatagaccagagttcagacagggcattgcttccataagcaccgcaggtcagtcatggtcctttctcttctgatgacaaggtgagygtggcacctagtgccccacgttattcccagaacatggaacactttccttccatgaggctgacttgggttgccgcaggttctgcagcatgtgttcacactgctgctgcggggccctgcctcgaaagcaagtcaagctggacttaactggactggcttgggctcaaaacacaacg

SEQ ID NO: 542202 - DNA, 270 bp, Homo sapiens
ctgggttttttggaccacaggtcctgctctctcctcagggacgaggtggctgggccaggggatgcttagtttacttgtagtttgatcttttttggtttttgaatcttacaccatgtttctrtcagtatcaaacaaagtgggcttgcaactgacatattctttctcacaaacaaatgatggttcatggaaaaacaacatggcttttgttgaataaaaacacaaggatattcagaagccccagtactcagtccattgtgcaattcccatctc

SEQ ID NO: 542203 - DNA, 599 bp, Homo sapiens
tcatggatcaggatgaggaaatctatccatgctggtcactctgcacacccagcaaagaccctcacctgcttctcagttgtaaaytggtctgccctagccgaaaggtaacagtttgcccagcccctgtttgcacagcagtagaatggaaattgcgctgagtcctgtgaagctggctgactcacgctgaaactcgagatttatttccaattagtgcgatgtgtagtagaaggtgctcctcaagcagccttgcaacactcccattgtgtccacagagttctcaaagattgtgtttggcagcaccacgacacagtgggccaaaaagggagaagggattaatatcaagcaatagaaattcatttaaaagccaatattagtcactcaagtgtacatccgaagactacaaaagccaagtatgcatactgcttcactaatgtgaaacttggaacaaagatgagaaaaaccaggcatgcacagggtcagactaggaataaagagccacctgtgaaatgtaataagtggtggtctccttctgaaaaagaggcacgatgcttccattaaaggaagtcgaggactaaagagatgctctgagcacagcttgt

SEQ ID NO: 542204 - DNA, 670 bp, Homo sapiens
aactgtaagagtggggcccagcaatcctccagggggttctggggcatgctgaagtatgagaagtttgggagcagtgacctgcttcccaaagcagacttgcctagtcccctccacacattaccatgggcctggttcctatttttattattgtacccatcccactaaattgcaattatctgctaacatgtctatctccccaacccaactacaatttctttgcagtgttgccactttctgttgctttccaggtaatatcagtctatgtttatatatccttggcagttttattagctcttttattaagagaacatgcttcttaagttatatttagtctcctaagtcaaaccatgtcrgagagaaatatgtaatcctagtgagaggattgtcagaaaatgaagaggagcaggtgcttatatgcttccttgaagtatctgtatgggtaaatattgccctaattctcaataaaagtcacagatcttggatactgtcatttaatactggaacaatagacagcttttctcctgctctaaggattgccaccacttttcaaactatcttatcccttgaactctaaggctgtacactgaactttcaggcactttaaaaaataaaaaacaaaacaaagcctctgacttctcccaatcactcctgagcatttcacagtctgagt

SEQ ID NO: 542205 - DNA, 522 bp, Homo sapiens
gactggcccacgtgatcggtgcctgcgctgctgtccgggtgagccgcctgggcaggacgacactgagagacactcttccctgagcctggaagttgcacctcacctcacctggagatttggaaattggggcctgaatcatccccccgatcttcatgtcagcctgaagatttccatactgaagcaggaagctacrttcacgaacacttcataacctccttggggtcggagcaactttatgaataccaccatcccaggtgggaaacatctttaggcaatatttagagatactgtaaacgatttttatttttatcataaattcctagtttcctgtgcaatctcagtattttaagatgcttgttggacgtaagttaaagctggggatgatgccattaatatggaccacagtggaccttccatcaaggggctgctgtcctcttggtgacaccaggcccaggttctcgcagaaaggctcgagagcagaccctcgtgggcccagctacccggcctcattctgctggatag

SEQ ID NO: 542206 - DNA, 616 bp, Homo sapiens
taaacaaaaaattaaaacaaaaagtgctactagaagacactgttgaagaatctcttcaaggtcagtatcctttcttaaaccaaacacaaatacactaactataaagggaaagattgatgagttggattttattaaaatttaaaactttagtattacaatgtgaaaatgtagaccatagagtagaatatatttaatacatatatttgaaaaaatattttgtttctaggtatataaagaattcagacaaatcaacaagaacagacagctttataaaaaaatttacaaggctgaacaggtgcgttataaaaacatccaaatgaacaatacgtatataaaaaggtgctcaatatcattagtcattggagaaagaaaataagaccaaaatgagatactcacaagagtgactaaaatgaaataaacaatagtgacaataacaagtgttaytgaggatgtggagtcactgctggttttacatagtgttggtaggaatgtaaattggtacaaacactttagcaaactctttgacagtttctacgaagctgaccatatacctaccttatgaattgagtaattcttatttctagatgtatgctcaattgaaatgcataaatacata

SEQ ID NO: 542207 - DNA, 626 bp, Homo sapiens
tcaaatatcaggaccagagtcaaatcaatgcttttccatggacaaaggcacatgtatctatggatatttgtctattaaagtaaacctctacacatttttttttgcctgtgattctctaactttaacttatgtaaaactcatttctataaaattgaaagtaacctgtccattgtttgaattctatggtctttctttacatggttatatggcatttaattctatactgcccttcaatatagtgatttatatgtatttctgtctcctttattagattttagtaaccttgaggtcagggatcctgtgatcctgtgttatttttatatctcgtacagcaattaatcttctgccttgtatataatattcagtaaagatgtctcaatgagaatttaatgaataatcttaaacatcatttatccatataactttacagtgattacatattcatttaggttcaactcattttggtaagaagcagctttatgcagaaaaaaatattgcatagatttttggacttaagcctggtcataaaacttgatattaaataacaaaaaytactactatctctgctatgctactagtactactgcccctaagtgctgttcattgagcaaacactgtattttgtc

SEQ ID NO: 542208 - DNA, 593 bp, Homo sapiens
ttgcctacttgtgttgagcatcatatgcgaggcactgggctggaccctggagatgcaaaggcagaagcagtttggtccctggctgttagagtgagtgtgccccttcccagtctggtcttacatgttctttttgaaaatgtttttccatcacctgttatccatgattccttaaaggttgccatactgatctcatcttaggggccctgggtgtaatttatctggattgtgacagattttagcagttgggtgttttcatgatctcttcaaaagatgttcccacctaccaatactcatttaaatcttttcagtataacgaggaggtgaggtttagtggaaagactttacaagacaaacttagatttggatcctggttttgcctctcagtaactgcaaattcagacaagttctkacctgccttcagcctgagtttcaccatctctaaaatactggtatttctgcctcacagcctgctgaggattaatgtgatggccaggaaaaaacattaaccccagcatcgacactttttaggttcactgtaaatgttccccgcttcctaaagagcattcccaatggagtagacagaagctgagaag

SEQ ID NO: 542209 - DNA, 593 bp, Homo sapiens
ttgcctacttgtgttgagcatcatatgcgaggcactgggctggaccctggagatgcaaaggcagaagcagtttggtccctggctgttagagtgagtgtgccccttcccagtctggtcttacatgttctttttgaaaatgtttttccatcacctgttatccatgattccttaaaggttgccatactgatctcatcttaggggccctgggtgtaatttatctggattgtgacagattttagcagttgggtgttttcatgatctcttcaaaagatgttcccacctaccaatactcatttaaatcttttcagtataacgaggaggtgaggtttagtggaaagactttacaagacaaacttagatttggatcctggttttgcctctcagtaactgcaaattcagacaagttctgamctgccttcagcctgagtttcaccatctctaaaatactggtatttctgcctcacagcctgctgaggattaatgtgatggccaggaaaaaacattaaccccagcatcgacactttttaggttcactgtaaatgttccccgcttcctaaagagcattcccaatggagtagacagaagctgagaag

SEQ ID NO: 542210 - DNA, 369 bp, Homo sapiens
tgatttatttcaatatgaattttaaaaattaaagaatttttatcccatgtatcttgtacatttaaagaattgacactgatgactacagtagagatattgacagaacattagccctgcatatgctatgtttacacaaatagatttttaaaaaacaattaagcaagatggtcaacattattttaggtgcaaaatttccaatcaaatggacagctcctgaagctgcactgtatggtcggtttacaataaagtctgatgtctggtcatttggaattctgcaaacagaactagtaacaaagggccgagtgccatatccaggtaagcttgcattttatagctsttggttatctcatgagtggctttatcaggagt

SEQ ID NO: 542211 - DNA, 650 bp, Homo sapiens
ttgtaaatgtttagtctttcagaatttatgaggcggccaacactcacctacttccttttgaatgtcatagaaagggaaaaactatacaaataagaatgacctttgaaagttaagtgaattaatgaattctatattagtgcttctgtagacagtgaatagaataatgcagattttgtaatgttagtaaacctatatgatagataatacggtaggtaagcgatgagtaaagcacaactcttgttttgaaggagtgtattgccattaatttgggggtaggttgggatttgaccagtaaattaaaaatggtatataaaatggaataaagtgagcctcataagaaaatctccccaaaggtatattgtgggttttaagagaaaagatattttactgattataaggaaagcctgaatggaaaagtaacatttgtgatgaccatcagtgaaaggataggattttagcaggtagagaggtggggagaatacttggaacagagacaattttagaagggggaaaaagaaacccaaaatgggaaagcacagggcatatgcaytggggaaacaagatttgtgtgtgtgtgagcgtaagtatgaggacagtaggaaataaagttggaaaggttggaaagatagattggggttaaatttggtgag

SEQ ID NO: 542212 - DNA, 662 bp, Homo sapiens
tgtgcactttttgttccccaacgagcacaagggtttggactgcaccatccccactctttcttgactctctctgtacaccataaatgcatggttcagggtgattttgctgggcaagggtgatggtttgactatttgtgtccctccaaaattcatgttgacacttaatgcccattgtggtggtattaagaggtagrgactttcgggaagtgagtaagtcacgaggcctctttataaaagaagcttcaggccaggtgcagtggcttatgcatgtaatcccagtactttgacaggctgagatgagaggatcattgagcctaggatttcaaaactagcctgggcaacataatgagaccctatctctattaaaagtaaaacattagctgggcatggtgcggtgcacctgtagtctcagctactttggaagctgaggcaggaggatcacttgagcccaggaggttgaggctgcagtgagctatgattgcaccaccgcacttcggcctaggcaacagcgtgagaccttgtcacacacacacacacacacacacacacacacaatagtttcagacaatagcctggcctggccttcccatctcttctgctgtgaaaacacaacatgcatccctttttgcctcttcagcacatgaggatatagcaaaaaggcc

SEQ ID NO: 542213 - DNA, 625 bp, Homo sapiens
ttatttttaatattctgttagtagatatcccagctactacaaaatgcatctttatctttatatagaatcatttttcctctatctgaaaaattatcttttgtacttcattcatagtgtcttctagttattattatttttttagacagggtttcactctgtcacccaggctggagtgcagtggtgcgatcacagctcaatgcagcctcaacctgcggggctcaagtgatcctcccacctcagcctctggagtagctgggcctacaggtgtgtgccaccatgcccggctaatttttgttttttttgttttttgttttttgttttttgtaaagatgggatctcactatgttgctcaggcttttctcaaactcctgggktcaaacaatctgcccactttgacctcccaaagtgtgggattacacacatgagccactgcgcttggcctagctgattttttttttttttttgagtaagtttttctttgtccagaaatatccttttttcacccaaacttttgaagaatatttttacaggttatagaattctagattggcagttaattttttttcaggctttaaatatggtaatccgttggcttctgacttctattgtttctctcaagaagtca

SEQ ID NO: 542214 - DNA, 583 bp, Homo sapiens
ggcatgacctctgcagaagaggaaacgaccatccacttgccctgcacccacagaagccatggcagtggggtcatctcctttttcaaagggggtgatcatgctgttggagcccagtgggtggcctgggccttggctttggctctgggcagtgccyggtggcatgggggctgccatgtgggtgtctccccttggccttggctctgggaggtgtcccccacagtgctgtgaccactgacacaccagcacttcccacattctcaggcacgcagtgtcctacagctaaaatccctgttttgttttggaaggacactgagaaagttaattctaagtatgagacagcagtctggggagactgggagggatgacactgcccaggctctgagaggagcccatcctgccagccgacctcacttcccccacgacctactttccctggcatcatcgctggagctcagcaggactcatgttcttccgtggggctgccgctgctttaaatctttccaaatgctggtgttctctatctcgctgagcctgtagatatgtgcctgactctactggctaatcgtccactggggaccatgtt

SEQ ID NO: 542215 - DNA, 606 bp, Homo sapiens
ggtgcctattaagtgcagagtgtagtgaggggttctcaagatgtcatgccaagtgagtgcgaggtcaggccagagtgcagatgccctgccagaggtgacctctggctcagaccgaggatccgcaagagttggaagtgagcatggagccccaggctgctgctggcagtgggcagagtgggagaaggcgggactgtttgagtgtaagaacaggccggggcagcaggactccctggggcaggaggggacggcaagaatggcaggacaagcaagggtggaaaaggggacttgtgaagggcgccagggggagmcagggattgttgtaagctgggcagagacatgcccagaattctgccttctccaccacgttcctcacgatctggactctgttgctctgcacacacaggtgggaatggaactggggccatgatgccagggggccatgagcccagtgacaaagagggcagaggagacacactcagtgtctccaatttctgggtgggctttggcctgcctgttccttggcccaaggctgggaaggcggacttaaaccaagattaagctgactgaagtaagtgctccaggaacattgtgtgactaatttaactg

SEQ ID NO: 542216 - DNA, 635 bp, Homo sapiens
ctacatgccaggcactgttgtaaggattttaagtaaggaaaaggaggcacaaaaagggaatggaatttgcctaagagatttgcccgaaggtagcacagtcaggactcctaatgaggctgcctggctcccaggtctgtgctctggaccctacgttatattcccgaaggatgtttaagttataaaggaaggttcttaacaaataggcaaaaaatggtctggagatgagggcttagggagatgacatgctgagggaattatttacctacctacctgggagtaagggcaaagtcttaaggtgtgatgtccatggggtggttttagagcacgagactagggaaagacagctcaagttgaggacaaaaaacagagatcacacacagtagaagtgagggatggggatgatgctacaaatggaccaggagagaagctaattcaaaggakgtattttgtggttgggatcttggagagggatgctgtagagggtcagagggcaacagcaggtatgactctgggcaggtgtgtctaggaccagcaaccaggggtgctgagcaagaatgcagtcttggctgaggtctggaaatgaaaagtgacctggccagagagagcaaccaatccacaaaaattgtattggtgga

SEQ ID NO: 542217 - DNA, 511 bp, Homo sapiens
tagaagttcagattaaatggcacttccacagacaggcccatgctgaccctcaaatataattgaggttctttccatgcccgtacatgactttcattctctcctgtagcacactatctttttcatcatgtttcctatcacagtcagtactyagtatgtgcaagtttgtctgtattcccattactgtaagccttgccagtgccttgcatacagtaggggcttaataaatacatgttaagcaaatgagtcgtttagggaagagtctgtctcttattcagtcctcaagatgaacacggctttgcctttaagaggcacataaacattctgttgattgactctaaatgactcccatcaagtcacatggcaggttggtcacttgctacctggcatcttttgtctacactaaagctgctataatagtaacctgtttaattattctcacacttacactgctctataactagagcgaggaaagaggaagatcttagaggtaaaataacaaaaaattcacagc

SEQ ID NO: 542218 - DNA, 511 bp, Homo sapiens
tagaagttcagattaaatggcacttccacagacaggcccatgctgaccctcaaatataattgaggttctttccatgcccgtacatgactttcattctctcctgtagcacactatctttttcatcatgtttcctatcacagtcagtacttagtatgtgcaagtttgtctgtattcccattactgtaagccttgccagtgccttgcatacagtaggggcttaataaatacatgttaagcaaatgagtcgtttagggaagagtctgtctcttattcagtcctcaagatgaacacggctttgcctttaagaggcacataaacattctgttgattgactctaaatgactcccatcaagtcacayggcaggttggtcacttgctacctggcatcttttgtctacactaaagctgctataatagtaacctgtttaattattctcacacttacactgctctataactagagcgaggaaagaggaagatcttagaggtaaaataacaaaaaattcacagc

SEQ ID NO: 542219 - DNA, 511 bp, Homo sapiens
tagaagttcagattaaatggcacttccacagacaggcccatgctgaccctcaaatataattgaggttctttccatgcccgtacatgactttcattctctcctgtagcacactatctttttcatcatgtttcctatcacagtcagtacttagtatgtgcaagtttgtctgtattcccattactgtaagccttgccagtgccttgcatacagtaggggcttaataaatacatgttaagcaaatgagtcgtttagggaagagtctgtctcttattcagtcctcaagatgaacacggctttgcctttaagaggcacataaacattctgttgattgactctaaatgactcccatcaagtcacatggcaggttggtcacttgctacctggcatcttttgtctacactaaagctgctataatagtaacctgtttaattattctcacacttacactgctctataactagagcsaggaaagaggaagatcttagaggtaaaataacaaaaaattcacagc

SEQ ID NO: 542220 - DNA, 585 bp, Homo sapiens
caactttatgtaactcagctattacttattgagttactatgttctcagccttgggcaaggtgctgcaggaaatattgaaaaagtatcagaggtgcttagatcatgcaatactaatgataagtgagaaagacgttcagattgggcagaaaaaaatatgaaatgagtccagtggaaaagtcttcaaatagctagacacgtaggacaccaaacacaggcaatgcagaaggtctcaggtaacatccttaatgcctaaaagctgcattctaatttattctaatttgcctaaagcctcttcattaaggggcttgtttggtgcaacattccacaaaccattagcaacataacagtctctgggatttgtctttgagcattagcaggcttagtatgttcatcgctgcatgtctcagtggctttctgggctgtttccatctcctgtcccactgattacacttttgcaagagttggactgaaagagtgaaaatatctatggcattgttggcagaaaacaagacaccrgtcagagtgataacaactggcctccaaaggaccaggagatagggagagggctttctaatggagcaaaca

SEQ ID NO: 542221 - DNA, 633 bp, Homo sapiens
ctgttataataaactcctctgctctacctcttttcctgttatggtggaatggctgtttaaagtaaatgtctccaatccatggattttctggggtcatgaaaacattgtttaattggcagactgtattacattttttggtgaagttaggaagtaaacagaatgccacacgccatgttagatccatgcagtgtaaaggtctgtaaggaaacggtccctggattctggagccattattccccacttcccaccccctggggtggaccagccttctcaggttttgaggttgttccagaaagaatggatttctgcctctcttctatcccaggacttccaaagcagagcaaggggaaattagtgcacggaatggagtcgatctgggtttgaatcctctctctgccagtcactaatgtggaacttcaggtaaattactctgagcctccatcttggaatctgtaagatggatatggtaataactacccaattgccttcatcataaaatttaaaacaaaatcaaaattataacatatattgctgtagttcttagtatagaccctgtgccgttcaggtgttttacaggcattaattcatttaatctcctcaacractttatgaggcagatactgttctaaccat

SEQ ID NO: 542222 - DNA, 612 bp, Homo sapiens
gctccaagaagtcatcataagacttcttctagacttttggactcaggggccctggtagaagcagatgcaaaactgctagacagggaaggatgtacacagagagggaggggaaaggaagtaaaccaacatcccaaaagaaaaggctcctgttcaaaactctgataaattaaaattccaaatccataaatctaatgctaagaaggatcaccagcaaatcaactattgggatatatatatatatttattccagatgaaatatatagcctgaccaagactttatgtatgttttggatactccaaaagataatcgatgagataacatcccttgaaaaggcacaagaaatcatgaaacaaaagcaggctgaaatgaagtaggacagtcgatacaactaatcgggagtcttgggaatgaaaaataccataattgaaaccmaaactcagcacacagaattgaactatacactggacatagatggaccaagaactagtgaactgaagaaggtgatgagaacttcatccagcaagcagcacagacagaatttttttttttaagtggaagagcagttaaaagccatggtgaatagattgggaatttccaacatctgtctagta

SEQ ID NO: 542223 - DNA, 594 bp, Homo sapiens
tctttgaccctatttcctattctttggtcagcaaccaccaccccagttccttctcattaataggcaataaagtggagaaccttgtataacctggttgacatataggttagtcaacatctttgttattgatacctatggatttttttccaaattctattaatcagcttgtgagaccttcatccttcctcatccagaaagtcctaccactcactgttccaggtgcattgccaaattgtcaagaactgtgatggatctcagactttacactactgacaagctaacaagttatcctggctcctgctctaaatcataaagtgaaaatgatttccaggcttgggtaattccatagtttctacttcaaatcagcagtttccaaaagtatttattcagactaagaatcaagaaaatattgtcatagtaaaataatatttgttatatatgatacaatatcaaatcagtgacattactttagtggagatttttaaattatgttgctgattcattactattaagcagaatagaaaatatttagaagaaaaaaamcagtaaattgaaggaataacctgaagttgaatttctatttcaaaaaatttt

SEQ ID NO: 542224 - DNA, 644 bp, Homo sapiens
actggttggttcagagacatgcacataattcattcagagacaatgaagcatgggaaggtatttgctggaagttctgagaaagagaagctttaattcttccccttaacatcttagctccccatggagakgagagatccaaagacatatattaaactattttgctacattgaatggtacattcaggaagcctctatgtagaacctatcagagaaggcagagaggagaggagagaagtgggttcctgatgacatcatttgaactgctggatcaacctcaatattggaactatcaaataattctgaatttttagtttatgaagttctccaagttctgttttcttagattgaatatttgtgtatttgggatccattcaacacaacaataatattaactatatattttcttattttctgtattcttttttaaaaattctagtttcaggaggtacatgtgcagggttattacatggatatattgtgtaatgccggggtttgggcttctattgaacccatcaccgaaataatgaacatatttctggcatgcaaggatggctcaacatatacaaatcaataaatgtgacccacccataaacaggattataaacaaaaaccctatgattatctcagtaaatgcagaaaaagcat

SEQ ID NO: 542225 - DNA, 566 bp, Homo sapiens
tagtgtggtaagagatgtagataagatattgccaaagaactaccraattattgggaaaagaatagctggtttttagaaaccaatgccaatggattctccatagaggaagtgctgtttggactaatctttacagaaggggtagtcctactttttgggtagggtgatgcactcagggctatatgctgatgtcttccagatctccatcttcagcctagatctcttcattggcttttggatttgtacatacagatgtctaccaaggaactacatctagaagtacctcaggcatctcgaagtccaaaacaaaacctatttaccccaccaaacctattctttctcccacattgtctacctcagttaataatatcaccctccctccagtcactcaagcacaacctggtgtgttctctgtgttctggctctttaatgctacaaaataaacctccccaaaactcagtggtgcagcaatttcttactgtccttcctgattctggaggtccattggctcaggcaggtagttcttgttgggttatcttaggtcattaaggacagatgttgtctggggc

SEQ ID NO: 542226 - DNA, 486 bp, Homo sapiens
cggttcattatcagtatgccccagtacacaatcagaaggggctcttctaattggctgatgcgcgtattctatcagttgttaaatatttcaaatgtaattgcactatctttttgtgctgagttacacattggaaacaattaaatgctcattactaagaaaataaatgaaaaagcaaattgcagaatattagtattgtttagattattggctcatgggttatactggcaggataaattaattaactcccacagactacaacttcttcatctgtaaggtggggataataatacttttttttttttyccagatagggtttcgctcttgtctcccagactggacaacagtggtgcaatatagctcactgcagccttgaacttccaggctctgcaggctctaactctgtgcactacaggtgtataccacgaagcccagccaatataatatgaaaataataataatgagaactttttttttgagatgtaattt

SEQ ID NO: 542227 - DNA, 479 bp, Homo sapiens
caaatgagcctgcctttctggttaaatattctgtctttgctttgctcttttttctctgtgacttcttgtttgtttctttctgcatggctctcctttggtctctgtcactctccattatttattttgtcctcccacattttccctcatcattcatgataaaataggaggaatagtttatagtgtgttattttgctatatttyttaaacatttgggttacatcattgtgtatcttttctgctgctggttcagagtgtggctttcccaggtgttgaccaggacaggtctgacttggttcttattgtgtagctatgctgggctagcatgtaggaataaggtatatggcactagattctgcttcaagagcaggctgtttaacatatccctcatgcctatgacgaacaactgcatttcctccagacgtaactaacggtgaggaagcctctttccccagctctgttggggtgacccttctagcaga

SEQ ID NO: 542228 - DNA, 591 bp, Homo sapiens
gctgggcaggtgattgtcactgtgaaggaactctacaagggcattaaccaggccaccctctctgggtgcattgatgtcatcgtggtacagcagcaggatggcagctatcagtgttcaccttttcacgttcggtttggaaagctgggagtcctgagatccaaagagaaagtggtgagtgtcctcaaggagaggaaaagtcatcctgagattcaaagagaaagtgagtgagtgtcctcaaggagtagaaaagtcatcctctatgaataaatcgctattgtgagttttctaggccttttttttttttaaaccggaatgatgttgagacaaggtaacgaaaagtcaacctttatgtatkgctttggaagttacttggaaaaccacaaagctcgactgcagaagtctcttcaagggaaagggaaactgaaaattattataataatcttacatgttgcaactcagaaaagcaaaacagaaactagatgggggaacttagacatatttagaaaaagaaaaatttcctttaccttatatagtatttttaaatacttaggctaataccttcatactaattgtaaatggaataggtgggta

SEQ ID NO: 542229 - DNA, 591 bp, Homo sapiens
gctgggcaggtgattgtcactgtgaaggaactctacaagggcattaaccaggccaccctctctgggtgcattgatgtcatcgtggtacagcagcaggatggcagctatcagtgttcaccttttcacgttcggtttggaaagctgggagtcctgagatccaaagagaaagtggtgagtgtcctcaaggagaggaaaagtcatcctgagattcaaagagaaagtgagtgagtgtcctcaaggagtagaaaagtcatcctctatgaataaatcgctattgtgagttttctaggccttttttttttttaaaccggaatgatgttgagacaaggtaacgaaaagtcaacctttatgtatggctttkgaagttacttggaaaaccacaaagctcgactgcagaagtctcttcaagggaaagggaaactgaaaattattataataatcttacatgttgcaactcagaaaagcaaaacagaaactagatgggggaacttagacatatttagaaaaagaaaaatttcctttaccttatatagtatttttaaatacttaggctaataccttcatactaattgtaaatggaataggtgggta

SEQ ID NO: 542230 - DNA, 496 bp, Homo sapiens
taaggctgtggggttcgaaacagcccttcaagaagtcatcacccctgaagtagtgcctgcgagtcagtcagaggcataccmaaacctgagacagaatcaggcacaagttcacaaattttttttttttttggggggagacagtcctactctgtcgcccaggctggagtgcagtagcgcgatctcagctcactgcaacctccgcctcccgggttcaagcaattctcctacctcagcctcccgagtagcggggactacaggtgcatgccgccacgcccggttaattttttgtattttagtagagatggggtttcaccgtgttgcccaggctggtcgcgaactcctgagctcagccaatccgcccacctcggcctcccaaagtgctgggattacaggtatgagccaccatgcccagccaagttcacaacttctgatatcaagttgttgctgagaaaaggtcaggacacttcttaagtagagaaggactgtgacatcccct

SEQ ID NO: 542231 - DNA, 496 bp, Homo sapiens
taaggctgtggggttcgaaacagcccttcaagaagtcatcacccctgaagtagtgcctgcgagtcagtcagaggcatacccaamcctgagacagaatcaggcacaagttcacaaattttttttttttttggggggagacagtcctactctgtcgcccaggctggagtgcagtagcgcgatctcagctcactgcaacctccgcctcccgggttcaagcaattctcctacctcagcctcccgagtagcggggactacaggtgcatgccgccacgcccggttaattttttgtattttagtagagatggggtttcaccgtgttgcccaggctggtcgcgaactcctgagctcagccaatccgcccacctcggcctcccaaagtgctgggattacaggtatgagccaccatgcccagccaagttcacaacttctgatatcaagttgttgctgagaaaaggtcaggacacttcttaagtagagaaggactgtgacatcccct

SEQ ID NO: 542232 - DNA, 493 bp, Homo sapiens
aattaaacttaacttaaaagagcttcttaatttctctgagttaatgggaaacacacgtggtccccagccaaaatctgcatctcttgttttttttttccccaggggtggttttttttttttttttaattgcgttggaagattagagacagtcctcagcctgcagtttatgcactaacattatgtcttgtctgcccctaaatgctttgcactgagacttgctcttaaagtttctattattcaggcaagctcacagcaatgtgtatttgctsttttcagtaacatcctggacctgcgtcattataaatttgatacaagttatccacaaatctacacatggatttttcttcaacaatatgatcctccctctctccccatattgcttggttgtatacacttgtcatctactcctgaactctagcacgcacagctccagtaacctactagcttgtcacaagtgtttccactgctatacagctcagttaacttcaccagc

SEQ ID NO: 542233 - DNA, 690 bp, Homo sapiens
agtcccagagactgaggcaggaggattgcttgagcccaggagtttgaggctgcattgagccatgattgttccactgcactccagcctgggtgacagagcaagatcctgcccccmaaaacaagaaagggcggggggtggggggaaccctatacttctggaatacctgtttccatgtgttactctgcagaaatgtcttggcctccctctaagagcaatattgatagtgagaacttcaggtcaaacaaatactctcttactctccttaggactagagaaagggatcaaacttagtgagtttggctacttggatggctacctacagaaaacacaggccaattataagaaagacagtgcacagtgcattgcagcacatagattataatccagtctccatgtagagtagaatgtttgcttcccatggggacaagtgcaggtaatgctatttgccaggatctgactgctaacaaaggaagtcattggctgttgtttacgttgcatatccatgaactttgtcctaaaggaagtaactgtatttggtgaagtctgggattatccgaaactctacttctcaatgttcaagtcaatatcatatttttcttaccagaagtctccacactcctggctgaggtcaggctataatgtagtccagctctaatttccaaaatatggagaccactgaacatctcccag

SEQ ID NO: 542234 - DNA, 525 bp, Homo sapiens
gtactacatgaacaacattggttcaatgtagtaaacgtactgcattaatgcaagatactaataacaggagaaagtgacttaagattatgtgagaattctctatactttctgaacaattttttctgtaaacctaaaactgctctaaaaaaagtattaatttttwaaaaaatagatagataatgtggctttaaaaatacagtgttagagaacggattaaaaatgggccagagcagatgcaggaagatcaaataggaggctactgcagtagagtcaaatctagggctgatggtttcttgggatgcatagtaataggtagatagagaaagtctttaggaggtagaatggacaggacttcacaatgcattaaatgtagggagaaaaaaaatgattcctgggtttctagcttgagctagtagggatagtggtagaatttactgatatggaaaactggaggaaaaagagtttggaagagaaagatggcaagttaaatacctgtgggaaatataatcacagacactaaatagg

SEQ ID NO: 542235 - DNA, 563 bp, Homo sapiens
tggccacgctgcagaaatgagctggagctcatgggttttcagctacatttttcataactttgtagtacatccatcttgagtaaattaagccacaatttggtacctagggtctcaaactaaaatttatttttataaatgaattttaaaagaaaaaatatctacttcttttaaagttagaagaaaattaacctgctgacaggcaacatttttggggtgctttctgcactagttttccttgtaaatgatttgagtgagtaggtttggtttctgacgaaagtagactggagggtagcattgtatgcctcaaatgtctcagtgtgtttggctcatacgtgggctatactktattattttggtatgcttacaaatgactaaccaatcaaattgtcattaatgtttggaaaatctgttaatgcacatgcacaataatttcctgaaagccataggacatgtctgtagtcagcaccacgatagcaccgtttcatgaaaggcatggcggctgcatttcataccacatcaaaatacagtaacatttctatactaaattaacagtaatacctcaa

SEQ ID NO: 542236 - DNA, 596 bp, Homo sapiens
ctgcaagtcaaacaacctattgagcaaacccaaggtaaatttcagcaccctttagtatcaatggcattcgagaatgaacacattcagacgctttgatttttaagatgtcatttatttaaagcaaaatcagtttatattctcaagggtggatttcaaagatataaaaagaaaagtcattttcggaacaaacaatttgttcaatttctrtataaaacctaaattacactttttttttttttggagagtagactctgtgatatgggaaatggcttcactgaaattcagatttctacatgcaaaagctgactcattttgttatgggattagctaaaatgtttaaagagccccgatgaaacagatgaactaatttgtgaaaaggcaaaaagtgtaatcacggttcagactacatgaatagtcagtgcacgaaccaaagcgatgaggcctttgtaacctcacagagattcagtcacctgatcattcctctttcaaagcagtttcaaaagtacagtgtgttattctggtgactggcataggtcttgcttatgtacaaaaatcagaaaaagtggctcctgtgcttactaatttccaaggttgtt

SEQ ID NO: 542237 - DNA, 541 bp, Homo sapiens
gggtgataggtacatgtggacttatacaattctctctgtttygtgtacatttgaaaggtttcataattgaaagtttatatttaaaaaattttaaatattgatgcttaagctgtatcccaaaccaattagataagaacctctggagagtgggacccaggcagcagtatctttcagcattccccaagtgacttttaggagtaaatggagttgagaaacaggtaaaagaagactaaagcacatacttaaattgaatgttaagaattcctcaaaagagagaggctataaaaataaacattgataacaagcacttatttatatctttaaaaaattacctgaagtccttgtagaagccactggatgacatgtgcatgtgcccattctctacgaagtgagtcaattttgaacaggctgtgtttgcttggcagtgcctgccatcagatttgttgattctcacaacctaggggaaacctattactgtagctggctacccagttcatagtaatgtgtcaataaaatgctggcatatttcacaacaggcata

SEQ ID NO: 542238 - DNA, 541 bp, Homo sapiens
gggtgataggtacatgtggacttatacaattctctctgttttgtgtacatttgaaaggtttcataattgaaagtttatatttaaaaaattttaaatattgatgcttaagctgtatcccaaaccaattagataagaacctctggagagtgggacccaggcagcagtatctttcagcattccccaagtgacttttaggagtaaatggagttgagaaacaggtaaaagaagactaaagcacatacttaaattgaatgttaagaattcctcaaaagagagaggctataaaaataaacattgataacaagcacttatttatatctttaaaaaattacctgaagtccttgtagaagccactggatgacatgtgcatgtgcccattctctacgaagtgagtcaattttgaacaggctgkgtttgcttggcagtgcctgccatcagatttgttgattctcacaacctaggggaaacctattactgtagctggctacccagttcatagtaatgtgtcaataaaatgctggcatatttcacaacaggcata

SEQ ID NO: 542239 - DNA, 544 bp, Homo sapiens
actgccctggcactgctccgaaacgacacattagagccttttatgatctacagaaaagggctgcataaaagaaaatactgcaaatctatgtttagtgctttaagctgagctgcctgtcacaattttaaatacagcccctcagctacataggaggtaaacatttccaacaatgtcacctttgcctctcaatatacttctttaaaaaataaaacacggtggataaaaattacatcaaatacatacatatatatatatcttacctaacctacagtggcaaagacatctgtgctttggtttcttcctgagcaccaggtaccccckctgtgcgcaccgccctcctctcagccctagcccactgcagcctggcttccaccctcagaacacagggggttgaagatgaaagggaagcagaggtgaaagaatcagtgcacaagcttggaaaactggtactcctcctccaagctcctcatggcgaactcaccaacatcagcgtggctaaatgcaaaggcagcattgcagctctcgtgtcatttaaatgttcaag

SEQ ID NO: 542240 - DNA, 544 bp, Homo sapiens
actgccctggcactgctccgaaacgacacattagagccttttatgatctacagaaaagggctgcataaaagaaaatactgcaaatctatgtttagtgctttaagctgagctgcctgtcacaattttaaatacagcccctcagctacataggaggtaaacatttccaacaatgtcacctttgcctctcaatatacttctttaaaaaataaaacacggtggataaaaattacatcaaatacatacatatatatatatcttacctaacctacagtggcaaagacatctgtgctttggtttcttcctgagcaccaggtacccccgctgtgcgcaccgccctcctctcagccctagcccactgcagcctggcttccaccctcagaacacagggggttgaagatgaaagggaagcagaggtgaaagaatcagtgcacaagcttggaaaactggtactcctcctccaagctcctcatggcgaactcaccaacatcagcgtggctaaatgcaaaggsagcattgcagctctcgtgtcatttaaatgttcaag

SEQ ID NO: 542241 - DNA, 684 bp, Homo sapiens
gtaaaatggggaaggcctatattcagaaagtaggtctctgccttttatcactctagtcttttcaccctaaggctaaaaaagccagagactgaagaaaagaagcattcctatgctcttagaaacaaaatctacaacattcataaactactctttgatcattgcttgtcttctgctttgaaaaatattcagaaagagagtgccaatacctcccaaaatatgagataaayatgcattccttatgcgggaaatgtaaaaaagttaatgtaagaccatggactaaagaaggagaatagcttagcgacattgctcaacctacgtctaaagagcacacagaactgagaccaagtttctccccacgggatttcagtggaaaaacaaaaggcttctaaacatttggaggtcattgaccttggcttccccacatctttgatgctccttctcatatcatgtgcaaactgatactttagtaggtcattggtgaaaaacaaatttctgaattcaatgtgtatctttgtgaacagacgaaagtcaatgaaaagtggtaaaaaaaaactacaccataaatctccaacaagcaaccccatacggacaaattcatcttgtctctacaacagcaaaaccatcccaccatcaaaaaaataatgtgtttagaacagaacttggtattttcagccctagtagaat

SEQ ID NO: 542242 - DNA, 596 bp, Homo sapiens
tgaacatttttgccaaacaaaatttcttattttatacaatggaaccatgtttatatagtggtgtttgtataattatttatatatgtactttatgaatataaaataactgcaaacacaagtaataatacaattaagataaaggaggaaattaggtaaaatgaatctttagcctccttcagaagctcactgaaagactgttcaattgtgaagcagaggaaaattaaagaacgtatatgaaatacttatttcacttagattgagacacagagtcactaagtctgtcaacattttgagaaacagcaatgaaaaataaggttttaaaattatgggcaaaattgttatgtaaatgattttaataattgtacagcaagtttatgtcaatactgagtgccacaaatgtttcaaaagaagtccgatgttcatgtcagtcttgacaaaaattaagaaaattgatcagaaccattaaaattacgatctcctattaaaccccagcaaaatccccacaagcaagttcttcttcccaacattcaaatcactacaggtraactgtaaaaatttgaaataaggtaagaaaacacttgaaaaaatgtgcttta

SEQ ID NO: 542243 - DNA, 583 bp, Homo sapiens
tgagaatccggtggaaagaaatgtttaatccagcattgtsagcatttttgtgtgtgtgttttgtttgtttgttcattttttagtggagacaaggtttctccatgttggccaggctggtctcgagctcccgacctcaggggatccacctgcctcggcttcccaaagtgctgggattacaggtgtgagccactgcacctggccattgtgagcacttgttaagcttccctgaggaagtagctgagtttgatgttcagcttaatgtaactgagctcatagtacatagaaaacaggttccctatgcaagtctagtaggatacaggattctccgaagaaagtagttgatgtctagtaaggaaagcaaagagctaggagctctgaagaattccttgcaatcaggcaaggagagcaggaacgccctcaggtgatgtgcatatctaatgcagagtttgattgaaagtaaagagggagggagaaggaacacttcaaagttgagaagattcaggaaagaaggtagaggacatgtatagaccagtggctctggtggcggtagtgggatatgagcttgggaagtcatacagggctg

SEQ ID NO: 542244 - DNA, 583 bp, Homo sapiens
tgagaatccggtggaaagaaatgtttaatccagcattgtgagcatttttgtgtgtgtgttttgtttgtttgttcattttttagtggagacaaggtttctccatgttggccaggctggtctcgagctcccsacctcaggggatccacctgcctcggcttcccaaagtgctgggattacaggtgtgagccactgcacctggccattgtgagcacttgttaagcttccctgaggaagtagctgagtttgatgttcagcttaatgtaactgagctcatagtacatagaaaacaggttccctatgcaagtctagtaggatacaggattctccgaagaaagtagttgatgtctagtaaggaaagcaaagagctaggagctctgaagaattccttgcaatcaggcaaggagagcaggaacgccctcaggtgatgtgcatatctaatgcagagtttgattgaaagtaaagagggagggagaaggaacacttcaaagttgagaagattcaggaaagaaggtagaggacatgtatagaccagtggctctggtggcggtagtgggatatgagcttgggaagtcatacagggctg

SEQ ID NO: 542245 - DNA, 555 bp, Homo sapiens
gagggttctggtgtcaaagaattggtaagggagacatagggctcgtcagaggtgaggctaaagatctaattgcaaatagaacttggttacaggtcagaaaatcccattgttgcacytataaataattcatagtaaggaaaatgtaaattgaaatacttaagaactttatagttgatagggtcttctttctcttctaagggactatacatttggaacagctaggaaggtaatattagttaaataattccttttatgtcaagaattgtccacatataagccttaccacacatataatattgattctgttttataattgtggaaactaaatttcaggaaatggaggaagccattcccaagttggaaagctggtaaatggtaaaataagtgatgtttagagcaagaaaatctcaattataaatttcaaaaactagcatttactaagtgatttttaagttccaggcactgataaactcactttccatgtttcatttaaggttcacagtaaacccattaggtaggtattactattattgcattctagtctaaaaattttaa

SEQ ID NO: 542246 - DNA, 320 bp, Homo sapiens
taaaaccaatatgataactctaaaatacatattgtaggaaatcaggttaaaataagtagttgtattttatctgcaaaagagaagtttaaggaaatactgcyttgaaataaatgaagataagtcaaatattcattcatttattcagttctgaaattattcagccactattcactgtaagatttctaggtaccattctaggtgttcctagtccccattatgagcaaaagtcgccacttcactgtgttattcgaggagggaaaagtagatacgatgatggaggcatatttgaggtcgatatgagaaagttcacgctcacaaac

SEQ ID NO: 542247 - DNA, 648 bp, Homo sapiens
actcatccaacaagacttgcaactcacttcatctctaaaatgtaacaggtccaggtaaaaaagggcagattgaacttgtgggcttacctctagaataatatcactaaaagtagaaattcaaatggacaaagggaagaaagaagagacaacagcctgtggaagatgtttgcaraatttggaagatggaaagcaaataagagaatggcagttgatgagtgaggggacctccctgccagaggatggggggagtcagtaaagggaaaggcaatttgcaacatacgaccctgagagctttggaaatttgaggtcactcagagggtgggagcagggcaaggaatggggctgaaaacatgagagtgtatgagtgttggagaaaggggaaattcaagtgctccctcctcctcccacatcccctttctgatcccctgcagccaggtaaccatcctgtgcctagcaggtaatttagggttcctctccagagagaaatcagggactccaggctctgcagagtgagggaatgaggcaacatactgaaaagggggaccaagtgaatggcaaggtacctcccccaggatcttccctctacttcaccctcagaaccctgcagccaggctctaacaaccccaccctcattccaccaccctttcc

SEQ ID NO: 542248 - DNA, 671 bp, Homo sapiens
cactaaacttagaggcaacagaccatggttttgaatgtgyagaacccaacacagagcccgagacctagtgggtattcagtgcatgttgaagggaagaatgaatgcatgagcaaacaagacaatggaagtctgtcatcagtatttacatttcaaaatgcaaagtgaaaattgtgcaaatctctaatcaagctgtactttaaaatgctaaattgatttggctaaaaatatttcaacactgaaatttctttttgcaagttaagtcttcgcataaccaaaacagaaaagaacgtatcaatgaactaaatagataaatttatggctgacaaaatctcaagatttagtgtgtgagaggaaagtaaaattcaatgtgtccttgaaagttctggggtctaagatatacaggccaatggaatagaatagagacttcagaaataaactattgcatatatggtctgataacttttgaaagtggttcaaagatcatttaatgagaaaaaaaggagtcttttcaacaactggtgttgggaaaactgggtatacatatgcaaaagaaaaaagttgggctcttaccttatactatatacaaaaattaactcaaaatagaacaaagaccaaaaaataaaagctaaaactctaaaattcttatgagaaaactctaaaatgcttaggga

SEQ ID NO: 542249 - DNA, 671 bp, Homo sapiens
cactaaacttagaggcaacagaccatggttttgaatgtgtagaacccaacacagagcccgagacctagtgggtattcagtgcatgttgaagggaagaatgaatgcatgagcaaacaagacaatggaagtctgtcatcagtatttacatttcaaaatgcaaagtgaaaattgtgcaaatctctaatcaagctgtactttaaaatgctaaattgatttggctaaaaatatttcaacactgaaatttctttttgcaagttaagtcttcgcataaccaaaacagaraagaacgtatcaatgaactaaatagataaatttatggctgacaaaatctcaagatttagtgtgtgagaggaaagtaaaattcaatgtgtccttgaaagttctggggtctaagatatacaggccaatggaatagaatagagacttcagaaataaactattgcatatatggtctgataacttttgaaagtggttcaaagatcatttaatgagaaaaaaaggagtcttttcaacaactggtgttgggaaaactgggtatacatatgcaaaagaaaaaagttgggctcttaccttatactatatacaaaaattaactcaaaatagaacaaagaccaaaaaataaaagctaaaactctaaaattcttatgagaaaactctaaaatgcttaggga

SEQ ID NO: 542250 - DNA, 671 bp, Homo sapiens
cactaaacttagaggcaacagaccatggttttgaatgtgtagaacccaacacagagcccgagacctagtgggtattcagtgcatgttgaagggaagaatgaatgcatgagcaaacaagacaatggaagtctgtcatcagtatttacatttcaaaatgcaaagtgaaaattgtgcaaatctctaatcaagctgtactttaaaatgctaaattgatttggctaaaaatatttcaacactgaaatttctttttgcaagttaagtcttcgcataaccaaaacagaaaagaacrtatcaatgaactaaatagataaatttatggctgacaaaatctcaagatttagtgtgtgagaggaaagtaaaattcaatgtgtccttgaaagttctggggtctaagatatacaggccaatggaatagaatagagacttcagaaataaactattgcatatatggtctgataacttttgaaagtggttcaaagatcatttaatgagaaaaaaaggagtcttttcaacaactggtgttgggaaaactgggtatacatatgcaaaagaaaaaagttgggctcttaccttatactatatacaaaaattaactcaaaatagaacaaagaccaaaaaataaaagctaaaactctaaaattcttatgagaaaactctaaaatgcttaggga

SEQ ID NO: 542251 - DNA, 654 bp, Homo sapiens
gctgctgcacgtcagtcccgccacatgacctgcactgttacatccaaagcgtgcagggaaaaggctgcgtgctcaggtccagaagttcataaaggcagcctctcccatcagctcaccggtggctgccagcctccatgccgccttgctctctctaggctactggtttttgcaaccttctgcttttgtccactcataactttgataagtaccgtgtcaccttctcatacgtggaaaacatgtggtcagcgattcggcatgtttaatggtgcttgaacaatacaaaggggagctgtcatccatcttttgttttctcattatcagttttcaggccacgttctaaacaaggacgacaaccaacagaacatcattccctggtgtcccagtccttgcttactttgaatctcctcaccaccttcagtcctttctaaggtcacgtacgggcatccaccgtcttttttcctaaacagaatactttgcaaagtcaagtattggcatttcgtatttaagccatgcatcctcaaggaggctaaaattagttcttgaaggatgaaaaamgtcttattccttttctgtataaagcacagatatacctaaatgtagacatacgtatatgtataatgcaaagtactaaaacagtatatctgtggtattaaa

SEQ ID NO: 542252 - DNA, 542 bp, Homo sapiens
cctgttagactcctggagggcaacggctgttttgtgttccctgttgtgtcctcacagccccgcacagtattcagcatatgatatgtgttgaacaaatacttgatgaatggatgaatacaattacaggaaccaatgtttaggttgagccatatgaaatggctgctatttaaccatttttaacctacaaacatggcagtttcatgattctatctaatgaactaactgtcttaggaatactgtgccccagcacaaaagactgcttgaaattacctccaaaagatgtaggggtctaggccccatgaagagaagcttcagataacacaggagaggacaaaggtagaaggaaaagaggattttgtgaaaagaactgaacaggcatttccaatcaattatatgctcagaatttttcctggtctcccaaatattgcccttcagccttgcaaaccatctggaaagttctttcctctggatgaagcatgctcatgccaaatgtgaactctgtactctctgacagtcrcaaggaagactgtcaaatcaggtat

SEQ ID NO: 542253 - DNA, 503 bp, Homo sapiens
ccttctattaaaccagaaatgaagaacatttgcagaaatgtacaacaatgccatgcttcccattaattattttgttcttgctttagaatatgtcacttttcattgaaaaatgttactcatgattttatgtaaaaggtttattgttgttacttttaaatayatattttaagtgttttttagttttgatttctaatatggcaaaaattggtaaaatcacatacacaagggcttttggggatcctcaaaactttttaagagtgtaaagggatccagagaccaaaagtttgataaccactaaccaaaaactttgacaaccatcatcttgaagggtccttggactttctggaatttggatctcccttgccttgttcagttttctctctttttagccatctcgtacttactgccatttcagttcctatgtacctgacttattaattatgcttattgtttaccatgtgtgttcccctcccatataaactccatgaggactgagatatttg

SEQ ID NO: 542254 - DNA, 503 bp, Homo sapiens
ccttctattaaaccagaaatgaagaacatttgcagaaatgtacaacaatgccatgcttcccattaattattttgttcttgctttagaatatgtcacttttcattgaaaaatgttactcatgattttatgtaaaaggtttattgttgttacttttaaatacatattttaagtgttttttagttttgatttctaatatggcaaaaattggtaaaatcacatacacaagggcttttggggatcctcaaaactttttaagagtgtaaagggatccagagaccaaaagtttgataaccactaaccaaaaactttgacaaccatcatcttgaagggtccttggactttctggaatttggatctcccttgccttgttcagttttctctctttttagccatctcgtacttacwgccatttcagttcctatgtacctgacttattaattatgcttattgtttaccatgtgtgttcccctcccatataaactccatgaggactgagatatttg

SEQ ID NO: 542255 - DNA, 371 bp, Homo sapiens
caccacaacagatagaataataataaatttgtgcaaataaataataaaaaaacattgtgaaaattaccaaaatgggacacagagataggaagtgagcccatgcctttggagacatggcaccagtggacctgctgtataccacaaccttcagtttataaagaacatggtatctgtaaagtacgataaggtaaagcacagtaaaacgaggtgtgccagtgttggggagcacatctggctgcctggcatagtattgactgaaagaaagataacagagggagggtatctgaaaagtaactgccagatgctatggtgyctgctcctttgcagtcagggagaagagaaagaagagactgattatcaaagaaatccca

SEQ ID NO: 542256 - DNA, 599 bp, Homo sapiens
gaagaaatgaatgcagacaatttcaaatttgaagctgatgagactttaacctgccaaaaaatcagagtcttggactcagaaggtctttcaacagagtcatgaaatcagtcattcttcatgtgtgtgtagtgtgagctctccttaagtgccacaaaacacatccttgcccatattggtccccaagaaccccagcgtggatgacagtgcatcacacagatgaaactggtagagtattttctggatgaatgagcaaataagcagtaaatgctgcaatctctctctggttgaagtcctcaattcctcttgcctgaaccatttcaatatccacctcataagcctccaggctccaatcttgtctccattccaacctgctgccagggtcttcctctcatgcaagtggttatgtacatttcatccaaataaaattcaaattccttaaaatagcatatagctctttttggcttccctgggcaacatcagaagaagaattgtcttggatcacaygtaaaatatattaacactaacaacggctgatgagctaaaaaaaaaatagtcacacaaaaaaatatcataatatcttaaaaaagtattgggccaca

SEQ ID NO: 542257 - DNA, 599 bp, Homo sapiens
gaagaaatgaatgcagacaatttcaaatttgaagctgatgagactttaacctgccaaaaaatcagagtcttggactcagaaggtctttcaacagagtcatgaaatcagtcattcttcatgtgtgtgtagtgtgagctctccttaagtgccacaaaacacatccttgcccatattggtccccaagaaccccagcgtggatgacagtgcatcacacagatgaaactggtagagtattttctggatgaatgagcaaataagcagtaaatgctgcaatctctctctggttgaagtcctcaattcctcttgcctgaaccatttcaatatccacctcataagcctccaggctccaatcttgtctccattccaacctgctgccagggtcttcctctcatgcaagtggttatgtacatttcatccaaataaaattcaaattccttaaaatagcatatagctctttttggcttccctgggcaacatcagaagaagaattgtcttggatcacatrtaaaatatattaacactaacaacggctgatgagctaaaaaaaaaatagtcacacaaaaaaatatcataatatcttaaaaaagtattgggccaca

SEQ ID NO: 542258 - DNA, 534 bp, Homo sapiens
tgcctgaaagagggcctgcgaagtgcaagccagaggagttggcctccatggcacagagcaggcagaaaacaaatttggagaatgaccagcaytcttgggtttatttgactgaaagtgcttgttttattgcattcactcacatccatttatttaataaatatccatggagtgtctatcatgtcttctgcactgttctaggggcttgggatacagagatgaaaaatgccaacccgatgaggcctgcagaccactagaacttacattttagtgatgggcaaggtcaggtaataaaagacaagcaagtgatgggaatatgtgctctgcagacatttccaatccagtgatgggagaacaggggctatgggagagcacccaggaggcaacatttaacctgagatctaaaagtaagaaggaggaccctaggagggtcaggggcagaatattgcaggtagaaggtacaggtaggataagaccaggagaactctgcctctgggtccaggggaagcaaagtaaagtggggttgtggggagtgtg

SEQ ID NO: 542259 - DNA, 550 bp, Homo sapiens
gcctgcgaagtgcaagccagaggagttggcctccatggcacagagcaggcagaaaacaaatttggagaatgaccagcactcttgggtttatttgactgaaagtgcttgttttattgcattcactcacatccatttatttaataaatatccatggagtgtctatcatgtcttctgcactgttctaggggcttgggatacagagatgaaaaatgccaacccgatgaggyctgcagaccactagaacttacattttagtgatgggcaaggtcaggtaataaaagacaagcaagtgatgggaatatgtgctctgcagacatttccaatccagtgatgggagaacaggggctatgggagagcacccaggaggcaacatttaacctgagatctaaaagtaagaaggaggaccctaggagggtcaggggcagaatattgcaggtagaaggtacaggtaggataagaccaggagaactctgcctctgggtccaggggaagcaaagtaaagtggggttgtggggagtgtgcagagccctgtgcacagatgtgacatcca

SEQ ID NO: 542260 - DNA, 541 bp, Homo sapiens
caacatcacttctggggaaaaaaaaggacttttgggactgataaatgtatttgtgacaytttcctctaaatatcttgcttctttatgcatcctctcattttatactgagcttggtctaggggaagttcgggtaaacagatctcttatgagtaattagtgtccaattaagccaaggtttcatgtctgtgtgagtccagcctctttttccaacctctgggaagaattaagtaggtcaggtctctgtttacaaagcaagccccaatgctgttgactatccaggggattttacaagttattcccagtagctgaaccactagataaagctactcaaaaaatttgtataggcctttgctgctgtgcaaggggcaacgttgaccatccagtgatctaggtccttcctttctgcatttgtcctgtgggagtttccacagactgttacatcaccaagaagcttcatcctgaaacaaaaggaaggtcacaaccctgatctcatggtcaaaagatcatgacactatccttcccatcataagccctgtttcaa

SEQ ID NO: 542261 - DNA, 614 bp, Homo sapiens
tcagcccttaaatgtggaatttatcaacccctgtattgtttatttttgtgcaattagcaacatcacttctggggaaaaaaaaggacttttgggactgataaatgtatttgtgacattttcctctaaatatcttgcttctttatgcatcctctcattttatactgagcttggtctaggggaagttcgggtaaacagatctcttatgagtaattagtgtccaattaagccaaggtttcatgtctgtgtgagtcmagcctctttttccaacctctgggaagaattaagtaggtcaggtctctgtttacaaagcaagccccaatgctgttgactatccaggggattttacaagttattcccagtagctgaaccactagataaagctactcaaaaaatttgtataggcctttgctgctgtgcaaggggcaacgttgaccatccagtgatctaggtccttcctttctgcatttgtcctgtgggagtttccacagactgttacatcaccaagaagcttcatcctgaaacaaaaggaaggtcacaaccctgatctcatggtcaaaagatcatgacactatccttcccatcataagccctgtttcaaatgactcaacttgaac

SEQ ID NO: 542262 - DNA, 614 bp, Homo sapiens
tcagcccttaaatgtggaatttatcaacccctgtattgtttatttttgtgcaattagcaacatcacttctggggaaaaaaaaggacttttgggactgataaatgtatttgtgacattttcctctaaatatcttgcttctttatgcatcctctcattttatactgagcttggtctaggggaagttcgggtaaacagatctcttatgagtaattagtgtccaattaagccaaggtttcatgtctgtgtgagtccagcctctttttccaacctctgggaagaattaagtaggtcaggtctctgtttacaaagcaagccccaatgctgttgactatccaggggattttasaagttattcccagtagctgaaccactagataaagctactcaaaaaatttgtataggcctttgctgctgtgcaaggggcaacgttgaccatccagtgatctaggtccttcctttctgcatttgtcctgtgggagtttccacagactgttacatcaccaagaagcttcatcctgaaacaaaaggaaggtcacaaccctgatctcatggtcaaaagatcatgacactatccttcccatcataagccctgtttcaaatgactcaacttgaac

SEQ ID NO: 542263 - DNA, 614 bp, Homo sapiens
tcagcccttaaatgtggaatttatcaacccctgtattgtttatttttgtgcaattagcaacatcacttctggggaaaaaaaaggacttttgggactgataaatgtatttgtgacattttcctctaaatatcttgcttctttatgcatcctctcattttatactgagcttggtctaggggaagttcgggtaaacagatctcttatgagtaattagtgtccaattaagccaaggtttcatgtctgtgtgagtccagcctctttttccaacctctgggaagaattaagtaggtcaggtctctgtttacaaagcaagccccaatgctgttgactatccaggggattttacaagttattcccagtagctgaacmactagataaagctactcaaaaaatttgtataggcctttgctgctgtgcaaggggcaacgttgaccatccagtgatctaggtccttcctttctgcatttgtcctgtgggagtttccacagactgttacatcaccaagaagcttcatcctgaaacaaaaggaaggtcacaaccctgatctcatggtcaaaagatcatgacactatccttcccatcataagccctgtttcaaatgactcaacttgaac

SEQ ID NO: 542264 - DNA, 534 bp, Homo sapiens
gcactgctctgccacaagacaggagggaggaaagctggggaaatcagataggtttccttgttgcaggtgtgttcaaaggagggttggagcatcttccactgacttcacctctatgaagctcctctcctgtcttcgtagtgagaacagagatggctgtaagtcaaacacgcccggaaaaggcattcgtrgaccagaccatccatgcactgtgttaactgaccacttagggcgagcagcgttacaggcctgtagttgtggaggcaggagctacagggacatttctgatgtggctccagccctccacgatggtatgatccagttgaacccagaatcccagcacatgtggaccagtcaggaagcaactgactgagagcggtagaggacccaaatttcttcggaggtatttacttcgttgagaaaacccacagggcagctccaatcccacatccctggcatcctgtggcttatgggcgtggggccacttgcctgttggaggcgtgatgcatgatccccagtatttgctctgcaaggcca

SEQ ID NO: 542265 - DNA, 534 bp, Homo sapiens
gcactgctctgccacaagacaggagggaggaaagctggggaaatcagataggtttccttgttgcaggtgtgttcaaaggagggttggagcatcttccactgacttcacctctatgaagctcctctcctgtcttcgtagtgagaacagagatggctgtaagtcaaacacgcccggaaaaggcattcgtggaccagaccatccatgcactgtgttaactgaccacttagggcgagcagcrttacaggcctgtagttgtggaggcaggagctacagggacatttctgatgtggctccagccctccacgatggtatgatccagttgaacccagaatcccagcacatgtggaccagtcaggaagcaactgactgagagcggtagaggacccaaatttcttcggaggtatttacttcgttgagaaaacccacagggcagctccaatcccacatccctggcatcctgtggcttatgggcgtggggccacttgcctgttggaggcgtgatgcatgatccccagtatttgctctgcaaggcca

SEQ ID NO: 542266 - DNA, 390 bp, Homo sapiens
cttctgtgcatacacgttaaataagttttatgccttttctcccattaatccatctgccttatgcctctcagcmgaactttaggggtcaagagcctgtggcccctacagccttaacccactaaaatgtaagtactcagaaggcaaggactctgtcttgttcccaaaggggatctctagcccaagacaggccttggcacgtggcagctcagtgcatgttttgaacaggcgagtgcatgcatgatgttgttctgccagacactgtatttcacactatgtgtcattattaagtcttttatgccccatgaaacagatgtgcttcctgttttatagatgcagaaagggaggcttggggaggttaggaaacttgtccaagggttctcagctgtatag

SEQ ID NO: 542267 - DNA, 498 bp, Homo sapiens
ctgctgcctgggatggggttgacagttgctgcctggggtcatctctctgggggaccctccaccaccagtgttgctgagtgtttcactcctggtccctccgcttttcccaagagggatgctccagtactccaggggtttaaacttggctcaaattgcaccagctcccaggaggrccaccagcatgtgcagaggtcaccctctggctccaatgggggctcttgtcgccccgccaccctgcccgcactctgcggtcacctcttcagagtgaccatcccctctgttggagtgggcaaaggagacgttgtcctggggcaaggggtaaaggagactatctggcctccttgcgaagtggcctgcggcccccgcccacccaagctcctgagcagtgggtggtgtgcgagtcttgccctgggaggaccctgctccaccccaggcaaggacctagcacccccagccaggacatccgcctcaccttcccgtccacagagcagcttctcc

SEQ ID NO: 542268 - DNA, 498 bp, Homo sapiens
ctgctgcctgggatggggttgacagttgctgcctggggtcatctctctgggggaccctccaccaccagtgttgctgagtgtttcactcctggtccctccgcttttcccaagagggatgctccagtactccaggggtttaaacttggctcaaattgcaccagctcccaggaggaccaccagcatgtgcagaggtcaccctctggctccaatgggggctcttgtcgccccgccaccctgcccgcactctgcggtcacctcttcagagtgaccaycccctctgttggagtgggcaaaggagacgttgtcctggggcaaggggtaaaggagactatctggcctccttgcgaagtggcctgcggcccccgcccacccaagctcctgagcagtgggtggtgtgcgagtcttgccctgggaggaccctgctccaccccaggcaaggacctagcacccccagccaggacatccgcctcaccttcccgtccacagagcagcttctcc

SEQ ID NO: 542269 - DNA, 622 bp, Homo sapiens
ccgcctccctaccctcaagtaactgggtcaatctttggcttttaaaaatacccgcctttcccctttctcaatgcctctgtttaacactgcagggtttaagaagccgaagtagctgaaggcacctgggctgggtttgggggcggggactggactcagggagcagcattgccttcgttgccttccaraggcttctggctggtggagccccacggagtccacctgctaaaggtgcgcccagacctgccaggtaagggccgccccttcctgccgcctccaccccagtgctgagggagcgaaggccctggggccccttcctcaatgcacacctgtgctgacagggacgcttcttaacaacaggagcgagggaagctgaaacctggaacacaaacgtatagtacaaaatgtaacaaataagtagtgtctacctgtctcccatgtagatacatatacaggatttgctttaaaaaaaaaacaaaaacttaaaaacactgacctaaacctctcactttaccttccttgaacaaaacccaaaaagcctaggtggggggtggggaggggggtcccggcccagggcaggcaccgccctgagccatgagccatgagccatgagcctgtctcccag

SEQ ID NO: 542270 - DNA, 622 bp, Homo sapiens
ccgcctccctaccctcaagtaactgggtcaatctttggcttttaaaaatacccgcctttcccctttctcaatgcctctgtttaacactgcagggtttaagaagccgaagtagctgaaggcacctgggctgggtttgggggcggggactggactcagggagcagcattgccttcgttgccttccagaggcttctggctggtggagccccacggagtccacctgctaaaggtgcgcccagacctgccaggtaagggccgccccttcctgccgcctccaccccagtgctgagggagcgaaggccctggggccccttcctcaatgcacacctgtgctgacagggacgcttcttaacaacaggagcgagggaagctgaaacctggaacacaaacgtrtagtacaaaatgtaacaaataagtagtgtctacctgtctcccatgtagatacatatacaggatttgctttaaaaaaaaaacaaaaacttaaaaacactgacctaaacctctcactttaccttccttgaacaaaacccaaaaagcctaggtggggggtggggaggggggtcccggcccagggcaggcaccgccctgagccatgagccatgagccatgagcctgtctcccag

SEQ ID NO: 542271 - DNA, 414 bp, Homo sapiens
ctggggagggtggctgtgggaggccaagtccactgcccggaagtcttgtcagccctaagccagggaagcctggagcgtggcctggcgggtctgggtggacaccgtccccactccggactcccagcacaggggaggatacctgagcctgtatggccctgtagccctgggcagagctgggcctgtcgtgtgttcctgcctggcaggtgcaggtgctggccatctgcaggtggaaggaggtgggaatcttggattttttgtttttttttgtytttttttttttgaggtgaagtctcgctctgacacccaggctggcgtgcagtggtgtgatctcggctcactgcaaactccgcttcctgggttcaagtggttctcctgccccagcctcccaagtagctgggattacaggcatgcgcc

SEQ ID NO: 542272 - DNA, 603 bp, Homo sapiens
ggcaggccctgggcagacgctgggagaaagccagccaagtctctgggaaaagtggacccaccaggcagggctgcggccccgaggccaagtgggctagggcgggttctttgggaacctgggatagccaggggaccctgcagagatacaggggtgaggccagaaggcaggcctgctgggcagagggagggttcctccatggcagggaacagggactggctgcccggcaaaaggccagcaatgagggkctgggaagtcaagctgcgctggggtctggaggaagagcaggtgctgggctgggccaggaggggaccaagggtgcggtgccttcctttctggtgccaagggccatgggcggctgccagcgtagaaggctcctggggcccctctgagcacaggcttctcctcggtgtggggggctcttcctgcccagggtcgggggctcttcctgcccagggtgagcctgtaagccagcacagccgtgagcacctgagtcgacagcagaggggcagggccccaggtgaggactgtcacaatggggccagggtgaggatgcgcctcggcacaggtggccgtgtgcgggtccagacgacaggctcccccggg

SEQ ID NO: 542273 - DNA, 566 bp, Homo sapiens
gatgggctgcccggggcattgagcaaagcccagttgtcacccttttcgcaggggtactggggaggcctcaggtggtggggactgggacttggcagagctgggtgggggtccggcctgagggcgtggtgtcctcgcacgctccctcccggaggcctggtcctgcccactgccggcctccagtgtctctggcctgacatgtccagtgtggcacctgtggcacaggacgccacctaccctacccctcaggaggagagaggagaggatttaggagaccagaagtgaggtgctgggttgggaaggggcccagccagcaccccaaggctgtgcagcggggtctggtctgtcttttagagttcagaaaatggttgagaaaatgcggacacacacccccacccagcttcaggcacctgaccctccttttccctatctggaagccaggaagaggcgagaaggaagccggccttgagygggaccaagccagggaggcaggagtggctcgtgggtgtcactgtctgaaccccggcctgcagagggggctccttcagacctggctgagccaggcctgt

SEQ ID NO: 542274 - DNA, 205 bp, Homo sapiens
ggggtggggggtgatacgttttgtgtttgtggagtgaatgaacgaatgagcaaacattcatttttctcctgaagacaaagtgccgctggagttagaggtggcgtgagctcttgcgtctcctgrtctagagaggactgcaaggcgccccagggcccatgggtccccagactgctctccagcgccacacccaggcctgcggctctct

SEQ ID NO: 542275 - DNA, 168 bp, Homo sapiens
cgggcacctgtccccagagtggcccccactgyatccttgcctacagcacctcttgcccttccatggccatggaagcgagtacacacacgtgtgcatgagtgtgcatgtacatgtgtgttgagccatgggcgggacccttgggaagtgtgtggcaccaagtcgggggcc

SEQ ID NO: 542276 - DNA, 510 bp, Homo sapiens
cagaagcatctttaaccttttggtgtagaattcctgtttgcctggacaagaaaatatagatattgagaatgttaaagatgaggaggaggaagaagacaaaggagaaggggataaagaaaagaagataaaggagaggaaagggatggaaagggaggaagaaggtttaagggacaggaagaatgacgaggaggaggagggtgaagaaataatcgtgacatataacrtattggtaatttttttatctataagaagaaaatatcaccatggttgattatattaatgcatcacagcacatttattgtgataaaaatttgaggctcaaaacacatttaccacatgagaaaaagttcatggttagatatcagatattgaaagacaatctttcttagagtataatggctctccagccaataaaaaagtgaatatctggagaacatcactaatcaaatgccaatatctagttgatcaagttttcttcacactattgtcaaaaggcaggtgatccaagca

SEQ ID NO: 542277 - DNA, 651 bp, Homo sapiens
ctgtttggaagtaagaaggcactcttgctttcttgagttgccagagttcttgcactgtttctcatctgtgtgggctgatgtttcttcaatccttgaagttgctgtcctttgaatgtgtgtgtgtgtgtgtgtgtgtgtgtgtgtgtgtgtgtgtgtgtgtgtgtgtgtgttgcttttaccttctttggtattcttgggggttttgtgatggtataaggtgtgttcaatcaactgactttgtttctgttagatttctgtggaatcaaggctcggctcagcactcctggactgtgtgctctaaatatgggaggctggtatttgggcttctggctatgttctctggcctcttgaggttaggaacctgttgcattggaggggccaagctcttcccagacctctggacagaacattccaaagagtggtgccagccaaagcacttcatcaggcagtaacagtgggatccatgctcatgcatgtgccaacagcagcagcagcatagcaacatgcatgttcctctgctagggtgggattctggcaaaaggaagtgatagtgtttgtaacagaatactgacaaatcaaatagtaaaagtttaaataagaaaataaggaactgatgacaattttattttwaaaaaattggattaattatat

SEQ ID NO: 542278 - DNA, 575 bp, Homo sapiens
ctgccttctcacagggtcgtcacacagcctttcctcagcacatgcgcccccgggtgtcattctctcctcttataacagcataacagcactaatcatattgttctttgttgttgttatttttttttagactgagtcttgctctgctgcccaggctggagtgcagtggtgtgatctctgctcactgtaacctccacctcctcccaggttcaagcaattatcctgcctcaccctcccaagtagctgggtaattttttagcctcactaatttttgtatttttaatagagacaggtttcaccatgttggccaggctggtcttgatctcttgacctcaagcgatctgcccacctccasctcccaaagtgctgggagtacaggtgtgaggccaccgcacccagccagcaccagtcatattggattagggccccatacttatgacctcctttaactttaattacccctttaaggcattgtctccaaataaagtcacactgggggttagggcttcatcatatgaattttagggggacagaattcagtctataacagcaggtaacagaactccagttccttcggg

SEQ ID NO: 542279 - DNA, 652 bp, Homo sapiens
aatgacctttttttttcattttatttaatagaaagtcctctatgtaggcaatgtggatgagggactcaggcgaatggcctgagcagagccctgttccattcccgctacacatttgtgtgtgtgtttgaggtgggcaggggatttgagaaatctgaggcacgaggattgatggaggcrggtaaagggttaactctggggctgagctgaggctgatgggtgaaagtgctaattagctgagggcaaggtccaggaaattgccgaggttgtgcttcctcgcttaggctgaagataataccacttccatcccatacttcttctgggaggaaacgccaccctagggcccagcttccgtaactgaggagcagagccgggcactgcctcgagttcctttctcctgcctatttgcatttgcgtttgagaaatggagggggtgggcagggtgaagccaagtcatcattaaaacttcttgaatagagaatttcatggtggaagaaagccctaaagatcacgtgcagcagacagcctttggggaactcacccagctcccaccgtataatctgagaacagttgttctgccttgctctccccatcccatgtaagcagaaatggactctagtccatgttcttagggaatatttcttattctctagtc

SEQ ID NO: 542280 - DNA, 510 bp, Homo sapiens
gcccacggcacaggcccgtcagactgggaacttgcccagcagaggaggcgacccttggtggcccccaccactgccttcaggcctcaagcctgacctggcacgaaggtgccaaagggcacagggartcccttgaggaagcccccttctccccccaacagacttctctcccgactgcagccataagagaggagctctcagcccaggtccctctgcagcgaaggagtggccatgtccccagacacaatgactcattgctacttcctatctgaactcagctcccttcctgcctgaatcagacagcctttcaggagccactgcctctggaaagtcttccctgactgtcttggcctcctatcccctaggccctatatccgtgactgtacaggtcatgctatttgaggagcatgtgggatgttgtcatgtacatgtgtgtgcacatgacatgtgtgcatatgtgaacatcactcctcctcagccagacagtaagctgccagggaacaggaccactgc

SEQ ID NO: 542281 - DNA, 664 bp, Homo sapiens
ttaagaaggggactgtgccttcatttttcactgggccctgcagaatatatgcctgggctctgggctcttctgaaccygtgttggcttccatctgacctctctgtgccagcccaaggctgctgctcttcctgagggcaaggagccccatgactgcgtgttgactcgctggatggggctgctgagcccactctgccacaccacgtgcccctggcagggagggaatccctgggtcctcacaggaacagtcagcaagccacacctgacgcctgctgtgggcccatccctgcggtgctggagaagacagacaaggcctggtcactgcctctgcagggtccccagtccgtggaaggagacagtaatctaggcattttcggtggggaagctgagctgttctcgtgtcctgaaggccaggcgggaacagccgtcttcagagggaagggagaaaatgcacatcgcatcagtggagaagggcctgacttccctcagcatggtggagggaggtcagaaaacagtcaagcttgttgctgggtgacagtgcatttaataatcaaaatataggctgggtacggtggctcatgcctgtaatcccagcactttgggaggctgaggcaggtggatcacttgaggccaggagtttgagaccggcctggccaacatggcaaaa

SEQ ID NO: 542282 - DNA, 567 bp, Homo sapiens
tgctcacaaaatacttaaaatgtagttaagagaaaaaaataatcctaaaataacttaatgagatgctctgagagttcacaaaggagtgatcacaagggaactggaacaatccaaggtggtttgacaaaaaaggcaggaagaaagctgagccccagaagacgtgaattcaaayacaaagaacaataataaaactctgtgaggccggacgcggtggctcacgcctgtaataccagcactttgggaggcctaggcaggtggatcacttgaggccaggagttcaagaccagcctggccgacatagtgagacaccgtctctacaaaaaatacaaaaattagccgggcgtggtggtgcacgcctgtaatcccagctactcaggaggccaagaccggataatcgcttgaacccgggaggtggagattgcagtcagccgagatcgcaccactacactctggcctgggcaacagagcaagaccctatctcagaaaacaaacaaacaaacaaaaaaactctatgagacaaggggccacaaggggaatgaatacttgcagagaattctccacatggga

SEQ ID NO: 542283 - DNA, 236 bp, Homo sapiens
actgttaaacggcatgaccctggcacaaagaagagcctaggtcttccataaccaaaaatctgaatastttcagatttctcaagaacagaaaacaaaaaagtgaagtaacacatcacatccattaggatggctactataggaaaagaagaaaaaaaaacaggaaataagtgtcaataaggatgtggagaaactggaactcttgcgcactattggtgggaatgcaaaatggtacagca

SEQ ID NO: 542284 - DNA, 572 bp, Homo sapiens
ctgcacggtcagtttggaagtctacacaagcatctagaggacctggacacaaacagggctaattcaggtgcccaattcatgtcccaactctgtcctgtcaggcgactaaggcagggctctgggaatccagggacaggtggagtaactcgtacacagtcagtgtgggagtcttagcaggtgactgggtcctgcccggactcgtgtgggatggagggctgggtaaactcattgctgcaataaaagggacagaatctcagtgcaaaagagactagaaaaaatgttaggtttccagagagaggctggaattcagaggrgaagatggaagcccatttgatatagtagtggtgaagatggaaggtggcccctgccgtgaggaagacacctgagctatgaagagtggagtataagcttggaaccagatgtgcacatacccagagttcatgtccaacatatctcaaaatctttgcaaagtctgtgtggatccttaaaaactggggagggcagagccagcagtgggcaggtggcccccacctggaggaatgggattatagagtccaggagtgaggcagcgc

SEQ ID NO: 542285 - DNA, 555 bp, Homo sapiens
gaacattttctgtctgcagaatctcaaaastcccaggtaatttaggggcaattaacagaatcttccctctgattctagtccaaatctcaaagcttgtctcatccaatgtggaaaatcgaacttccaaaatccagttgtcagaaatttccatgtgggtaacagtggccaaatcaagacaacatcttgaaacttgaggaagatgctaagctttgtttctctgccagccagcatgctgcgccttcagggagagtggggctaaaagcccctgtgcaccacaggcttctggccttttggagtggcatcgcgctctaaaggcacttaaagagggccaagcctctgatgctttgtttgattgtggttcccattctcatgagagctgtttcttcttcagctaccatcatgctatcatcacgccacaaaatgagattccagaagtgggcaagcaagatccagtttccagaatgaatccccatctcattcattcacaatctgcagaactcatatgagctaaacagcacaaaatgagacacactcctggtctacacgccagtggct

SEQ ID NO: 542286 - DNA, 578 bp, Homo sapiens
tgctttcccatgtgaactgatagagattttcaaatcacttggttctgttctcttttcttcccagtgcccagagtagtgggtagctcaccccccagtgggtctaccccagcaacaaccccagtggccacccatcgttgctagtccggagcttgcggtgaccctcatcctggtgcggttctgaggtccttggggaggggggagtcccctgggggaaatgcctagaagcttcctacaaaggtctggaatggtcrgtgcagcaagggaggagagggctactggaaaactcacagggccttaattcaattttgaatcctataaatcacacaacacttgtgatttttaaacactatattttgttacacttttacttattaaattatctattgatatatttttcctcaaagcctctgagaagactttgcacaagctgctgaggacactaaggctggagacatgggacatggatgccctgtgatcaattaagttggttaacgtcaccagcgtagataatgtcaacgcttcaccctctggaggccccagaaagcagctttccttcacacgccgccggactgtccact

SEQ ID NO: 542287 - DNA, 483 bp, Homo sapiens
gaataatacaagttgaaaaaatatattttaacttacattagatatataaatgcaagttaaatattcacacaggtatgccttgccattcttatatgagccctgttgtccatggttctgagttacttttggatttgggggcagtgttgtttctcgtaaccatggtccacaggtgaccygtgtccagctttctcagaaactcagacccaggttacgaggaggcagcagaagagaatggtgggcattgcacagaaaccattgccactgaaagattgctaggaagaaattcagacagtgtttcatataatccaatatcaagtcaccaagaaagaaactacggttgaccataatggaaagatcacattgctaaaaaaaaagtaaattgtttgtctatcaagtgaaacaagtctgtgcaagtgttgactaggccgtgggttctctgggtgttggggcagacaccagtggggatggcaggacatggtgttg

SEQ ID NO: 542288 - DNA, 483 bp, Homo sapiens
gaataatacaagttgaaaaaatatattttaacttacattagatatataaatgcaagttaaatattcacacaggtatgccttgccattcttatatgagccctgttgtccatggttctgagttacttttggatttgggggcagtgttgtttctcgtaaccatggtccacaggtgacctgtgtccagctttctcagaaactcagacccaggttacgaggaggcagcagaagagaatggtgggcattgcacagaaaccattgccactgaaagattgctaggaagaaattcagacagtgtttcatataatccaatatcaagtcaycaagaaagaaactacggttgaccataatggaaagatcacattgctaaaaaaaaagtaaattgtttgtctatcaagtgaaacaagtctgtgcaagtgttgactaggccgtgggttctctgggtgttggggcagacaccagtggggatggcaggacatggtgttg

SEQ ID NO: 542289 - DNA, 595 bp, Homo sapiens
tttcgtcttccctttctttaggaggtattttcagttccctgcggcatatataaaggtactaatgtgtgggaatagggaggagatgaccctaagccagcctggctgttccrgtgtgaggaggtgatgtccaagtgcagtaagagttaacaaattgagggtggggaagcgggtaccgggcagagagaaccacttggacggaggcagggggccgagaagcagtgcggtggggtggatgctcaggagtgcgtctcaccactgccttcatctttgcaccccactgcctaacagcatttgctgagtaaatgtctgctcaatgagtaaacaataatatatgcagagattttcatctgaaagagcccagtgaaaatgaacaatgagcagaacatattgggcacacgggggtgcattatcattatgtgtgtgtgttttaattgtggttgcagggagtagaaaccagatcactaaaattgctctgcgcgtgaggaaggaaggatttctttgtggcctctaaggaggacaggaggaatccggccattaagacagacttagctttgtgctggcgctgcagggtacagcagaggcctgggacaggaca

SEQ ID NO: 542290 - DNA, 595 bp, Homo sapiens
tttcgtcttccctttctttaggaggtattttcagttccctgcggcatatataaaggtactaatgtgtgggaatagggaggagatgaccctaagccagcctggctgttccagtgtgaggaggtgatgtccaagtgcagtaagagttaacaaattgagggtggggaagcgggtaccrggcagagagaaccacttggacggaggcagggggccgagaagcagtgcggtggggtggatgctcaggagtgcgtctcaccactgccttcatctttgcaccccactgcctaacagcatttgctgagtaaatgtctgctcaatgagtaaacaataatatatgcagagattttcatctgaaagagcccagtgaaaatgaacaatgagcagaacatattgggcacacgggggtgcattatcattatgtgtgtgtgttttaattgtggttgcagggagtagaaaccagatcactaaaattgctctgcgcgtgaggaaggaaggatttctttgtggcctctaaggaggacaggaggaatccggccattaagacagacttagctttgtgctggcgctgcagggtacagcagaggcctgggacaggaca

SEQ ID NO: 542291 - DNA, 595 bp, Homo sapiens
tttcgtcttccctttctttaggaggtattttcagttccctgcggcatatataaaggtactaatgtgtgggaatagggaggagatgaccctaagccagcctggctgttccagtgtgaggaggtgatgtccaagtgcagtaagagttaacaaattgagggtggggaagcgggtaccgggcagagagaaccacttggacggaggcagggggccgagaagcagtgcggtggggtggatgctcaggagtgcgtctcaccactgccttcatctttgcaccccactgcctaacagcatttgctgagtaaatgtctgctcaatgagtaaacaataatatatgcagagattttcatctgaaagagcccagtgaaaatgaacaatgagcagaacatattgggcacacgggggtgcattatcattatgtgtgtgtgttttaattgtggttgcagggagtagaaaccagatcactaaaattgctctgcgcgtgaggaaggaaggatttctttgtggcctctaaggaggacaggaggaatccggccattaagacagacttagytttgtgctggcgctgcagggtacagcagaggcctgggacaggaca

SEQ ID NO: 542292 - DNA, 599 bp, Homo sapiens
gacatttgagttgtttctactttttagctattatgaataaggctgctatgaacatttctgtctatgttcttatgtgaccatatgcttttatttgtcttagatgctatattaggctgggytctccagagaacaaaaacaggacttacaggacacacacacacacacacacacagagtatatacacacacatacatataggtgcatgtgtatacacatatatacagtatacacacacatgatttactatcaggaattggcttgtgtgattatggaggctgagaagtccaagatcttcaatcagcaaactagagactcaggagagccagtgctgtaagttctagtccaagtccatgggctgaaaaccaggagagccagtgctgtaagttccagtctgagtctgattcttatttttcttttttgttttgttttttgtttgtttgtttgagacaaggtctcactgtgtcactcaggctggggccatcacagctcgctgcagcctcgaactcctgggctcaagcgaccctcctgcctcagcttcctgagtaactgggactacacgggttcgccatcaccttttttgttctttgcaggccttcaat

SEQ ID NO: 542293 - DNA, 599 bp, Homo sapiens
gacatttgagttgtttctactttttagctattatgaataaggctgctatgaacatttctgtctatgttcttatgtgaccatatgcttttatttgtcttagatgctatattaggctgggctctccagagaacaaaaacaggacttacaggacacacacacacacacacacacagagtatatacacacacatacatataggtgcatgtgtatacacatatatacagtatacacacacatgatttactatcaggaattggcttgtgtgattatggaggctgagaagtccragatcttcaatcagcaaactagagactcaggagagccagtgctgtaagttctagtccaagtccatgggctgaaaaccaggagagccagtgctgtaagttccagtctgagtctgattcttatttttcttttttgttttgttttttgtttgtttgtttgagacaaggtctcactgtgtcactcaggctggggccatcacagctcgctgcagcctcgaactcctgggctcaagcgaccctcctgcctcagcttcctgagtaactgggactacacgggttcgccatcaccttttttgttctttgcaggccttcaat

SEQ ID NO: 542294 - DNA, 631 bp, Homo sapiens
gttctaaaaaactttaagttgcaatgttacatctctgtccaaaatcattagactcctcgggcaataagtagagtattccttatttattagatccaagactccttgcgtccttgataggatcttcaaagaaggccatccctgtccataccaagtcatttgggccagtgtcagtcataggtaatcaaaaccattggctcccactgcttctgcctctaccacttgccactggcagatacatagatggggatcatgtttcatcctttcaaggacttgagagactatagtcccagtgcataggttatatatgcgtttttcttctctggcatgtacaattgtcactgctttcatctgcaggggcccagatacactcttcttcctctacctytgtccctaggaatggtgacaagtgagagcacaggaaacatattttctagacatgatgctgggcgcttcacatgccatctcattaatcacaactgtctcccagggtagatgatgacatcctctttcatagaagaaactgaaatttgtcttcatcttggtccgaatcctggtttgtgttgccatctactcctgaaggccatgctagaggcatgctggagggtgtttctctagcccagtggtgggctag

SEQ ID NO: 542295 - DNA, 469 bp, Homo sapiens
ccaatggccaatgatttaattagtcacacctatgtaatgaagttccataaaaacccaaaaggatatgttccaggaaccttcctgtgtttagctatctagaagctctgagaacctagtcccaatcagcaaggtaaataggygaaccatgaattttccagaaaaacaaaaattggctattaaccctaagcatttttaaaaaattctatcagagtaagaatataaaacttccagcattttgcatattagataagagtatacaggtaaatgaactttataaaaggtctcctatacttattaaaaatctttattactatccacttatattttggggtcccattttcattgaagtggcatcaaatatcaaatgaaagatcctctgaaatagcaaggctacatttgagctaattgattatacagtttgggaaaaagaggaagcaggaaaaggaaagaggaaaaaaataagggagtg

SEQ ID NO: 542296 - DNA, 469 bp, Homo sapiens
ccaatggccaatgatttaattagtcacacctatgtaatgaagttccataaaaacccaaaaggatatgttccaggaaccttcctgtgtttagctatctagaagctctgagaacctagtcccaatcagcaaggtaaataggcgaaccatgaattttccagaaaaacaaaaattggctattaaccctaagcatttttwaaaaattctatcagagtaagaatataaaacttccagcattttgcatattagataagagtatacaggtaaatgaactttataaaaggtctcctatacttattaaaaatctttattactatccacttatattttggggtcccattttcattgaagtggcatcaaatatcaaatgaaagatcctctgaaatagcaaggctacatttgagctaattgattatacagtttgggaaaaagaggaagcaggaaaaggaaagaggaaaaaaataagggagtg

SEQ ID NO: 542297 - DNA, 603 bp, Homo sapiens
ccacttcgcttatgaccttctggtggggctgggatcaggcaggagaaggtgatagacatcagtaggacaggcagaagaggagtcaaagggtgttttcagttggttcaacttcaagataaaggatgccagaaagtcttagtttatagggactttggataaatatattgtggttgatagttccaaattgcttctaaggaaagttaggacgttgcaggtgcgtgtctgcacctctgagactcatgtcagagcaagcacccatgctcctctgaatattctccagcatattccaagtctgcactagggaaccagcgtgacgacgggtgcttcactgctcttgccgcctggtagctgttacagggaagtgaccattacacagttgatgtcactattttggctcaagagatacttattttgcttggkggcttttttttttttttttttaaagaaagaaccttttaaaaatgactaaaatatagtgattaaagaatgtttaatgaggagaggtgcttatatttcagttatcagtggtctgtctgtcaaaataatcatctacatatcctatagctttggggcaagttgtttgctctctctggatctcagtag

SEQ ID NO: 542298 - DNA, 598 bp, Homo sapiens
tgcagggcatgttgcggaggcacacacctactcagaaacagtcgaagtctgggatgatcctgggtccatgagttcctggggacaacacgctttgcctcagtgacaggccaggaaaagccactttataaaattgtgtttacccgcctggcaaattcaactcaggyctctctctttggtcttttccagaccacccacgtgtgaacactttttagcttggggcggaagctcacatttcagaaacagccactggtttggccccagccccaaaaacccaggaccatctggaaacttggcccaattccacacttcaacattcctgttgctgtgactgacaccaacagtagcccttccctgcaggccccggcaggcagaaaacacacagcattgcaccctaaaatggaagaattttgctttgaatgatggctcttatctatggcggtttctgtgaagtttttggacggagaagcattggcagaacacagggtttttttcttgtctggacccatgcgtcatatgtgcacttgagcacacagttccctcactctcattgtttagtcttgtgaaatagggataatggggctattcccttcttcttaat

SEQ ID NO: 542299 - DNA, 598 bp, Homo sapiens
tgcagggcatgttgcggaggcacacacctactcagaaacagtcgaagtctgggatgatcctgggtccatgagttcctggggacaacacgctttgcctcagtgacaggccaggaaaagccactttataaaattgtgtttacccgcctggcaaattcaactcaggtctctctctttggtcttttccagaccacccacgtgtgaacactttttagcttggggcggaagctcacatttcagaaacagccactggtttggcmccagccccaaaaacccaggaccatctggaaacttggcccaattccacacttcaacattcctgttgctgtgactgacaccaacagtagcccttccctgcaggccccggcaggcagaaaacacacagcattgcaccctaaaatggaagaattttgctttgaatgatggctcttatctatggcggtttctgtgaagtttttggacggagaagcattggcagaacacagggtttttttcttgtctggacccatgcgtcatatgtgcacttgagcacacagttccctcactctcattgtttagtcttgtgaaatagggataatggggctattcccttcttcttaat

SEQ ID NO: 542300 - DNA, 634 bp, Homo sapiens
gctgggttttggcgatgtttccagaaaacctggctttcttctgttcatggctggtttaagttcttccctttccaagtacgttcgactgaagtcagtggttgactgtctcttgcagggcaaactcccaactcgaacgctaaacaaagagtaactttttcattccaaatttggaattgttaccagtaaacctctgaaccctacctttgttacatctcctctccaaatgtgatttagtttctcgacatgtacccttctccttaaccctgtccatgacttaccacagccctgtaggaagcttacataatgacaaggtacacacaaaaatcagtgtgtattgtaaagataatggcagacattgtcttggattctctaatgtagccatcctaactggtctaaaaattatccatccgcattttaaaatattttatgcaacccatgctctctaaccsaaagcatcagtgtaacatataataaagccaccaatcttttctatcttcatttcctcaataggataagtaatctgaatgggtaaactaagaaagcaattgccaagtgttcaattaacacatcaccagattctgatcttagaatcagctcagatatgtcttccttacttattgtctataatacataa

SEQ ID NO: 542301 - DNA, 508 bp, Homo sapiens
taaaacattcgaccagtggttttcaaccagaggcgattttgctttccaggggacatgtgtaaatacaatttctagagaaattatgagttgtcacaacttgtcagggaagaggggtgctaccggcttctagcaggtcagggcccaggatgctgctcaatatcctccagtgcccaggacagcccccaccacaaagaattatccattccaaatgtaaaacctgtctaagttgagaaaacctgycttagatgatcttatttcaaagtgtgactacatgtcactgcctagccatgtctcggctaaggtccagactgtttatgggcagaaaaaaatggagtatggagacataagcaactcactcaaggtggtgcagcagacacaggcctccagtttcaaattcaagttcctattcctttgactcttctgccatcttctaggtgctgaagatacacacaaatgccttccaagagctggttcctgctggggaaaaattccatatgacattgttttc

SEQ ID NO: 542302 - DNA, 653 bp, Homo sapiens
gcagtgtgatttatgtgtgtacacacacaaaaaatcagtgagtcattgagggagggagacagacacaccagtcagcacagagaggaagctcagggtgggaaatcgatctgcattcaattacctatatgctatacttcaattacctatgtagagaawtataatacttggaaatgaatccagtttgccaagtgagtttaaaagccatcatgagtaagttaacaatttctctccacctgtttgctcagattcccagacaagaataaagagtagcttgaccttcccaggtacttacaaggatgtgcttggaggtagaaaagatccaggaaatcaggagacctgggttctagcacgggctttgcccccaagttgccatgtgaccttgagcaaattccatctctcaaaacctcaagtttcctgctttgtaaagtttggacagtgatctttgactggttaaccttaaagaaacactggggtaaagcaagggttgggttttagatgttgaaagcagttttacaaatgcaaggcttaattggtctcatttaagaggcgggaactgtactctctttagacacaacagggacagcagtgactttgtgattgttaacttcgttttaatggtgagcaaactggggctctgagagagaggtgtcaca

SEQ ID NO: 542303 - DNA, 580 bp, Homo sapiens
tcagcacagagaggaagctcagggtgggaaatcgatctgcattcaattacctatatgctatacttcaattacctatgtagagaaatataatacttggaaatgaatccagtttgccaagtgagtttaaaagccatcatgagtaagttaacaatttctctccacctgtttgctcagattcccagacaagaataaagagtagcttgaccttcccaggtacttacaaggatgtgcttggaggtagaaaagatccaggaaatcaggagacctgggttctagcackggctttgcccccaagttgccatgtgaccttgagcaaattccatctctcaaaacctcaagtttcctgctttgtaaagtttggacagtgatctttgactggttaaccttaaagaaacactggggtaaagcaagggttgggttttagatgttgaaagcagttttacaaatgcaaggcttaattggtctcatttaagaggcgggaactgtactctctttagacacaacagggacagcagtgactttgtgattgttaacttcgttttaatggtgagcaaactggggctctgagagagaggtgtca

SEQ ID NO: 542304 - DNA, 664 bp, Homo sapiens
tgatggaattgctagcaagaaaggctctcaggagacccctgcacctttcttccctctccatttccactcctgagatcygtcccaccaccaactctgtaaggaaatgagaaatcacttcctcctcagaaaaaaactgggatgcatgacattgtggtatgcaggaggggaagcaactcagtgccaatgtgaggccacctgactgggacttggggaccccgggctccagtccagttctgctgtggaccacctgtgtgaccttgagtgagcccccctccctctctgaccttggtttccctttttgtgaaataactgggggagtccagatcagagtttctgaagaggagccagtgagcccactggatgcatcagaactgctgaggcattggtgagacctgcagaggtccaccgctgagaataccgctctgacaagtcccaggaatggcccaggaatctgcatttaacatgccctgtggggttcatgagcacagggctccaaggaacacatgattcaatgcctcctcccagttctaagattccatggacattcacgcactctcactcaaccacggtgcaactcacatcttggggcgggaccatctgcttcaatctttccattttcttgatgccaaagctgcagagaagtgtgcacttagttagccagcta

SEQ ID NO: 542305 - DNA, 664 bp, Homo sapiens
tgatggaattgctagcaagaaaggctctcaggagacccctgcacctttcttccctctccatttccactcctgagatctgtcccaccaccaactctgtaaggaaatgagaaatcacttcctcctcagaaaaaaactgggatgcatgacattgtggtatgcaggaggggaagcaactcagtgccaatgtgaggccacctgactgggacttggggaccccgggctccagtccagttctgctgtggaccacctgtgtgaccttgagtgagcccccctccctctctgaccttggtttccctttttgtgaaataactgggggagtccagatcagagtttctgaagaggagccagtgagcccactggatgcatcagaactgctgaggcattggtgagacctgcagaggtccaccgctgagaataccgctctgacaagtcccaggaatggcccaggaatctgcatttaacatgccctgtggggttcatgagcacagggctccaaggaacacatgattcaatgcctcctcccagttctaagattccatggacattcacgcactctcactcaaccacggtgcaactcacatcttggggcrggaccatctgcttcaatctttccattttcttgatgccaaagctgcagagaagtgtgcacttagttagccagcta

SEQ ID NO: 542306 - DNA, 482 bp, Homo sapiens
gttatagttcttgcaattgccacagtgggaggttgagagagcagccgggaaatgtgcaggagtagcctctgggaatcaaaaygggccttcatatttggggtgtcattggggtgtgcaggacagagagctgtcagtccccaatgctcagagcccactcgtggactggagagtagaactcaaaaggtctaggaggggcccgtcagtctgcatgcaacaagctcaccagtccacaggtgagcaccaggtctgagaatcccttagaaaccttgcggctgaccaccagcaccgttcaactcaacgacatacacaaacccagattcgcccaccactcctgcatctggggtccagacccattcctgtttctcttctccactccatggaatgtccagcaaatctgctttcccagttactgaatttgggattttctccaagtcttcctgtgaattggactttaatcagattttaactgtagctcccaaaaa

SEQ ID NO: 542307 - DNA, 521 bp, Homo sapiens
ttatagttcttgcaattgccacagtgggaggttgagagagcagccgggaaatgtgcaggagtagcctctgggaatcaaaatgggccttcatatttggggtgtcattggggtgtgcaggacagagagctgtcagtccccaatgctcagagcccactcgtggactggagagtagaactcaaaaggtctaggaggggcccgtcagtctgcatgcaacaagctcaccagtccacaggtgagcaccaggtctgagaatcccttagaaaccttgcggctgaccaccagcaccgttcaactcaacgacatacacaaacccagattcgcccaccactcctgcatctggggtccagacccattcctgtttctcttctccactccatggaatgtccagcaaatctgctttcccagttactgaatttgggattttctccaagtcttcctgtgaattggactttaatcagattttaactgtagctcccaaaaaatgggaatggtacgatcrggtttcaaacagtgtaattctc

SEQ ID NO: 542308 - DNA, 561 bp, Homo sapiens
gtggtaaaacattgtcttgtcatgaggctaataaagcrtgttatcctgcctgtcacagaagctgccttacagatgctgtttgctatctgccagggcctggcattaatctcccttccactcggctacaaggaatagagtctactgtgggaagatcaatattgtattatctcggccaccagtgttgttccagctatggccaatgagttgtcattctcgtgttacaagtcaagtgcacaaaggaaaaggaccagaaaaaagagggaagagaagccagcccagaaggggacaagaaagacagtatcagggaaaagaccccggagaaagactcagagaagcaaggacatgaaaagtggttaaggacacttgccccagccttggacagacccagggacactgctaagcctgccttcagaagcttcatgatgacaatttcattcttctgaacctcagttttcatatctataaaatggaccccccaaaaatagaacctggcacagaaggattgaataagatgatgcgtggtagaatgtttagcccagttaacgcacacagggagggctc

SEQ ID NO: 542309 - DNA, 561 bp, Homo sapiens
gtggtaaaacattgtcttgtcatgaggctaataaagcatgttatcctgcctgtcacagaagctgccttacagatgctgtttgctatctgccagggcctggcattaatctcccttccactcggctacaaggaatagagtctactgtgggaagatcaatattgtattatctcggccaccagtgttgttccagctatggccaatgagttgtcattctcgtgttacaagtcaagtgcacaaaggaaaaggaccagaaaaaagagggaagagaagccagcccagaaggggacaagaaagacagtatcagggaaaagaccccggagaaagactcagagaagcaaggacatgaaaagtggttaaggacacttgccccagccttggacagacccagggacactgctaagcctgccttcagaagcttcatgwtgacaatttcattcttctgaacctcagttttcatatctataaaatggaccccccaaaaatagaacctggcacagaaggattgaataagatgatgcgtggtagaatgtttagcccagttaacgcacacagggagggctc

SEQ ID NO: 542310 - DNA, 621 bp, Homo sapiens
tgttggctgcgagagctcgttaggctctgggcagaggctggctggactccaggaggcagacatcaagccccacaactcaaagaatggaggagcctggggcttggcattagatgatgccagtccactcctccgcatgcactggggctctgatgcccagtgagaacgttgactctggaggaagagggtagagatgatgtgttatgcatcctgtgtccccctagctcaaagtggtgctccatacaggattacaggatgactgggagctgggctgccgtggggtgagatggtgcaggatgggatagattggggtggggtaggaygggatagaatagaatagaatagactctggacattttcttcttttgttggagatccaaattcttcctcaagtggactgagaagtcagcaggtgtagacctggcgtggacagagtcacctgagagagcaggggcgataagcagacactatttctccctccaagtcctgcaattctcagccatggccccaaaagagaaattgtaccttaggatcacccatccatagaacacgagatctggaagggttattagagaactttctgtccagtgcttttcagattatgttcaagtcccagcactgcca

SEQ ID NO: 542311 - DNA, 645 bp, Homo sapiens
tctcttttgctgtgccatctgacaaactaatctgaactaagacataagctgatgacaatcctcatactctttaagatattggagagatccttgaatcaaatgtcattttacaagggagaatctaaagatgtcaacttatcraggtgacagctagttagagatgtcatatttaagataacttaatgagccacctctcctagagacgacattttgacaaagacctttcttccttggccaaaatgatgagctagtggaaatttcaagtgctttaacagaccaatatgcccattttgaggtttgtgagactttttaaaactactgcaatcaaagcaccaagcttttggtccatccttatggggcacctaagacaaatcattccacaacgttcacatgtttcaatgaacatgaagtaaaggactaagtgctggaaaataatcttcccaaaatactttgcagatcatcttgtctcatgatcttccctgaatgagtcatctcaaaatgcagctcaaattggcaaatttagagatctaaaatcatctgtgttctgattactccaaaatgtctttattctttcactatattctaaacattccagagtgatgccacatttactagaggtcaccaagttgcaagatatatacgaag

SEQ ID NO: 542312 - DNA, 339 bp, Homo sapiens
gacccgctttttttttctgctattcattgagtacagaatttttttaagtctgtaataacaataattgttgactgtggtgtgcagaatggccccccaaagaagttcacactcagwtttctggatcctgtgaggatgctatattaaatggcaaaagacattttgtggataaaattaaggctagagaccttaaaagagggtgggccctattctgaattatccagatgaggggagatcagagaggtctgagagtgagaatggttaatgccctgttgttggctcttgtatgtagacgcccacatgcaaggaccagagagacacctaggaactcagggaagcccc

SEQ ID NO: 542313 - DNA, 637 bp, Homo sapiens
cttaatgaaaaatgaacagtatactgaaccactatttcacattagacaggggaaggcaacaaaatgcatctggatgttttggttggggatgataaaagtcagattattaaacagattggctgcctataagtgatccaattttctctaaagaaaaagacaatccttcagagttaaaacaatctattttgttctttttatgatcccttatcattagcttcctacttctaagcttgcaagaagctctaatcaccccaaacacaaacattcctaggttccttaatattctttgggtaccttaatattccttctgttccttagcttctaaatgatgtttgatcacacaaaatcaaacttctagcatctttttcagtttctgaaactgacattccagaagtactttaaagacagccttccctatatcacaggcacgttgccctgtgtgtactttattactgtggtaactcatttggccttggtgtttgtactgttttaygctgagtctgagttttatgtaaatttccacaataacgcttaaatcatttgtataactagtaggtttgatttggattcatttaacacatgttctctggttctccttaccctaaagtattctggagagggtggaagaaaaagtatt

SEQ ID NO: 542314 - DNA, 580 bp, Homo sapiens
tatgctgctgtccccctatgcaggtcatagctgggtagtgagctgggaactttgtctcatcatccagaatctcccatcatttacagctatgcaaagacagaccaggaggataaacttcactatgatgtgagaagacccaaatctcaggagaaagacagacggctgggcagaaaaatctcaggaactctaactaaggaccagacttatttttagcttsaaatgacattagctagaaagtatacactaggaaggaatgaacaagcatgtgtaatcatttaataatagcacaaacataccctggggaagaaaacaggaattatgaagggcatcctagagagctgaccctgacatctgcctccactgcctctaatcagtcgaccttatggggtgcacagggactagcctgcactttaagagttttccagatgtttctggggttgcttgcttcctacatctgttctaactgggaaaggctgctctttcatcacatcttcccttatcccataccccaccctgctcccagagagctctaaaattctccaggctgtttcagagcagacaatactattctaattctcca

SEQ ID NO: 542315 - DNA, 580 bp, Homo sapiens
tatgctgctgtccccctatgcaggtcatagctgggtagtgagctgggaactttgtctcatcatccagaatctcccatcatttacagctatgcaaagacagaccaggaggataaacttcactatgatgtgagaagacccaaatctcaggagaaagacagacggctgggcagaaaaatctcaggaactctaactaaggaccagacttatttttagcttgaaatgacattagctagaaagtatacactaggaaggaatgaacaagcatgtgtaatcatttaataatagcacaaacataccctggggaagaaaacaggaattatgaagggcatcctagagagctgaccctgacatctgcctccactgcctctaatcagtcgaccttatggggtgcacagggactagcctgcactttaagagttttccagatgtttctggggttgctygcttcctacatctgttctaactgggaaaggctgctctttcatcacatcttcccttatcccataccccaccctgctcccagagagctctaaaattctccaggctgtttcagagcagacaatactattctaattctcca

SEQ ID NO: 542316 - DNA, 541 bp, Homo sapiens
gtccattccaagtatgcattcccggactgcagaaataactacagtgtggacccatggtgagatgtaccttagctaaaacttcattgatcacctgatctccataagcctgtactctgactgaagggccacagtgacattttgggtctcctggaattagtgacagtttagagccagtgtttagtaatcctccaaaagtctgatcatttccttttccccaatgcatagttaccctggtaaaactgggtcagtttgggaattgattgaggggccataactctgttctcatgattcaagttattagacttctcttcacttgctgtagaactcttcygcttaatttagtagactgcccatctatttattttatttttaaggacaacaatcaactagtgataccataggtctctgtgggttaaactattctgcttgctgcttttactctgctatccataatggtagccacatggacctcatttttggtgattaagtgccaccacttggccccttctaccctgtgatccagttctctctggatcttgca

SEQ ID NO: 542317 - DNA, 581 bp, Homo sapiens
ctcctgctggcccctggacacggcagatgccagtgctggagaaactgcctgctgtgggcacctggtgagatgcacaccagggccagagagagaaaaacgcctttcttattcagtgccctctactgagaaggagcagcagcccgcctgctgcaaaggacgtatttacagggccccactccatttttgcagagcaggcaatgaaaattgagtttggaactgacaggaaatgaattgataactggcataactgagttaattgaattcccatgagtcaagaaatttgaggttcgaaaataatgtcttttgcaacaacttggatggagctggaggccattattctccacctgtagtgaagtatcacaggaatgaaaaaccaaaaaccgtaggttctcacttgcaagtgcaagctaagctatgagtgtgcaaaggcatacagagtgatataatggacttcagagactcacaagggggaggctggaaggggggctagggattcaaaactatacattaggcacaaygtgcactactcaggggacaggtgcactaaaatctcagaattcaccactgtctaactcatccat

SEQ ID NO: 542318 - DNA, 667 bp, Homo sapiens
gtgtatattgatggaatggctatctatacatctacttttgcaaatgtccaacttactcctaaggtagacatattgaattcaataaggaattgatggacacatttctcctaatgatctcaacatgaagttctaactaaatgatttacatgaccagaatgtctgatgggaaggcaagagtgtacstgccgatggctagaaccgcaataaatgtgcaatatcttcctgaaggagggtgaagtgggtacaaaatgataggaagtgggcaaaagaaacaaagaaagacaacaaagtagaaataaacttaccttgggtagcaatgtaatgattgggtcgatgataaccctaaaaataaataaaagagaatatttgataaacataaaatcgataaacagcagataagtcgcatgctaactttgctgaaaggaatgtgcacacaaacgccaatagctgcatcacctgaaagttaaatggccaacccagcaccactgagtttctcttaattagtgaaggcgcatcaaatacaacagttctgatgcttgcaccaaaggtgtgggtaacttaatcataactggctatgagatgatggatgagcaagaaacactaacaacttatggattctctgaaataacatgagcattactcttacaaagtgcaaacaaactgagaa

SEQ ID NO: 542319 - DNA, 552 bp, Homo sapiens
tggataatactggaagggaaccagctgtggagaggagctcaggttggcatgagatcaacagcagcttatgagtttgatttggggacatattgagatgcttttgaaacatgcaaatgcgatgccaagcagacagttctgtagactgctgtgaaatctgaaagagagggatctgggctgsattataaatcagtgacccatttcatgggtcatatgggtggtggtagaagccattggcaggaggaggtgatctgtggagggagcaaggagggcatagagagcccaagacccagctaaaggggctttaataatgggcggtcctgagacagaactgctcagcggtgcagggagcactctcatggagagaaggggtgctgctagtgtcctgttggtagatctagtagatctagtacagcagagactctgatgtagtgctgaggacacgaggtcccttctgaggtgggttaccatgccctcctactccatttcctaacaacgaggtgtgactaatcagtgactggagctttggacctaccccagattcttctaaccagt

SEQ ID NO: 542320 - DNA, 552 bp, Homo sapiens
tggataatactggaagggaaccagctgtggagaggagctcaggttggcatgagatcaacagcagcttatgagtttgatttggggacatattgagatgcttttgaaacatgcaaatgcgatgccaagcagacagttctgtagactgctgtgaaatctgaaagagagggatctgggctggattataaatcagtgacccatttcatgggtcatatgggtggtggtagaagccattggcaggaggaggtgatctgtggagggagcaaggagggcatagagagyccaagacccagctaaaggggctttaataatgggcggtcctgagacagaactgctcagcggtgcagggagcactctcatggagagaaggggtgctgctagtgtcctgttggtagatctagtagatctagtacagcagagactctgatgtagtgctgaggacacgaggtcccttctgaggtgggttaccatgccctcctactccatttcctaacaacgaggtgtgactaatcagtgactggagctttggacctaccccagattcttctaaccagt

SEQ ID NO: 542321 - DNA, 397 bp, Homo sapiens
gtggtgcgatcatggctcactgcagccttgagctcctgggctcaagcaacccttgcacctaaacctctcaagtagctggggccacaggtgtgtrctaccatgcctggctaatttttgtatttttggagacacaggatctcgctatgttgcccaggctggtcttgaagccctcttctccagtgatcctcctgcctcagcctcccaaattgctgggattacggatgtgggatgctgtgtttggagacatcattcaggaattctgaagatttcactgactccctttgttttcttttctttctcttttcctcccagcaatgtaggcttttggacttccttgctggctgattcctcaactccacctgtccttttcctgggactttttccttcattttctcag

SEQ ID NO: 542322 - DNA, 487 bp, Homo sapiens
gcttttatctgttctgaatactgagttttagcatacactttaattggaaggaagggtccctctgctaaaaggaacagttatttaggtaaatactttttaaaggacatatattttcaaaaaacgamaatgcactttttatttcttcaaaagttattttgggggaaaatctgctatgttccaggctctaatctaagggccagggacacagcagtgatcagtgcaggaaaattctgcccttagggtgctattagcacatcctttcttttttttttaatttttagttttttatttcaataggttttgggggaacaagtggtgtgtttggctacatgaatgagttctttagtggtgatttctgagattttggcgcacccgtcacccaggcagtgtacacggtacccagtgtgtagtcttttctcccttacccccttctccccctttcccctgagtcctcaaagtccactgtatcattcttatgcctttgtgc

SEQ ID NO: 542323 - DNA, 487 bp, Homo sapiens
gcttttatctgttctgaatactgagttttagcatacactttaattggaaggaagggtccctctgctaaaaggaacagttatttaggtaaatactttttaaaggacatatattttcaaaaaacgaaaatgcactttttatttcttcaaaagttattttgggggwaaatctgctatgttccaggctctaatctaagggccagggacacagcagtgatcagtgcaggaaaattctgcccttagggtgctattagcacatcctttcttttttttttaatttttagttttttatttcaataggttttgggggaacaagtggtgtgtttggctacatgaatgagttctttagtggtgatttctgagattttggcgcacccgtcacccaggcagtgtacacggtacccagtgtgtagtcttttctcccttacccccttctccccctttcccctgagtcctcaaagtccactgtatcattcttatgcctttgtgc

SEQ ID NO: 542324 - DNA, 487 bp, Homo sapiens
gcttttatctgttctgaatactgagttttagcatacactttaattggaaggaagggtccctctgctaaaaggaacagttatttaggtaaatactttttaaaggacatatattttcaaaaaacgaaaatgcactttttatttcttcaaaagttattttgggggaaaatctgctatgttccaggctctaatctaarggccagggacacagcagtgatcagtgcaggaaaattctgcccttagggtgctattagcacatcctttcttttttttttaatttttagttttttatttcaataggttttgggggaacaagtggtgtgtttggctacatgaatgagttctttagtggtgatttctgagattttggcgcacccgtcacccaggcagtgtacacggtacccagtgtgtagtcttttctcccttacccccttctccccctttcccctgagtcctcaaagtccactgtatcattcttatgcctttgtgc

SEQ ID NO: 542325 - DNA, 413 bp, Homo sapiens
ggtgctgggatgactggtcccactggcttggttttcaccaggtgtggtggctcatacttgtaatcttagcactttgggaggctgaggtgggaggattgcttgaggccaggagttggagaccagccttggcaacaaagcaagactctgtctctacaaaaaaattttaaaaattagttgggcgtgatggtgcgtgcctgcagtcccagctactcaggaggcggaggcaggcmaacatgaggatggccctgtattgattgtttcctttctataaaacgtctgcaggctccccaccacgttccaagcaggttttctcctttaaacctccagagatcctgcccatttgtctccacttggcccgtgtgggtatttggtgtacagctgcttgtcacaggaacactgaattctgttcctgt

SEQ ID NO: 542326 - DNA, 413 bp, Homo sapiens
ggtgctgggatgactggtcccactggcttggttttcaccaggtgtggtggctcatacttgtaatcttagcactttgggaggctgaggtgggaggattgcttgaggccaggagttggagaccagccttggcaacaaagcaagactctgtctctacaaaaaaattttaaaaattagttgggcgtgatggtgcgtgcctgcagtcccagctactcaggaggcggaggcaggcaaacatgaggatggccctgtattgattgtttcctttctataaaacgtctgcaggctccycaccacgttccaagcaggttttctcctttaaacctccagagatcctgcccatttgtctccacttggcccgtgtgggtatttggtgtacagctgcttgtcacaggaacactgaattctgttcctgt

SEQ ID NO: 542327 - DNA, 413 bp, Homo sapiens
ggtgctgggatgactggtcccactggcttggttttcaccaggtgtggtggctcatacttgtaatcttagcactttgggaggctgaggtgggaggattgcttgaggccaggagttggagaccagccttggcaacaaagcaagactctgtctctacaaaaaaattttaaaaattagttgggcgtgatggtgcgtgcctgcagtcccagctactcaggaggcggaggcaggcaaacatgaggatggccctgtattgattgtttcctttctataaaacgtctgcaggctccccaccacgttccaagcagrttttctcctttaaacctccagagatcctgcccatttgtctccacttggcccgtgtgggtatttggtgtacagctgcttgtcacaggaacactgaattctgttcctgt

SEQ ID NO: 542328 - DNA, 413 bp, Homo sapiens
ggtgctgggatgactggtcccactggcttggttttcaccaggtgtggtggctcatacttgtaatcttagcactttgggaggctgaggtgggaggattgcttgaggccaggagttggagaccagccttggcaacaaagcaagactctgtctctacaaaaaaattttaaaaattagttgggcgtgatggtgcgtgcctgcagtcccagctactcaggaggcggaggcaggcaaacatgaggatggccctgtattgattgtttcctttctataaaacgtctgcaggctccccaccacgttccaagcaggttttctcctttaaacctccagagatcctgcccatttgtctccacttggccygtgtgggtatttggtgtacagctgcttgtcacaggaacactgaattctgttcctgt

SEQ ID NO: 542329 - DNA, 217 bp, Homo sapiens
tgcttggacccaggggtccttggttgttcccaggscccaggtcatgccctgtaagagtggagcttatgaagttacccacacacctatctccagagactctcatttccaacctgctcgggacccaagaaggctcagttgttcagatctaaaaacgcattacataattttcctcgccattcattcttctatatgatagcagggagaaaatccgctttcg

SEQ ID NO: 542330 - DNA, 564 bp, Homo sapiens
gtttttaagttaatcagcagtaatgggaaactggcttgggaaggggcaatggtgggaggcagatggcttatgtgcccctaaaatttaaatgttcatccattattgctctttatttgaaattttttaaaattatttaagatgttgttcttctataagtcatattcttaaatgtttggtctcttaaatacataaatactagaaaatttgaaattcwaagtagaatgcatattcatgaaaataattcagctatagctcttagtttaagcatggtagatgtgtttataaaacagaattttgacctgtataatcttttccctactgccattacaatatcaaaatcagttattttcctctaggtaggaaaggaatggtagaaaaactacacacacaccccaaattcttctttccaatagcttcctgcctctgtccagtctgcaataacacccctcctccaccatccactccccacttttcttccaaagttagtcaagtgatggatggagatgacttctgcacaatcactaggagccttcatgtagatattaaaagcatacaaagggaatg

SEQ ID NO: 542331 - DNA, 496 bp, Homo sapiens
ggatttaaattgttaaatttcagaaattttgtgggctcttgagagcagaggccagaaaaagcatttagttcatcattttaaagacacaaattaaaagagacgccatactgtcttgatgtaattactraaagattcataaagggctttcaaggctaaatatgaattcaaattgaaactattttggtatatcttggttttagaggtttctttttctttcttttttttttttttttcttttgagacagggtcttactctttcacccaggctggagagcagtggcatgattatggctcactgcagcctcaacttcctgggctcaagtgatcctcccatctcatcttcccaagtagctgggactacaggcctgctccaccaagccttcctaatttttgtattttttgtagagataagtttccccatgttgcctatgctggtcttgagctcctggtctcaagtgagccaccactcctgtctcagagtttagctattaattct

SEQ ID NO: 542332 - DNA, 624 bp, Homo sapiens
gggagcatgtgccttccgctrgcatgcttagggaacattttctgccagttttctgctcttctgttctcagacatctgttcatatattttaaagagttataaatagtagtggaacaatcctcaagaggcagcacagaagagtgggtgcttctagtctctgtgctttgggaagggttctgctgactaaatactgaacaaagtcatgggcccattccagttaaaaagagggaaaaaactagaaccctcactccattgacttcaaatggttttgtgtcacacggagctggaatcgagacccaggtgtgcctctgccttcccatcagcaagacagagaggattaacagtgcttacctgttagggttgtaagaagacaacacatgctcaggccatggcccagggtagggcagagagtcggtgctcagcacacattagcctctgagttctcaattccacccccacatctcttgctcccctacacttctccatctcaggaaatggcagttccactcacccagttcctctgtcaaaaatcttagtcatcccgggcttatgtctcacaacccacagccatcgtcagaaaaccttattagctctaccctccagacacacacaactggacactttt

SEQ ID NO: 542333 - DNA, 428 bp, Homo sapiens
ttttgccaagcctaaggataaagcagacactcccaagggctgcagaatagagataaagaaatctgagtccttgatgacaccatggaactgctctatcaaggaatcctgaaactcactctacctttttaagccagctatactttgttacttcagtgaaaaagcatcctgataygggaccctttacaaaagagctcattttctctcttttaaaattgtttgaatctatttttttaagagccttctgtctccacgaaaggttgtcaacaatcacttcttgctattctctaaaaggatataataatgtaataattggagttctggaataggacaataaatctgagctctcctacttactatctgtgacttgggggaaaattttaaactgtctgagctttaggatttttcttttttaaatcagcagcatctgg

SEQ ID NO: 542334 - DNA, 428 bp, Homo sapiens
ttttgccaagcctaaggataaagcagacactcccaagggctgcagaatagagataaagaaatctgagtccttgatgacaccatggaactgctctatcaaggaatcctgaaactcactctacctttttaagccagctatactttgttacttcagtgaaaaagcatcctgatacgggaccctttacaaaagagctcattttctctcttttaaaattgtttgaatctatttttttaagagccttctgtctccacgaaaggttgtcaacaatcacttcttgctattctctaaaaggatataataatgtaataattggagttctggaataggacaataaatctgagctctcctacttactatctgtgacttgggggaaaattttaaactgtctgagcttwaggatttttcttttttaaatcagcagcatctgg

SEQ ID NO: 542335 - DNA, 666 bp, Homo sapiens
gttccagtcaaataaaaggtctttgtcatttcttggagagagggtttgatgggtcaaatgagctctatttcaaatcaggaatcataaataaggaaacataagagctcctatatcgctaagttttctttgtttgtttaattgctagtagcctgactgtgtaattttacccttttcccccacaaatatactgttatgttatacaagagatacacttctgagacccagcccaagaggttagccatgaatcataaaatcatttctctgggaaaatatattctgagttataaataacgaatttacaaaaaacctttggaacaaattctgctatcatttgacagttcctttcatcagaataggattttagaagattgttcttggcttttkttctgataaaactaatagaagccattatgatctgtatttttttttctggttaagtgttaatgaatacattgacttttaaaaatcaccactgaatctctatgagattaatatggagaattcgttctccagattcctgtgtccaatgccttcttagcagctccacctagacatctaaaatgtcatacataatctgttcaaatctgagctcctgatgctcccatacctgctctcccttcaggctcagccatgctgggttcatggcagcttcaccctctccttgcc

SEQ ID NO: 542336 - DNA, 508 bp, Homo sapiens
tcatgggaaaatacttgcagggtgtagaggtttacaaatcaagttttagaagatagcttggttgatactgagatgatggcttctttactgaatgcttagtagcatatttatagcagaatcttccccaactcccaataccttgtaactttagctaaaatctattttaagttagccacatcaaaatcgatcatactgttgacccaccagacagcaagttatactggtttcattccttgactgcctagcagggacactgaggaaatgttgacagttaccaagataactacaactgttgaggctggcagaggtccagtaagcagtcccctctcccctactctggttcagaactaagggrgcgttcaacacgagggtgaggcacttggggattaaaacgttagtgtagtgataaatacttaatcaaaagacacagtgtagatgggtgcccatgataggagtgctcatagttccccccgaatgtttcagacttcccatctggcccagtgccaca

SEQ ID NO: 542337 - DNA, 628 bp, Homo sapiens
tgaggcgtgcctcgccctgcttctgtggccgctgtccttatccagccacctgcaagggaactgcagccatgtggaaatcacctatagctggagaggagcctgtccaaggggcttctgggataagcaacagcaggaagggagattagccatcaaaacagaactgtgtagctccaaatgagaacaaaaaacttaactttaaaaaaaagttacctaatagcagaataaagcgtgaagaagcctgtctgcaatgagtataggggggttagaagagcaaagtcatccagctttagtgcttggcaagctgtccattttccagcccccctgaatgacttgagcagctctgtgggccccacatgtgcagccagtaacaggatctcacccaccccaacccaagggtcctgagcgtctgtctgcaatccccacatccctgctatagaggggcagacaraacacatatgctgcccatttgtggaacctattgattcataagagggactagttctgaggcaggcactggctgtgctagaaattaattcactaatcaattactctcacatccccggtctgcgggatatttctgtgcgatggattcctcctgccccactgagctgcggctttggtttttata

SEQ ID NO: 542338 - DNA, 527 bp, Homo sapiens
tgaatctttggtagctgtcagttcaaatgaatttgtttcttacttacgggtgtacatagagagtttaagatctgcactgctgttctttatcagcaacaagggtaaaactatgccagaacagatagaacagtttctcttacacctttcatttactgttcatttacaggatttactgtttcagattagaggtcacttccttggagaagctggccctgtcccaggccagaataaggggatratctttcttctgtgctaggagagcccaatgaactgccagtacagtaatgtacgtgccattttagtagactacatcccctactcaactgtgaggcctgtgagaccatgtatatcttctttgctgttatatcccagcatctagcatagtgtctggcacatggtaaatatttaatacatattgaatgaatgaatgaatgaacatagtaatagctagaattttctgagcatatcttatacgacaggcacagtgccaactgagccttttacaaatataattaattcatgtaatc

SEQ ID NO: 542339 - DNA, 634 bp, Homo sapiens
aatggattgctgtgggatgtagattggagctgggagactagttaaaaagctgttgcagaagtctgggaaagagataatggtggcttgaaatagggttgatgatgaagaagagagggaaaagcacagatttgggacatgcttaagaggtagaatcagcacgacttgctgataaactgaattcagggagtaatagaaggcaaggaattaaagataatccctatatttctggttggagcaattggctataaggttatgctttttgtaaggaacgttttatggggagaagcagattggcaaatcaagagtgtgtttgtgattttagttgaaaatgtatgctaggcatccaagtggagatgctaagtgatatgtgcctgaagctcactccggggataggttagggctggaagttaatgyttagcagccatcagaacacagatgattttaaatccatgggattggctgaagcctctagtcatgcacagagaagtaaatggggttgcagaaaatacagtggattgatccacaatatccattccaacctcttagtgtgtcttcctggattgcagaatcttaaaaactagtaactatgtttcccaggatcccttcatttgggttatagctaggatttagattc

SEQ ID NO: 542340 - DNA, 560 bp, Homo sapiens
aagcagcaggaacaaaattccaaccacatctgtcagagtcacagcctctgctttttacatttttcagacatagtttttgcacatacatatctataatggttacattataacataggaagaatataggctaattttgattttatctatttttgtttagaagaaaaaaattcctcataatcaagataatataatgaaataaaaaccaaatgacaaaatacaaggaaatcacaataaacaaaatatttatgtgtgtatgagagaaatgatgcaagttttattaaaatagctcaacttagttatctttttgtccatttgtcaaaaataactatatcaaaattactactattaggtaasagatagtatagtgatacggttttctgacaatatcaattggaaaaataaaataagccatttgaagtcattctggttgtcacatctctgcttatattgaaaactgcctcaatttatgatttgactattcgatctctttaaaatgttgaagctatggattttttttctgccctcttttggcaggctcacaaattcacaatcaacaactt

SEQ ID NO: 542341 - DNA, 619 bp, Homo sapiens
atagtatttctcatatctagaaaattgtctaatacatggtagatacttgatgaatatgttttgaatgaatgaatgtttctaaggcactttttccaagtgtctttgacaggaattatattgagagtgtaactagtcttatttcaaaaccttattgtctttggatgtagaaagatttgaaattattttgaacaaatatcaaattcttcactcaacttctccaaccatattcaaattacatttactaatgagtctgggttgttactgagttatagatgccttgagtaaatggagaagaggtacatgtccaaaaaaatcaatttttacagaaccatctaagtctgctttcaatgttgtggcacaatcttaccaaataaaaagatggtaacatgggtaaatagaatggaattcccatgtttattgttacaaccagagtgactacagagttctgcaggttctaatagtgaccccagagtaaaatagacttgtgcttctacatcctccaatgtcattaggagtaagcctgccctgaggtaatgtctgttttgcacagtttctgccagaggtaatgatcagtggtgaagtatggccagcrcagggctcgaaatgctttggaaggcca

SEQ ID NO: 542342 - DNA, 570 bp, Homo sapiens
caagccatccttgctgtgttttttctgtgttcttgactcacagaccccttgagcacaataaaatgattcttcccttcccataaagtttgaggtggtttgttacatattgatagtaacaggaacatgcagtaatgtccaaatgtatatctctacttcaaacttctatttaaggtccagaactgtacatccaattgcctacctgacagctccacttggaagttcacaggcatcacaaactcaagaagcaaataagaaaaaaaaaaaaarggagaagacaagaactgacgagttagaaaatcttaaaacacatgcacacacacattcacacacacacacaaaccaacataattaattaataaatcaaaaggcttgtactttagaggaaaaaaaatctacaaaatagataaatttctagcaaatcaaactttcataaaagaagaaagcaaaattcataaaatgggaaagtttaaataaccaccaaagagaggaaaaatttaaaagagacttctttgcatcactttatataaataaatttgaaaatcgatataaaatgtttaactttctggaaaa

SEQ ID NO: 542343 - DNA, 515 bp, Homo sapiens
cagaggcagtcccttcccctactgtcaaccttgggttagacatgtaatctgctttggagactaaatatatatacatatttgtaatttctactagtttctaattctacccattatctcagggctgtgatgagtatgtctaaccctctgacctgaactccatgagctatctcaagacatgtttgtatgtagctcttattcccttgtacgagcagcggcactgataattatgactggccaagaagccatggcttatgcatagttcttgatgtgtgaagatttttgggtggggggagttggaaaggaatctctgagaaatgggagggaaacatgggggcattagctacttggaaaaggtaccatgaggatgaataaaagggaatggagcctgctagttgggaarttgagaagtttaaacgcatacttggctgacatctcaggctgcctaagagtgtctatagaatttatcatgataaagtgatattttcttaatctcctcttttaattaaaaaaaacaa

SEQ ID NO: 542344 - DNA, 656 bp, Homo sapiens
gccatccagctccagagatcgtctttctgatttgttccaagcctttccaacatattcacctctctgtctctgtctttctctgacactcatgatgttgctctttagtgatcatagaagctgcccaatataaacatttcccatttccttttcataaaccatagaaaagtataagaaggactggtatttctgaatctctttgttcagaaaacatggagctggatrtagtggttgcatgactgatttctgaggataagtagctaaattatttagaaatgaaaactgtatgctttaatgttagattatggttttgcattctttagtttgtcatagaatttattgctctgaagaatgattacatgatgttttcagattagggccagatgtatatccagaatttaaaactgcagagagaaatgtataacatatggtctggaattcttaggaaagttatgaaacttctgggtctcaagaattactatgacatgaatgttacaaaatgaggtcactttaaagatatttatactttttaaaattacagttctgttattagctgaaaaaaaatgagatactgggaggtttggggccaaaaacttagtggcacaaacttcttgtctctgtagagtgtgtattatattcttaccccagtgcctgcaagc

SEQ ID NO: 542345 - DNA, 656 bp, Homo sapiens
gccatccagctccagagatcgtctttctgatttgttccaagcctttccaacatattcacctctctgtctctgtctttctctgacactcatgatgttgctctttagtgatcatagaagctgcccaatataaacatttcccatttccttttcataaaccatagaaaagtataagaaggactggtatttctgaatctctttgttcagaaaacatggagctggatgtagtggttgcatgactgatttctgaggataagtagctaaattatttagaaatgaaaactgtatgctttaatgttagattatggttttscattctttagtttgtcatagaatttattgctctgaagaatgattacatgatgttttcagattagggccagatgtatatccagaatttaaaactgcagagagaaatgtataacatatggtctggaattcttaggaaagttatgaaacttctgggtctcaagaattactatgacatgaatgttacaaaatgaggtcactttaaagatatttatactttttaaaattacagttctgttattagctgaaaaaaaatgagatactgggaggtttggggccaaaaacttagtggcacaaacttcttgtctctgtagagtgtgtattatattcttaccccagtgcctgcaagc

SEQ ID NO: 542346 - DNA, 656 bp, Homo sapiens
gccatccagctccagagatcgtctttctgatttgttccaagcctttccaacatattcacctctctgtctctgtctttctctgacactcatgatgttgctctttagtgatcatagaagctgcccaatataaacatttcccatttccttttcataaaccatagaaaagtataagaaggactggtatttctgaatctctttgttcagaaaacatggagctggatgtagtggttgcatgactgatttctgaggataagtagctaaattatttagaaatgaaaactgtatgctttaatgttagattatggttttgcattctttagtttgtcatagaatttattgctctgaagaatgattacatgatgttttcagattagggccagatgtatatccagaatttaaaactgcagagagaaatgtataacatatggtctggaattcttaggaaagttatgaaacttctgggtctcaagaattactatgacatgaatgttacaaaatgaggtcactttaaagatatttatactttttaaaattacagttctgttattagctgaaaaaraatgagatactgggaggtttggggccaaaaacttagtggcacaaacttcttgtctctgtagagtgtgtattatattcttaccccagtgcctgcaagc

SEQ ID NO: 542347 - DNA, 517 bp, Homo sapiens
ggtgggcaaagccagaaaatcctagaggaggatgcagggagtagcagcattagagcctcaccttgtcatgctggccactgggtggcaggggccggtttcaatgaaggcactcatacccacccaccaaagtccagcctctccttttggcccaagctggccaggaactggggcctagagtggggactggaaacaccacattgcccggctccccagtccacaggaactgctgggcccaccagggctgcgctctttggggagcagaaccagcaggaactcagacccagccagccctcccacccaagtgctgtttccgatcctgatgcctccacccacagggccctgtccccctgtggtgtccgctactccgtgtccagcatgctcaggggtcccagccggtctctgcaacacagagagagaggaagcaggcctgggaatcacggcggatgtgggggccctgccgtacccaggattcccgtggaaacgttgtgcacrcgtgccactggagcaggagcaggag

SEQ ID NO: 542348 - DNA, 635 bp, Homo sapiens
ctgcactcggctagtgtttatctcaggcacagagcagttatgcagagagtgcagcaggaatcctgttatggactgagttctgtcccctccccttttctcacattcataggtttaagtcctgatcctcagtacctcagaatgtgacagtatttggagaaaggacctttaaaaagaggtaattacacaattaaatatgatcataacaattgggccttaatccagtatgactggtgcccttatgagggcaaggagaggcaccaggaggcacctgcacaaagaaagaccccatgaggacatagcattctccatgtgcaagccaaggagagcagcctcaggagaacctgtccccatggatacctggatctcagactcctacctctggaagtgtgagaaaataaattgccgccatttaagccacaycgtctgaggtgctgtgtttcagcagcccgagcagattactacaaataccctgtgtgcaaatcagggcacttggattaaaaccacaccaaagacacttaactcggtgtttcatctttagaatatcactttgccgctctgaagctccgttttcctctcctggtgatgtggtaatcgtatcattctctaaatcttcttcaggtgactcatgtacaaaa

SEQ ID NO: 542349 - DNA, 532 bp, Homo sapiens
ctcacatttgaaaacaaagaactgagcctgtatagttcctttaaaaatttttaattaagagctataaataatgatttccaaaatacacatgtgcattctcaaacacacactccacgtgcaaccacaaacaaacatatacacaaaatgtagtcacaaaatactcaattgaggattgtgtagtagatgagttttaaaactagcaataaattgttcattctcaaatttaaaaaaaaatgctaacatacctactgcaatgagaacaacaacaaaatactattttgcttatattgtcmctttcaaaaaaagaagaaaaataataacaaaaacctaggaactgtttgttacataaatgaatgcaaaaagactgttagttttggttcctccatttggtgtatttttgacttggcaaaatgaaagatggaatatagtgaggcaacgggtaaggaaccgggtggccatcttttgtgatcggtcccctcatcccaaggcttttatattgatagaattcccctattttgactttagtcaaaat

SEQ ID NO: 542350 - DNA, 573 bp, Homo sapiens
aacaaccccatgtactttttcctcagtcacttgtcatttgttgatgtgtggttttcttccaatgtcacccctaaaatgttggaaaacctgttwtcagataaaaaaacaattacttatgctggttgtttagtacagtgtttcttcttcattgctcttgtccatgtggaaatttttattcttgctgcgatggcctttgatagatacatggcaattgggaatcctctgctttatggcagtaaaatgtcaagggttgtctgtattcgactgattactttcccttacatttatggttttctgacgagtctggcagcaacattatggacttacggcttgtacttctgtggaaaaattgagatcaaccatttctactgtgcagatccacctctcatcaaaatggcctgtgccgggacctttgtaaaagaatatacaatgatcatacttgccggcattaacttcacatattccctgactgtaattatcatctcttacttattcatcctcattgccattctgcgaatgcgctcagcagaaggaaggcagaaggccttttccacatgtgggtcccatctgaca

SEQ ID NO: 542351 - DNA, 573 bp, Homo sapiens
aacaaccccatgtactttttcctcagtcacttgtcatttgttgatgtgtggttttcttccaatgtcacccctaaaatgttggaaaacctgttttcagataaaaaaacaattacttatgctggttgtttagtacagtgtttcttcttcattgctcttgtccatgtggaaatttttattcttgctgcgatggcctttgatagatacatggcaattgggaatcctctgctttatggcagtaaaatgtcaagggttgtctgtattcgactgattactttcccttacatttatggttttctgacgagtctggcagcaacattatggacttacggcttgtacttctgtggaaaaattgagatcaaccatttctactgtgcagatccacctctcatcaaaatggcctgtgcygggacctttgtaaaagaatatacaatgatcatacttgccggcattaacttcacatattccctgactgtaattatcatctcttacttattcatcctcattgccattctgcgaatgcgctcagcagaaggaaggcagaaggccttttccacatgtgggtcccatctgaca

SEQ ID NO: 542352 - DNA, 555 bp, Homo sapiens
tgcacacaattttctgattgcttaaaatgaatcttctccaggattagttcttgccccagaggaatcacactaacctctgctagcatatcttgggtaacttagacactcagaaggagagccagggaactgttaacagtcaggtctcctgagagaagggtgtgtgagtacacacgtgtgtgcatatgtgtgggtacatgcatgtgcatgtacagactcctgtttgctgcataccctctcgtgtctattccaactgcctaatcactttttgcttatctggggaattctgatgggtctctgacatttctagaacatcagtctcttctactgcctggcctgcttcccgaaatctgcttgtgttttttgtctgatctcagaggctggctgatcctcactgagttagggcttctctagctcagaaccatggctgcaggaaagcctctcgcactgctgctttgctscagggctcactggtgccgaatactgccagagtatagtttcaggggccagtctgggcacgtaactcacttaacaggaatggaaatcttcctcctcctg

SEQ ID NO: 542353 - DNA, 592 bp, Homo sapiens
tggctagagtggagttcatttaaaaaataaaactgggttaagaaaggccattgcatgagtacagacgtcaatgtaacattttaaatgtaattattaatgttgaaatataaaaaatgtcaaggcctataaaaactgaaagaagagcaaaacatggtcatttttatgatcagcatagtaatttttgacataagtttaagggtataatgtttgacagaagtttaagggtataataaatttgacatatgtttgggatgtaatgtccataaatttttcattactctgggatttatataaacattttaaaataatatttattttttaaattacaaaacaatataggcttaatcatgtatctaccagtttagtaaacatttgttataattttactgcattgcagacactattttaagtctttagagattcatcaatgacccaaataaagaaaaattgttgcctgcatagaacttttgatgacactataagcaagaaaagcaagcaaaytaaacatcagtaagataatgacaagtgctaaagagagcaaaagagaaaagtgaagtcaaatataggtatgtagaaagttccatagtaaagg

SEQ ID NO: 542354 - DNA, 522 bp, Homo sapiens
gtttggggataattgtaccttttttcaatgttaagtcaggatcttctggccattttgcccttctctgagcacatggtgagccagactattcatgggaaacaatactttggataaggtttgccaattaaatctctctccacatttcaattactttctctaagcaaggtagacatatgaaataacttttcattaaatattgcatcttggaatcctcaataggaaggcaatgaaaagctaacccagcccmatcggatactgagctcttccttgcaatagtcctgtctgtgactgtctagcttctgtctgaacacctatgaatgacagagaactcttcccccaggaagataattccatatgtgtgcttctgtcaggttggctgcatattgaaccaaaatgtatcttctcgtgttcctgctctcctactcttcagttctaattctttcctttagggccacatggaagtaaatcctcattttaatctgggttctccagaaatcaaagcctgatgcagaaggaaggagg

SEQ ID NO: 542355 - DNA, 601 bp, Homo sapiens
ctgaggcaggggaattgcttgatcgagggaggtggaggttgccatgagccgagatcacgccmctgcactccagcctgggcgacagagcgagactcccatctcaaaaaaaaaaaaaaattaactacaatgggattgcaagaaatgcttttatgagtgtatggggaaggctgataatcgggaaggcagcatacctttaagaaatactgatggtgctttttttcctgtctgtattcttaaactaacaattaagcagtttcccagataaaaacagtagaaattacatgagtagagaaaaatacttatggtaggtaattgcttccatgggaattacagaaagagcagaattcagtttactttgaagatgcacagccttcagatcaattgagaaaagaatgcattgtataaaaaatgatagcatggatcacttctgaatgtttatcatattaaaatgcagtttggttcacatttgcattatttagggctgcttttcctaatcacttggatggcagtattgcttatgcaaaagagtgacatcaatcttagttttctctcatttttcagaatatacatttctttaaaatatttggtcatttcataaagc

SEQ ID NO: 542356 - DNA, 395 bp, Homo sapiens
aaactgaaaataggtttgtaaagaatatgctgttttgtacagtgatgtaagaaggaagaatggagggataaagtataagaaaaacaggatgaaaaaggagagaagagataagagakggaggttattgaagcaaaacaaaacaaaaacaggagggtccatgttcctagacttcagtggtagaaacggtggccggactgctttttaccctttgggtggaagaaaggacatgtttggcaggaggaagggaaaggagacgatgggtactaggtatgcatggttctggcgggcatcaggactggggtggaataatgagtaaagccttagcagcaaagctgtaccaacacagtgttggaaaccctgtgccagtccaagcaatgacagtgccctgctcagac

SEQ ID NO: 542357 - DNA, 682 bp, Homo sapiens
ttctcttgttttatgaagctttcaagcagtttttctctggtaaacagacttaaagtgctttctagattcaagactacatcgtctttattttccttctgagcaacaagttccacacccgaatgagagtggcactcctcattggcattattaatttttgatatgaagtctatctaaacgtggtcagtacaccaataattggtatggtaaaccgcctgactgtaatgaggctgtggcaccaacgctttctgctcccgagaatggtgacatggtcagtcactcggccactctctggagcaggttctttcccagtccccatggcacctccacgctctgcttcaaccyctcctgttttcctaatacattcagtcacattttaatggctgaaatggctttgaagctttccccacggaaccaattttcaccctcagcgaagggcagctcctgtccttcagcaaggagtgtgcttcagtgataagttttcacaggagcccagaactcaaatgtgttttgactgttgccctgatggcagcgtgttaacattagcaccagaagtagatctgtcatggagcttttctgatgagacaggctctccaaattaattgaggctgatggcagattttgtcattgagatgagatgttgcccacagctagttagactgctggaatatttggtgctaatgac

SEQ ID NO: 542358 - DNA, 559 bp, Homo sapiens
gacaagacttttaaaaaatcacacttctaggtgggcacagtggctcacgcctgtaattccagcactttgggaggccaaggcaagaggattgcttggggccaagagtttgtgacctgaatggacaacatagcgaggccctgtctctacaaaaaatacaaaacagccaggcatggtggtgcatgcctgtagtcccagctcctggggaggtgggaaggctaagatgggaggattgcttgagcccaggagtttgaggctgtagtgagctataatcatgccactgcactccagcctgagtgacagagcaaaactctgtctctaaaaaaaaataataataataaagaaagaaaatctcgtttatgttgctatcctcttttgttgggttgtgtctgacagttgaccttgagacttgagaggtacagaatgcagcagatgaaatgatgtgacccaacctccttatttcttggcataggggagaatgatgattgggatggagcaactcaggatagaaagctgcttgtyacttaaagcagtcatccattcagtcatttattcagtcagt

SEQ ID NO: 542359 - DNA, 539 bp, Homo sapiens
aaagaaccagaaggtttgagatattcacattgtacatacctaatattttgaacaaataccttttgctgcgtaataaacaaacccaaaacttattggcttaaaaacaacttaatatcatctctccaaattctgtggattgactggactcagctgaaagattcttgccaggagtgtctcatgtgattgaagttagacacagctgaggctggaatcagttgaaggcaggagactcaagtggcttcttcacccccaygtttggcactgcagctgaaggctggcttggaggagggcagaccagacatttttctctttccatgggtctgtccttagcatgttgtcgcagggtagttggactgtgacacactagacagcttcccccagaacaaaatcttcaaggttgcttatgacataactttggaagccattccaagtgattctgtcacattctctggatcgcacgttctctgtggaaagggactatatattactcatgaatgacaggaggcgtgattcactgcggggggcgggggcatctttga

SEQ ID NO: 542360 - DNA, 539 bp, Homo sapiens
aaagaaccagaaggtttgagatattcacattgtacatacctaatattttgaacaaataccttttgctgcgtaataaacaaacccaaaacttattggcttaaaaacaacttaatatcatctctccaaattctgtggattgactggactcagctgaaagattcttgccaggagtgtctcatgtgattgaagttagacacagctgaggctggaatcagttgaaggcaggagactcaagtggcttcttcacccccacgtttggcactgcagctgaaggctggcttggaggagggcagaccagacatttttctctttccrtgggtctgtccttagcatgttgtcgcagggtagttggactgtgacacactagacagcttcccccagaacaaaatcttcaaggttgcttatgacataactttggaagccattccaagtgattctgtcacattctctggatcgcacgttctctgtggaaagggactatatattactcatgaatgacaggaggcgtgattcactgcggggggcgggggcatctttga

SEQ ID NO: 542361 - DNA, 505 bp, Homo sapiens
gtttgtttaggattcttttggactttctcytactcttaagcataagcacacttcatgaagtgcccccaaatcccagtgatattttgactgggatttctcaataaatatttgtaacaaaatattttcattcacatttctggctttcaagtcgtgtaatgcctgagactttcagtttcttatatgtacactgttacaacactacttatctacaacacagaaattgcatgagacaatgcgtgataataaaacacggttcaaaaatatctgatcatggcatttctcaaagtatgttctgtaatacatagatcctgcaatatactctgcaaagaaaataagagttccctgggcaaatgagtttggaacattaggtggtatattttcttttttggatatttgtaattcagggcaacatattagaaacccttagttctataaaaaaggtttaactttgtctaaccaatgttttccaaacttgtttgatcagggaaagtattttgcctattga

SEQ ID NO: 542362 - DNA, 526 bp, Homo sapiens
tttttgttttgtcattatcaccaaattactaatatttctttaatctagtatggctttatataaaccaggtaattagaatttgtcaccttaagttatattttaaatattgatacggtttgggtgttttgtcccctccaaatctcatgttgaaatacgacctacaatgttggaggtgtttgggccatgggggtggatacttcgtgaatggcttggtgckgtcctcatgataatgagtaagttctcgctatacaatttcacacaagagctggttgtttaaaagagcctggcacctcccctctttctcgctcctcctctcaccatgtaatttgtctattcctccttcaccttctgccatgactggaaactccctgaggccctcagcagaaacagatgctggctccgcacttgctgtatagcttgcagaactgtgagctaattaaatctctttataaactacccagtcttaggtatttctttatagaaatacaagaacagactaatacagaaagttggtactgaggagtgg

SEQ ID NO: 542363 - DNA, 622 bp, Homo sapiens
ccaaaccagctctccagcacatctcttctgctctttgatttcctagactgaagttagacccagccaaatctgagcacaaacccagaggaggcatagcaagctcttaaagcagtctttgaagctctcccttactgtgtttgagtgagagcaggtagtccccatctctcctttcttagggaaagacgctctctgtgcagctttcccagagaagtagtcctcaaaagtgttctcccttcccactctcttaattcttttatatcctccattttaatcagtgttcttctagtgtccagstgcaagtttgtgcaaccaactcctgcctttcaaaatgtgtattttgatacagaacctcactttggtgtgcagaatctgctgtatcatgaaaccttgttggaaacttaaacattttattatataagatcaaaacaccttattacatacacatgtacccaaagaaaaacaaacactggatgaaggaaaacattcaacactttagtattcgggtaatattgcattgaggcatgaaaagctattctactgtaccccaaatattgaggttgccatggatttattcctttaagaaggttaattgactatgtaccacgtgcaagcagtgcgttag

SEQ ID NO: 542364 - DNA, 622 bp, Homo sapiens
ccaaaccagctctccagcacatctcttctgctctttgatttcctagactgaagttagacccagccaaatctgagcacaaacccagaggaggcatagcaagctcttaaagcagtctttgaagctctcccttactgtgtttgagtgagagcaggtagtccccatctctcctttcttagggaaagacgctctctgtgcagctttcccagagaagtagtcctcaaaagtgttctcccttcccactctcttaattcttttatatcctccattttaatcagtgttcttctagtgtccagctgcaagtttgtgcaaccaactcctgcctttcaaaatgtgtattttgatacagaacctcactttkgtgtgcagaatctgctgtatcatgaaaccttgttggaaacttaaacattttattatataagatcaaaacaccttattacatacacatgtacccaaagaaaaacaaacactggatgaaggaaaacattcaacactttagtattcgggtaatattgcattgaggcatgaaaagctattctactgtaccccaaatattgaggttgccatggatttattcctttaagaaggttaattgactatgtaccacgtgcaagcagtgcgttag

SEQ ID NO: 542365 - DNA, 622 bp, Homo sapiens
ccaaaccagctctccagcacatctcttctgctctttgatttcctagactgaagttagacccagccaaatctgagcacaaacccagaggaggcatagcaagctcttaaagcagtctttgaagctctcccttactgtgtttgagtgagagcaggtagtccccatctctcctttcttagggaaagacgctctctgtgcagctttcccagagaagtagtcctcaaaagtgttctcccttcccactctcttaattcttttatatcctccattttaatcagtgttcttctagtgtccagctgcaagtttgtgcaaccaactcctgcctttcaaaatgtgtattttgatacagaacctcactttggtgtgcagaayctgctgtatcatgaaaccttgttggaaacttaaacattttattatataagatcaaaacaccttattacatacacatgtacccaaagaaaaacaaacactggatgaaggaaaacattcaacactttagtattcgggtaatattgcattgaggcatgaaaagctattctactgtaccccaaatattgaggttgccatggatttattcctttaagaaggttaattgactatgtaccacgtgcaagcagtgcgttag

SEQ ID NO: 542366 - DNA, 497 bp, Homo sapiens
taattcaaaccaaatcagaaaaaaaaaatgcccckgccaaactactgaagttaaataattgacatttttagcatctctattgcctttcaaaaagtagcatgatgaaggaagcacctcagcaagaagtttcctgagaaggaagagtgtgagtggtttttttttttccaattagctttgtgtccttgccttgaaatggtcacaactgcaacatcacggatgtcatctggaatttcttcatcattctcaagcttcaagatgagatcaaggagccatagtgtgcattttcctcagccgatttgaagatttcagcagggattccatcagctccagatgccttgttgtttttcatctgcttgatggctttcctcacctcataaagagttggagggattttgagattgccactgattgggagttgtgggatggagttgaaaacactcccactgataaaataatttccactgaagacctggaaatgctcttttcaatatgtgttg

SEQ ID NO: 542367 - DNA, 497 bp, Homo sapiens
taattcaaaccaaatcagaaaaaaaaaatgcccctgccaaactactgaagttaaataattgacatttttagcatctctattgcctttcaaaaagtagcatgatgaaggaagcacctcagcaagaagtttcctgagaaggaagagtgtgagtggtttttttttttccaattagctttgtgtccttgccttgaaatggtcacaactgcaacatcacggatgtcatctggaatttcttcatcattctcaagcttcaagatgagatcraggagccatagtgtgcattttcctcagccgatttgaagatttcagcagggattccatcagctccagatgccttgttgtttttcatctgcttgatggctttcctcacctcataaagagttggagggattttgagattgccactgattgggagttgtgggatggagttgaaaacactcccactgataaaataatttccactgaagacctggaaatgctcttttcaatatgtgttg

SEQ ID NO: 542368 - DNA, 452 bp, Homo sapiens
ttctattcagtgagttcctgtagttcttttctcttcgttataaagagcaacaaagcatatttctagtttttatgattgcacatccttttaaaataaaagtctttatatatttttttctggtgccccaaacattgagataatcagggagtattattaacatcagtggtataatatagagtgactgttgtgtttcatactggtgagtgcctaaatgtactgattcctggtttggttatattcaactgatatagattgagggttctgtcaaattatrcgaagactaataataggaagttcctgcttcctgggtattgtttatgagagaaattagagaagatacaaagatttggatttcattcttcatcaggtgttatattgtcaggagagaaagaatactgtagttggaagaatcttgccctagaagcactgagttttagaacaccatataccac

SEQ ID NO: 542369 - DNA, 553 bp, Homo sapiens
gagctcccctgtgctctgaggcttagggaaaatagacccaagcccccagtgcactttctatgctgtctccacattgccaggtcacttctggttctgagcttcaccctaactctcctcgtgccccttgcttctcttccagaagctgtccttgagctgagaacggtaggatgaagtttttttttttccctaggcagaatgaacagtaatcccagagatcctgagatgagaaaagggtgtttgacttattcaaagaagaccaaggaagcccaaagaccagagaagagtgcaggaaaggggcggcggtctgagatgcagtcagagcagtggcaagcccccakagtctgtggcaaagacttcaggtttcatcctgaagaggaagacaggtctttggagagttttgatcaaggaagtgagatgaaatatcttaggcttacaaagaactactctgacatctaaatggaaaatggactgatgaagcaaaagaagccacaaggaagccagttcagaggctattgaaatgctccaggtgagagatgatggtggtctggatgag

SEQ ID NO: 542370 - DNA, 553 bp, Homo sapiens
gagctcccctgtgctctgaggcttagggaaaatagacccaagcccccagtgcactttctatgctgtctccacattgccaggtcacttctggttctgagcttcaccctaactctcctcgtgccccttgcttctcttccagaagctgtccttgagctgagaacggtaggatgaagtttttttttttccctaggcagaatgaacagtaatcccagagatcctgagatgagaaaagggtgtttgacttattcaaagaagaccaaggaagcccaaagaccagagaagagtgcaggaaaggggcggcggtctgagatgcagtcagagcagtggcaagcccccagagtctgtggcaaagactycaggtttcatcctgaagaggaagacaggtctttggagagttttgatcaaggaagtgagatgaaatatcttaggcttacaaagaactactctgacatctaaatggaaaatggactgatgaagcaaaagaagccacaaggaagccagttcagaggctattgaaatgctccaggtgagagatgatggtggtctggatgag

SEQ ID NO: 542371 - DNA, 553 bp, Homo sapiens
gagctcccctgtgctctgaggcttagggaaaatagacccaagcccccagtgcactttctatgctgtctccacattgccaggtcacttctggttctgagcttcaccctaactctcctcgtgccccttgcttctcttccagaagctgtccttgagctgagaacggtaggatgaagtttttttttttccctaggcagaatgaacagtaatcccagagatcctgagatgagaaaagggtgtttgacttattcaaagaagaccaaggaagcccaaagaccagagaagagtgcaggaaaggggcggcggtctgagatgcagtcagagcagtggcaagcccccagagtctgtggcaaagacttcaggtttcatcctgaagaggaagacaggtctttggagagttttgatcaaggaagtgagatgaaatatcttaggcttamaaagaactactctgacatctaaatggaaaatggactgatgaagcaaaagaagccacaaggaagccagttcagaggctattgaaatgctccaggtgagagatgatggtggtctggatgag

SEQ ID NO: 542372 - DNA, 598 bp, Homo sapiens
taattaagcttgcttttattgtttttcttttatttgtattttccccattaataccaatttttgctttttaggaagatatgacaaactctaggtcattccttgtctccgattcctgcttttcagatttctgctctggctaggttacatagattctttctgagagagaatttagcarctctcaggttaacactaaccttttgatttagtgtgaatagtaaccgtttgatttttaaaaagtatacatctttaaaacgtaaattttactctgacaactaaaaaaactacaaatttttatccactattttccaattcttccttgaagtcctctgatgcagaattggtttctaccaaacataacagatttatattctctaaccacaacatatttagagaggaaagattgtgacggtgaatctgaaaacaactgagacgaagttggggtgggttcacccaaatccaagctttcctcagataagaataccagggctttcctgagcacagggctcattgtcaatgaatccccacaattgccaacctcttagtgtccatgtatgatttttatctgatttttgttttataagtcttacaagacccatta

SEQ ID NO: 542373 - DNA, 598 bp, Homo sapiens
taattaagcttgcttttattgtttttcttttatttgtattttccccattaataccaatttttgctttttaggaagatatgacaaactctaggtcattccttgtctccgattcctgcttttcagatttctgctctggctaggttacatagattctttctgagagagaatttagcagctctcaggttaacactaaccttttgatttagtgtgaatagtaaccgtttgatttttaaaaagtatacatctttaaaacgtaaattttactctgacaactaaaaaaactacaaatttttatccactattttccaattcttccttgaagtcctctgatgcagaattggtttctaccaaacataacagatttatattctctaaccacaacatatttagagaggaaagattgtgacggtgaatctgaaaacaactgagacgaagttggggtgggttcacccaaatccaagctttcctcagataagaataccagggctttcctgagcacagggctyattgtcaatgaatccccacaattgccaacctcttagtgtccatgtatgatttttatctgatttttgttttataagtcttacaagacccatta

SEQ ID NO: 542374 - DNA, 598 bp, Homo sapiens
taattaagcttgcttttattgtttttcttttatttgtattttccccattaataccaatttttgctttttaggaagatatgacaaactctaggtcattccttgtctccgattcctgcttttcagatttctgctctggctaggttacatagattctttctgagagagaatttagcagctctcaggttaacactaaccttttgatttagtgtgaatagtaaccgtttgatttttaaaaagtatacatctttaaaacgtaaattttactctgacaactaaaaaaactacaaatttttatccactattttccaattcttccttgaagtcctctgatgcagaattggtttctaccaaacataacagatttatattctctaaccacaacatatttagagaggaaagattgtgacggtgaatctgaaaacaactgagacgaagttggggtgggttcacccaaatccaagctttcctcagataagaataccagggctttcctgagcacagggctcattgtcaatgaatccycacaattgccaacctcttagtgtccatgtatgatttttatctgatttttgttttataagtcttacaagacccatta

SEQ ID NO: 542375 - DNA, 484 bp, Homo sapiens
aaagagagcacgagacaaagagagaggcaacctgacttttttaatatggttcatgtgaaagatgtcaatggcaatagctttgccatccagctttccaacatattcattattggagaagacaatagaccgtggattccttgccccaaagaaaagatgcctgcttcctcattgctggagacagtgacagtctagaagccaaaaagggcagtgagtgaaatgagctctagatgggagaagtgaagaacttctaggggctaattaaagatataaratcatagaagtaaaaatgaaaacattgctttcagagactttctgctgaaggaacatgtatttgtatttttttaaaaaaattattaaaacacgtatggaaacaagcccaaatcaacccaatccagcagaaaaaaagagtaaactggaggagcagaaccccaagattgaccctggaagtattagatacagatgataaaacaggaatgtttaatct

SEQ ID NO: 542376 - DNA, 484 bp, Homo sapiens
aaagagagcacgagacaaagagagaggcaacctgacttttttaatatggttcatgtgaaagatgtcaatggcaatagctttgccatccagctttccaacatattcattattggagaagacaatagaccgtggattccttgccccaaagaaaagatgcctgcttcctcattgctggagacagtgacagtctagaagccaaaaagggcagtgagtgaaatgagctctagatgggagaagtgaagaacttctaggggctaattaaagatataaaatcatagaagtaaaaatgaaaacattgctttcagagactttctgctgaaggaacatgtatttgtattttttwaaaaaaattattaaaacacgtatggaaacaagcccaaatcaacccaatccagcagaaaaaaagagtaaactggaggagcagaaccccaagattgaccctggaagtattagatacagatgataaaacaggaatgtttaatct

SEQ ID NO: 542377 - DNA, 484 bp, Homo sapiens
aaagagagcacgagacaaagagagaggcaacctgacttttttaatatggttcatgtgaaagatgtcaatggcaatagctttgccatccagctttccaacatattcattattggagaagacaatagaccgtggattccttgccccaaagaaaagatgcctgcttcctcattgctggagacagtgacagtctagaagccaaaaagggcagtgagtgaaatgagctctagatgggagaagtgaagaacttctaggggctaattaaagatataaaatcatagaagtaaaaatgaaaacattgctttcagagactttctgctgaaggaacatgtatttgtatttttttaaaaaaattattaaaacacgtatggaaacaagcccaaatcaacccaatccagcagaaaaaaagagtaaactggaggagcagaaccccaarattgaccctggaagtattagatacagatgataaaacaggaatgtttaatct

SEQ ID NO: 542378 - DNA, 612 bp, Homo sapiens
tctactttgtagatagtcatctcaggagcaaaaaaaatttcaagatgtagagtgggtggtggcaactttatgggtttctgagttgcaaactaaaactgtgaatggtgcccactggagttgggcaatattgtgtgtctgaaccaactgtagagagaaattaaactaaatgagtatctgggaccttttaacagggagagtaaaaaagtataaagattggatctgggcctaagaagtggcctgtatttaatagtaagactgtcaccagagtctgtttagtctgtccagggcagaaagaccctctacccaccacggcaatgtgaaaagccttgagcgggtaggccatgatagagaagaacraagtatgagaagatggacaatcactgggctgatatttgcctctttggaagatcagattttgtaaaactagtctatttgattattatagtaatgggaaaattagaagaactaattcacttagaatctggcattgagttaaacaattcttaaacatatcagtagtgatttttgccaataaccaatataacaaatcagtttcaaagctgactacaagtacagaatagtatagaactacttggtaggactttaatcaac

SEQ ID NO: 542379 - DNA, 554 bp, Homo sapiens
gtgtaaatacttcaaacaaaagcctaaccatgctcacatctggtcaggagaagaggggaacatgagatgaatacatttattagttattacctggatgctaaaaattattatgaccctgcagttattttttaaagtttattttattttttgtttgtacagtggttcatctgaaactagtcattattaatatgttgatattttccttttgcttttcttcctgttcatattttaacgtgtgtgtgtgtgtgtgtgtgtgtatgaatgtctgaatgcaacatttttagaaacttaaaggtataaaagctgaaaagagattataacatctccattattgagcgcccactatttgccaggctagtgtactatgtgtattacagacattactcctaaatctcactacaatcctataaattgctgttccctccattttacatgggtaaactgaagataaaactaaggatagaagaggtgaagcaacttgctcaaggtcacgaatttggccagagcmaagagcctggacctgtgtccaggtgagggcccttcagagctcatgc

SEQ ID NO: 542380 - DNA, 606 bp, Homo sapiens
ataatgttgcctttaccttccataagccatggatttttatagaagccttcaagaaatggagcttatgatgtcaaaagcacatggattgtaggcagaataagaggcttttttaaaaaattatgttttgtaagtgttgtgttatgatacatggacacccactctaaaaccaaaaatgtttttccaaacaagatcctaaaagtgtttgccccagttagtctaagatagcccttatggcaatgccaaagattaaagtttgtgytcacagttgttttaaaccaagatattactctctggcttttcaatcatatttttattccttttgtgcatctcatcaaagcatttcgattagaacaagtcattgagaaggcagaagccaaaataaacagtcgagtttaaattactacagtgaagggaccacagttgcactcaggcccaagttatggggacttttaatgattctacgaggttctagtatttatggaattggcttgcacatatattttttttcttcctgatttatttctgagttctaaagccatccatgaattttaatcctagtctatcttgtcaaattttttttctgatagggttctcagaggttccagt

SEQ ID NO: 542381 - DNA, 289 bp, Homo sapiens
tttgaagtgagattagtgtttgttctaatagagggactgggggaaagttctcagaagatctaacaacagcagcaatagataaattaaattgtactaygtgctgtcattcagaaaagctgtttacagacagagctattttgaagccattaaaaaatgctattcatctcaaacttgccatctgtcttcagcttctggaatcgtctacggcgttagcgaagagattagtctctgtggccagcttccttctagctctcctgtgacactcagggaggctcttatgggaagaagg

SEQ ID NO: 542382 - DNA, 289 bp, Homo sapiens
tttgaagtgagattagtgtttgttctaatagagggactgggggaaagttctcagaagatctaacaacagcagcaatagataaattaaattgtactacgtgctgtcattcagaaaagctgtttacagacagagctattttgaagccattaaaaaatgctattcatctcaaacttgccatctgtcttcagcttctggaatcgtctacggcgttagcgaagagattagtctctgtggccagcttccttctagctctccygtgacactcagggaggctcttatgggaagaagg

SEQ ID NO: 542383 - DNA, 262 bp, Homo sapiens
taacatcaatcatccaacagtttttgatagcacatctacatgcatctgcatgagccaggcactacatacagtaagctctaaaaacacaattataaagagattttatatctctcttaaagacactcttatttgggtgacagaaaaattaacaggcaattaaaattcattgtattaagcattataatggcatctataggcacctaattytgtaaacagagggtggtaaattattcagaaatgacttatggtggtgttgacatca

SEQ ID NO: 542384 - DNA, 673 bp, Homo sapiens
gtggaaaggataaaggaataaatgaataacttagagtacatatgaagagaggagacatctgcaatgggactattttttaagatggcaatttaagtcagggaaaaacattccgcctgtcatctgctaccatttaaatgtctgtagaaaggagaaagaaacctacccgtagttacctagagaagaagaaaatatggattttccttgttagcattaaattaaaactttctgacagagagctgtaggaaatgctatatcagaaaagagatatcagacctattatataagtaaaattactctgtcacgtggagagtactgacagttgctagtataaatcatccttatagcattcttaactgggaaatttaatataaacctttcttgcaaatcagtaawattgcagacacaaggctgaaatctccagggaacaattaacagttgcaatgaaatcacagaaactctagcataccaaaccaataatactcattcttaaagtctacattggggagggaagcgtaactgacaatatattccatcaaaggcttttatcttagactgtaagcaggaatggctgcatttttgagagtcaatcagacactttggtttctggccagcccaccgtctctcactacgcattgccttctgagcagttttacacctcaacagagactggcca

SEQ ID NO: 542385 - DNA, 631 bp, Homo sapiens
tctttgctttgaaaaattttttacttaatggaattcaaccatctataatttagtttaactttatatgaatgaaacacacttaatatactttttaaattttgtttccttcactccatattatgtttgtaaaaatcatctttttttgtttgttttgttcatttttttttttatgagacagggtctcattctattgcctgggctggagttcactggcatgatcactgaggctcactgcagcttcaaccttctggcctcaagtgattctcccaccttgggctcccaaagtgctgagcttacaagtgtgagccatcacacctggccctattcttttattgttcagccataatccattgatttttatagcattcttaatttgcattattggaacacaatctttatccyttctacagttgatggacccttggatatttctagtttgagatcttgagaacaatgctgctatgaacattctttcctatttatcctggtgttcttgtgcacacattccattaccgtctacactcacgtgccacgtaatgatgtttcagtcagtgatgaaccacatagatgacaatggtttcataagattttaatggagctaaaaactcctattgcctaatggcattgtagt

SEQ ID NO: 542386 - DNA, 631 bp, Homo sapiens
tctttgctttgaaaaattttttacttaatggaattcaaccatctataatttagtttaactttatatgaatgaaacacacttaatatactttttaaattttgtttccttcactccatattatgtttgtaaaaatcatctttttttgtttgttttgttcatttttttttttatgagacagggtctcattctattgcctgggctggagttcactggcatgatcactgaggctcactgcagcttcaaccttctggcctcaagtgattctcccaccttgggctcccaaagtgctgagcttacaagtgtgagccatcacacctggccctattcttttattgttcagccataatccattgatttttatagcattcttaatttgcattattggaacacaatctttatcctttctacagttgatggacccttggatatttctagtttgagatcttgagaacaatgctgctatgaacattctttcctatttatcctggtgttcttgtgcacacattccattaccgtctacactcacgtgccacgtaatgatgtttcagtcagtgatgaaccacatagatgacaatsgtttcataagattttaatggagctaaaaactcctattgcctaatggcattgtagt

SEQ ID NO: 542387 - DNA, 559 bp, Homo sapiens
gttttttattgaaactcttatttgagcagagcacttttgttgaatttccagttttttcttgtgcttttccccattatccacgtcttccaccaagccaatgttaatgctggctattaaagaggttcttttcctcctaaagaatgttctgaatattatctgtgaccaaggaataacacagttgttggtcattagtgaaatagaagcaataggctggcttggcttttagtgacaaatgaagaatattttgtagtttgaatgataaatgttttctcagcactattccccaaaaggcaattattttgtgatcattacatgtgcaatacctttacctgttcttctataccttaacacaaggtwccccttcctgtcactatttcataaattggactccatacaccaatattggcatataataccatcaccattatcattgcatgcatatttaaatgttaaagacttattgattggttttatgactatctgaaggttaagaaaagttagagaagctcattcctactagagtttaatgtgacatatcttcaaatataattagtctata

SEQ ID NO: 542388 - DNA, 559 bp, Homo sapiens
gttttttattgaaactcttatttgagcagagcacttttgttgaatttccagttttttcttgtgcttttccccattatccacgtcttccaccaagccaatgttaatgctggctattaaagaggttcttttcctcctaaagaatgttctgaatattatctgtgaccaaggaataacacagttgttggtcattagtgaaatagaagcaataggctggcttggcttttagtgacaaatgaagaatattttgtagtttgaatgataaatgttttctcagcactattccccaaaaggcaattattttgtgatcattacatgtgcaatacctttacctgttcttctataccttaacacaaggttccccttcctgtcactatttcataaattggactccatacaccaatattggcatataataccatcaccattatcrttgcatgcatatttaaatgttaaagacttattgattggttttatgactatctgaaggttaagaaaagttagagaagctcattcctactagagtttaatgtgacatatcttcaaatataattagtctata

SEQ ID NO: 542389 - DNA, 480 bp, Homo sapiens
agaatgatgttgagcatttttttccatgtgcttatgtggcatccatatatctatacatctacatctaccttggtaaggagtttgttcaaatcttttgcccattttttatatgtatgtatgtatttttatttatttttgtagagatgctcaggctggtcttgaactcctggcctcaagcaatcctcttgcttggcctcccaaagcactgagattataggtgcttcccattgtgtccagccctcttgccccatttgaaaaactgagttttytgtttgtttatgtttttgtttgttgtttttttacaattgcactttgaaagctctttgtgtctttgtgtattctggacatcagtctaagacttgaaaatattttgtttgcctgtggcttgcacaggaatgaacacctggctttattgtgcattgctttactgcacttcacagatactgtgttttttcacaaattgagggtttgtggtgaccc

SEQ ID NO: 542390 - DNA, 506 bp, Homo sapiens
gagtttacaagcaatgtcagtatcattataagtgtaatgatctagcactgtgtgtcttctgatattatatgaagcacatggcactactcaagaagtaaactcaccatcaagaaagaaagaaagaaagagagaaaggaaaamaaagaaaagaaagaaaagaaaggacagaaaagaaagaaaagaaaggaaggaaggaaggaagataggaaggaaggaagagaaagagtgagaagttgaacccaaactttaatctagaaacagtggttctcaaaatgtgctggttgcactagcaggatcagcatctcctggaaacctcctagaaatgcaaaggctcagctccctcccaagatcaactttggatgtaggcccagcaatctgtgttttaacatgacctccatgagattctgaggcacagtcaagcttgagaaccacttgtctggagctaaattccatttgtaagaaaaatggcagagagagaagttaaatcacaccagagaaagcacaca

SEQ ID NO: 542391 - DNA, 311 bp, Homo sapiens
tctccattttatatgtaattcctgcagcaagcaagaaaatgtaagttgaaggagtgttgagtctccctgcctgccaggaaagaattaagtgtctccccagttcctcctgctcaggctgaggttctaagatgtattaatgcctggaaccaggcccaaggkcagaacattgatagagttcccaagagatctctgctgtctttgggaagcagcagtgatgcttcccttctctactcaacagtttttcttcttgcagcattagctatatggctcagtgaatgtgaattctacagcaacgggaattgttggagtaa

SEQ ID NO: 542392 - DNA, 410 bp, Homo sapiens
tgaagaaaatgtcactaatttctggtgcccagaggaagccctaagagctggaaaaggaaagagtccctctcatgtggkgaccctgatgtttcctgagtttctgatcactgagggctggtgtttgcagacacagaccttgagccctgagttcaaaggcagttggtcaagcctcagacttggacttctgagaagattcctgctgagttacttctttcctgggtaaagaaggttgcatttttccccactcatccgctttctactctgcttctcagagagtctgccacaaatagtatgaggtggagagaaagttgaccttggggtactgttaggttgcgtctaggcaataaacactatttcaaaggtccacattcatttccagtgtgtccctcggtcccaaattatgtttaaga

SEQ ID NO: 542393 - DNA, 467 bp, Homo sapiens
tcactaatttctggtgcccagaggaagccctaagagctggaaaaggaaagagtccctctcatgtggtgaccctgatgtttcctgagtttctgatcactgagggctggtgtttgcagacacagaccttgagccctgagttcaaaggcagttggtcaagcctcagacttggacttctgagaagattcctgctgagttacttctttcctgggtaaagaaggttgcatttttccccactcatccgctttctactctgcttctcagagagtctgccacaaatagtatgaggtggagagaaagttgaccttggggtactgttaggttgcgtctaggcaataaacactatttcaaaggtccacattcatttccagtgtgtccctcggtcccaaattrtgtttaagactgagcaggttgtgaggtgtgcttacccagcactgggcttggtcctgaaaccctcaagccacaccttc

SEQ ID NO: 542394 - DNA, 534 bp, Homo sapiens
caaccctagggactcacccctaaagcagcagagcaggatggggagttccagcaagagggacttgtccattttggaaagagggagggccaggctacagcacgaagcttcgagagtgcctatttatacacctgcaaggttgggctttcctgcgaagggttaggggtggggactctgtggaagttcttggaaggcataacctgctcctagggaaatcaatgactctgttatttctcttccttgcaacttggtggggagaggtaatggccaggtcaatcctgagtctgatttattccagttctaccactcaggatttttgatgccaggttctatggtcttttcactatactgtactgtargagaatgcaaggataaagctgggctggatgggtagaattgagagtcatctacaacaagacattcattaaagctgagagaatacataagtataaatcattggaatgcagaaaggcaaaaggaaggctgaacgcagacttaaaaaatacatacctctaggaatggagaagagagggcaca

SEQ ID NO: 542395 - DNA, 534 bp, Homo sapiens
caaccctagggactcacccctaaagcagcagagcaggatggggagttccagcaagagggacttgtccattttggaaagagggagggccaggctacagcacgaagcttcgagagtgcctatttatacacctgcaaggttgggctttcctgcgaagggttaggggtggggactctgtggaagttcttggaaggcataacctgctcctagggaaatcaatgactctgttatttctcttccttgcaacttggtggggagaggtaatggccaggtcaatcctgagtctgatttattccagttctaccactcaggatttttgatgccaggttctatggtcttttcactatactgtactgtaagagaatgcaaggataaagctgggctggatgggtagaattgagagtcatctacaacaagacattcattaaagctgagagaatacataagtataaatcattggaatgcagaaaggcaaaargaaggctgaacgcagacttaaaaaatacatacctctaggaatggagaagagagggcaca

SEQ ID NO: 542396 - DNA, 275 bp, Homo sapiens
tgaaaattaggtcattgtaaagaatattgtaatcacttctacaacttcggagattgtttccttatcgatctctttataatttrtcttaatggttcaaagaaatatgacttattgtttactggaggaagctgttgctattagaaaatgtgattttttggaaaaatatttccttttttttaggaaaatggttctgaagtcctcagtaatatcctgatcaaatcaaatggttatagttggctagaagatttatagggaaaaagtttatattctatttg

SEQ ID NO: 542397 - DNA, 553 bp, Homo sapiens
ccagctgcttaggagggtaagcccagcccaacccacaaaataaataaataaataaataaataaataaataaataaataggccaggcgcggtgactcatgcctgtaatcccagcactttgggaggccaaggygggcggatcatgaggtcaagagattgagaccatcttggccaacatggtgaaaccctgtctctactaaaaatacaaaaattacccgggcatggtggtgtgcacctgtagtcctagctactctggaggctgaggcaggagaatggcttgaaccagggaggcggaggttgcagtgagctgagatggcaccactgcactccagcctggcaacacagcaagactctgtctataaataaataaaacattttaaaattccctctggattcattcctctcctgcaggcatttgtgtgtatgtacctgtttgtacatgtgtgtgagacagagagattgttttatttgactatgtgaatgcaaaggacattccaactttagagggctgtgacattgttttgtttggacgtttgagttgagtgtatagttgga

SEQ ID NO: 542398 - DNA, 611 bp, Homo sapiens
ccaaaatggcttctttctggagggttgtaccattataattcaccatatctcttgctttcccaattacatcattgccaccaccaccaggtratcaaactcacaggaaccaaaggattcacattcgcatttacaaggaactcctacaaactggacagaaagaagcaaacagataacgcatgtcaaggatatgaagggataatacacaaaagaggaaacccgaagtgtaacatgcatatgaagagttgttcaaactcattcattattggagacaaacaaattaaatccatgagatattacattatatcagttggatgctctaagagttagaaagttgaatgatgccatgtgctaagagcatgtggagacacaggaacccttaggtactactgatgggattgtagaggggtgaagtctttttagagggaaacattgcactactaagggacatatatgtgtgtcctaagaaccaacttctgggtgtatctctcaatgagatgctaacagaaatgtccacagcaaacatgaatgagcatattcattaagttgttacctgtggaaacagaaaaggagatggggtatttgttagagggtacataaaatgtattagatgt

SEQ ID NO: 542399 - DNA, 611 bp, Homo sapiens
ccaaaatggcttctttctggagggttgtaccattataattcaccatatctcttgctttcccaattacatcattgccaccaccaccaggtaatcaaactcacaggaaccaaaggattcacattygcatttacaaggaactcctacaaactggacagaaagaagcaaacagataacgcatgtcaaggatatgaagggataatacacaaaagaggaaacccgaagtgtaacatgcatatgaagagttgttcaaactcattcattattggagacaaacaaattaaatccatgagatattacattatatcagttggatgctctaagagttagaaagttgaatgatgccatgtgctaagagcatgtggagacacaggaacccttaggtactactgatgggattgtagaggggtgaagtctttttagagggaaacattgcactactaagggacatatatgtgtgtcctaagaaccaacttctgggtgtatctctcaatgagatgctaacagaaatgtccacagcaaacatgaatgagcatattcattaagttgttacctgtggaaacagaaaaggagatggggtatttgttagagggtacataaaatgtattagatgt

SEQ ID NO: 542400 - DNA, 611 bp, Homo sapiens
ccaaaatggcttctttctggagggttgtaccattataattcaccatatctcttgctttcccaattacatcattgccaccaccaccaggtaatcaaactcacaggaaccaaaggattcacattcgcatttacaaggawctcctacaaactggacagaaagaagcaaacagataacgcatgtcaaggatatgaagggataatacacaaaagaggaaacccgaagtgtaacatgcatatgaagagttgttcaaactcattcattattggagacaaacaaattaaatccatgagatattacattatatcagttggatgctctaagagttagaaagttgaatgatgccatgtgctaagagcatgtggagacacaggaacccttaggtactactgatgggattgtagaggggtgaagtctttttagagggaaacattgcactactaagggacatatatgtgtgtcctaagaaccaacttctgggtgtatctctcaatgagatgctaacagaaatgtccacagcaaacatgaatgagcatattcattaagttgttacctgtggaaacagaaaaggagatggggtatttgttagagggtacataaaatgtattagatgt

SEQ ID NO: 542401 - DNA, 513 bp, Homo sapiens
tttttaaaagtgcataggaggctgttcagcctatggaatagtcatttttttgtttctttactttyctcataaacttgctttccttaaaaaaaaaagtgcatagaagcccagtcctttatatagtgtgctttttgttgatacatctactttattcaccacaaccatctaaccatcttcagtgctctggaatggtgtgatttggttgccattttataaaagagacctcagtaacatttcctaagggcccctccatggataataccaaaatctcatttaagatagctggcttacccagacatcatctggcatcacaggcttcatcaatgcagcaagcttcaatagtatggacccatgccagccaccattctgtgagccaggacacaagggaaaactgcacacagtccttttccacagggagtgcctggcacgggggattcagatctgcaaagaattactgtgcagagtgctatgatcgctgccagctaagtggtaggtaggtgggaaatccatgac

SEQ ID NO: 542402 - DNA, 640 bp, Homo sapiens
agctgcagttcacattccctaagtgtgagcaagcacrgatgtcttcactgattgtaaggctgaaggtggaagaaaaacgtccttactagtatgccttgatctgccccagacgttccaatctctccagttcattctgcaaaccagcattgcagtactttttaaaccttggtgtgatagtaaaaacaagacaaagccaggggtttcagagacagatagatgtgtttgacctgtcgtttctccacatcattttcattatctgtaaattgaagatgattacagtagtcgtagttccccaatcttaagctacatctctagtgtatttatttgcctactacacagtaggaatcaatgataactggaagagttgactggtatttccctctccatattgtgaactacatgaatataagggatgcatctttttttaacattattgccatcctctcacatctccagcaatattgtaaacagacagcgacccatatatacctccattatgctctaacaggtaactgattttagcagtgacatatttataataaataattagtgtattttgatttgaaaaatagacttaataattaaaactgagttttatagctaaacattctgataccaaaatagatatatatattttttg

SEQ ID NO: 542403 - DNA, 533 bp, Homo sapiens
taccatgcctggctaatttttgtatttttagtagagatggggtttcaccatgttggccagactggtcaggaactcctgacttcaagtgatccgcccacctccatctcccaaagtgctgggattacaggagtgagccaccactttatcttaagataaattttccatatgcttcaagaggagtaagctctaactggaatgtagggtactgaccctagctccatatgacctcacaaaaatctgttactaaaatagtttattttctaaattaccttcttactctgttattctgtgatgctataattgtgctcctttagctttttttgttrtaggcttggtcctttggaaacgaataccagaaacagtttctctctgagcctttgcttcattctccatcagagtattctgtcccatttactactatatcattatttgaaaaacagtttgaatttgcgtatcttattatcattggtaggaataggtggcattgtcttatgtgattcttgttttaggaggaaatgggcaacaaaaatgtg

SEQ ID NO: 542404 - DNA, 533 bp, Homo sapiens
taccatgcctggctaatttttgtatttttagtagagatggggtttcaccatgttggccagactggtcaggaactcctgacttcaagtgatccgcccacctccatctcccaaagtgctgggattacaggagtgagccaccactttatcttaagataaattttccatatgcttcaagaggagtaagctctaactggaatgtagggtactgaccctagctccatatgacctcacaaaaatctgttactaaaatagtttattttctaaattaccttcttactctgttattctgtgatgctataattgtgctcctttagctttttttgttataggcttggtcctttggaaacgaataccagaaacagtttctctctgagcctttgcttcattctccatcagagtattctgtcccatttactactatatcattatttgaaaaacagtttgaatttgcrtatcttattatcattggtaggaataggtggcattgtcttatgtgattcttgttttaggaggaaatgggcaacaaaaatgtg

SEQ ID NO: 542405 - DNA, 598 bp, Homo sapiens
ggaccaagtgtgtttttaactatgagattattcttttaatgttgaatttttattccataaccagaaaatgcatggtggttatttcgattttggtgtagaattttttttttttaacttttggggaataacttatctttgtgttaagtatatgatatagttctaataaaactcagatggtattatcacacagggaacatgttgtgaccataattgtctcgaccagctttatggtcaagacataaatgttttaaatgtttttttaattaagacctgaaagattttgctagtcaaagaattttccccttgtaccaataagaatgtttgctgcccttaagcagttctgaagtgataggcttatctctcatagcaagataagttaattattctaatgagtttttacagtatataaacaaagctttttttcattttattttaatgatttgaatttaagaacattttaaattatttttttgaaggaactatatcctagaaagtaagctctgtgaaggcaggttttaaaatattttgttccgacaagtagtttgtaaatgtttgttgaataaggtggggcacrgagcagatagtaaaaccctaaaac

SEQ ID NO: 542406 - DNA, 489 bp, Homo sapiens
gtcatagaatcccacattcttacagcctgaagggatcttaaataccattagkttccacctgcaacagatgaggaaactgacacccagaagagaggaagtgacctccccaaagccacacagtagattagtggctgagcaggtatagatctcacaaacctcctagactccctgtctgaagttcactgtgctgacctcaattcaggaaacctttcttgagttgcttgatctttgtcatgcctttttgtcatccacttcactgggtgctcgccagagcccagttaggtcagcaaagggctgctgcaaggcagcatcatgcagctcacactctccagacaaggaactgtctgacaggaccaggaactctccagacaggaaccgtagctcagtgaagtcaagggacctgccccaggtcacacagctcagaagctcctgagcctggcataggatccaggtccttggctccaggtcagagatgtcccttcccacttt

SEQ ID NO: 542407 - DNA, 655 bp, Homo sapiens
caaacgggaatgagcaactgcctttagcgactgacagaaaaaaaaaagagctaaaagaaaataaaaatttaatcatcagttataaaaattaaaccactgctgacaaaatatcttctatcagaatctacatctgaatggaggataggagcaggggttccttcaacaggagtgagtaccaggttagagatgttctataaataagtcagatgagcggactgcaggcacgtggccagcacactgtgagcctaggaggtgtgatgccatggtctctaagaccctatctgtcttgctgattctctgactacgagagggtataaagacacacatggatgtcaccactccagaaacttggatttagacctggtcactgagatgtaagagtaagaatgtgtgttttggattgctaacctaactctgctatttcctatttatgagatcttggcaattagcattagatctctgagcctcatttctgaattaggcttctacgtgtttctctggatatcttttctaggacrtgtgtttaccacttatcattatttatctttacatatgtgtatatatatttgatgattgtatttaaacttgagaatccatctcaaactgcctcagacctgtctatgaacaccatggaggcagaaagcatggctatttt

SEQ ID NO: 542408 - DNA, 628 bp, Homo sapiens
gcaaacgggaatgagcaactgcctttagcgactgacagaaaaaaaaaagagctaaaagaaaataaaaatttaatcatcagttataaaaattaaaccactgctgacaaaatatcttctatcagaatctacatctgaatggaggataggagcaggggttccttcaacaggagtgagtaccaggttagagatgttctataaataagtcagatgagcggactgcaggcacgtggccagcacactgtgagcctaggaggtgtgatgccatggtctctaagaccctatctgtcttgctgattctctgactacgagagggtataaagacacacatggatgtcaccactccagaaacttggatttagacctggtcactgagatgtaagagtaagaatgtgtgttttggattgctaacctaactctgctatttcctatttatgagatcttggcaattagcattagatctctgagcctcatttctgaattaggcttctacgtgtttctctggatatcttttctaggacatgtgyttaccacttatcattatttatctttacatatgtgtatatatatttgatgattgtatttaaacttgagaatccatctcaaactgcctcagacctgtctatgaaca

SEQ ID NO: 542409 - DNA, 665 bp, Homo sapiens
tgtcacttcacctctggaagctggtttgaaggagaatgagggcatttcaactgttctctctcctcagcccctgctgtgcaggaactgctggcctgggttccaccctgcttctgccacatgttaaccatgcgaccttggcaagaaagctcacttttcttgacttcagtttccttatctgaaaaatggagatagtaatagtacctgcctcagcgggttatgtaatcattaaagtacatcgttttggtatgcacgtagaacagtgtcygtcatacagtaagcacttaatgtctttctaccacctcccttccaagggcactttcattgagtgaaagctgttttaaagctattgagtttttgcagtgaagctatgcaaggaatgcctcgttgcctggattcactagagccaagaaactatctttctgtttagggagttagctacagggcagcagaacaggcactgggttttttgggggaagagttgctccccactcgttgaatggcttcatcatgtggcttaaccctctaacccttaattttcccttaggtaaaattactttatggaatcactgtgaggattaggtgaggaaatttgggcaaagtagttcttgtagtatctggcacagctcacaccctagacaaacggtagctcaagtcatcttgcttat

SEQ ID NO: 542410 - DNA, 665 bp, Homo sapiens
tgtcacttcacctctggaagctggtttgaaggagaatgagggcatttcaactgttctctctcctcagcccctgctgtgcaggaactgctggcctgggttccaccctgcttctgccacatgttaaccatgcgaccttggcaagaaagctcacttttcttgacttcagtttccttatctgaaaaatggagatagtaatagtacctgcctcagcgggttatgtaatcattaaagtacatcgttttggtatgcacgtagaacagtgtctgtcatacagtaagcacttaatgtctttctaccacctcccttccaagggcactttcattgagtgaaagctgttttaaagctattgagtttttgcagtgaagctatgcaaggaatgcctcgttgcctggattcactagagccaagaaactatctttctgtttagggagttagctacagggcagcagaacaggcactgggytttttgggggaagagttgctccccactcgttgaatggcttcatcatgtggcttaaccctctaacccttaattttcccttaggtaaaattactttatggaatcactgtgaggattaggtgaggaaatttgggcaaagtagttcttgtagtatctggcacagctcacaccctagacaaacggtagctcaagtcatcttgcttat

SEQ ID NO: 542411 - DNA, 634 bp, Homo sapiens
caagctctgttgcagcaattctggctacgtgatgtaatttaggaggatgatgcaggaaacagggctgatatttagctccatgctctcagtgggcagtagaaattgtagaggaagcacaaacaggaggaatcaggaagtgtcagagactgagctttccccaaaggccactgaacttatgccagactcggtgtgttttatgaatctactctaaccaaccacaacagggcataaggactgacgatttgccatctcacaggagtgactggcaagtttcaaggcaaaagtcagtcctgaaagactccttttggatgaatgtttcacagcagktaataatgtggtcagaatacctgttgcctaggaggctcacatctgccactttcatacagcaggcagcatccttcatgctgtagtgggagtcttcatgagggccttcctgggtgggaaggtgtatagggtagggaacagtggcctggcctggccagtttatccctgaagactggccactaatgtcttccagctgggcctcttcctattcacatggagtgagaggtggggaaggggcaccccatgccaagcttgccaaccccatctaagaggcacacatgtctacaaacagatgagcctctacttcatt

SEQ ID NO: 542412 - DNA, 604 bp, Homo sapiens
atgtccactgcagagctgattgcttggtgtgtggggaaataactcccacacatgtggtgtgggaagtgttgtgttgagtggtatgtgagagtggaggggaaaaaatgttcactaattcaatttcctttgtagggttgtgrtgagaattaaattaaaaagtgcatgttagcacagtgtctaccaagtaataataactaaatacattatagatattgtatagtattgttattctttattcttactcttattagatgaatagctccctgccttcccttatatctctcttggctcaatccatcctacgtcattgccagatgaatcttcctaaaactttaatcaagttattctgcttaagcacttgcagtgacttctctttgccagagtaaattcagtttgcctgggttcctgcacaatctggagccatcgtgccttttcagtcttatttcccctctactcaagtcctctactctagctagttttgtttcttcgctgtcctgaaagccacttggtttatttaactctgtgccctatactgccttctttatctagattgacctctcctctctttccaaatcctgtggagctcttgaattctcagctccaa

SEQ ID NO: 542413 - DNA, 425 bp, Homo sapiens
ctgatgtccactgcagagctgattgcttggtgtgtggggaaataactcccacacatgtggtgtgggaagtgttgtgttgagtggtatgtgagagtggaggggaaaaaatgttcactaattcaatttcctttgtagggttgtgatgagaattaaattaaaaagtgcatgttagcacagtgtctaccaagtaataataactaaatacattatagatattgtatagtattgttatyctttattcttactcttattagatgaatagctccctgccttcccttatatctctcttggctcaatccatcctacgtcattgccagatgaatcttcctaaaactttaatcaagttattctgcttaagcacttgcagtgacttctctttgccagagtaaattcagtttgcctgggttcctgcacaatctggagcc

SEQ ID NO: 542414 - DNA, 545 bp, Homo sapiens
agttgtggttaaaaattaaattgagagaggagaatgtgttcttatccatcatgtgttggaagtttgtacacacatctctatcgtacataaggtcactgtcttctgtgtaattgcagcactttgtatgaatctcttacagcacaaattaaaggtaccatgcatgaataatytgctggcctatttttcctttctccagcctaagtgactggaaatattaagaaaatatttgttgaatggaggaagacatatatgaatggataaatacagcctagtcccctggattaaatgtgttcaagcattcatggagaaagtattactaaatgtagtaaagaaaaaaatctggctactctactgaagaggaggaagctctgagacttcatgaagagagagagagggagaccctggtatccctgctgatcccagccttccaatcttctccaccaaagcaccagacctgtgatgaagccagaacatcttgggtgttctagccccagtcacgatctgactgccgccaaaaaagatattccaaacaaccaaattgttca

SEQ ID NO: 542415 - DNA, 509 bp, Homo sapiens
attacctgccatctgtattaaactgtgtcctggaacccaagccatgggcttcctgagggtgaagttttaaggtctttggataaaaagtaaatgtatttgaaggtgttgattattcctcataatctaaagtctctaatgaaaggaacatgttataatccagatttccttacagaaaatgagtaagtaagtaaaataagtcaaaaaataaagaaggcctgagactgagaggcaagatggccgagtaagaacagctctggtctgcagctcctagtgagaccaatgcagaagctgggtgatttctgcatttgcaactgaggtacgtggttcatctcattgggactggttagacaatggatgcagcccacggagggtaagcaggagcagggtggggcgtcacctcacctgggaagtacaagcggttggaaaactccttcccctagccaagggaagccataagggactgtgccgtcagggactgtaccatgagsaacagtgcactccagagcaga

SEQ ID NO: 542416 - DNA, 474 bp, Homo sapiens
gcaatatttttgttttgtcaagtaccattctggaaggagattatcttgtcttgcatgggttttttaactctttcttgccttcatgatgtgctctagaccagcttaggttcaatgaataccacactgaggccacacatttgccccatctgacagcctagtaattttcatctttattttaattatcttattaggatgtgtccttgagtatctctagtatcagtacttttagttttctcattgtcatttcttttaatcaagtaaggacaaagagaataggcaaaaayagcattgatgctggcacaggaacctgcaaactgttgaaactgaactcttagctaaaaggcagccccacaatacaagagtttgatggacaaaaatctgggtcaaaatctgggtctgcatacaaaatgtggtacagaatgtcaccttcccaggtacagaatgtcaccttcccaggtatagcatgtcaccttc

SEQ ID NO: 542417 - DNA, 605 bp, Homo sapiens
aacagccctctccacccacttctgcatgaaaaaagaaaagaaaagaaaactgataataccatctgcatgcaagcaggaggacaaaccttgtgggtctatttgctgcactccagcatgaacctagagcagccacaaactcctctttaggctctatttcattccgtgaacctaactgatactcccagttattgtacatttggaggaatacacagtgattttattttttaaagattctggcggtgtcacgacatctattggaaaacttttcaagcagagggcttctgattgatttgcttggggtcatgtggaggtaaaagaaaaagtttaaaaaaataagcacttacaagtggcaaatggcaaatccaaccagcaaaggtgagtgcatttcaaaagcttcctctgtgatgactacacagaaaygtgctatgggcatgtactatgtgcgccaaaataactgccgatggttgctatatggctatttccaattcatgtgttacaatgctaaacacgctcctgaaacactaccttctgcgagagaggaaactttcacacagagacgaaatgaacaggacaaatatacactgtggtagtactaaaaggaaatt

SEQ ID NO: 542418 - DNA, 611 bp, Homo sapiens
tggctatgactttttcctgtctgcctatccaagaaaacaatcagtgttaattccagcaggttgtrttattgatttttgttactaaaacagacttatgatgaagaactactataaacactcttatcaaaaatttctttaggttctctaacatatattatgaccataaaagtatttaccatatattcattaaaagaaccctaaagtcttttcttctgaagaaactgactaaatcaaaatgatttaaaagtgcacaggtatttgttctttatcataaaatttgataacaggaaaatggagattgttgtaactgttgatatcttgaaatcaaggataacaaacagatatttaatttttctccttcttcaaatattttttaaaaaccatgaagcaatccaagaattcaaactaactgttttacatagaattcttatgcttttccattattttatggagctattcttattaaggagtaatagtcctaaaaatgggtgagaagtgtaagtaaaattatctttatccaagataatcatcttcattctcatgattaattcacaaacagaattaaatgtaattcaatagacaaaaaaacatttgattacctaaacatacat

SEQ ID NO: 542419 - DNA, 547 bp, Homo sapiens
gtacatttatctccaaaaatcaattaattaattaattaaattttaaaaaactaaatgactctactgtctatgtcccagtaaacataatttatagatctttcttattattcatttttaggacatctagaactacataagaaaagcgttattaggccaccaaagcagaactgttgcaataatgtgacattaagcacagtgtccctgctctgctgcttccttagcagaataatgaacctctcttgtcttccgtttccatttgtaaaacagatacacaatcaccatgcctgtacctcacagatgattgtagagcataaagaaactaattcacgtaaaacattttcatgtcyaggatacaggtttcaataaatattagtcagaagcatcgtgatcattttgtagttggctcaggactaactgaaggactgtgggcatgagcaagtcctggctggtcatcagaggtccacactgctgcaggaaagacagaaacacttctgagagactcaggggctaagtactccctccacccaagaaagcaaggaggaggaaa

SEQ ID NO: 542420 - DNA, 450 bp, Homo sapiens
caggcccatcattgaaccattgaacccaaacatactgttaaaataatgttcactgtgttttccattattatttttaatagtgttttagaatgggaagcaaggcatgtatgcacttcgcatgtcattgagtagataggcctggatttgaaagcctatagaagtgtcataacagagaatattggaatatttatagtcttaattttatcttattgacagtaggaagcattgaaagtttttagcaagatgaatagaaaaggggaatggatcagtgggagggggtgtgatagtattcttttggatggaagtaacagaacccagtttaagcaaaaggaattgtttactggaagaatataccaggaaaaccttggagaaacaatgtaaggggttaacaggcaaaatgtgaacagtttctagaattccacctccagggkacagccagcaaattagcgc

SEQ ID NO: 542421 - DNA, 549 bp, Homo sapiens
ccctcaccccgagaatgcctggggaccacagaaggctcagggcagtgtggggagggcctttacttccacagttcagctgtaaaaggctggtcccttctcccttgcccctgcctggtccccagcygggaggagtaggatgggaggaggaggaaggagaaagatgcaaagaaaggctatgcctgcttcatgtccctccagcccagagttcttgtttgtttgtttgttctgtatgttgtggcaattcaacagagcctatggaaatctttttagaaaaaaatgtttattttaaaaaggcatgtgctaaaatacgtagtattataaagaaaactatattaaaatgcacttatcaaaatatttaaaaaattatcaacatagtaatatacatatttctttattgatacattaaataatactgtctagaagacacattttagaatactgctgagtataaataatatttcataatacctgaaattattgtaatatgatacctattttttctattggtgacaatgcctcagatactgttaatactatagtggtttgtgg

SEQ ID NO: 542422 - DNA, 598 bp, Homo sapiens
aaattgactttcccaagagactcacactagaacgttgctcagttcctggaaagttaaaactgcaaagaacacccatacccaccaatggcttctcctccagcatcctgagacttgggtttcacaagaaaaacagaaaatgtttccaacaattgtcccattgacttgttcacttaggcctgagaaargcatcttcagactccctgtcgacttggcagaattttaactctggcacaattcacttaatgtgaattttttttcataaacttccttgcagaaggttcttagatatgtatgaatccctcacatgcacacgcttctgtgtgtacagatgctatgtgcttctcaaaggaagaagttggtcaaccaaggacagaccaacatttgcccaatctttagactgaaaatatggctagcattggttaccagcctgctaggcactatgacccattctatagcatctctgacccttattgcagctctgcaaggaaaacatggaaaccaggacatagcagaggaagaagctgatactcaaagaagtgagctgatagatccaagactactcagccagaaagtgctggaactgggatccacatttatg

SEQ ID NO: 542423 - DNA, 571 bp, Homo sapiens
ctgggccacattgctccggcagcaacacatgctcaggaggcaaaagctagaagggttttgggtacaaaaagaaaagagtcccttgtggaaacagtcagccttgactctgttgtacgaggcattcaggaaggggtggcagggccagggacatgtccatttcttgagctggtattgtgtgccaggcacggtgctaggagctcccttaacaagctcagtatcttcattcttgtcttcatttctgtggactgaaatccatactgaaagctggaaggcaatgaagatgttggtaaagtgaagggaactgggagtagaaagcaatcaaacaaatgttgggagagtccactgttgggaaagcggccttgtgctccatggaatggggaggagcaagactggacccaagagcacgagccagatttggtcctcgtgcccctgtggagaacccctcacctctgggaaggagagttgctcttcctcctcgctggacaaaaaccccctcatccatccacatggagtcagtgaaacccagaatgagaccccaaacccartcacccctctcaaggcaacttcttca

SEQ ID NO: 542424 - DNA, 466 bp, Homo sapiens
ccgtggccagtgtcttcttagtgtcttagctggacctcccactcccacccctgtgaagggtcatgaccctcrgtggcccctgagtggtagacataattagcagaggcccacgccatctgccactggccactagggcagcatgcacaaagtgtggtagtcaagggaaatattaataggtcttgcatacacacacaatagatattgtaaagggattggtattcctttgctgcaggacttctcagtcaccttaaactgctcagtcaccaaaaatgtattcagcacctactaggtgccaagtactcatctagctgcttggaataagtggtgaataagacacacaagttttatgctctcatgacacttatatttcagtgcagagggaggtataaaataaatttgcaagtaaataagagaacttcaaatggtgagtgctgtgaagaaagcaaaccagtaaagggacagaggg

SEQ ID NO: 542425 - DNA, 546 bp, Homo sapiens
ctggttgtcaaggcaacttagccackgcaggccaggcctgagccagggaattgggaagtgggtccccccgcctcccctgcaagcagatgaagattcaatccccagggccaccccctgctacccaacacgcttaccctcctggctcagcgagggcagagtgggcagcacctgcctgcccaggtcctgcagggcacgggcgatcgtatccaacatctccaatttccaggtgactccgtactgaatgttcgatgggtctcttctttcttatatggaatgtgcacaaaaataattttcccaccctccagccccttctccacggagctttggatgtgccttaaaaataagagtgacgaaaatcttgaacttcttgactctttttcttctttcttaaataaacttaaacattggttctcgccgtccctccccactgctctggctctcgggcagctcccacagcaagagccgcaggaactgatgtccggcaccgagtgagagtgtgcagacccgcgccctcctgaccaacgagagacccaatgaggggtgagc

SEQ ID NO: 542426 - DNA, 553 bp, Homo sapiens
tactcagattagtagaggactgaatagaccctccccgctcccctaaattcatgactatttggtacctgtgaatgttgcctttttggaaacacaatctttgcagatgtaaccaatttaagttgaacccatwctggagtagggtggtctctaaatataatgactggggttcatacaagaaacacagagacacagtgaggaatgccatgtgaaacaagccaatgaggcagaatttgaaatttatctataggttaaggaatgccaaggactgctgccaacgcccagaagctaggagaaaatcatggaatagattctcctctggagccttcagagggcacatggccctcccaacacctactttgacttcaaacttctagcctccagaactataagaaaataaatttctgtggttttaagcgtcccagtttacagtgatttgttacagcagctctaggaaattaataaaaacccatggcccatttttacatagggctgtcttatttttttttaaagatgggggtctcactatattactcaggctggccttgaacttgca

SEQ ID NO: 542427 - DNA, 553 bp, Homo sapiens
tactcagattagtagaggactgaatagaccctccccgctcccctaaattcatgactatttggtacctgtgaatgttgcctttttggaaacacaatctttgcagatgtaaccaatttaagttgaacccatactggagtagggtggkctctaaatataatgactggggttcatacaagaaacacagagacacagtgaggaatgccatgtgaaacaagccaatgaggcagaatttgaaatttatctataggttaaggaatgccaaggactgctgccaacgcccagaagctaggagaaaatcatggaatagattctcctctggagccttcagagggcacatggccctcccaacacctactttgacttcaaacttctagcctccagaactataagaaaataaatttctgtggttttaagcgtcccagtttacagtgatttgttacagcagctctaggaaattaataaaaacccatggcccatttttacatagggctgtcttatttttttttaaagatgggggtctcactatattactcaggctggccttgaacttgca

SEQ ID NO: 542428 - DNA, 553 bp, Homo sapiens
tactcagattagtagaggactgaatagaccctccccgctcccctaaattcatgactatttggtacctgtgaatgttgcctttttggaaacacaatctttgcagatgtaaccaatttaagttgaacccatactggagtagggtggtctctaaatataatgactggggttcatacaagaaacacagagacacagtgaggaatgccatgtgaaacaagccaatgaggcagartttgaaatttatctataggttaaggaatgccaaggactgctgccaacgcccagaagctaggagaaaatcatggaatagattctcctctggagccttcagagggcacatggccctcccaacacctactttgacttcaaacttctagcctccagaactataagaaaataaatttctgtggttttaagcgtcccagtttacagtgatttgttacagcagctctaggaaattaataaaaacccatggcccatttttacatagggctgtcttatttttttttaaagatgggggtctcactatattactcaggctggccttgaacttgca

SEQ ID NO: 542429 - DNA, 589 bp, Homo sapiens
gctggttaacataggaagacttccatctctacaaaaaaaatttttttaattaaaaaaaaaaaagaaataaagagaaatagtaatatctttatttaaatattttacagataatttaaagttttagaagtattttctgggcggggcatggtggctcacgcctgtaatcccagcactttgggaggccgaggcaggtggatcacctgaagtcaggaattcaagaccagcctggycaccatggtgaaaccccgtctctactaaaaatacaaaaaattagccaggtgtggtggcgggcacctataattatcccagctattaggaggctgaggcaggagaatcacttgaacccaggaggcagaggttgcagtgagctgagatcgtgccattgcactccagcctgggcaacaagagcaaaactccgtcttggaaaaaaaaaaaaaacaacaaagatggttcatattgatacaatagtgggttagattatggtccctggactcaatgaatttgttgagcacaagtagtctctttattaactggagaaggtggcattctttagtttaacgtgtgtttatttacatctataaaataccta

SEQ ID NO: 542430 - DNA, 593 bp, Homo sapiens
gctgaatttagtatcagcttaaaaccacattaaactgccatgtgtcatgtgacctctagcagaaaccaacgtggcagtgttctgttttttcatgagtgcgtttcattggggtttttgaactgtgaagacattatttaatacatgtgctttattttctgtgtattattgcccaaggtcagtcatcgctagagggttattattgacatttactcatcataaaatgtgatgtcagcctaccagctcggagtgcagttcctggtttccagtttacaacattgaccagttgctaacatgttatctctgaggaacttggaatgataaatacagccatacttaaatagaagattcttggccgtgtagataaggaaaataagataaggcaatatttttgaactattctataatagaaatgaggatatatacacaaaatgacccartgctgttttcttagggtgcatcctttgtttttctggttttggtcttttcatcacaggatggcattagctctgtgtctgcaggtgctgtgcagcctgtgtggctggctctcgctctatatttctttctgccacctgaataagcaccgaagctatgag

SEQ ID NO: 542431 - DNA, 559 bp, Homo sapiens
atctacccctttcaacacagctattgcggctgtgggtccttcccrtctttagctcccttagcagatctcttttttttttttttagacagagtttcactctgtcacccaggctggagtgcagtcatgcgatctcggctcactgcaacctccgcctcccgggttcaagagattctcctgcctcaccctcccgaatagctgggactacaggtgcccatcaccatgcctggctaatttttgtatttttagtagaggtggggtttcaccatattggcacaggctggtctcaaactcctgacctcaaatgatagacccacctgggattacaggcttgagccactgcacccagctcccctagcagatctgatatatcatcatagctgatctcaaaaccaggctttgctcagagatcattttgcatctcacctctccctctttctcgggaccccacctgctcttcatcctctgctgccaccttgccagcccacctgctctcagagatgcgtcatgacctcatgaccacacaggaaagggctgtacttgcccatggttgtttaggaca

SEQ ID NO: 542432 - DNA, 629 bp, Homo sapiens
tgctgctgcagttagagaatgtttctgtccccattgggcccactctgcctcccctaaggttttttgttagagccaaactagaatggagtgctggtgggggaagaaagaggcgtctgagatagtaacagccaaggtccgggagggcgttcacatgacgagacctcttctcagcagggatcacctgggggagaaagagccacccctttctggaaacacataagaatatgcatctgtcccttcacctgccatttagcagggcttctcaggtcttctctatgtgcacaaacctaagctcaacctcatggggcacagagctctggcgtctccattgcagaggactccccgatcccccaagcatcggaattattagtcctatgtcctgggctggtaggagaaatcctggactttttgtttaacyaaattggttttattaagaatgaatagtttgctccaccccccaactcccaccccaacaccctccaggaaagattctggcccaggaaacagccgaggcatggcttttagcataaccaggtggcatgagatttaaaaagaattggatagttggggattgcatgttatctctaggataaactttgagagatgggtcatacccaggctttgccttc

SEQ ID NO: 542433 - DNA, 595 bp, Homo sapiens
ccttagaatgactgcctttaaatctgtggctccactattcacaatagtgaagacatggaatcaacttaagtgtccatcaacaatggattggataaatcaaatgtggtacatatataccatggaatactatgcagccataaaaagaatgaaatcaactggataaaamaaatgtggtacatatacaccatggaatactatgcagccataaaaaggaacaagatcatgtcctttgcagggacatgggtggagcttaaagccattatcctcagcaaactaatggagggagggacagaaaatcaaacaacaaatgttttcacttataagtgggagctgaacaatgagaacacatggacaaagggaggagaagaacacacactggggcctgtcaggggatggagagtggggaggaagagcattaggaaaaatagcttattacctaggtgatgggttgatagatgcagcaaaccaccacggcacacatttatctatgtaacaaacctgcacatcctgcgcatatatcctggaacttaaaataaaattaaattaaattttaaaaaaagaatggaatcatgtcccttgcagcagcatggatgca

SEQ ID NO: 542434 - DNA, 595 bp, Homo sapiens
ccttagaatgactgcctttaaatctgtggctccactattcacaatagtgaagacatggaatcaacttaagtgtccatcaacaatggattggataaatcaaatgtggtacatatataccatggaatactatgcagccataaaaagaatgaaatcaactggataaaacaaatgtggtacatatacaccatggaatactatgcagccataaaaaggaacaagatcatgtcctttgcagggacatgggtggagcttaaagccattatcctcagcaaactaatggagggagggacagaaaatcaaacaacaaatgttttcacttataagtgggagctgaacaatgagaacacatggacaaagggaggagaagaacacacactggggcctgtcaggggatggagagtggggaggaagagcattaggaaaaatagcttattacctrggtgatgggttgatagatgcagcaaaccaccacggcacacatttatctatgtaacaaacctgcacatcctgcgcatatatcctggaacttaaaataaaattaaattaaattttaaaaaaagaatggaatcatgtcccttgcagcagcatggatgca

SEQ ID NO: 542435 - DNA, 589 bp, Homo sapiens
tgagccacccacccatcctggatggctttcttttgaggaacattacctcatagaggcctggagcacaggctctggactcagaatgttgaacttagcatcttaaacttcatttcttgggcaagaaattgaacttccctatgcattagttcctctgcctgtgaaataattttaataatagtacatacctacacattgagcattaagtgagacaaaatgtacaaaatgcatgcaacattgcctggcaaatggtaagcagataatgagtgatattactataattaatacaaatattttacattagaaaaatcaaggwtaattatttgcagattatccagctaagtttatctttcgttagactcttcaagcagtgcatctagtcattcactcaacaaatatatatggacgatatggttctaggagccaggggttcagtcaaaacatatcatggtcatttcccccttgctctcacatacaagaggggaagacaaacatgaagcctggtatgtagtatgtaactggaatattcagaatgtgcaaatatggcaagtgatgagaagaataagaaattagttggagaaatgggagacaa

SEQ ID NO: 542436 - DNA, 577 bp, Homo sapiens
tctccaattaatttcttattcttctcatcacttgccatatttgcacattctgaatattccagttacatactacataccaggcttcatgtttgtcttcccctcttgtatgtgagagcaagggggaaatgaccatgatatgttttgactgaacccctggctcctagaaccatatcgtccatatatatttgttgagtgaatgactagatgcactgcttgaagagtctaacgaaagataaacttagctggataatctgcaaataattatccttgatttttctaatgtaaaatatttgtattaattatagtaatatcactcattatctgcttaccatttgccaggcaatgttgcatgcattttgkacattttgtctcacttaatgctcaatgtgtaggtatgtactattattaaaattatttcacaggcagaggaaccaatgcatagggaagttcaatttcttgcccaagaaatgaagtttaagatgctaagttcaacattctgagtccagagcctgtgctccaggcctctatgaggtaatgttcctcaaaagaaagccatccaggatgggtgggtggctca

SEQ ID NO: 542437 - DNA, 577 bp, Homo sapiens
tctccaattaatttcttattcttctcatcacttgccatatttgcacattctgaatattccagttacatactacataccaggcttcatgtttgtcttcccctcttgtatgtgagagcaagggggaaatgaccatgatatgttttgactgaacccctggctcctagaaccatatcgtccatatatatttgttgagtgaatgactagatgcactgcttgaagagtctaacgaaagataaacttagctggataatctgcaaataattatccttgatttttctaatgtaaaatatttgtattaattatagtaatatcactcattatctgcttaccatttgccaggcaatgttgcatgcattttggacattttgtctcacttaatgctcaatgtgtaggtatgtactattattaaaattatttcacaggcagaggaacyaatgcatagggaagttcaatttcttgcccaagaaatgaagtttaagatgctaagttcaacattctgagtccagagcctgtgctccaggcctctatgaggtaatgttcctcaaaagaaagccatccaggatgggtgggtggctca

SEQ ID NO: 542438 - DNA, 610 bp, Homo sapiens
ggataagttttcagaattgccctgtggggaagtctttcctcctagagatgaggtctttgttagagagaagagtcaggaagggtttcacgaaggctactccccttcaagcccctatcccagagccatgagggtcctcttactgagcayctggtagagttccagggggaaaagcctgtgaaagtgtgaagatccccttagacagcaactcccaggagcttattaatctcccactagcctgcactcagtttccagcaattcatcaaaataactagtaaagtatccccgccagcttatggcatctggtggtttctgctccaggtaaccaaatctcaagaaaagtaaatttctagttagttcatttttctcttgttgtaagaatggcaataaggacttccaaactctatatatgtcacggttgaaacaaggtgtctccttctttatggttttaatcttttcagattttctatttgttcttaggtcaagtttaataatctatatttgttccaggatttttccatttcatttaggttttgtaaattaccagcagattgtttttatggtattctcttagtgagtatctgtacatacttatataaatcttttaattatg

SEQ ID NO: 542439 - DNA, 549 bp, Homo sapiens
ctggtatcacctccaagactgacacttgaactcagaataccaccaggtgggattcagagatgattgttaaaaccgtgaataaattacatgtatgtatcccattgtctctacccattttgaagaacaaaactcattctaggctttcctggccatccctcagacacacccgggctgtgcactgagcaccttcggacccaggacactgtgggtctcacttcatcctgtggctgcgtccctccaccagatgtaaagccccagtagcaggaagcacattaacttacctttcatttcagagttcctaggacagggtctgttacatagtaagccccaacaaatatttttttgaatatttgcaagaatgttaaatggaaaaagtgcaacatrtgttaatatacatgatgattgcagcaataggaaagtgtctgtagggtggagccttagccttcagatccctaaactgtcgccatgatttgtggatgttataactcctcccccacactgtaggtgagtgtggtagaaccaactcttcaatgtatcaaaacttgtttc

SEQ ID NO: 542440 - DNA, 381 bp, Homo sapiens
gtctttctggaaatgtgaagccttcaatgaaaggtcaggtttagatacggaggagtgaggaatgatctttcgaggcaggggaaatgacacaagcaaaaagagagagatgggacccacgaaaggggcacgtatatggacaactacagaatttccctatcagaaagtgtcagagcagccatccggctagaagatggagttggtggtgacttgtcttgagattatattcacatagcaatcccactttttttttttttttgagacagggtcttgctcatttgcccaggcttaagtgcagtggctcgacctcggctcactataacccctgcctcctgggttcmagcgattcttctgcctcagcctcccaagtagctgggattacag

SEQ ID NO: 542441 - DNA, 254 bp, Homo sapiens
aaaggcagctggactcgcgtctccttcagcattcaccccaatgtcatatcacatgtcacggagcgtctggaaaacttgattgagtgtgaaaaaggcacatcatgtcttagtgttattatgagcctagttctaagctctcaagtcctctaaaaaaaggccccgggccccactttgagaactgtcacagcagagcaggggctccttgagacgagggcaccttgtctcagtcrgctccatgagcccagtgcctggcc

SEQ ID NO: 542442 - DNA, 530 bp, Homo sapiens
tgttgctgccaccaccctcctgtctgcctcttcaaagtctcctgtgacattttttctttggtcagaagccaggaactggtgtcattccttaaaagatacgtgccggggccaggtgtggtggctcacgcctgtaatcccagcactttgggaggccgaggcgggcggatcacaaagtcaggacgagaccatcctggctaacacggtgaaaccctgtctctactaaaaatacaaaaaaaaattagctaggcgtagtggttggcacctatagtcccagctactcggaaggctgaagcaggagaatggtatgaatccaggaggtggagcttgcagtgagccgagaccgtgccactgcactccagcctgggcaacacagcgagactccgtctcgaggaaaaaaaaagaaaagaygcgtgcctgcggtgaggaagctgggcactgtttttgagttcaggtgaattagcctcaatccgccgtgttcacttggctcccatagccctcttgatggatcacgtaaaactgaaaggcagcgg

SEQ ID NO: 542443 - DNA, 530 bp, Homo sapiens
tgttgctgccaccaccctcctgtctgcctcttcaaagtctcctgtgacattttttctttggtcagaagccaggaactggtgtcattccttaaaagatacgtgccggggccaggtgtggtggctcacgcctgtaatcccagcactttgggaggccgaggcgggcggatcacaaagtcaggacgagaccatcctggctaacacggtgaaaccctgtctctactaaaaatacaaaaaaaaattagctaggcgtagtggttggcacctatagtcccagctactcggaaggctgaagcaggagaatggtatgaatccaggaggtggagcttgcagtgagccgagaccgtgccactgcactccagcctgggcaacacagcgagactccgtctcgaggaaaaaaaaagaaaagatgcgtgcctgcggtgaggaagctgggcrctgtttttgagttcaggtgaattagcctcaatccgccgtgttcacttggctcccatagccctcttgatggatcacgtaaaactgaaaggcagcgg

SEQ ID NO: 542444 - DNA, 530 bp, Homo sapiens
tgttgctgccaccaccctcctgtctgcctcttcaaagtctcctgtgacattttttctttggtcagaagccaggaactggtgtcattccttaaaagatacgtgccggggccaggtgtggtggctcacgcctgtaatcccagcactttgggaggccgaggcgggcggatcacaaagtcaggacgagaccatcctggctaacacggtgaaaccctgtctctactaaaaatacaaaaaaaaattagctaggcgtagtggttggcacctatagtcccagctactcggaaggctgaagcaggagaatggtatgaatccaggaggtggagcttgcagtgagccgagaccgtgccactgcactccagcctgggcaacacagcgagactccgtctcgaggaaaaaaaaagaaaagatgcgtgcctgcggtgaggaagctgggcactgttttygagttcaggtgaattagcctcaatccgccgtgttcacttggctcccatagccctcttgatggatcacgtaaaactgaaaggcagcgg

SEQ ID NO: 542445 - DNA, 530 bp, Homo sapiens
tgttgctgccaccaccctcctgtctgcctcttcaaagtctcctgtgacattttttctttggtcagaagccaggaactggtgtcattccttaaaagatacgtgccggggccaggtgtggtggctcacgcctgtaatcccagcactttgggaggccgaggcgggcggatcacaaagtcaggacgagaccatcctggctaacacggtgaaaccctgtctctactaaaaatacaaaaaaaaattagctaggcgtagtggttggcacctatagtcccagctactcggaaggctgaagcaggagaatggtatgaatccaggaggtggagcttgcagtgagccgagaccgtgccactgcactccagcctgggcaacacagcgagactccgtctcgaggaaaaaaaaagaaaagatgcgtgcctgcggtgaggaagctgggcactgtttttgagttcaggtgaattagcctcaatccsccgtgttcacttggctcccatagccctcttgatggatcacgtaaaactgaaaggcagcgg

SEQ ID NO: 542446 - DNA, 485 bp, Homo sapiens
tcatagctgccatgcccctaccacatgtgtcagcaggaagtcaggcttttctttcaaggccaagacactagaacagtgctgascagggtaggtcaggaggcatttactctcatgggcattgcgttgcaggctcactcacccagacagcaggagaaacaggccatggaagacaacacgtgttctacagactcataagtagttctctgcctctccagttttaagatggccataagcgagggccaccctcacccacaagaaggtcagaggtaggtagagaggagggagctgacacacaggcacccaggacaccctgcttcagggctcagcatggaggtggcacaaggcctgaggagttgcacatagcacgcattgagcaatactcctctctggcctcctgtctgatttaggggcagaaggagaatgtaggagaggcaatgttggtggggagggggcggggcctgacattcatttttgggactgaatca

SEQ ID NO: 542447 - DNA, 594 bp, Homo sapiens
ctgctgaagaagggtgtggacaaaggcaaaggttcagagttccaaccacagaactagtcatagatgtccctgcagtgcacacataagggagcccagctaccctcagtagtaaagatgcaaaaaaaagtaacattatttactgatgccacaatttagaaaaattaaaatttaatatttttaatatactttaagcttaaataaaagtagttacagttcacagagctcccataaacgtttcactccaattctgattgttgacttttctaaatcatttgagaataagttgcaaaataatgtctcatcatccccataatactctactgtacatattctaagtataaggacactctctgacataaccccagtacaaccatcaaaattaggaattaccattgacctgatattacaactaatcaatagactccattcagattccacctctgctgtctgcatsgaatatcacgttgcatacatttgtcgcgtctctctagtctccttcagtctcctcttgtctttcacaaccatgatatttttgagaagtagagtccagctaccttgctaaatgtctcttaaggtgggattatctgagcttcc

SEQ ID NO: 542448 - DNA, 641 bp, Homo sapiens
atctcactcttcctctatatacayacacacacactttttaggaggcaaactacttaaaaataagtggcagacactgtgatctctgatcctcaaagaccatatatctcctaaggacaaaaacgttctcctatattacctcaatacaattatcacattcaaaaattctaacattgataagtattattatataatatacagtccatattaaaatgtcccaattctctcagtaatgccttttaaaactttttttgtttgggattcagaatctaaggaaatacactcaacatttggatatcaaatctttttagtctcctttaatgtagaatagtttcctagtccccctcatttttgtgacaatgacagtacccagcagttgttctgcagaatgtccctcaatctgtttgattgtttcctcatgattagatgcaggctaaacactcttggcaggaacatcatatgaaacattgtagtcaggtgctactaccaagaatatgacttattgttgaaattagagacacacttcaaaatagatcttttaaatacttgcaacttctcagtgataacaaaagaaaaagtagtaccaaaaaaggggcaaataacctaatttgggtttggattttctttttatttgtttcagggaa

SEQ ID NO: 542449 - DNA, 603 bp, Homo sapiens
ttcaagtagagtctgcattcagagtcccctcaaaattcaatgagcccctccattttcctttgttcatttgttttacattttttatatggaagccattagtctcaagaagcttgcagccaatacacgatgtctacagaagttcaagattcctgtraacacagatttccacaaaaacatattctccacaaaaaactctcactctcaaaaatcctgacatgaacactccttcaactcttctgaccagaccagaagaaagttttgatttaagtgcaccaaattgaattatagacagctttttgtttgacttgccaagaaaggttttctggggtagcggggacagcagctaggagcagaaaatcagtgaacccctgccaggggccaggctctaactattagaaacagtaaatcctagtcttccaatctcaaggattttctgtaattcgcattaccagcagttataagtcaatggtaaatgtcaaatgaatagcagacaaagaacatgctatagatgcccagagagagaaaaagcatgagctggccagggaagacatttcagaatgcccccaagttctggagaatttcagaaagagtccattggttgcc

SEQ ID NO: 542450 - DNA, 643 bp, Homo sapiens
tcatgacagaaccggccttgcatctgcagcctgaagggctccaggcagttctaagaatggccactggcctaccacaggggcaggtgaccttgagggtcctcagaataggacactcattgaaaaaggaagggctgagcctgccctactcattgccttctcccagattcacccgtctgtcctcagaaaggagtctaggggagtgcatagaagacacatgtcctcctggggatctgaggggaattccctgctctctctggaataggaagagcagggygttgggctcccttgagatgcacccacctcaaaggaaaatgaaaatccatattacgtcattttagggtctatacatagagagagcacatatttaaaaaacaacaacaataacaacaatgctccaggaaaggacaataattatgtacgtccactgagaaatggaagtgaggagtatgcgggactggcactgagtccagcccaaaagcccagtcacagctgcgtgattgtggaaaagaatggattctaggactatgattatttatgaccattaatactgaaaatcacaggtgacactgtttgcagaagaaccctgtgcattctccacaagtcaactgacaaaggcccagcaatgggaatcccaggataaaag

SEQ ID NO: 542451 - DNA, 621 bp, Homo sapiens
gaggcagaggacggacagcttctaaggtaccccaggccaaacaagtcataaaaagctgtccagatactgggtcatctgagaaatgtattgccrtatgtatagtgaaagtttgccatcactagcatgtttcttgttggaaagacaaacatacagattgtatttttggtgcaatttgaatagcttattaatttggacattttgtgaatatcaactcatacagaatatttggactactttttataatgcttagagcataacgtttcaactttaaagttattatagatataactaagcacttggtgtcatgttgtggtgttttaattccttttcatgcgtttgactgcctggtcatgtgcactcaggagcttcctcctccatgccaacagccccttccatcaggagaacacaatccaggaacacaccaagatggtgggaagttgccttcatggtcacaaaacctacttcatttccatgaagatgagagcttttcagtaaacatgctgactgttcagtgcttgccaaaactgcaacattctaaaatgtatcaaaaacacgataactggaggccaggcccagtggctcacgcctgtaatcccagcactttgggaggcaaggcaggcg

SEQ ID NO: 542452 - DNA, 431 bp, Homo sapiens
ctgctggttaaagtcaagtaggtttrcttaagcccaaaagcttgaagctgcagtgaggttgtgatcatgtcactgtactctaagactaggcaagagaaaaaaaaaaaagatggatgttctactcaggttactcatttaacacactgcctatcaggcaaactgtcagatgtcccttcaagttccaggtacttcagggagcatgagaggaaagccagtttcccatggaaatttacacactgatgctaagagacacatacacacaaaaaaagtaaacaggactatgtaatcaatcattttattattttcatcaacaaccaacacagcaacacaaattgacagccagtcctcaagggaaccttttttgaagtgaagagcaaggccctgaatgagctacctacatggaacatagtatttgcaatatgcaaatggag

SEQ ID NO: 542453 - DNA, 530 bp, Homo sapiens
agctccggcggtgctgcctgctgcaactcctgcctgatcaatatggttgcagtcagctatagactgttttactgagaccggacaacattagttcagtcgtttgtggtaaacatctacgtgtacaagcacactttataaacatttttttctttcttttttttttttttggagacggagtttcgctcttgttgcccaggctggartgcaatggcccgatctcagctcactgcattccacctcccgggttcaagcaattctcctgcctcagcctcctgagtagctgggattacaggcatgcgccactgtgaccggctaattttgtatttttagtagagacagggtttctccatgttggtcaggccggtcttgaactcctgacctcgggtgatccgcctgcctcggcctcccaaagtgctgggattacaggcgtgagccaccgcgcccggccaaacatttttttctttcaagacggaggcttgctctgtcgcccaggctggagtgcagtggcgggatgtctgttcactgcaacc

SEQ ID NO: 542454 - DNA, 620 bp, Homo sapiens
tcccaggctcgtaaacatgttctctattatctcaaggcagcagagcatattctgtgtcatcaaagaaaatgctaaactgtcacagctatgcttgatgcactgctacctttctaycccaaagccttcacgccctcacctgtttacccccacatccacacatcctcaccacctgcttctttgtttgatcatcaataaatagtttgggctcccagagctcagggcctttgcagcctccataccaccgttggccccctggacccaccttatgtactcttaatctgtcttttctcattcctttgactccgctggactttgtagccctgacgtcctggtattgggccatttacattaactttcaccatacaattaactttcaccattgggacattacaaacatagtgtaagcagaagtttgatgaacttgcacataggattaggcctctttgagtgcactttcttaaaatccagttgccagtctgtgaggaagccaagcagccacataaagatgtccatgtaagagttaaccaaggagcctggccaaaaaccccccactgagctcccagtaggtggccagcacgatataccagccttgtgaccttgcaactatctcagcactccag

SEQ ID NO: 542455 - DNA, 620 bp, Homo sapiens
tcccaggctcgtaaacatgttctctattatctcaaggcagcagagcatattctgtgtcatcaaagaaaatgctaaactgtcacagctatgcttgatgcactgctacctttctatcccaaagccttcacgccctcacctgtttacccccacatccacacatcctcaccacctgcttctttgtttgatcatcaataaatagtttgggctcccagagctyagggcctttgcagcctccataccaccgttggccccctggacccaccttatgtactcttaatctgtcttttctcattcctttgactccgctggactttgtagccctgacgtcctggtattgggccatttacattaactttcaccatacaattaactttcaccattgggacattacaaacatagtgtaagcagaagtttgatgaacttgcacataggattaggcctctttgagtgcactttcttaaaatccagttgccagtctgtgaggaagccaagcagccacataaagatgtccatgtaagagttaaccaaggagcctggccaaaaaccccccactgagctcccagtaggtggccagcacgatataccagccttgtgaccttgcaactatctcagcactccag

SEQ ID NO: 542456 - DNA, 620 bp, Homo sapiens
tcccaggctcgtaaacatgttctctattatctcaaggcagcagagcatattctgtgtcatcaaagaaaatgctaaactgtcacagctatgcttgatgcactgctacctttctatcccaaagccttcacgccctcacctgtttacccccacatccacacatcctcaccacctgcttctttgtttgatcatcaataaatagtttgggctcccagagctcagggcctttgcagcctccataccaccgttggccccctggacccaccttatgtactcttaatctgtcttttctcattcctttgactccrctggactttgtagccctgacgtcctggtattgggccatttacattaactttcaccatacaattaactttcaccattgggacattacaaacatagtgtaagcagaagtttgatgaacttgcacataggattaggcctctttgagtgcactttcttaaaatccagttgccagtctgtgaggaagccaagcagccacataaagatgtccatgtaagagttaaccaaggagcctggccaaaaaccccccactgagctcccagtaggtggccagcacgatataccagccttgtgaccttgcaactatctcagcactccag

SEQ ID NO: 542457 - DNA, 564 bp, Homo sapiens
tgccagggcaggtgtacttgattttcagtaggtatcagtattaaagccaaggtacaagttcctcatatggcttagctgttttaacccattaattcaatatgagaaaaccatattattttgcttccaaaaatctctaaaatcaaaggtctcccaaaggcacaattagtatttggaaaatgccagaagcaactcctgttctctttaatgttccacttgccattggatgatgtaccaggcattcaaagagttcagttgttctcttctggttgcctggggtaaaagaatgtaggcacctcttctgccatttgcttacaacattacaagatgattattttctattatagaagacagagaaggccacacacctcaaggtgtctttataagatgttgtctctctgaggcaatgatatagggacttttctggctgcaggtcattttaataaagttyaaaatacaaggcagggtgacgttttacaaaccttaaaaccccaaagtagctttgttccaaataagcgggctttatctgaatgccaaaactccagataatcccctaactggttcaag

SEQ ID NO: 542458 - DNA, 564 bp, Homo sapiens
tgccagggcaggtgtacttgattttcagtaggtatcagtattaaagccaaggtacaagttcctcatatggcttagctgttttaacccattaattcaatatgagaaaaccatattattttgcttccaaaaatctctaaaatcaaaggtctcccaaaggcacaattagtatttggaaaatgccagaagcaactcctgttctctttaatgttccacttgccattggatgatgtaccaggcattcaaagagttcagttgttctcttctggttgcctggggtaaaagaatgtaggcacctcttctgccatttgcttacaacattacaagatgattattttctattatagaagacagagaaggccacacacctcaaggtgtctttataagatgttgtctctctgaggcaatgatatagggacttttctggctgcaggtcattttaataaagtttaaaatacaaggcagggtgacgttttacaaaccttaaaaccccaaagtagctttgttccaaataagcrggctttatctgaatgccaaaactccagataatcccctaactggttcaag

SEQ ID NO: 542459 - DNA, 621 bp, Homo sapiens
tattgtggaatacgtgcaattgaagttcttgacaaactctcggtgactcatttcttattaaaaccttagatgtaagatttagtgttcaaggaagcttatctaaagcatgaactgtccatccatttttaagatattctaacttatgtctctgagtcaaaataagtcttccctgagacttatactttgccacattgtcttggcacttaatagaattgcttttggtgagttgtgttggtcccatgctcctgccttgcctagaaagacccttcaataagctgttattctccctgtgcatttgtcgaggatatcaatgggatgttgttcactctagaagacactaktggtaccctacccacaaccctttaccatgctaatgcacccaccacttctgcccatccatagcatccacgcacatcaacttgtaacagctcaaagctataactcttctccagaaaactgttctcaactatcaggagccttgtcatctggagatgtctgggaaattatataccagaccccactccagtgtataaaggcacaaaagcccaggcttcttgcctcaagacaggacaacttcatggtgcctttcagacttcagagccgtcctcatgagaccaggtt

SEQ ID NO: 542460 - DNA, 570 bp, Homo sapiens
aacccgatctctgtgaaaaatattaaaaatatttttaaaaaattaaccaggtgtggtgccatgtayctgtaatcccagctactggggaggctgaagcaagagaatcccctgaacctgggaggcagaggttgcagtgagctgagatcgtgccactgcactctagcctgggcaacagagtgagactccatctcaaaaaaaaagagtgaccttgagtgaccttgggcagagtagagaatggagttgagaatttaaactaattggcaaaaaggaagggcaaatcttggtaaagatagttgcatgtgaaggaggacacagagactgcattaagctcaattttcaagaaggataacttctttgtgttttactatcatgttacccatcttcgtggttgtttgaatggtacaagaagctatgaaatttatatattttgtattctctgctgtttagggaagaactctctcaaaccacgtttttcctctgctttcgaagcacaacagtcatcaacacagcagaagacttctgtaaccaaatgagtgaggagtttttcccacgaccaagcagtggatatca

SEQ ID NO: 542461 - DNA, 570 bp, Homo sapiens
aacccgatctctgtgaaaaatattaaaaatatttttaaaaaattaaccaggtgtggtgccatgtacctgtaatcccagctactggggaggctgaagcaagagaatcccctgaacctgggaggcagaggttgcagtgagctgagatcgtgccactgcactctagcctgggcaacagagtgagactccrtctcaaaaaaaaagagtgaccttgagtgaccttgggcagagtagagaatggagttgagaatttaaactaattggcaaaaaggaagggcaaatcttggtaaagatagttgcatgtgaaggaggacacagagactgcattaagctcaattttcaagaaggataacttctttgtgttttactatcatgttacccatcttcgtggttgtttgaatggtacaagaagctatgaaatttatatattttgtattctctgctgtttagggaagaactctctcaaaccacgtttttcctctgctttcgaagcacaacagtcatcaacacagcagaagacttctgtaaccaaatgagtgaggagtttttcccacgaccaagcagtggatatca

SEQ ID NO: 542462 - DNA, 503 bp, Homo sapiens
agtctctggaattgatccagtttttgggttgagggaatacagaaagcctaaagtcagtagcttaagatcttggatgttcacaaccaagtacatcacagtaataatccattctgcctgtaaaaatgaaattctcataagactatgccctagtttcactakgaaaatctcttgtttactttcttagagaagaatcctgtttgtgaaccacaaacttcctaactgggacaggttatttgaaactgacttttcctacgtgtaattgctagtctgcttaggaattctcctattgtctattgcctgtattcattcatttttaattcaagaagatctattaggcttatactatttgccagagactctgttagggctgggacaagatatgagcaaaacagaaatgggacagtttctgctccaccttctcatagagcctcttccttctctcctgaccctttttggctctccacaccactgtcacttgtaagccagactgtttttggaaggtc

SEQ ID NO: 542463 - DNA, 589 bp, Homo sapiens
ctgggtatgacagctattattcttccttttatatattaggaaatggaggcagataatgtttaaatctaagtggcagatccagaaggcgaaatccagaatcatgtttcttagtccaatgtcctgttcattacagcccagtcaatttctatgtttttccctgcatcaagaaaaacatttaacctaaattatatgaataatagtttgaatagttagcaatacctctaaaaagtagattgttaaagggagaaacgtttyttttttaaatctaaacccccatatataatgatgatgatatcatataggctctcactatgctttaacaaccttaaatacagaatcatcttttggatttgatgcatattccaggtcataatcctaatgatatgttacgacactttttcccatacaccaaaaaattcataggcattctaaatattatcccccatctactctctttatgaaagtgatacactacctctaattagcctgaactctgtgattcatttagaatatttcatgaagctctatttgttaccaacagatatggcacactctaggtgactggtcctatcccctcaaccccagtgga

SEQ ID NO: 542464 - DNA, 604 bp, Homo sapiens
cctgatgagaaatggttactttgtagaaacagattatcctgaaggccactcttgaattcgtggcaagtctggattgtataattcagatattatgcatataggaattagaaatatatgcacagttagaagccttcttttggaatatagggcagctccctggttgggatttgaaactgtagctgcctttctattggaagtatagtaataatgtagcaacaaactgccctttggtggtgctgagccaccattatgcactttgaggtgttttcccaaaggttaggatagatttgtcctgctggagggcgcttctgctttgaacccaagtccatgtgtttgtaagttygtgatcttgaccacctgaagtcaagttcctgatcttggtcttagtgcccagtgctctagtctagcagcagtcgctccccctccacacacacacactcattcccttcctcactcactgtttgcatatgtgacgtgcactcagacctttagttgctcaggcacataagacaggctgtgggttaggtgccaaagacatgtgctagatatttcggtgctgcaatgtaggtgtaggtaaagctgatggtgatagggaggctgggag

SEQ ID NO: 542465 - DNA, 651 bp, Homo sapiens
ggctgtgtcgttctctagatatgaaaatagagaagtttatcaggctctctttttttcctgccattatagagtcacatactgttcagtggaagaggaggatgagtaggaggaaaggaactgrctcaaaggctacggaaggattcagaaaagacttgcagagactaatatctcaagggtgaagcttgagctgaagtttccattaaaagcttccattgagcaatgaccatgccaatacttcatatagtagtttattgattcctcacaggaacacgatgcagtagatattgtcatgatcatcccagctttccagatggagaaatggaggcttcacgagttgaattggcatgtctaaagtcagcctgctcataaatggtgaagctgtgaattcaaatcagacaagcaggtgtccgagcttctggctgccctgctgccacgctgaaataacgactggccaccccaaagtgccttcagtccctctgcaactggttggcccagcaatggcaggtggccatttttgtctatgtccagtgacacccatgaactgacctactgatgtccaaagacaggaagacagaggaggagatggaaggatggggagggcagaaggcatgacatggatgaggcaagaatagctggagtgagagaccacag

SEQ ID NO: 542466 - DNA, 484 bp, Homo sapiens
ctggccctcagggtcattgaaagtgaaggctatagagccaagggcagaaagcaagggatggagaaggctgattcagtgcattctgggaaattcacaggggtgacttactaaatgtggtactctgtcttgtaggtgccttaccaaaaaaattaagtaaatctaatcccttcyacctccaaggtcaccagcttattgtaatgccagtcacctgtacttgtgttttatttacttccttctttcaagtgttcccatgttgaacagtgtacatatcttgatcatgcatttcttcactggtttaaaaagcaggtgttgggaaccaggggctacatgccttttattaggttggtgcaaaatgaattgtgcttcttgccgttacatttaatgtcaaaaatcgcaaaattacttttgcacaaacctaatacagtcttgcagtataagtccaaggtagctcatgttcctctgtgtgtgtgcgcgcacgcgtgtg

SEQ ID NO: 542467 - DNA, 603 bp, Homo sapiens
ctggaaaggagtgtgacatgttacagggatatctgagttgatgcatttgataatcttgaactcccagattctctgagccctctgaaccagtacaagtggccacttttctctgctataggcctgtgctataccctttatctgaagatgatgagagatctctgccctgcaaggcagcacwtgctgcccacggtgtctaaccccatcttcctccctggccaccagtgacctaactagagttaatcacagtatactcactagggatgtgttgtattctttaagagagaaaaagcattatacgcaaaaagagctacaggatgtagctatcacagaccatgtggagccaagggaatatgaatggctctgtgtcctgagggtgattaatgaagtgggctggaacataaaagtcagataaggaagattttatccagagatggtgctaaactctgcttcatgcttctagggcagcacttcaaagcttggagaaagcagtgctccacactgagtgaattagatatgccaaaatacccatggcagaatgtggaagaagagatcaaacagtttggagagcaggaccttctggagtgaatgtgctatgtaagggct

SEQ ID NO: 542468 - DNA, 488 bp, Homo sapiens
tcttcagggagctctagctacttactgaattttacttctgaatttcaaattccattataaacaaagaccccttttcctattgatttttgtcccagttttctggaagctctaaatgattcttggcttcgctacatcaatttcagtgtactctctttttttctccccctccttggagctttttaaaacaaatctgtataattgtgtctactgactcctttagcataaagacttcattctagtctttaaagccacycaatgattttagaaatgttttctttagatttttgttggctctttatttttaaagcaagtaaaaacaaacaattcaaatatttaatttatttttattaacaagaagacccagaaaagaaaaaatccttccttcctgagaggaaaaggtctaagtgacaataacattattgcttcaaacataatttcttaaaatataagactagcctttcttaagagacaagtatactcaaagcagt

SEQ ID NO: 542469 - DNA, 488 bp, Homo sapiens
tcttcagggagctctagctacttactgaattttacttctgaatttcaaattccattataaacaaagaccccttttcctattgatttttgtcccagttttctggaagctctaaatgattcttggcttcgctacatcaatttcagtgtactctctttttttctccccctccttggagctttttaaaacaaatctgtataattgtgtctactgactcctttagcataaagacttcattctagtctttaaagccacccaatgattttagaaatgttttctttagatttttgttggctctttatttttaaagcaagtaaaaacaaacaattcaaatatttaatttatttttattaacaagaagacccagaaaagaaaaaatccttccttcctgagaggmaaaggtctaagtgacaataacattattgcttcaaacataatttcttaaaatataagactagcctttcttaagagacaagtatactcaaagcagt

SEQ ID NO: 542470 - DNA, 384 bp, Homo sapiens
cttttcctattgatttttgtcccagttttctggaagctctaaatgattcttggcttcgctacatcaatttcagtgtactctctttttttctccccctccttggagctttttaaaacaaatctgtataattgtgtctactgactcctttagcataaagacttcattctagtctttaaagccacccaatgattttagaaatgttttctttagatttttgttggctctttatttttaaagcaagtaaaaacaaacaattcaaatatttaatttatttttattaacaagaagacccagaaaagaaaaaatccttccttcctgagaggaaaaggtytaagtgacaataacattattgcttcaaacataatttcttaaaatataagacta

SEQ ID NO: 542471 - DNA, 695 bp, Homo sapiens
tcaaaattcattgaattgggtgtaatttattgtttgtaagttatacatsaatcaagctgattttcaaaagtggcatcaggatactccgtaaaagaagttacccacttgcccccaaatagtctgtcattagcaagcctcttggtgtccactccagaaccacatgacccctattagctcagggatcctggactgcagagaagaactccactttccccaggagctcggagcagtgcaggtagtgccccaaggtgctaagtgtgtgtcatggaccgaattgtgtcccttatattgtgtccccatatattgaagccctaaaccgcagtaccccagaatgtgactatatttggtgatagggcatcttaacaggtgattaagctgaaatgacaccattagattgtgtcctaatccgagctgacttatgcccctatagaaaaaaatattaagacacaagagacaccagcaaaatgcacaaagcaggaagatgacttaaggtcacagggagaaggcagccatctacaagccacagagaggtctcaaaagaaatctaccctgctcaccctttgatcttggacttctagcctccaaaactgtgagagaacaaactgatgttgtttaagctacccagtctgtggtattttactatggcaacccttggaaactactacagtgtatatttgagagtggttaatgagaca

SEQ ID NO: 542472 - DNA, 625 bp, Homo sapiens
catttttaaaagtcattaatttacctattaggaataatcaatggatgttacacagcatctttctgtctctattaagaaagattttagcctggtgcggtggctcacgcctgtaatcccagcactttgggaggccgaggcgggcggatcacaaggtcagaagattgagaccatcctrgctaacactgtgaaaacccatctctactaaaaatacaaaaaaattagccaggcgtggtggtgggcgcctgtagtcccagctacccgggaggctgaggcaggagaatggcatgaacccgggaggcagagcttgcagtgagctgagatcgcgccacagcactccagcctgggcaacagagccagactccatctcaaaaaaaaaaaaaaaaaaaaaaaagaaagaaagttttttgacacaaacaaagcacttaataaaatatttgaaattaagatatttcaattaaaatcaaataataaaatgtgaatctgccaaagaaaatattttgtttgtctatattgtgttaagacatactgtcaacttttcgaatgcatagtatagtattgttaactataggcacgatgttatgcagtagatctctaggtcttatttatcttgcataattgaaacttg

SEQ ID NO: 542473 - DNA, 625 bp, Homo sapiens
catttttaaaagtcattaatttacctattaggaataatcaatggatgttacacagcatctttctgtctctattaagaaagattttagcctggtgcggtggctcacgcctgtaatcccagcactttgggaggccgaggcgggcggatcacaaggtcagaagattgagaccatcctagctaacactgtgaaaacccatctctactaaaaatacaaaaaaattagccaggcgtggtggtgggcgcctgtagtcccagctacccgggaggctgaggcaggagaatggcatgaacccgggaggcagagcttgcagtgagcygagatcgcgccacagcactccagcctgggcaacagagccagactccatctcaaaaaaaaaaaaaaaaaaaaaaaagaaagaaagttttttgacacaaacaaagcacttaataaaatatttgaaattaagatatttcaattaaaatcaaataataaaatgtgaatctgccaaagaaaatattttgtttgtctatattgtgttaagacatactgtcaacttttcgaatgcatagtatagtattgttaactataggcacgatgttatgcagtagatctctaggtcttatttatcttgcataattgaaacttg

SEQ ID NO: 542474 - DNA, 624 bp, Homo sapiens
cacataccagtatattgcagaatgagagcaagaaaagttgccctgccaggcgcggtggctcacacctgtaatcccagcactttgggaggcggaggtgggtggatcacctgaggtcgggagttcaagaccagcctgaccaacatggagaaaccgtctctactaaaaatacaaattagccgggcttggtggcacatgcctgtaatcccagctactcgggaggctgaagcaggagaatcgcttgaacccaggaggcagaggttgcggtgaactgggatcgcgtcattgcactccagtctgggcaacaagagtgaaactccgtctcaaaaaagaaaaaaaagaaagaaagaaaaagaaaaaagaaaagaaaaaaaaaagaaaaaattgctctaataatttgctgattaaaatgcatacatctgaaaagttattcagcacaggaaagagaatactttctcagaaaaatgtatgccttttaaytaaatataagataatagcatgcaatacagatatatatatatacacacattccagaggtgtcaagaaagtgagaaaaaaaattctttaaaaaaagagaaataatacaataacagagaagatagcactaccaaacccagcaggtagggt

SEQ ID NO: 542475 - DNA, 480 bp, Homo sapiens
ttggttgatactttcaatcttgcgccaaagatcaggtagtttgttggttaacttattcactgttggtgagaaaaaaaatagaaatgtaagattgtgcattaagaaaaggctaactacaaatgttcttactgacagtatttgtcaagtggcatgtttggtccccagatgttgaacaggatgggtcataattagttacggtagttccccccttacccatggtttcacttcycaaggtttcaagtacttgctatcaaccatggtccaaaaatattaaaaaagaaaaattccagaaataagcaattcataagttttgaattgggtgctgtttggaatagcatgacgaaatctcatatggtcccacccatgtgaatcttccttttttccagcatatccttgctgtctaccctacccacccattagtcacttagtagctgtctgggttatcagatcgaaaaaacatagtatatatagggtttggta

SEQ ID NO: 542476 - DNA, 605 bp, Homo sapiens
agaggctggccacctccatccattttatgaggacagaaatgcaggcctcatgtggaaacatgaggtgacatatgtttcttagcaagggtggaacttgctaacgggtggatttcacagggcctggctcaggggatgccaaattctcacattaggaagactaaaataatagggccttgttggcctgaggtctctaactttgtcttctgggtgaaggactgtgggttttgacatctgagtgtgggaaatgttgcctctcttctatgatcccacttctctttcacttaatactcctctttaccgctatatgaygggcccatgtgttgattatctattgctatgtaacaaattactccaacacttcgcagcttaaagcagtaatgattatcttggatgaggaattcaggaggggatggcccagagtcttcctaggttactgtcaagatgtcaaccagggctgtagtcccctgggactgcagcatctgcttccaagctcacccacatggctgttagcaggcctctgcttctggctagctgtgggctggaagcctccatttctcatcacgtgagaccctccataggctacctgagggtcctcatgacatgac

SEQ ID NO: 542477 - DNA, 694 bp, Homo sapiens
ttgcagctggcttctgaggtgtaatgccaagtagtacagcacctccctgtctgcatccagcctaactgggcacacagcaacaatgacagacatcactcatcttgtcagtggcctggaggtatgtagaacctcagaccctgcttctctccaaaacgctccaaggagcctggaagcggcagattggggttgcaactgacctggctttggctaccctagaccccatctggctgccccagggccaaaggcatcaatatctcctggaacctgttgcagcattcatgttttggaaagctctcatttacagggacaaatttcttgttttccctgaatccttaggaaattgaagggtatatgtgtgtctgtgtttgtgtttgtgtgtgtgtgtgcacgcrcgtgtgtgtgcatgctagtcctgttattttgcttaccatcttactcaatattcttgcaaacagcctatctggcaatataagaggcagcaaagtgtaattcctcagaagatagattctggagccaggctggcaggtttcaattttagctcagccagttgctggcttcctgtcctgtgttcctctcctaatctatataaaatagagctaataatagtgctgtttttctagagctgttaattaaattaactcatgcatgttaatttcttgcagtaatgcctagaatagagtaagtgtccaatagt

SEQ ID NO: 542478 - DNA, 592 bp, Homo sapiens
gctgccagcacagtgccaggaacatcataagcatctggcagagtatgatgaaaagaatgaatgaacaatctttaatgtttgcaagagccaccccttcaagggtgtttatgtgacagtaaaggccacactgtgtgtatccagcaagaacccaagaggggagatcagaaaagctacctggggcagggaaacagaaaaaagcatttatgagacccttctctacttctctgcctaacgacctcattagtaactgccaaagagtgaacattttgaaggatctcgctcattacagcgggtccaaactccgcatttaaagatggyaaattaatttttttaatgtactacttttttcctttccttccctccatccctccctccctcttgctctggcaaggaattgtttatgagatgtggcagattgttacaaataggggaagaaacatttccaaattccatgagggaaatagctcacagatgccagagggggttgggaaggagcaggtttatcaggatccagagatccagatgggcttgtgggcaggaaggggtgggaaatgaagccacccagatgtgctggggatgccatctcccagcc

SEQ ID NO: 542479 - DNA, 651 bp, Homo sapiens
acaaagtagacaccttggcctcctccacttgaagcaatagtagtggtcatgatggtgagaataaagttggggtcaaatgacaataccctgtgtcctccctatgccaagtgggtggaacctgagatgtggatattatggtgattgtactgaaarcccagaggctggaaagggccttcctctcatgtaggaagcagggtccctctgagaatgtggacctgaggctggccactgcctgggctcatgtgtatcccttgaagttggggatcagaggtgaagagtagtgttcaagttgagcccagagatggcacagtctttttggctttcacctgggaaaggaacagctcttggatgttaggaaagttgctgctgtggcctgggcacagagagccaaggaagctcagtgaataagagcctggggtgcaggaccagcccttaggactagactagcgtttctcaactttgacactattaccatctggggccagatagttccttgtggtggctgtcctgtgcactgtaggatcgtacagcaatatccctggcctctacccactagatttcagtagcaatccccactcccagttgtgacaatcaaaaatgtctccagacattgccagatgtcctggggattcgggggcataactgcaacag

SEQ ID NO: 542480 - DNA, 651 bp, Homo sapiens
acaaagtagacaccttggcctcctccacttgaagcaatagtagtggtcatgatggtgagaataaagttggggtcaaatgacaataccctgtgtcctccctatgccaagtgggtggaacctgagatgtggatattatggtgattgtactgaaaacccagaggctggaaagggccttcctctcatgtaggaagcagggtccctctgagaatgtggacctgaggytggccactgcctgggctcatgtgtatcccttgaagttggggatcagaggtgaagagtagtgttcaagttgagcccagagatggcacagtctttttggctttcacctgggaaaggaacagctcttggatgttaggaaagttgctgctgtggcctgggcacagagagccaaggaagctcagtgaataagagcctggggtgcaggaccagcccttaggactagactagcgtttctcaactttgacactattaccatctggggccagatagttccttgtggtggctgtcctgtgcactgtaggatcgtacagcaatatccctggcctctacccactagatttcagtagcaatccccactcccagttgtgacaatcaaaaatgtctccagacattgccagatgtcctggggattcgggggcataactgcaacag

SEQ ID NO: 542481 - DNA, 651 bp, Homo sapiens
acaaagtagacaccttggcctcctccacttgaagcaatagtagtggtcatgatggtgagaataaagttggggtcaaatgacaataccctgtgtcctccctatgccaagtgggtggaacctgagatgtggatattatggtgattgtactgaaaacccagaggctggaaagggccttcctctcatgtaggaagcagggtccctctgagaatgtggacctgaggctggccactgcctgggctcatgtgtatcccttgaagttggggatcagaggtgaagagtagtgttcaagttgagcccagagatggcacagtctttttggctttcacctgggaaaggaacagctcttggatgttaggaaagttgctgctgtggcctgggcacagagagccaaggaagctcagtgaataagagcctggggtgcaggaccagcccttaggactagactagcgtttctcaactttgacactattaccatctggggccagatagttccttgtggtggctgtcctgtgcactgtaggatcrtacagcaatatccctggcctctacccactagatttcagtagcaatccccactcccagttgtgacaatcaaaaatgtctccagacattgccagatgtcctggggattcgggggcataactgcaacag

SEQ ID NO: 542482 - DNA, 659 bp, Homo sapiens
agctttctgccaatatcccagaggcctttaaagtgaaacctaggctgggtgcagtggctcatgcctataatcccagcactttgggaggctgaggcgggcagatcacttgaggtcaggagttcgagaccagcctggccaacatggtgaacctccatctctactaaaaatacaaaaattagctggatgtggtggtgtgcgcctgtaatcccacctactcaggaggtagaggcaggagaactgcttgaacccaggaagggaggttgctgttagccgagatcacaccactgcactctagcctggtgacatagcaatactccgtctcaaaaataaataacaaaataaataaataaaaataaaataaagtgatacctaacttcagcattccctcatggacaagtcatttaaccctgtgagcctcaatctcttcctttgtgaaaaggggattttaatcatcgccccagggatgctgtgagggagcttacccagggcagaccctcaggaagtgctaggtcccctttgttcttaaagtgctatttttgctataaaagtggccctatgttaaagtgaactcctcaaaggccacattcactctttataagcacaygtgtaaatttatgagcagaatcttccagataccttcatgagggcatgtctagcac

SEQ ID NO: 542483 - DNA, 590 bp, Homo sapiens
ctgcactaattcccccatgaggttccttgacaagcaaaagacaactgcacactagcctgtgggaactgtgttgggggcccaggacagcccagaggagggaaggcaagtggccctgtctgggaaagtggagacacctgggtcaggttttgtagggtgagcgggtgttacacggactccatgggaggggtcatgaaggaacaaaggaccccagaccgtctgaagaactgcaagatattttaggtaggctgggaatatgctgggggaagacacaggccttgtttcaaaacaatctacctacttgtcatctggacactgtcctggctacttcagggacaccattccagttaaccttcgyagcaatcctgggccctattttacagatgagcttatatgctgtatgaaagtcacgtgaaccccagaactgggatttgaacccaggtctgccctatggcagacgccgtgtatgtaatcttcatattacattggaaaaagctacctattcaaggcacatattcaaggcataatggctcctgcctcaaaagcctccttgctgactgtgcttccaagcctcaaacagagacacacagcct

SEQ ID NO: 542484 - DNA, 496 bp, Homo sapiens
agttgagaaataggttccgctgctaaagtagaaaaaaaaagtagtttgaagaccactatgttgaagacttctgattagattattaggtgatagcagaaacctcttataggagaggaaactaacgaacaagagacttctgagaagacgctgctgctacctaccagtggatccctgcttttctgcctcctgtctgtctatagtgcacattggctccagaaatccagcaagattaaggcatagtagtgatttccggactactgatatgaaaataggcaaaactgtccctatcaaatccagtacatgctattttataaggattaggtgacttgaattstagagggttttggtcaaccaaaaggttcagatactgctgcattagacaggaggaatagattgtaacttcaaacagtaaaaaaatcaaaccaggctttgcctttttgataatcttttgacttttttagtatactaagttaaaggtaaaatgtggagttgaaac

SEQ ID NO: 542485 - DNA, 459 bp, Homo sapiens
tctaaaaagtgcttttgtactttgcttcctaaccagattggtccagaaaagggcgtggtgcacctggcgacagcggccgtcctaaacgcggtgtgggacttgtgggccaagcaggagggaaaggtaacccctctcacaaacgctcaggaggctcctgggagctgyacgacactgactttccctacgcacagaggaaagacagacacactgcagcccccaaaaggaaatacagataattgctttggtgtttttttctcctctgagaggttttggcagtaggtagggaactgcaggaggaggagaaagaggagacaggatggcggaaggcgcaggcagcagtagaggggggtgtggggacctggtggctgacagccagcattagagctgccaacgcgtttactgtcaggaaaaaatggggactttacacatatgtcttacaaatcctttcttttttacttc

SEQ ID NO: 542486 - DNA, 459 bp, Homo sapiens
tctaaaaagtgcttttgtactttgcttcctaaccagattggtccagaaaagggcgtggtgcacctggcgacagcggccgtcctaaacgcggtgtgggacttgtgggccaagcaggagggaaaggtaacccctctcacaaacgctcaggaggctcctgggagctgtacgacactgactttccctacgcacagaggaaagacagacacactgcagcccccaaaaggaaatacagataattgctttggtgtttttttctcctctgagaggttttggcagtaggtagggaactgcaggaggaggagaaagaggagacaggatggcggaaggcgcaggcagcagtagaggggggtgtggggacctggtggctgacagccagcattagagctgccaacgygtttactgtcaggaaaaaatggggactttacacatatgtcttacaaatcctttcttttttacttc

SEQ ID NO: 542487 - DNA, 595 bp, Homo sapiens
gctatgtatgactcctattattacttatacaaacaataaggctaagaaagtgagtgtcttccattgggccacctgtctattaagtggcagaggcagggcttgaactctggagtcttgggccaactgctgtcttccattgcatgctcacacttgtattttagggtcaaaggtgcacacacaaatttatgcatggcaacagaaatgatctggttcaagtaataaactcctaagtgtgaagttaatgccataaaatgattctgggagagtctatttgctcagatggtgcttcctggctcagcctggaagcatcatggccagtctggatacattcacccaaagtctcctcttaaatttagtactytgtctttagggcctaagtatttcatctgttttatcatcaatctcatcctgaaactcaggatagagcgagcagttgcagtctagggcaggaacaccaacaaagacatgaaatatctgtcagagtccatgattccttgagatccacaattgtgatagcattcaaatgatactcaaagccgttaggagacctaggttgtaacatgcgttttttccacttagtgctatacatatcata

SEQ ID NO: 542488 - DNA, 595 bp, Homo sapiens
gctatgtatgactcctattattacttatacaaacaataaggctaagaaagtgagtgtcttccattgggccacctgtctattaagtggcagaggcagggcttgaactctggagtcttgggccaactgctgtcttccattgcatgctcacacttgtattttagggtcaaaggtgcacacacaaatttatgcatggcaacagaaatgatctggttcaagtaataaactcctaagtgtgaagttaatgccataaaatgattctgggagagtctatttgctcagatggtgcttcctggctcagcctggaagcatcatggccagtctggatacattcacccaaagtctcctcttaaatttagtactctgtctttagggcctaagtatttcatctgttttatcatcaatctcatcctgaaactcaggatagagcgagcagttgcagtctagggcaggaacaccaacaaagacatgaaatatctgtcagagtccatgattccttgagatccacaattgtgatagcattcaaatgatactcaaagcygttaggagacctaggttgtaacatgcgttttttccacttagtgctatacatatcata

SEQ ID NO: 542489 - DNA, 595 bp, Homo sapiens
gctatgtatgactcctattattacttatacaaacaataaggctaagaaagtgagtgtcttccattgggccacctgtctattaagtggcagaggcagggcttgaactctggagtcttgggccaactgctgtcttccattgcatgctcacacttgtattttagggtcaaaggtgcacacacaaatttatgcatggcaacagaaatgatctggttcaagtaataaactcctaagtgtgaagttaatgccataaaatgattctgggagagtctatttgctcagatggtgcttcctggctcagcctggaagcatcatggccagtctggatacattcacccaaagtctcctcttaaatttagtactctgtctttagggcctaagtatttcatctgttttatcatcaatctcatcctgaaactcaggatagagcgagcagttgcagtctagggcaggaacaccaacaaagacatgaaatatctgtcagagtccatgattccttgagatccacaattgtgatagcattcaaatgatactcaaagccgttaggagacctaggttgtaacatgcgtkttttccacttagtgctatacatatcata

SEQ ID NO: 542490 - DNA, 591 bp, Homo sapiens
aaacatgtgctttttgagaccatttttctatgtataatgctggtcacagagataggagagagagaaaaaaagagttcctccacaattgtgattggaagagaacaatttccttcattttctggctccartgagtacctcctaacagagctgaaaactcatcttcgggttcctctagaagaggctccagtgtttagcagagaaacagttcagcagggtggaaagagccggccgtgttgcaggtacttacaggccccaggacgatgctgtgtagcaggggacgaacagttctgcttggcttgcggagtcagggagaagcctccctggaggaggaggacacttgagcccattctggcaaaatgactatgaactggccaagagaacaaggagtagggaggagcagaaggcttttaggcagagggaagaacacatacaaaggagtagaagccagaatgggagcacgttcagaactgcaggggtctacttggctaagcataggaggtgagcctgtgaacttagggggtggaagttgggggtggcctgagccctgtgaagggctgctgggtactcaggtatggtgggcactgggttggc

SEQ ID NO: 542491 - DNA, 591 bp, Homo sapiens
aaacatgtgctttttgagaccatttttctatgtataatgctggtcacagagataggagagagagaaaaaaagagttcctccacaattgtgattggaagagaacaatttccttcattttctggctccaatgagtacctcctaacagagctgaaaactcatcttcgggttcctctagaagaggctccagtgtttagcagagaaacagttcagcagggtggaaagagccggccgtgttgcaggtacttacaggccccaggacgatgctgtgtagcaggggacgaacagytctgcttggcttgcggagtcagggagaagcctccctggaggaggaggacacttgagcccattctggcaaaatgactatgaactggccaagagaacaaggagtagggaggagcagaaggcttttaggcagagggaagaacacatacaaaggagtagaagccagaatgggagcacgttcagaactgcaggggtctacttggctaagcataggaggtgagcctgtgaacttagggggtggaagttgggggtggcctgagccctgtgaagggctgctgggtactcaggtatggtgggcactgggttggc

SEQ ID NO: 542492 - DNA, 606 bp, Homo sapiens
agatttgaactttagctctgtaattttctaaatttgttgtgattaagttgattgccattttttctctaagcctcagttttcatatagtaaaatgaagataatgacattttctttgcctttcttcatgattgctttgatgattaaacgtgacatagatacaaaaagaatttcaaaaattaaaagcattaagaagcttgaaaataataattttatttttctttagttactcagaaactctattccttgggtcaatagtagtttactgtgctgtaacagatragatctgacttattagaaacaactgtacatttactggatatgaagagatagcaggaaaaactttaaaccatctcgtaaagaaaaaaacacatcatagcaatctgtgaatatagattcacagagcttgtcagcttattttgaaatgcccagttagatcctttttttgagttgggggacagcactcttcagatagcactgacctttcgctttcacagagtgacagccaacaagcattatcataagagtggataatatttttaaataatcatatgttaccattaatctggcgctgagaactctctctgcctgggacaaaggcaatgcagc

SEQ ID NO: 542493 - DNA, 606 bp, Homo sapiens
agatttgaactttagctctgtaattttctaaatttgttgtgattaagttgattgccattttttctctaagcctcagttttcatatagtaaaatgaagataatgacattttctttgcctttcttcatgattgctttgatgattaaacgtgacatagatacaaaaagaatttcaaaaattaaaagcattaagaagcttgaaaataataattttatttttctttagttactcagaaactctattccttgggtcaatagtagtttactgtgctgtaacagataagatctgacttattagaaacaactgtacatttactggatatgaagagatagcaggaaaaactttaaaccatctcgtaaagaaaaaaacacatcatagcaatctgtgaatayagattcacagagcttgtcagcttattttgaaatgcccagttagatcctttttttgagttgggggacagcactcttcagatagcactgacctttcgctttcacagagtgacagccaacaagcattatcataagagtggataatatttttaaataatcatatgttaccattaatctggcgctgagaactctctctgcctgggacaaaggcaatgcagc

SEQ ID NO: 542494 - DNA, 594 bp, Homo sapiens
gctccacttctttcagcaaaaataaaaatgtttattttccatatgatcagtcaccagaggtataccgttgtttcatggggaaaaatccattctgtacaatttcaatccttggctayggggctgtaaggcttcgggggaacatgggcatttttaaatttttgtttgaagaaaaaaatacatgtgactgtggcttttattggctctatagtatacttcatgatcaagaatttgagagagtccagttaaaaacatgcagataatattcttttctaatgctcttgccctttggttaaaatgtcatccatatcaccaaacagtatttttttttgctcttcaatattcccatttaaaccattgctctgattcctgcctgctccttatgccctctgctaagtctaaaaatgattctgatattctatatcataaaagtacttcctttgatcctgtttctcttttaagtgctagagtaagtttaaatatgagctttagagtccagcagatctagtttagagtcactacatccacatttgcaatctgtttaaatctatttaatgcccttaagatttagtttccttgtctgtaaaatgaggatga

SEQ ID NO: 542495 - DNA, 640 bp, Homo sapiens
ctgcatctctctgataaagaaaatagtgtgtatttggaattatgctttgccctttataggtttatgccagcaaataaatgacattattgtcagtgtgtcccttaatgtaaaaagtaaaatayaaagaaacttataaagtctcatcttgctttaataaggtaattttgtgatgttgtgactcaccctctgacatcgctcagagtgatattacttagatagctagggtaattgctatatgaatatgctcttcatcttttaaaatactatactgggctggctgtggtggctcacacctgtaatcccaacactttgggaggccaaggcgggcggatcacaaggtcaaaagttcgagacccgcctgaccaacatagtgaaaccccgtctctactaaaaacacaaaaattagccaggcgtggtgatgcacgcatgtaatctcagctactcaggaggctgaggcaggagaatcacttgaacccaggagatggagtctgcagtaagctgagatcgtgccactgcactccagcctgggtgtcagagggagacgccgtctcaaaataaaataaaataaaataaaatactatagtggaagcttgacctgatagtatttattcatcatcatttattttaacagttattacct

SEQ ID NO: 542496 - DNA, 567 bp, Homo sapiens
gtcataaaggtccccgcacacaccccagaaggccccagagaggcacctttcctgtgctcggctcaggctggtcggccagaccccgtgacctgaccctgccaggaatgtgacctgtctgcccgcccagacgtgcccaggaccttgtttcccaagtgtctgcctcatctgggggcccgatgcccccagcctacaccgggtgccctttccgcagtcacagatgcctgatttgttgaattaatgagcggctgcttctctcatcctttcccttggctcattcaagtaagcttgttacccattcttttgcaacagagtcacatgtgtcaaacagatttcatttttttcctagtttatgcctatacatttcttctgtcctatttgtcttcattgggatttggatgggaattggattatgagctgcaaagaggtgtcagatacccagtgtattctgggagctgtyctccgaatgtccttctgcatgaagactgagatcttctccacccttcctgggtgggcctggtccctcgaccccctccctcacactgcaacctcagagctctgtggaaaaag

SEQ ID NO: 542497 - DNA, 530 bp, Homo sapiens
gctgaggctggctgggccagcttctggggctatgtgacagaccccatctgtccagagaagcccactctcaggcatgtctaaccaggaaaagagccaccagacagtctccaagtacttggggtccttggcccaggcatcagggaggcttcatggaggargtgaggggataaggcaatgctgcaggcattgcctatcaatgtttaacctgtgcctggccctgggagagagccagggtccctggcacggatcagccttgaacttggagtgccccaggagctggaacctggcaggtgggttggatggaggcccttgggagggaggaaggggctagtggcctctggagagggtataggtggcaggaggtcagagaaaatttttgagaggctgaatctgcagcaaacgtttgtccggcccctgctctgtaccttcctgggtgctggaactagtccctacatcctggaacctttcacctgctgggagatgcctattcagcaaaccagaatgacagtggccaggaagtgcaggaaggg

SEQ ID NO: 542498 - DNA, 599 bp, Homo sapiens
tgctgacctggacgccctgcagcagaacccccagcccctcatcttccacatggagatgctgaaggtgaggggccaccgcgcctggtctcaccaggcccccactgcccagcctcagggcggcgctggcctgtccacccaggggtggtgggatccgcaggtggactgctgggggagcggacagagacaagaaaacctgtgcaggacccttggcagtaccctgggtctcctttcctcctccttcacatctcaaatgtcacctcctccaggaaaccggccctgcccacccggtctcctcattctctgtctcgcagcagctcatttcctttatagcctctgccgcaccttgaagtcccttggaattcatggatttccttgtccatttagggaacctgccatgcagcatgatctctkcgagggcagggcttttcaccgtcttgttcactgttctattcttagcacttggcacagtgctgggcacacaggagatgtgacatcgatgtttgatgctttttgagtgacaagtagctctgctgctggtgtgtgatgtctgggggcccagccagcccagatgtgggtcaggtctgctgctgacggacgca

SEQ ID NO: 542499 - DNA, 593 bp, Homo sapiens
cgggcgcgtgacgtctttcctgcgcgccacctagcgtctctatcgcgccagttcctcagcctcagtgctatgaaggtgacagcgtgaggtgacccatctggcccgccgcgatgctggcaacacggcggctgctcggctggtcgcttcccgcgcgggtatctgtgcgtttcagcggcgacacggtgaggcccagcctggctggggccacgggtgtttggggccgggtgtcgcggccgcgcccgtgcacgagcagtccctggggtctgtagtggcctctggagagcccttctccccaggccaggcgggaaggcccccgctccggcctggttgaagtaggggaacgggtcccaacgcggggccgactcccttgaccctctgacttgctggcttcccttgttttacagtcctcggcctggcggaagttttgcagcttgtgaagacccctagtctttcattctctccttgtcacagmcttgtagggcgtgaaggggtcattgccccatttagggatgcgcacctcctgatttcccgtccactgctctgcgccctgaagtggctgaaaagtgctcttaaaaggatgggaatcccgtcgc

SEQ ID NO: 542500 - DNA, 606 bp, Homo sapiens
tttacagaaaagttataaggtagtacagagagttcctgtatgtccttcatcagctycccttaatgttaacatataaccgtggtatatttgtcaactaagaaatgaacattggttcagtactatcacctaaactaattaattcagatttaaattagagaacctatcttttttttttcccaatttttcatttatttaaaatttttctgttaaaagtagagacgaagttttggcatgttgcccaggctggtctcaaactcctgggctcaagtgatccacccgccttgtcctcccaaagtgccgggattataggagtgagccactgcacctgccagaaccttttttctccccattctacaagctgtgcacgtgaggaggatactctaggaaaatgccctataaagatctggttaggacccagtcatccaaattaccaatagcacaaaagtctgctacttttaatgtatgtctgaagcctaataatgtctcacttgtaaccccctcttatatttccactagcatgaaagaggccaattcttggagtggggaggttctttctttagtggaagagtttaaaaggttacctttatggccaggggaggtggctca

SEQ ID NO: 542501 - DNA, 563 bp, Homo sapiens
cctgggcaacacagccagactccatctcagaaaaacataaaaataaaaataaaaataagaaacctaattggccacacttgccttacaagaagctcctacagcttgagactattacagaacctgaactgagtctgaagagagaaacttccttttgctgccacagcaaagaataatcaccacaaataaacctcacttatgtccagagagagtctaggtgctttgataccaaaatattaggcacaggagaaacaaggaaataaatgaacacatcatcccagtcaatagttaaccaaggactgtcaaaatatccctgttaagaaatgtatggcctgtgtggttcctgttctgggaattatttactaactgcaacaattgtgtcacgatcaatcttggcagcagccctggttgtaaatggtaatttataatacmaggaagtgagtggttaaagagctggcaggccaagggtgtgtggatcatctcaggacgatcaggagcaggctctggaatgcaaagtcagcaccatactgtactcataatcctgtattagattcttattgttgctg

SEQ ID NO: 542502 - DNA, 580 bp, Homo sapiens
ctgtgatgccaaaaccgagttcttgggaatgagggcgccctgatgggctgtgctcagcccatgttagctttggcctgggagtcaggacggcgcctggggagctgaggtcaccctcccaaactccacccagcaaggccccactcccccctccccctggatggctggggggccctggggaaagagagaaaaaggaggggaaggaagaaagaagagtgagcactccaaaactccctgccccaggtccagaagccctgcsccacctgctctgaaacccagttactggccgtcatctcaagctggagtcaacagaggtaagcccatttctttgcaggtgactaaaatttcctgtttattacagaaaatgtgcttttgctgtgagggaaacacagtgactggccagccacacccacaggtgacaaaaagggccacagcactcaggcctgtgccatgcaggcagtgaccacgtaactgcacgccccaccaggcccaccggcgctccttagcccaccaggccctcgctgccctcaaaggcacctcactcagcctaaaagacgccgggtttcaagaggtgccaaaggct

SEQ ID NO: 542503 - DNA, 630 bp, Homo sapiens
catctgacagcttttggggagtttctcatgctatctcaaaatggaaagggagacacctgtgcaaaaagaacaaaacactagaagcaacctcgatataacaaccaactcttaagggaattaactcattcctatgagaactaaccagagctgcaaaataataataataataataataataataataataataaataaaagacattaacccaacctaacgactgaatcactttttaaagtctcctcctccaagtgctattgcattggagaccaagcctcaacatgagtttccgtggggacaaaccatattcaaactataataatttgtgatatattctgatgctgcatctatcattatattaaaaatccacacacaaatcagtttcctattttctttgatgataatttcattcatgttcagcaccaattcaaacctcaaggcttttgcaatcagaaccaatacccttttcaacattcaacggttttctccttttttwaaaaaaaaaaaaaatccctttggctaacataacttcctgttttgaagaagggggaaaaaagcccaaaggtaccatacacatcaaaaagctcttgaaatataacattttgatgagttaagaagtaaagcagtaagaa

SEQ ID NO: 542504 - DNA, 583 bp, Homo sapiens
gctcttcattacttcattcaacaaatatattttgagcatgtatcatctgcctgatgctggtgaacaataatactactattcctatacacacacaactattaatccgttggaaagacagtcatcaataattacacaaatagctatctaaatattataataactacaagataaaatgtaattattaaacattctttacatctactcaccttggagcagatgtttttttcttggagggaaaaaaatcaacacacatacacacatttgcatggccttctgtaaatatataaagccaacatcatcaggcaacctattgcatggagaaaaaatatagctgcatcttgagtgtgtgtacacatgtgtrttgctaaaatgaccactgattttggcatacaaagctcaagggaagagatggaacaattttcctaaggtaccaagacacttatgggaaaaatataactagaattcaacttctcctctttagcagttaaaattcaagaaacttgtcagagttgactgaatgaatctggctgttgttcactagcaaagaaaagatcttttaaggtaagtaagtcactgtgaggaa

SEQ ID NO: 542505 - DNA, 583 bp, Homo sapiens
gctcttcattacttcattcaacaaatatattttgagcatgtatcatctgcctgatgctggtgaacaataatactactattcctatacacacacaactattaatccgttggaaagacagtcatcaataattacacaaatagctatctaaatattataataactacaagataaaatgtaattattaaacattctttacatctactcaccttggagcagatgtttttttcttggagggaaaaaaatcaacacacatacacacatttgcatggccttctgtaaatatataaagccaacatcatcaggcaacctattgcatggagaaaaaatatagctgcatcttgagtgtgtgtacacatgtgtattgctaaaatgaccactgattttggcatacaaagctcaagggaagagatggaacaattttcctaaggtaccaagacacttatgggaaaaatataactagaattcaacttctcctctttagcagttaaaattcaagaaacttgtcagagttgactgaatgaatctggctgwtgttcactagcaaagaaaagatcttttaaggtaagtaagtcactgtgaggaa

SEQ ID NO: 542506 - DNA, 439 bp, Homo sapiens
ttcccataaccactactttagaaattgaattctaaaagtccaccttagaaatatctccatctctttctttctaacttcattcttctttcttagttgaagctgtaatcttcttctcccttgactattgtaacatacttgtaattttctctaccatcagactttgattttctccaactggttttctaaatttcttatagagttaacttcctgaagcactttcaatagtttgtaatgattaacaggaaaatatcatarctccttactttagcatacaaggtcttatataatccatcacaaagtgacttttctacaaccccagcaccctaggaatcaacttcatgaaacttatggatcacaaatgatggctcttctgtcactctttcattgtgtttctataggaataaagagcatcattttctgggtttccatggcgctgtgg

SEQ ID NO: 542507 - DNA, 571 bp, Homo sapiens
actgatgttgcaattcatttcagcttaccatcttgtgttggattttttttttttcagttkgtataattgtctttcccaccagcctatttgtcaaggggagaaaccatgtttcatcaatgctgtattccccaacccataactccatgccaactccatgctagcacatactctattagttggggttcagccatacaaagtatcagaggaagcctaaaagtaaccagccttcacaaagtgtcagaggaagcctgtgggtaaccagccttcacaaggttgtcctagtgtctaatgctggattctgaagattacgagcagcccggaaccctatgaagatagctagaatccaccaaaaagcctgaaaattgtgtccactcttgcttcctatgaccttggtgatggttatcctgcagaaaccaggacttttagttatgtagctgaacacaaatataaccggcccatgagtcagggaaaataaaggaagatccagaaacaatggagggcaattctctgttagtgtctattactacggaactatacttccacaaactaagcagcttaatatacacatact

SEQ ID NO: 542508 - DNA, 635 bp, Homo sapiens
caaatagcgcaaccttgggagactaaaagtatgtattacttgatgagagcttccctttgttagttaaacttattgggtcttctttaaaagggaaactacacaagattgaaatagaacatatgaatgataaccatagggaatgggggtgaatgctttttacatttttacacaaactgcaaaacaatgagactcatacatgctcagccatggcatgagataccttccctacagatgtgaagtaattagatatgctagaaacatgtctttgaattttcaagttgtaaataatctagattacataagaaaacctctttattttacacaggaggaaattgaggccttttaaaagaatgccactgcaattgtggggagaatctaggtctccacaatctaactcacttctcagtcccttcctgttaggtaagcaaattatatgcactttcttccctatatgagttttgcaagtgggcactccttaactcgttgttgtcagctctattaagctgrgctaacttcctagggctaaacgtataaccatttttcatttcttggcaatctgttctattaaatttgcatattcaaatgtgcagcatttatgtctgatctccaaaggaaaactcactaaattcctggta

SEQ ID NO: 542509 - DNA, 605 bp, Homo sapiens
gcggaattataagattagtcaaagatgatgaaagtggcagacacctatagatactaacaaccttgaaaggtttgctagactattcccttcatttcattgaaaggatatctagaaattattatgtgtatttcaaattatttcccattttacctttatatcagatattgaaatatctgccatagtgaaagcttggtagtcatctctccttctcactaccatatggtagctatttctttcaaaggctctgcttctctttttcaccctatttkttacttctaaaattcatctgagagactgtaacactttacattacaacaaggttgaatcaagtaaattattcaccttatgtgaaggcattagcacattttgttattcttttaaggcccatttttctgagaatactctcaggattcttacattttttaggcattacttcttaccaaagaaataaaagaaaaaaatcacaattattaataaaaaataattactatctgtggcaggcaggataatagttcccaagatgtccattcttaatccctcaaaactggaaatatgttggctaaatgacatttatgatcacagacggaattaaggttgcttatcag

SEQ ID NO: 542510 - DNA, 474 bp, Homo sapiens
tctctgccattccttggcctagaatatattttctttttatactgtcagtttgatcttcctccaagaagactttccttctttccatctctcttcccatctatgctaggtactactcgtatgtcctcttatagcacaatggaaagwcctccattaaaatacttactattccctaatgtttatttatttgtcttcctgaataaacaataatatttttgaaaacagaaatggcaatttatgtctcattctatcctcagcacagtgcttcagactggaagctactcaacaaagagtgatcaagtaaatgaatgactttggatgaaggagaaatttttttaaagtgtggcttcataaagaaagatgaacaatgaatatttagcaggacacttacaaagagaaaagagggcagttatgcctgctggacaaagagaactgactacataagtgggtaaaagtaacacaaagtagtgagtaaga

SEQ ID NO: 542511 - DNA, 609 bp, Homo sapiens
gctcctacactgtgcactcaaggtggagtggcccaaaggcccagcatacctgggatttcagtcctgctgtacatcttaaaagtgccttctttcactctsagaagtgccctggttcaggaaataaattatggagtcatccctacactaggtgcttatccagatagcaaaggaaactttccatgcccaaacagcagtctctttacctggtttcttcaggtatggtccatacatcatcagcctggacttatttccctcagtgacaaaatttggtctcaatggccaaaagtaattccttttgttcagaacacataattagccttagaaatgtgtacaaattattttaaaattgatttgtaaatatggaaacagagcaggagatttcatgcaaatgtggtgagacgtaaaccattagtggggtcagatgaagagtacataaatattcattatattggtcttttaacttttctgcagtattgaaattcttcaaaataaaagaagtgggggcagtctccttgagatcagaacagcctactctggccaataggcaccggggctttccttaagtagctgataaatgatgcacttcacctctggatcatatacagggat

SEQ ID NO: 542512 - DNA, 609 bp, Homo sapiens
gctcctacactgtgcactcaaggtggagtggcccaaaggcccagcatacctgggatttcagtcctgctgtacatcttaaaagtgccttctttcactctcagaagtgccctggttcaggaaataaattatggagtcatccctacactaggtgcttatccagatagcaaaggaaactttccatgcccaaacagcagtctctttacctggtttcttcaggtatggtccatacatcatcagcctggacttatttccctcagtgacaaaatttggtctcaatggccaaaagtaattccttttgttcagaacacataattagccttagaaatgtgtacaaattattttaaaattgatttgtaaatatggaaacagagcaggagatttcatrcaaatgtggtgagacgtaaaccattagtggggtcagatgaagagtacataaatattcattatattggtcttttaacttttctgcagtattgaaattcttcaaaataaaagaagtgggggcagtctccttgagatcagaacagcctactctggccaataggcaccggggctttccttaagtagctgataaatgatgcacttcacctctggatcatatacagggat

SEQ ID NO: 542513 - DNA, 610 bp, Homo sapiens
tcaggccagagtctactctaagagcttgacatctaaggaccctgttgcaggaaccttagggcctaccaacaggcaacaagtcagctccaacaatgcagagttgcaggtccgtctgtggggagcttgctcgggaagaaggtaagaggcaccaggttgaaggacagaaggatgacccttggctgcaggggctgcagggcccctgactatgacaggaatcccccatcccccttccccaggttcctgtcaccttccctattttggtcattcatgtgttagtgcagctaaaggcatcttcaacttttggagattatggggctgtggagttgactaaytcgaggagcttggctctatgagtcaagcagtctgtggctaatccttggggcccatctccctgagtctaaaaatacaaatggtctctccccaggagggtggcacattagtctattgtgcccagaggtggaggcactagaggctcacacactcttgggagaagggttgggagaggagatgtggccagcctaagggacaaaaaccacctgtctctggatttttgtaaacatgtagaacatcagacctgaatgatctttggaaacctaaatgtctaagccaa

SEQ ID NO: 542514 - DNA, 593 bp, Homo sapiens
ccaacaaggacatgaagccaactccaaggtcacctctgcatggaaggtcaccatttcataaatgaagagacaaaggatctgagaggtggaataacttgccaaggagcacacagtggtggatctgagtttcaaactaaagtcttttatattaattttatcaccaggcaccccactgaattattttatcwtttggaattatgtatatttcttcttcctttccaaaattaattttctcatctaattgcattggctactactcctagaacaatgtgaaatgaatataaaccccggccctttttttttttttttcgaggcagagtttcgctcttgttatccaggctggagtgcaatggcgcaatctcggctcaccacaacttctgcctcccgaaacccaggccttttgactttaatgtcagtgttctttctcttgtaccttactcactctctccttctcaaagagctacatttaaaaaaaattagttatctcactggatggtcacacctatctggagagttaggccagggttagttatctttccaggaaacatacagggaggctgaggcccaagaggaccattaacttgtccaaggtc

SEQ ID NO: 542515 - DNA, 509 bp, Homo sapiens
gaccttgagacaccaacaaggacatgaagccaactccaaggtcacctctgcatggaaggtcaccatttcataaatgaagagacaaaggatctgagaggtggaataacttgccaaggagcacacagtggtggatctgagtttcaaactaaagtcttttatattaattttatcaccaggcaccccactgaattattttatcatttggaattatgtatatttcttcttcctttccaaaattaattttctcatctaattgcattggctactactcctagaacaatgtgaaatgaatataaacccmggccctttttttttttttttcgaggcagagtttcgctcttgttatccaggctggagtgcaatggcgcaatctcggctcaccacaacttctgcctcccgaaacccaggccttttgactttaatgtcagtgttctttctcttgtaccttactcactctctccttctcaaagagctacatttaaaaaaaattagttatctcactggatggt

SEQ ID NO: 542516 - DNA, 509 bp, Homo sapiens
gaccttgagacaccaacaaggacatgaagccaactccaaggtcacctctgcatggaaggtcaccatttcataaatgaagagacaaaggatctgagaggtggaataacttgccaaggagcacacagtggtggatctgagtttcaaactaaagtcttttatattaattttatcaccaggcaccccactgaattattttatcatttggaattatgtatatttcttcttcctttccaaaattaattttctcatctaattgcattggctactactcctagaacaatgtgaaatgaatataaaccccggccytttttttttttttttcgaggcagagtttcgctcttgttatccaggctggagtgcaatggcgcaatctcggctcaccacaacttctgcctcccgaaacccaggccttttgactttaatgtcagtgttctttctcttgtaccttactcactctctccttctcaaagagctacatttaaaaaaaattagttatctcactggatggt

SEQ ID NO: 542517 - DNA, 631 bp, Homo sapiens
tcattttgcagtaactcttttcaggcagtttttagtctcaatgaacgtgggaggtgtggttgatagtcctattaaaagaagtctttaatttgtctatatgtagactgactatgtaatttctcattaaaatcaggacactttagtgaaagggggtattagtcataatcactcagagacaacaggcataaaccagggttattccaggcacatggtgactcaacaggcaggctggctttacagcttctaacagcagaacccaggcttcctcacagaggacccctgccctaaactcggaggcaggtcttggagagtcacaggctaagacagtccacttagcaaaatcacaggaaccccaagtatgcagatgaagaatatataatttaaataaaataaagagacaaaatgttgcttcattcacaactggatatctctgtattcttttctrgagttacagaatgctagtggcatcttctttactattatttatcccctctttcctctttttctttttcctcatctctcttttcaagctctgagacactcagcagtgcctgtgtctcttggtggccacagcaatcggggtttacaagtgtggtccttccccatccccaacatccttcacttctgcagc

SEQ ID NO: 542518 - DNA, 626 bp, Homo sapiens
tgctagtacacgctgggtgctggacaagtgttgttaatgaaygaatatgcaacccacactctgggcagcgtggatcctgctgacaaagtttggtctgcctggatatcatgtccagggacctggaaattcctgaatttcaaagtgcagcccaagagcacactttggtccttgaggaggacacaggggttccccacaggagcccacacactggccacagccaatgcagacaggtagaccaacaggccagcagctttgagaacttctcaaccaaactcctggggatcaaagaccataggagtatcagaatggggacatgatgggacacaggggactggattctgggagaaggaaggaatcagtcagattacagcaagggagactgatgggttcagtgagtcaaaaaatgaacccattcattttttgtcatcccaggtcaacaaaaaataggaaaaggaattaaatactgatctttacccgagctcagactgacctgcctacaacgatgacacatctggaacctgcctctggggatggtactgagagtagaggcaaggaaaaaaagccaggactcattagctccaaaagtatgacaatatctgacaatgttttcatcgattgatattgga

SEQ ID NO: 542519 - DNA, 636 bp, Homo sapiens
tggagagaaatcaaagacttattttgacagagacctcttgtgcccaggttgctcatgaatgttattttgtgtaaagaatactagaagcaggctgggtaacaacacgggaagtaagtgccacattcatctgtattgtatagtgagtagcatttgataaatataccttgtcttggattcaatattgcttaggctctgtccacagttttaggcaaagaaactatttggactaattatttcaacaatccagggtaaggatactgtatcagtataagaaactctaactgttcaaattaacagctctacaatttcagcaccttaacagaataatggtctattgttcctcccacccctgttttagtatgagttgggggtagtgtaaggctctgcaccatgaagtcattcagggatccaggctccttccatcttttgtcacctccatctttaccatgcagtcaccaagataaccacagaaaactaagagagaaatagaatgtggaacctgtaccctcactcctactgtcttggtcccaaagcccctcctcagtacaaaaggactggaaatgtaatctggggccagtctttgccacaccacrtgccattgccttcattactagatagttcatgtgaaaatatcca

SEQ ID NO: 542520 - DNA, 640 bp, Homo sapiens
catagggaattgttccagttctctccatctcattgtgtcttggagctggtggaaggaacacttacagagacaccttcctgaggtactacttcatgagtcctaagccagtgtcctccgcaggagcaatggcctcatggtgagtggttgtgaacggagctgatgacgtcaccatggcactcatgcctgagatgttcttccatcagtttcagtgactccagtctggtttagttattctttagagyagcaggacttctttcatttgcaacttgaaaaaaaatgcatatcaaaattaggccataaatattacttaattatattgaaataataaatacgttagtaaatcctagtttataattttataataaattagtaaattactattttctaatttatttgttataaattagtaatatttataataaacttacaataaattgtttataataatttataataaattctcaattatcaatttcttatacaaatttgttatacaatagtatacatttgttatataatattctttatttatattacttatactaatttattatttattatttaccataatttatgatacagtatttgtaaatcttatttatactagcataaaatattttattctagtgttaaaggtgct

SEQ ID NO: 542521 - DNA, 640 bp, Homo sapiens
catagggaattgttccagttctctccatctcattgtgtcttggagctggtggaaggaacacttacagagacaccttcctgaggtactacttcatgagtcctaagccagtgtcctccgcaggagcaatggcctcatggtgagtggttgtgaacggagctgatgacgtcaccatggcactcatgcctgagatgttcttccatcagtttcagtgactccagtctggtttagttattctttagagtagcaggacttctttcatttgcaacttgaaaaaaaatgcatatcaaaattaggccataaatattacttaattatattgaaataataaatacgttagtaaatcctagtttataattttataataaattagtaaattactattttctaatttatttgttataaattagtaatatttayaataaacttacaataaattgtttataataatttataataaattctcaattatcaatttcttatacaaatttgttatacaatagtatacatttgttatataatattctttatttatattacttatactaatttattatttattatttaccataatttatgatacagtatttgtaaatcttatttatactagcataaaatattttattctagtgttaaaggtgct

SEQ ID NO: 542522 - DNA, 590 bp, Homo sapiens
attaaccaaatttaattaacccatttgctgaggttaatgaaacccttgttaacctgactcagaaggaggctggaaaggagaacttttaagctaagattcctaataggctccatgcctcagggagccacgaacccgtcagagagagggcaccaggtgcatgctctgaggctgctgactctgtcctggaagcccgcaaggggctgatttgaacagagaccaggatcagaagtgtgaccagcacgctagactctcctgaagttattcaaaacccgactttgttattyagtctaaaacagagtggacctccagaatcctgacatgttccactgaaattgtggccgggcactccaacactgaacggaaatgatttggggatgatgtacaccatcgattagccgacctgctgctccatgttatgggggcctccttctccatcaacggtattggcgaggcagccataaagacccaaagctatgattctcttgcctgaagtttagtgtcagtgcagtgaactgacaagctcagcctgttttgtagttgccaggagtcactgttataaaactccccttcatctggcattggccaaaagc

SEQ ID NO: 542523 - DNA, 515 bp, Homo sapiens
ggactgaagactggaccacttggaccattttctttccaacaacagggctaaagtagctgatgaagccatggcgcccccatggacttctttgtccagctttgccagtgacctgtgaggtcaccttggtctagtccttcccttttcttgacctcggtttcctcatttacaatgaaggagtttgacacaataattcttgattccgaactatagcccaggaagaggcatttgggaatgaggccctggcctgctggtgacatcatagaggggagagttccacgagaatagtcaggcctttctggaagcccagtgccacagtctgcactgagcttggctcaggaaagaagggaaatccaggcggggcctgttgggcccaggtcttgagctcttttggctccagagttcccaacacagtcatggatcaaaactcagtgcctgaaaaggctcagaatgaggcagacaccaataaygcagataggttctttcgctctcactcatcacccccacaccacaggcca

SEQ ID NO: 542524 - DNA, 466 bp, Homo sapiens
ctcccagggggctttggggctgactggcatctattcagaccagcgagtgcccctgagggatgatgggaatcatagtccttcatgaaaaccagtcacaggggtagaagggtccttttgggattccctccctttgtagggtaggagaaattggggggacgggcaaggagytcatttgtgtcccccacctcggggtctctagccgctgtctctgcccggcctccaaccctctatgtcgagagcagccttcatccattgtgcaccgctacatgaccatcacctcggagcggagcgtgcccgctgacgtgttccagatccaggcgacctccgtctaccccggtgcctacaatgcctttcagatccgtgctggaaactcgcagggggacttttacattagggtaaggtttctgcaaccctcaactgacatgcacaatctaaaactgaactccaggacgccttaagggggaac

SEQ ID NO: 542525 - DNA, 597 bp, Homo sapiens
gtgtaaacaagatggaaaaccgcaacagtcctcccctgcccgtggcccccagagcaccctccagcttcctcgcataatccacgtgcaaccagaaactctcgaagggtagcagatgaaaggaacacttgaggaagagggtgagagacatgatggcccctgtccaggcgtgcgcacctgtccaggggtggcagtcgcgtctcctgtcacaaaatgtcctgcacatcagtctggctgggygtcgcccgctggtgcggttgagccaaccaatgctttcagcatatcctgctgtctcagtttcttcctctaaatctgtatgcattcattcattcattcattcattcattcattcagcatgtgttccctgagcatctactatgtgctaggtactggcaagataccatggaagattcagagaatatgtaaaatctaggccttcagttttgtgcactccatagatggaacaggagcaggggagactgctttcccacactccagacaaagcctgacactcactcactcactgatgtccacaagaaggggctaaacatagagccaaggtcagccccctcaccttcatcccatctccaccctgacatc

SEQ ID NO: 542526 - DNA, 568 bp, Homo sapiens
gtgcagggcagcaggatctccgtgccattgacagcgtagatgtcggtggcctttcccacagacacctccagcgacagggttacggggagcaggaagaggcctgtgtaaggagcaccgcctcccttaataaaaccccaccagcctggagctctggaaggggatgcttaggcagggcggagtagcttggccaggcaggtaggtctctatcaccctcagtgccaacytcgggaggatggctgtctactccaatcagcaccgcctgggccaccctccatcattctccatttctcccctggaaaggactgaattctggaccagggagtagcccttgttgcgctctggatgaccaccagggtcaccccaacccaaggaaacaaaggcctggccactgccgcgaaccgcgccccggctccgcccctcacctggggacgcagtgcctggaagcgctcctgccgcacaccactccaggacgcgcagggcgggctcccttctgtttgcaggggaattcccctaggacagtacgcgcctctcgccaggttttcaggactgacgggcggggcggtcgagg

SEQ ID NO: 542527 - DNA, 670 bp, Homo sapiens
tggccataagtccctatttctatcctgctcagggatgtcatcgacattgatggcccccagttgacactcacaggcctaaaatgcacctacctccctgcccatgagccccagtactcgtgaccttctgcagctcctcttccaaaggtgtatctgtccatcagctctgacctgtctgtgtcacagatatttgccaaagagcttcaagaaaagccaaagaatgagctactcatggggaaactcaggcagcacaacagtaagggcagagcatggtgaggacatgagtttgacctcctcaagccactcagcatagccaggtgatggcttttttatgttttccttgagccttgggtgcatagcattgggggaactagaatccttgcttcatgacttttttcactattggtccatgcagggcccatttgtaacttgctagttagttggatttaacaatgtaataagcctccataaacccatcatccccaacaaaagctggacttaatagtaacctacatctaaccatgaggttcccactcctgcacacacatatccatccctctcctgaggtgggtagagcaagtgtctttcgtttattaattcgacaaatattggctatacatatttgataggcagggactgtrctacaagctccctgcccaagtaagttcttccc

SEQ ID NO: 542528 - DNA, 511 bp, Homo sapiens
tgtaagtttcttgagagcaggaccctgtcttgtctacctttaaatcctagtacttaacacacagcaaacagtaactatttgatgaccaaatgtgagccagaaaggacaggaaattgtaactgaggctgccccatgcgtgctgcrcctggtggatttcaggcagagggctagactgggtgaccttggggcattcctcctttctatgaaatttgttatttcaaggagactagaaaagagacttctcagccacttcgccagctattggtccttctattcattagtgtttgctgagacatgctatgtgacaggactgagccaggtcctttcaatggataggagatgttttgagcataaaatccacgttctctcttgggctgggctcttctaccttcttccccctggtgcttgggctctgaagaaaaaaagataggtaggagatgagtgatggggcttctgagggcagggctgagtgactttctgtgtatttgctctttctttatcagaagtcaaa

SEQ ID NO: 542529 - DNA, 636 bp, Homo sapiens
catttagcaagttctccctcaataagtggcatttctagctacttttatgccaatgtattacattttttaagtagtaaattatttcagggactagagtggcaggtccccagctggagctaccttcttcttggcattagtgctccagggaagcagaatcagtaactaagttaccagacgaacaccgtcggatcaaaggaagtgggaggggtgggggatacttcacctgagccctgggaaaacctcacagatcctgctggcctccacagaggcaacctctgttaagcagaacctgcttatgttccccacagcccttcctgcgacctgggctgctggacaccgattagcttggatctacggggcccatttcctctgcacccaggaccgctctttggtgactctttcactagatatgatgctagacagagccagcatcaagcctctgtccccattatgagttgacttcacaaaaccaaccctccctgctcaagggattcccacttttgcagcccacagcaaaagcattggcgtgtaagtaacaatgccaccyaccacatggggcagaaccccaccaactgcctcggtccaagttcattacaactcagtctccccttggaattggaaggtccttgacctccc

SEQ ID NO: 542530 - DNA, 466 bp, Homo sapiens
aaatgagctgtaacacaacacacccccatcctccaagctgcaggcagcagggagagctgtaacatgcctccatcctccgagctgcaggctcaaagaagtgaagcagttaggcactattccctcctggccagcttgctgaactacaaaagctgcaacatttcttgggagcttagacctcaggattccccaggcgagagctgtaacatcacctggggctccacagttgctggcatctctgagttttcaggtgccactgcattcccctcatctagactccggctcccaatgcaaaagctgcctgtggcatgccaagtttagccacaggcaaaacacagagtccctgttcagatgtgggatccaagcaggtagcacaagctgagtacagcycatcaggctgagtgggaagagtgagcccagcaggccttggcaagactacaggcagaggtcacagcagccacagagattt

SEQ ID NO: 542531 - DNA, 609 bp, Homo sapiens
acatattacaatgtgtgaatatagcatcaaatgtatgctttgtttctgcatccaagtagtgctttaggaatcttattgtcaytgcattagaagagtaaaatgtctccaaatttaaattaattataaataaatgtaagaaatgattgaagcatcatctaaaatggcactattgtctatagaacaaaaattatgtgaccatttcaattataaaaatgtaattactaattttgctgaagtgaagaaaaataaattttatataataaatatagaataatagaataaatcttaaattatgcatgattttattttgtatgcatccagacattgcctacacaataacagaatacccagatatggaattacaaattcacttttctctgatattttgctgattctcatcatacaaattccataactttatatatttttaaaatgttattaatatatggtcatgtgtcacatgaagatcagaacgcattctgcaaaatctggcattaggctgtttcctccttgtgtgaacatcttagagtccacttatgcaaacccagatggtgtagcctactccacacctatgctatatgctcttttctattctcccaggctacaagg

SEQ ID NO: 542532 - DNA, 609 bp, Homo sapiens
acatattacaatgtgtgaatatagcatcaaatgtatgctttgtttctgcatccaagtagtgctttaggaatcttattgtcactgcattagaagagtaaaatgtctccaaatttaaattaattataaataaatgtaagaaatgattgaagcatcatctaaaatggcactattgtctatagaacaaaaattatgtgaccatttcaattataaaaatgtaattactaattttgctgaagtgaagaaaaataaattttatataataaatatagaataatagaataaatcttaaattatgcatgattttattttgtatgcatccagacattgcctacacaataacagaatacccagatatggaattacaaattcacttttctctgatattttgctgattctcatcatacaaattccataactttatatatttttaaaatgttattaatatatggtcatgtgtcacatgaagatcagaacgcattctgcaaaatctggcattaggctgtttcctccttgtgtgaacatcttagagtccacttatgcaaacccagatggtgtagcctactccacacctatgctatatgctctwttctattctcccaggctacaagg

SEQ ID NO: 542533 - DNA, 344 bp, Homo sapiens
ttcagtgttgtttgtggctcaagggttggcattttaccagcagggacctccttctcttctcttttgtgctgtagaagttttagattgctgggmagtcaactctcaataataaacttgatttctattagttgtttgcacttatactaatgtaaaccactttctaagctttgtcagatagcagagcagcctgaactcctgctggcagctactgcagctttcctctgtggctttcctcacccgtgttctgttgccacccctccttggctctctgtcccctgacagagcagagagaagagctgtgtaccaagcattcacatttgtcagcgcaaagcccttgtcctctg

SEQ ID NO: 542534 - DNA, 344 bp, Homo sapiens
ttcagtgttgtttgtggctcaagggttggcattttaccagcagggacctccttctcttctcttttgtgctgtagaagttttagattgctgggcagtcaactctcaataataaacttgatttctattagttgtttgcacttatwctaatgtaaaccactttctaagctttgtcagatagcagagcagcctgaactcctgctggcagctactgcagctttcctctgtggctttcctcacccgtgttctgttgccacccctccttggctctctgtcccctgacagagcagagagaagagctgtgtaccaagcattcacatttgtcagcgcaaagcccttgtcctctg

SEQ ID NO: 542535 - DNA, 641 bp, Homo sapiens
aagcatgagtgttttctgggtggactcagactgacctacctctgcctgtgaagtgtcacttttcattgtctatttgggtggttgttttccagaggtccacagtgaaagttcagattgtgagaaacacagtcacagatttctcccttcaccctgccagcagaggaggctgttcctcagtctagagcttatcagactgttcagggcagagtaatcctgacattttttcagtttctggaagccacctgcttccttagcttgtgactgtgtcactctgatctctgcttccattgtcatattccctccttgacactgactcctctgcttccctcttacatgacacttgggattatacctggatactccaggattagccacctgcctgtcatttcaagatccttttgccatataagggaatatacaggtgccggggattcatatgtggacatttttgggggccattattctttctattacaaccctcaacttgctgtgtgatcctgaacaagccatccacctctctgagcctgtctcatctkgcgtatcatgaagaattgaactaaattatgtctttcagctccaaaatgaaagacataatttcattgggttatgtggttctgtgacctagggttcaccagcataca

SEQ ID NO: 542536 - DNA, 588 bp, Homo sapiens
ctcccgtgtgacttactatctataatgtatgtacaccctttagtgctttgctctgtagctataggtgtgtgcatctcatcagtcttttaagattataagcctatggagtgccagactgagattatatacatcttcacattttttaatatttctaaataacccacactgtatcttgaacaatataggagcttaaaaaacatttcccaataaatgaaacaaaaaagaaaaatgataatttrttattggatttattctaaatgttcaaatataaaaatgtatttgactttaaattaaaacaagaggaaaatgaagtcaattgcaaattcctgttcaaatgaaaatattttaattctaatataaatcccagaatactttaaatcttatgtcctaacaataaacgaatatgaagtaaaatactcaaatttcctttaagaattgaagtgtggatgtatatatttaagttagattttgattttgaaaaattatgtctcgtgttttctcattactgaattaagtttaaaagaccatttctaggatagatgctgtttgaagatttgatgatagattctgggatccaaaccaaagcat

SEQ ID NO: 542537 - DNA, 578 bp, Homo sapiens
tgccagtgtggctagaataaagcaggcagaagaacctggaagggcttgactggctgagtcttctggccttcatctttctcctgtgctggatgcttcctgccctcgaacatcagactccaagttcttcagcttttggactaaactttcaccagtaatttgctaggagctctcggggcctttggccacagactgaaggctgcactgtcagctaccctgcttttgaggttttgggactcggactggcttccctggccagcttgcagatggcctattgtgggagttcaccttgtgatcgcgtgagccaatactccttcataaactccccttcatacatgcatctgtactgttagttctgtctctktagagagccctggccaacacattcattctttaggggaaaaaaaaaaatcttacccatcttagattcatttgctgggaccctctaaattagattgatgaaagacctatgaacaagagaaagacatactaatttacttaatgtcagttgtaaagaaacgaagacctgaagaaataattaaacctgagtgtttttatactgagtttgatgaagaatggaa

SEQ ID NO: 542538 - DNA, 624 bp, Homo sapiens
ttcccttcccctggagtttatgccattttataactattggtttaatgttgtaaattatacagtctgccttttataagtgaaactatgtaattatctagacttacaaacaagttagggagtaatttatatgctttgtagaattggcaagttataatagcagccagcgtagtattcctataagtattagtctttctaatgcttttaagtttcattttaatttggagattttaaaatgtacccagctttttaggaacacatctttgggtaaatccatgtggagctgtttaagatattaactttcccattaaattttattttctcaattatcagcaaaaatactgtctctgtctgttcagtcggctataactaaataccactgagtaatttataataaacaacagaaatttattgctcacagttctggaggttgggaagcycaagattagagcaccagcagatgcggcatctggtgagggttgccctctgcctttttgtccccactcatcgtgagaaggacgagagtgctgcctccagtctcttttataagggcaccaagcccgtgcatggggctggagccctcatggcttaatcacttccccaaaggccccacctcttagtactgtc

SEQ ID NO: 542539 - DNA, 565 bp, Homo sapiens
tggtgaacagtcctggcctgctcccgacttcagttttaagcgtctcttcactcacatggtgtgtgtttggcttgaaatataaatgcactgctatgttaaactagtgtccacatcctcttgacatttccattgcctaaagacacagaggcctccctggacawtgcatccattttctcacaaggtctgagccccaccacacgctggttctgctctgggcaccaaggctttgggggtgaccacagccctggtccctacttcacggtacttctggtttaatcagcagaacagacgctcaacagagaatcgtccagcagttcctcactagtgggtgggccatcttccctgaggacctggcaggcaggaaggagacatcctcctgctggggaaggtgtcctggtagaagacaggaggtgatggggcccaagttgggaagaagctgccccactccaggggtacgagggcggatgtgacatgaggagcaagtgaggggaaacgaggctgcagagacacaggacgagggcgagcaggctccaccagcagagcacatggagctctctagacactt

SEQ ID NO: 542540 - DNA, 565 bp, Homo sapiens
tggtgaacagtcctggcctgctcccgacttcagttttaagcgtctcttcactcacatggtgtgtgtttggcttgaaatataaatgcactgctatgttaaactagtgtccacatcctcttgacatttccattgcctaaagacacagaggcctccctggacaatgcatccattttctcacaaggtctgagccccaccacacgctggttctgctctgggcaccaaggctttgggggtgaccacagccctggtccctacttcacggtacttctggtttaatcagcagaacagacgctcaacagagaatcgtccagcagttcctcactagtgggtgggccatcttccctgaggacctggcaggcaggaaggagacatcctcctgctggggaaggtgtcctggtagaagacaggaggtgatggggcccaagttgggaagaagctgccccactccaggggtaygagggcggatgtgacatgaggagcaagtgaggggaaacgaggctgcagagacacaggacgagggcgagcaggctccaccagcagagcacatggagctctctagacactt

SEQ ID NO: 542541 - DNA, 626 bp, Homo sapiens
acacatgattttcttactcatactttaccaaatttacaatgaactgctgctattaaagctattgctgaaatcagtactattatgcatttaccctgtagtcctatagtgatagttaatatcgatgcagactttctggaaactcaccataatcagaataacttaagtgtccgccactaatagagtataaaattatttcattcaaatttatcttcaaagcattaaagttttaaaagatttaaatatgttcagagtataaactatgcaccttgcaatactattttaaatgctaacttaattgaactgtccaaattttgcttaatttaaaaatattttctcacgtttctaagttccttcagatgccattaatgtgacacaggctgcacaggaatgcagggctgtaatttatgactcttaatttcaagcactggagcggcaagtctacaagttaacgtccacaaaaatgtmtacttttacatgaccagcaaggaacacatttcatatctcaaaagtggtttatagaacacaagttgaagctaagcaaaatgtcatctcatttataaaatttgagtttctcattaaaaatgttttaggcatctttcaaaaatccccttatctgatttccactc

SEQ ID NO: 542542 - DNA, 342 bp, Homo sapiens
tgggggcatatccagtaccagagcccaggtctctacatccttcctctaggcctcttttctctcccccttgatggctggcctgccccctagaccgactgtttcttggtctgtgtacaaaagtaccttccgaggagaatgcagggtgccagagctggttagcggcagggaacagcagtgtttggactccaagctaygggagccacgcattctgtcctcagggtatcaccaccccattctagacaccaatgaggacagggcttagcatgtcgagacgaggggtttgaatttcatgtttgtgtgcgttccgtttgttgggaggcactgtcccttcagtgttgtcat

SEQ ID NO: 542543 - DNA, 572 bp, Homo sapiens
ctgcaaatgaaatggagttgaaattaggagttcacttttagtagaataatttgttattttccattaatgtatgcttacgattaggactttatatttccacctataatatatttgatctttaaaggtgttccacagatgggagctccttgatttcccatctgagcctagagggggacacaggaaaccactggcagcttctggggcagggagtgagctggggacgaggagattgcctctctgcccttgttgtgatcatagaacagagaccacatgcgtgtaggtgcttgaaataaagagacaaatacggccgggcacagtggctcaggcctgtaatcccagcactttgggaggccgaggcgagtggattacctgagatcaggagttcgagaccagcctggtcaacatggcgaaaccccrtctctactaaaaatacaaaaattagccacacgtggtggtgggtgcctgtaatcccagctactcgggagcctgaggcaggagaatggcttgaacctgggaggcggaggttgcagtgagctgagattgtgccacttcactccagcctgggcgacaga

SEQ ID NO: 542544 - DNA, 669 bp, Homo sapiens
cttcttctttttcttcttttctttttttgagatggagccttgctctgttgccaggctggagtgcagtggcacaatctcggctcactgcaacctccgcctcctgggttcaagtggttctcctgcctcagcctcctgagtagctgggactacaggcacctgccaccacacctagctaatttttttatttttagtagagacgggatttcaccatgttggccaggatggtcttgatctcttgagctcgtgatccacccacttcagcctcccaaagtgctgggattacaggtgtgagccactgcacccagcccaacaatgtctaattattagataaaaccagaaagtagacattatagtaatgaaaatgaaaaagaaatatcaagatgttagagttgataaacagctagaaagccgttacctcacaatttaaaagtaaattccagayggattgaaaattttagtgtaaaaaataaaactataatattagaagaaattttaggggagtatttctgtcactttgggtgggagagaggcgcctaagcaggaaaggaaatcaagaagctatcaaggaaaagacaggcatttttttatttggtaaaatatgcacaacacaaaatttgcgatttctaagcatgtttaagtgtacagttcagtggcggtaagtaccatcac

SEQ ID NO: 542545 - DNA, 607 bp, Homo sapiens
ctgaactgtgtgcttagaaatggttaagacggtaaaatttatatgtttttgtccacaatttttaaaaaagaagttttatgatgacatagaccattactatatctccagggtctaacacaagtctggcacataataggtgtgaactaaatacttgctaaatgaaggaattcataactataaagcctatggtcttaattattgtggagtatactctttctaaaatagtaataatcatcccatattatatatatatctatatataaattgttatttctaggatgagggagggaacagggtattggaaacaacagatggaagttagactaatcggaatgtaccttcctttgttgttgatttagattcctttgttttagatttgattttagaaccatgtaaacattttccataataattataaatcaatattatataaaaaatttaaaaacaatccacaaaaataaagacaaaagaaatgaaactaacatttarcatttttctttttgtgactggcttgtttcacttagtgtactatcctcaagtttcaaggattgtatgttaattccatttttaattgtttgaggaatctccatactgttttccatagcag

SEQ ID NO: 542546 - DNA, 633 bp, Homo sapiens
aagctgtggccatgggaaaggggtgaaagagtcacatggtataaacatagtttatactttcagtatgggttacatggaggacaatttcaaaaaaggagtgagggctgagttggcacctatcatgtgttattataaaaattattcccattttataaatgatagaattgaagctaarcaaggccaaggtactattttaatatcacagttttgttaaggactacaaccaaattttgaacctgactattcttattctaagtttaatgatcttatcacaaaacttacctggttgagaaaataaatctccatgtaagaaatgattttttcctacctgagcatggtggctcatgcctttaatcccagtgactcccgatgctgaggcagaaggatcacttgaggccaggagttcaagactagcctaggcaacatagcgagacctcatctgtacgaaacaattaaaaataaacccaaaagatatgacctgttctaacatttaaattaattgaattatggatgcatctttaatcaacaaaccaatacctgcatgaatcgactcagtcccttaggtaccaaaagcttgcttttttatatttgtaatggatgcttttcctagaccattctctaaaacagtgtttc

SEQ ID NO: 542547 - DNA, 650 bp, Homo sapiens
ttttacacccacttattttggccagtgttctagtatcattgaattgcttacaggcatgagagatctttatgctatttcaagcctctgtgaatatgctcaggctgctttccatcaagggcattcatcttccctcgttccaccaagacctggcttcaccatkccatcctcagtcctttcccaaaagtcaaaggacactgatacactactaagtgtcaattacacctattattgattaggtttaagaaccagttctttcagactgcctttcctgattcctctacccccatcttagtggaaaggattcccgctcactgggatggtgctgtggactataataaaattctaatgtgcttatactttgttaaacatatttgcctatatgtcaccaatctcaagtaattagctaattatttgaaagcaaagattgtggattattcatctttgaattttcagcacctaaaacagagccttacaagaacacagtatgcattcaactatagttctttgccattaaaattgtaattattgatagaaatgaagatgaaccctatctattttaagaaagccaaatacatgcaagcatagatttattgaatagaaaatactagggataatgatatgtcctataaaaagatgctcactttgtaaga

SEQ ID NO: 542548 - DNA, 601 bp, Homo sapiens
ttttaatgtcatttagtaagaaacactttaggaaaaagtgaagaaattctgaatgtcaagtccctacaattccattggtgaatattattgttttcctatgagattaagttggatttttttctatgtcgatttggtccatgtttttcatatatagaattcacatttggcaaaattattcagcttgccataattccattttttcctttactagggtctcagaagcaaagaattattaaaattagtagtgtgatcwttgctttcagtgggttgcttctttttgagatgggaaagatggggaatgatgtcatgattagcaagtcctctgtaactttttactaagaaattataatgcattttcatacccttcccaccaacacttgaatgcacctgctcaataccttccttctggtcaaaaactacccccatttcaaacgctgaattatttttgacaatcccagtgacgtgaacaaggtagcatgagttagaagaacccaacatctgagggcctctccaccgcaggcctttccacagcttccacacttgacctgtactaattctcatagcaaatctgtggaatgattactacagccctggctttaca

SEQ ID NO: 542549 - DNA, 205 bp, Homo sapiens
agcctgggtgacagagtgagattctgtctcaaaaacaaaaaccactgcaaaaaatcaagatcccactgccaaaaggccaaaagggatggctgttggaaaattaattacatcaagatggctacaacagaacatggccaaagtatttgagaataaaacatcagagraagtagcatctcggagaaaatctgctgtaacttttccaatt

SEQ ID NO: 542550 - DNA, 538 bp, Homo sapiens
aaggtgttgatggaatgtgccctagagtgagtgamaggtcacactgagccatggaattctcactgggggctgggtgcagtggctcatgcatgtaatcccagcactttgggaggccaaagcgggtggatcacttgaggtcaggagttcgagacctgcctggccaatgtggtgaaaccccgtctgtactaaaaatataaaaattagttgggcatgggggtgcatgcctgtaatcccagctacttgggaggctgaggcaggagaattacttgaacttgggaggcagaggttccagtgagccaagatcgcgccactgtactccagcctgggtgacagaatgagactccatctcaaaaaacaacaacaaaaaagaagaatccctactggctaaccaagcgtgaatagaagtgtagccccaatgagaactggacttatgagatagatatgtttgagaaaatgagatgcaaaataggaggtggtggtagagtgtaaaactcttgaaatttaactttaggcagtaagatcggtaatgacaggagta

SEQ ID NO: 542551 - DNA, 500 bp, Homo sapiens
gctgtggaggcagcagttcaatcctatcagtcctctgctctcagcacttcagtagctgagtcccactctccttcagcctccctgcctatcaccaagcccaccacactgtccctgctgtgtctcctaccacaccatctgatgggacactgtcggrattaaacgtagtaaacctagagaagagttcagtgcagtgcttggcacttgaggcttcagagatggaacctgttgtttctaagctcttaaagctggtccctcctgtctgtgccccagaagcctgtgtggactctttcctgaaaacgatggcatgacagagagagagtatcagtggccaatatagtggcctaggacatggattgaaatgacaatgacaaaaatagacacaggagaggagaggagggtgccgttaggggagaatttttttttttttctttagagaagctgaggctgagatgataataaaataaaaaagtagaaatgtattcagtaggctgctgaacttt

SEQ ID NO: 542552 - DNA, 601 bp, Homo sapiens
ttttaatgtcatttagtaagaaacactttaggaaaaagtgaagaaattctgaatgtcaagtccctacaattccattggtgaatattattgttttcctatgagattaagttggatttttttctatgtcgatttggtccatgtttttcatatatagaattcacatttggcaaaattattcagcttgccataattccattttttcctttactagggtctcagaagcaaagaattattaaaattagtagtgtgatctttgctttcagtgggttgcttctttttgagatgggaaagatggggaatgatgtcatgattagcaagtcctctgtaactttttactaagaaattataatgcattttcatacccttcccaccaacacttgaatgcacctgctcaataccttccttctggtcaaaaactacccccatttcaaaygctgaattatttttgacaatcccagtgacgtgaacaaggtagcatgagttagaagaacccaacatctgagggcctctccaccgcaggcctttccacagcttccacacttgacctgtactaattctcatagcaaatctgtggaatgattactacagccctggctttaca

SEQ ID NO: 542553 - DNA, 611 bp, Homo sapiens
tattataacgtataatatagatgtatatagtctataataatatatggatttctatatgtatatttttataagcagagtagagtagcaacttagtgaggttctaaagtaaatatgttacatgaaccccagagaaagtaaaagtactcttaagaagtcctggccgggcgcagtggctcacacctgtaatcccagcactttggaaggccraggcaggcaggcggatcacctgaggtcaggagttgagaccagcctggcaaacatggtgaaaccctgtctctaccaaaaaaaaatacaaaaattagccgggcatggtagcgtgcgcctgtaatcccagctactcaggaggctgaggcaggagaatcacctgaacccgggaagcagaggttgcagtgagccgagatcgtgccactgcactccagcctgagcaacacagcgagactccgtctcaaaaaaaaaaaagttcttaaacagcctataaaagcacgccataaaaggtacgaaggacgtgaggccacctcaggaaacagccagctcgcgactgcacaggagactcattctggggttaacgcttctcaagagtgaaattgatgagtctttgctgtgtatatgca

SEQ ID NO: 542554 - DNA, 611 bp, Homo sapiens
tattataacgtataatatagatgtatatagtctataataatatatggatttctatatgtatatttttataagcagagtagagtagcaacttagtgaggttctaaagtaaatatgttacatgaaccccagagaaagtaaaagtactcttaagaagtcctggccgggcgcagtggctcacacctgtaatcccagcactttggaaggccgaggcaggcaggcggatcacctgaggtcaggagttgagaccagcctggcaaacatggtgaaaccctgtctctaccaaaaaaaaatacaaaaattagcckggcatggtagcgtgcgcctgtaatcccagctactcaggaggctgaggcaggagaatcacctgaacccgggaagcagaggttgcagtgagccgagatcgtgccactgcactccagcctgagcaacacagcgagactccgtctcaaaaaaaaaaaagttcttaaacagcctataaaagcacgccataaaaggtacgaaggacgtgaggccacctcaggaaacagccagctcgcgactgcacaggagactcattctggggttaacgcttctcaagagtgaaattgatgagtctttgctgtgtatatgca

SEQ ID NO: 542555 - DNA, 587 bp, Homo sapiens
ctggtgcctggtgcattatcaccaccatcctgacaattccacgtacttattacatgtgatccttttccaaggctccatctaaaatgaaatgtttcacaatcctagctgctttaaggtgtaccaatcactgtcattaaggtttataacaactgagtcatctgccaggaaggggaaacctttgccctagaactattcatccagagaagataagttcttgaggacctgggatgttttttgttttgctttgttatacaatgatcagaaaaataacgaaatattgagtctttttattatgaccattagartaagaacacaagaaaaacccaaaataggaatatttgaaaatacttggaaaaggaaaatttaaaagcctagatagctaacccagcaccgtatctaagttatagacacttgaggcagttatataaaaggatatagaaatcagatcctttaaaacaaatcccctcacagagtagatgttctaattgtagttactggaaaaatatgttaaaaatgtaatcacttaaaaaattaaaaagggaaatgttgtacttctctctttctccttctcctgtctgtgtatactt

SEQ ID NO: 542556 - DNA, 675 bp, Homo sapiens
ctttgtaagcaagccatacctaagttcccatttgttaattgaaataaggactaaattattattgtgttttgataactttgaaactaattgccattctgtttcatgtaggttctttttaaatgaaagcttctaggccaagatttgtttttttcttcttctgtgtctattgaaaatcttaatgattagaatgataataaggatataatatccaattgccacagtccccaacctttttggcaccagggaccrgtttcatgaaagacaatttttccacggacctggcgttgggggagggagtggtttcgggatgactcaagtgtattgcatttattgtacactttatttctattattattacattgtaatatataatgaaataattatacaactcaccataatgtagaatcagtgggagccctgagcttgttttcctgcaactggatggtcctatctgggggtgatgggagacagtgacagatcatcaggcattagattctcataaggaatacgcaacctagattctcataaggaacgtgcaaagatccctcacatgtgcagttcacaatagggttcatgctcctatgagaatctaatgctgccactgatctcacaggagctggagctggggcagtaatccaagggatggagagcagctgtaaatacagatgaagcttc

SEQ ID NO: 542557 - DNA, 560 bp, Homo sapiens
tttcatggagacaacggttgacctgtttggacaatggacattacagtgattgattggcaggatgcatgacacgctgggcttgaaaagggactgtttgtatggcaccccactttttaccagcagagctctgaaaaaggcaataattagaatcatgcaaaagcataattaagtttctgacattaagcagcagtaaagaattgtaccagactcaaagtgatctatccaaaaacaggtgtcctctggcccccagccaataaggtgcttgccattgtctccatctgcacccccagccctagcctctggtcatacctctgccaggaaaatccttcaccttgccctcagttggcctggaaaattcagacgtgcctttaagtctactttttttttttctagacagtctcactctgtcacccagtctggagtgcagtggtgcaatctyggctcactgcaacctccacctcctgggttcaagtgattctcctgcctcagcctcctaagtagctgggattacaggtgtctaccaccacgcctggctaatttttgtatttttagtagagccg

SEQ ID NO: 542558 - DNA, 664 bp, Homo sapiens
ctgtgtcggggaaaagactgaaaaatcagagaaaggtacaagctcagtacggtatgtgtactccaatatgtcacataataatagaaaatacaaatttaccttctgccagtcgctgtttccacccttgtgctgcatatgcaaagaattcattatttagagctgaagtactgaggcgtaaaattccatcacttcccatctaggaaaataagccgacaaaaacaaggttccatcaggaataagtcaaagcaaaagtatgcaggaaagaagcaaaaattgagtggtgttgggcagtgtatgtgtgaggaggaggaagggggaaggagacagagaaaggagaagggagagagagagcaggagctccagcgagagcatgtgcagggtaggaggcggagaggaaagggacccaacaaaagattggtctcctgggatgaatactaggagtttagatgtatgcattgtgcttgctgatgtgtaggagacagaaataattagtgttctccttggctggcttcttatgtagttggwgagtgaatttaaaacatataacaagttaaacaatgtcaagcattaggtgagtgagaattaagaagttcaaaatgtaaaagctcggagaatatatgtatgtggacatgagagtgtaggaagaacctgatgcagccgcatg

SEQ ID NO: 542559 - DNA, 590 bp, Homo sapiens
ccaaaaagatttgcttggcaacaactgggaataatcaaagctaccagtccttacaattccagttttataattgtgactttcagtaatattattaccttaaaaaataaatctaaagaagacgtcacgatctgaatatggagattttacaagttcccttcatatcgataaactttgaagagttttaagtgtatactacagcgattttccagagctgttccaaaaaggctttattaaaaaatactcatttagaaataattgataacattaaaaataatttattaaattatttaaaataacagttaacattattttaaaatgggtattaaaaaagattaaaargtaatagttgataacattgaaggtattaacaaataattttaaaataattgataatattagtgaaatgcagtgtaacaagtgccgcaaagcattttacaggtattatcacatttattcttaaaaaaaaactataaaggaagcaccattattatatctatgtaataaataaggaatctgaggcttagagagcttaaagttaagaacactcagctaagatttggggtataaagatttatcagaaacaaaagccc

SEQ ID NO: 542560 - DNA, 590 bp, Homo sapiens
ccaaaaagatttgcttggcaacaactgggaataatcaaagctaccagtccttacaattccagttttataattgtgactttcagtaatattattaccttaaaaaataaatctaaagaagacgtcacgatctgaatatggagattttacaagttcccttcatatcgataaactttgaagagttttaagtgtatactacagcgattttccagagctgttccaaaaaggctttattaaaaaatactcatttagaaataattgataacattaaaaataatttattaaattatttaaaataacagttaacattattttaaaatgggtattaaaaaagattaaaaagtaatagttgataacattgaaggtattaacaaataatttwaaaataattgataatattagtgaaatgcagtgtaacaagtgccgcaaagcattttacaggtattatcacatttattcttaaaaaaaaactataaaggaagcaccattattatatctatgtaataaataaggaatctgaggcttagagagcttaaagttaagaacactcagctaagatttggggtataaagatttatcagaaacaaaagccc

SEQ ID NO: 542561 - DNA, 642 bp, Homo sapiens
ggcaggacctttggagaaagtggattccttcagttgacttagtatctttgactcttactttatctgaaaatgagaaaaccaacttcttagttctcagaggtggctttagatctagcaaagcctgagataaaatgattaatacataaggccctttattatcttgcttggtgaataaataatccaacttttccttagaagtctaatgacatgggcaaaggaaaaataaataatttaaatcatttactgaaaaagttatactttttgtcaagttaggtcttcgaaaatagctgatctcatcactcatgcaagaamcttgataaacagacagccttacaagttcattatcttaccttctataggagcctcctcttcttagtaggagattctgagagtaattttattttaattacctaccatagtacactgggatccagagccttacatttgtttctgcctctgcatgggaagtctctccacttgttgtccacttgacatggtcccacaccttcacactttcttccattctctacgcaaatattctttccctctcaattatcttgggctgcacaacagaataccatggactggtggcttcaacaatagaaatttattttctcacagttctggatgctggaagtccaa

SEQ ID NO: 542562 - DNA, 642 bp, Homo sapiens
ggcaggacctttggagaaagtggattccttcagttgacttagtatctttgactcttactttatctgaaaatgagaaaaccaacttcttagttctcagaggtggctttagatctagcaaagcctgagataaaatgattaatacataaggccctttattatcttgcttggtgaataaataatccaacttttccttagaagtctaatgacatgggcaaaggaaaaataaataatttaaatcatttactgaaaaagttatactttttgtcaagttaggtcttcgaaaatagctgatctcatcactcatgcaagaaccttgataaacagacagccttacaagttcattrtcttaccttctataggagcctcctcttcttagtaggagattctgagagtaattttattttaattacctaccatagtacactgggatccagagccttacatttgtttctgcctctgcatgggaagtctctccacttgttgtccacttgacatggtcccacaccttcacactttcttccattctctacgcaaatattctttccctctcaattatcttgggctgcacaacagaataccatggactggtggcttcaacaatagaaatttattttctcacagttctggatgctggaagtccaa

SEQ ID NO: 542563 - DNA, 619 bp, Homo sapiens
ctgccatatatttttaaaaggtcacaaaattgttctaygtagacacattttataaagtacaaattcttaaagaaaggagagatccgctatgtataatcaaggaggttctaaaaattctccaagcacatcttgcagaacgctatgcacaaaggcatgtctggctacaaacccaagcagtgaatttattaagccaacattcccataagggggattgagggaagaactagttataattctacctatctgctaccactgaccaatcctgctctgacttcttggtttctctgtatttcatctctgagccaaaatgctgtggtcaagaagatgactttgacccatgtgtttgcctaaacctgatcatatccaaagtgtgttactctaggaccccataacacttcatttatcaacatactttgcttccttccaacctatattttcctgtccgctcaatcagcccagctcctccaaccttactttccttcctatgctgcctgaacctcataatcaaccacatctaatcagtcaacaagaaccttacaagtctcctaaaatccatcaactccttcaaatttgagcctttgtaaatctctgacttttgcaaaatctaacttctggcaca

SEQ ID NO: 542564 - DNA, 612 bp, Homo sapiens
taccacaagtgcaccattttacttcaggagatgatgaacacactctctgagctccaaggacaggcgtactgggtttaggccaatttgtatattccattcccttggctacagtcattgtttaagaaatgctcatgtgatctaaacggtactattagtgtgaatcttaggtcttttgcatgaaataccagtattctccccatgcactgaggcaagtgctcacatcttgattcgggtagccatcctacacaaagggattagggtttagaaaatgtcaacaaggcagaagattttatgaattatttatttaaataatgaaatggtccttcaataataactgagacctaggaccaagaacaagaagcccacccaaacttctgtcttctaattaactgagccaataaatgtccttttatgacttaaaaatctttgagttggactttcttttacttgcagtatgtgtgaagaataaacttaagtataaaactagatgcagcaatgtgatgaaacaactargggtaaattaaaaatataatctaagataaacagaactctaaaaaacagaatgagaagtacaaatataggaaaacaaaacacccaaaaagattgccttaa

SEQ ID NO: 542565 - DNA, 581 bp, Homo sapiens
tgtgcaactttgggcaagatrcttaacctctctgatctcagtttccttatcagtaaagtgcaaacagtagtacctatttcatagggttgttgtgtggatcaagtgaagtaatattgtaaagtgccctgagtagtgtctgacacatgggaagtacccactacatgtaaactatgctcttaaatactggctaatgcctctgcagcagcatttgagcatccactcactgtcgctcagtaggtttctagcagcacaagaaatgaactttcattctgcacatgaatgaaaaagactttgaataaaatctcaggcaatgtttcactgcagttttgcccctgcaagctgcttggatgagattctaacgtagcttcccagggaggcatttttccaacagtagcctccatctcctagacagcaagctgagccaaaattgcagcctttagaatcttcagagctgtgaggggctctgaccacagtgggttttactcactcgccagtagttttcacacttcgggagcattagcatcccgatgcccaggctatcctccaaaaaacaattaaatcaggatccctgaaggtgggac

SEQ ID NO: 542566 - DNA, 544 bp, Homo sapiens
tcctaaacatagcctgggtgtggtggctcaagcctgtaatccccagcactttgggaggctgaggtgggcggatcatgagatcaagacatcgagaccatcctggccaacacggtgaaactccatctctactaaaaatacaaaaattagctgggcatggtggcacacacttgcagtcccagctactcgggaggctgaggcaggagaatcacttgaacccgagaggcggaggttgcagtgagctgagatcacgccactgcactccagcctggtgatagagtgagactcsatctcaaaaaaaaaaaaaaaaaattcctaaaagtaaaccactgctgtctagttatttttagtatttgctgttagtatttatcaagcctttcagtgttaatttgtctgcccactcatttcttttcctgcctccacgtgctgggcttgggatggaaggagcacgcataagcagcagctggtgacctcacagaaatatgtcctggagagtagaggctgtaagcctttaaaatcgatcttctccacccctgccttgcagaga

SEQ ID NO: 542567 - DNA, 360 bp, Homo sapiens
gattggaaaaaaacttctgtattgttttgtgyctttccagatttttctatttaaaaatagtgcccattaagagggagtgctgatatcattaccatcctctccaaaagggggcaggaactgggaggctctgaggaaactaggtatggtccatacagcagataggacagattcagccaaaagacaagaagctcttggttaagctgcgccaggaatactatcaattactgtatcctgggatgaatttaggaaaaacctaagaattaaattgcgctcagagcacatgaattgcagtttcatgcactgtttttctagaacctcaactaggatatttataataaggttttggtttctttccagact

SEQ ID NO: 542568 - DNA, 504 bp, Homo sapiens
ttaaggactctgcgcaaaggaagagaagaatgattagaccttgcttytttcttttttttctctcgtgtactcttgtattcttttctttaaagaaagctgtggttaagggaaataattggctaagggaaaaaaatggaaagaaagtccttcatttgcacagcttgccttggccatataaaagacacacaccctgaagcagaagtgctgctgaaacaggcagggggaatggaaagggttattgggagatggcttagtttggtttccccaggaagcagatttttaataatgaatttgggtaggcgaatggggatgtgattattttgggggacatgcagaatgtctcccagagttgtatctgggggttaggaggtgggtatttatccatcagttaccactcagcattggctgaggactgtcctcaggggctttactcctctgctgcctggctgcatctgtggactgcaagtccctgtggcaggggagggggcctggaggctgaaagac

SEQ ID NO: 542569 - DNA, 625 bp, Homo sapiens
caaagctaggtgaaccaaagcattcctgaaagcagctggtaaagggcttacggcgtataattcatttgaatttgaaaaatgtagaaatgaacctatcgaataccagtgagagctatggaataaaagtattgattcaatgaagagagttgaagaaatcaaacagaaacgccaagctaaatttataatgaacagatcgaagaaaaataaagagctacaaaagttcaggatatcaaagaagtaaagcaaaacatccatcttatctgagccccccttgcaggcaaagggaagtagttggaagagaaaatggtacaacagttacaagaggatgtggacatggaagatgcttcttaaaaatctctgtaaccatttcttttatgtacatttgaaaatgccctttggagacttggaactgctaaattattattttttacataaggtcacttaaatgaaaagtgattaaaakatatctttcctacattgccatctacaaaacatcagatattacagatgttagattgcatctcagtgttaaatctttactgatagatgtacttacataaatcatgaaaattctacttaaaactatagaagtgaattgtggatgtaaaatggttatgccatttgg

SEQ ID NO: 542570 - DNA, 625 bp, Homo sapiens
caaagctaggtgaaccaaagcattcctgaaagcagctggtaaagggcttacggcgtataattcatttgaatttgaaaaatgtagaaatgaacctatcgaataccagtgagagctatggaataaaagtattgattcaatgaagagagttgaagaaatcaaacagaaacgccaagctaaatttataatgaacagatcgaagaaaaataaagagctacaaaagttcaggatatcaaagaagtaaagcaaaacatccatcttatctgagccccccttgcaggcaaagggaagtagttggaagagaaaatggtacaacagttacaagaggatgtggacatggaagatgcttcttaaaaatctctgtaaccatttcttttatgtacatttgaaaatgccctttggagacttggaactgctaaattattattttttacataaggtcacttaaatgaaaagtgattaaaatatatctttcctacattgccatctacaaaacatcagatattacagatgttagattgcatctcagtgttaaatctttactgatagatgtacttacataaatcatgaaaattctacttawaactatagaagtgaattgtggatgtaaaatggttatgccatttgg

SEQ ID NO: 542571 - DNA, 653 bp, Homo sapiens
tgtcctgccccttcaccctgacagcgatagcccttacagtcgcctccacctatgcctcccttggctgagaaagagcccaacctcctttctttccccttccctgatcatcaaaagcaatccttcaagtgtctcacttcctgagggkcctaattgcagttataatgccataggattgatcagaaaagttaatcccagcaatgggctatcttaccagcatctcacctctgactcaggattttaagcctccttggaatctgaagaggggtatctgaagagggtggagagaccctttggatgcacaaccaaacatgcaatttgctctcctcattgagagatctagcattggtccagactcaaaagacagatagatgatgctaagcttcttgaccccatctcctctcaagaacaaaacatacagtttaataacattgttttttagaaaacatagagttattctgggggccaggcaaattcctttaccttttctcctggtcttcttggctgtcacttgctttgcttacagacagcagcctcttgtctcgaggaacctggaaacatcaccaaccatcagtcagacatacacagaggcaaccatgaccatgttcagagctggacaccggcataagcaaagaaaccaaaatggaatgttctcc

SEQ ID NO: 542572 - DNA, 653 bp, Homo sapiens
tgtcctgccccttcaccctgacagcgatagcccttacagtcgcctccacctatgcctcccttggctgagaaagagcccaacctcctttctttccccttccctgatcatcaaaagcaatccttcaagtgtctcacttcctgaggggcctaattgcagttatawtgccataggattgatcagaaaagttaatcccagcaatgggctatcttaccagcatctcacctctgactcaggattttaagcctccttggaatctgaagaggggtatctgaagagggtggagagaccctttggatgcacaaccaaacatgcaatttgctctcctcattgagagatctagcattggtccagactcaaaagacagatagatgatgctaagcttcttgaccccatctcctctcaagaacaaaacatacagtttaataacattgttttttagaaaacatagagttattctgggggccaggcaaattcctttaccttttctcctggtcttcttggctgtcacttgctttgcttacagacagcagcctcttgtctcgaggaacctggaaacatcaccaaccatcagtcagacatacacagaggcaaccatgaccatgttcagagctggacaccggcataagcaaagaaaccaaaatggaatgttctcc

SEQ ID NO: 542573 - DNA, 634 bp, Homo sapiens
ggttagacccacagttttggaaccttggatatgaagaaccaactgcatactgttggttaatcattagtcctttgccaggaaggggaacatcacacacttgggccatgtaccctagaacttaaagtataataaaaatatatatttaaaaaaaatctttagtgctttgcaaacatataagcactcttccatgaggacaaaaccaaaattacaaacagcttcctaccaaagttttcttcctccattcacacccctgccctaaatttcccactcagttcattgaacaaacctttattgagctcctgctgtactacaggctctgagctaggtgcagggggcagtgttgaccaagccagacacagtctctcctattaaggagcatttcatctacgaaytgattagttcaagtcagcttattaccacagcgttctctaaaagctaacaaaaaattacatttttaaaacttttttttataatcggccctaatccctaggtatataagtccaagtataaagatgtaataaaaaatcttatcatggaagttatgtcttgttaaataacggaaacactgctacttaaaaaccatgaaagttaagatcacattcattcgacaggtcttaactgagcacctactgtg

SEQ ID NO: 542574 - DNA, 506 bp, Homo sapiens
cttatggaatagatatgttacagaaattgttccagaacaaagatgggaaatatccaaggtcrctttgaagctaaaaatctctgataatcaaacctaaaatagatgaactaaaaagaagatcaacaggccatttaactattgtcttttgtgaggatgaatgctgtaccgcttctcagtcttttggttaagatcaagtgaggatgcatgctgtaatatttgtggttgctagaattttaagatgatcctcaaattttccactcacctgctatacacaacacacataatccccaagactgttatgatgaattgtaccctcataattagctaatgttatatggcacaaatgtttaaatatagattatccaggtgttcctgagcacatcacaaaatctctttaaagcagaaagatttttttgttttttgttttttgtttttctggtaatagaaagggaagtcaataatttgaagtatgagaaggatctgactaactgaaaatgaggaagcac

SEQ ID NO: 542575 - DNA, 603 bp, Homo sapiens
tgttatgatgaattgtaccctcataattagctaatgttatatggcacaaatgtttaaatatagattatccaggtgttcctgagcacatcacaaaatctctttaaagcagaaagatttttttgttttttgttttttgtttttctggtaatagaaagggaagtcaataatttgaagtatgagaaggatctgactaactgaaaatgaggaagcacacagtaagtgtattagtcagggttctctagagggacagaactaatagatgtatatatgaacgggagtttactaaggagcaytgactcacataatgacaaggtaaaggtccacaataggccgtctgcaagctgaggggccaggaagccctcccgagtcccaaaacctcaaaagtagggaaaccaacagtgcagccttcaatctgtggcccaacgcctgagaggccctggcaaaccacaggcgtagctccaagagtccaaaagctgaagaacttagagtcattgttgtagagcaggaagcatccagcacaggagaaagatggaggccagaacactcagccagtctaatcctcccacgttcctctgcctgattttatcctagccacactgacag

SEQ ID NO: 542576 - DNA, 603 bp, Homo sapiens
tgttatgatgaattgtaccctcataattagctaatgttatatggcacaaatgtttaaatatagattatccaggtgttcctgagcacatcacaaaatctctttaaagcagaaagatttttttgttttttgttttttgtttttctggtaatagaaagggaagtcaataatttgaagtatgagaaggatctgactaactgaaaatgaggaagcacacagtaagtgtattagtcagggttctctagagggacagaactaatagatgtatatatgaacgggagtttactaaggagcattgactcacataatgacaaggtaaaggtccacaataggccgtctgcaagctgaggggccaggaagccctcccgagtcccaaaacctcaaaagtagggaaaccaacagtgcagccttcaatctgtggcccaacgcctgagaggccctggcaaaccacaggcgtagstccaagagtccaaaagctgaagaacttagagtcattgttgtagagcaggaagcatccagcacaggagaaagatggaggccagaacactcagccagtctaatcctcccacgttcctctgcctgattttatcctagccacactgacag

SEQ ID NO: 542577 - DNA, 603 bp, Homo sapiens
tgttatgatgaattgtaccctcataattagctaatgttatatggcacaaatgtttaaatatagattatccaggtgttcctgagcacatcacaaaatctctttaaagcagaaagatttttttgttttttgttttttgtttttctggtaatagaaagggaagtcaataatttgaagtatgagaaggatctgactaactgaaaatgaggaagcacacagtaagtgtattagtcagggttctctagagggacagaactaatagatgtatatatgaacgggagtttactaaggagcattgactcacataatgacaaggtaaaggtccacaataggccgtctgcaagctgaggggccaggaagccctcccgagtcccaaaacctcaaaagtagggaaaccaacagtgcagccttcaatctgtggcccaacgcctgagaggccctggcaaaccacaggcgtagctccaagagtccaaaagctgaagaacttagagtcattgttgkagagcaggaagcatccagcacaggagaaagatggaggccagaacactcagccagtctaatcctcccacgttcctctgcctgattttatcctagccacactgacag

SEQ ID NO: 542578 - DNA, 445 bp, Homo sapiens
gtttttgtggtactataacacatctactcccattctctggctggcctgagccaaatttactttagtcccatatgagccaatgtttactcctgtgagttacatcatagttgttaccaccgtgtgtggtctcactcattctcttctgcgaaactccaagacacaaataatttgaagatcggttctaaytcaccttcctctattatcgaagagtatttgtaactattgtccaccttaatttttcccatttattcatgtattcaatcacatataatgcacttaccatgttctaggcactgtacagttccctggagatacagcagttagttaaccagtcaaaaataattgctccgaaggaaattacatcatataagggaagacggaaggtaactttattagtaggcgaaatggtagtttgtgctgtggtgaagtataattagaaagggcg

SEQ ID NO: 542579 - DNA, 445 bp, Homo sapiens
gtttttgtggtactataacacatctactcccattctctggctggcctgagccaaatttactttagtcccatatgagccaatgtttactcctgtgagttacatcatagttgttaccaccgtgtgtggtctcactcattctcttctgcgaaactccaagacacaaataatttgaagatcggttctaattcaccttcctctattatcraagagtatttgtaactattgtccaccttaatttttcccatttattcatgtattcaatcacatataatgcacttaccatgttctaggcactgtacagttccctggagatacagcagttagttaaccagtcaaaaataattgctccgaaggaaattacatcatataagggaagacggaaggtaactttattagtaggcgaaatggtagtttgtgctgtggtgaagtataattagaaagggcg

SEQ ID NO: 542580 - DNA, 445 bp, Homo sapiens
gtttttgtggtactataacacatctactcccattctctggctggcctgagccaaatttactttagtcccatatgagccaatgtttactcctgtgagttacatcatagttgttaccaccgtgtgtggtctcactcattctcttctgcgaaactccaagacacaaataatttgaagatcggttctaattcaccttcctctattatcgaagagtatttgtaactattgtccaccttaatttttcccatttattcatgtattcaatcacatayaatgcacttaccatgttctaggcactgtacagttccctggagatacagcagttagttaaccagtcaaaaataattgctccgaaggaaattacatcatataagggaagacggaaggtaactttattagtaggcgaaatggtagtttgtgctgtggtgaagtataattagaaagggcg

SEQ ID NO: 542581 - DNA, 445 bp, Homo sapiens
gtttttgtggtactataacacatctactcccattctctggctggcctgagccaaatttactttagtcccatatgagccaatgtttactcctgtgagttacatcatagttgttaccaccgtgtgtggtctcactcattctcttctgcgaaactccaagacacaaataatttgaagatcggttctaattcaccttcctctattatcgaagagtatttgtaactattgtccaccttaatttttcccatttattcatgtattcaatcacatataatgcacttaccatgttctaggcactgtacagttccctggagatacagcagttagttaaccagtcaaaaataattgctccraaggaaattacatcatataagggaagacggaaggtaactttattagtaggcgaaatggtagtttgtgctgtggtgaagtataattagaaagggcg

SEQ ID NO: 542582 - DNA, 456 bp, Homo sapiens
ttaatagttctttttacctttaatctattctgttattctcatcatcatatctcatgtactcaacaaaagtgaaatggaatgaaaagtcytttgctttcttaatgctggcctaaaagccctaacacttagatttgcaatacaatttaaatatgtatacaagtgtctttgtttcattttttaatatatgatacatgaccatccatttattgatgtgacaactgtgtctgaaacatttaggttgctgaaaaaaattctactaaaaaagtatcttaaatagcattgagtctattgttgtatcaaataacattccatgtattagtaactaagagccagaatcacagctctgcggcattaaggatccagagtcctttttatgtttatctttgatatctgtgggttttgtcttttttaaaattatgttcataaagactcttcaccggtgtacattcctgccaa

SEQ ID NO: 542583 - DNA, 456 bp, Homo sapiens
ttaatagttctttttacctttaatctattctgttattctcatcatcatatctcatgtactcaacaaaagtgaaatggaatgaaaagtcctttgctttcttaatgctggcctaaaagccctaacacttagatttgcaatacaatttaaatawgtatacaagtgtctttgtttcattttttaatatatgatacatgaccatccatttattgatgtgacaactgtgtctgaaacatttaggttgctgaaaaaaattctactaaaaaagtatcttaaatagcattgagtctattgttgtatcaaataacattccatgtattagtaactaagagccagaatcacagctctgcggcattaaggatccagagtcctttttatgtttatctttgatatctgtgggttttgtcttttttaaaattatgttcataaagactcttcaccggtgtacattcctgccaa

SEQ ID NO: 542584 - DNA, 456 bp, Homo sapiens
ttaatagttctttttacctttaatctattctgttattctcatcatcatatctcatgtactcaacaaaagtgaaatggaatgaaaagtcctttgctttcttaatgctggcctaaaagccctaacacttagatttgcaatacaatttaaatatgtatacaagtgtctttgtttcattttttartatatgatacatgaccatccatttattgatgtgacaactgtgtctgaaacatttaggttgctgaaaaaaattctactaaaaaagtatcttaaatagcattgagtctattgttgtatcaaataacattccatgtattagtaactaagagccagaatcacagctctgcggcattaaggatccagagtcctttttatgtttatctttgatatctgtgggttttgtcttttttaaaattatgttcataaagactcttcaccggtgtacattcctgccaa

SEQ ID NO: 542585 - DNA, 552 bp, Homo sapiens
ttttaatatatgatacatgaccatccatttattgatgtgacaactgtgtctgaaacatttaggttgctgaaaaaaattctactaaaaaagtatcttaaatagcattgagtctaytgttgtatcaaataacattccatgtattagtaactaagagccagaatcacagctctgcggcattaaggatccagagtcctttttatgtttatctttgatatctgtgggttttgtcttttttaaaattatgttcataaagactcttcaccggtgtacattcctgccaacaagaatggaataaagagaaaaaataatgttgtttttttttttaaaaaaaaggtcagaaaacataattgcctacaccacctccacttcgtcctgctagccatatccataatctactgtcaggacagtctttacatgaatattcatatgtccagccccagctagcaactctattgccatagaagaatgcgccaaaaatgcaaaataacttgccatctctgtcaaagtgttgaacacaatctaaaatctagggttgctctgaatttctgagag

SEQ ID NO: 542586 - DNA, 552 bp, Homo sapiens
ttttaatatatgatacatgaccatccatttattgatgtgacaactgtgtctgaaacatttaggttgctgaaaaaaattctactaaaaaagtatcttaaatagcattgagtctattgttgtatcaaataacattccatgtattagtaactaagagccagaatcacagctctgyggcattaaggatccagagtcctttttatgtttatctttgatatctgtgggttttgtcttttttaaaattatgttcataaagactcttcaccggtgtacattcctgccaacaagaatggaataaagagaaaaaataatgttgtttttttttttaaaaaaaaggtcagaaaacataattgcctacaccacctccacttcgtcctgctagccatatccataatctactgtcaggacagtctttacatgaatattcatatgtccagccccagctagcaactctattgccatagaagaatgcgccaaaaatgcaaaataacttgccatctctgtcaaagtgttgaacacaatctaaaatctagggttgctctgaatttctgagag

SEQ ID NO: 542587 - DNA, 552 bp, Homo sapiens
ttttaatatatgatacatgaccatccatttattgatgtgacaactgtgtctgaaacatttaggttgctgaaaaaaattctactaaaaaagtatcttaaatagcattgagtctattgttgtatcaaataacattccatgtattagtaactaagagccagaatcacagctctgcggcattaaggatccagagtcctttttatgtttatctttgatatctgtgggttttgtcttttttaaaattatgttcataaagactcttcaccggtgtacattcctgccaacaagaatggaataaagagaaaaaataatgttgttttttttttwaaaaaaaaggtcagaaaacataattgcctacaccacctccacttcgtcctgctagccatatccataatctactgtcaggacagtctttacatgaatattcatatgtccagccccagctagcaactctattgccatagaagaatgcgccaaaaatgcaaaataacttgccatctctgtcaaagtgttgaacacaatctaaaatctagggttgctctgaatttctgagag

SEQ ID NO: 542588 - DNA, 393 bp, Homo sapiens
ttttaaaggtttatttaatgattatctattttgggaatgggaaaagttaaacaaatttataatcttatgaattagaatttgagtaccggaaatcattacagtttcctccatttcaaaggagaaaacaaaacacacamattgatattaaaaatgccttggcttaaatttatcaaaaattaaatttatattgtacatgtgattgagacctatctggaaaatattctcaaacttctcttgtgagtgtcaataaatacttatccgagtcttagaaataagttagttaacaataatttctggtttgggcaggaaagttctgggaacatcaccttgatattatgggaagaaattaagaaaagtccactataaaatatctgaatgatgttctcagattgg

SEQ ID NO: 542589 - DNA, 525 bp, Homo sapiens
tgatctttgcttactgtgaggttctctccgttgtctcaggtgttgggctggacagtggggtggccagtgccctgagctcctgttccttggcaataggggaacacctctggcctgagctggggccccaggcttgcccatgaacataccaatggagagcacaggcaccagtcctgacaagggtggctgggaagagctcctggtgaaatgcactgaggtctctgccagagcrtgaagtcattgcactggctccccatcttagataggaagtagcataatctattttcctgtcacaccccagttccatgtgactcctcattcagatgcacattgtagtctacctctggaccccagtatggatgagagccatagaaaacgctgctgtgtgactgtccatcggagaggttttagggcagaaccttgtcagtcagtctaatgcaggcacctttatagctctcttgttctctgatgtggaaggctgctgcttcatgtaaaagggaaggaggcaggtgtcggttgtggtgtcag

SEQ ID NO: 542590 - DNA, 556 bp, Homo sapiens
gtagcagtcaatcatggatgaccatcgatgctttattaaaaacctgatttatgggacaaggaagagctgccattgagaagcaagtaatccagagagcaagggagttgacacaaggatattggcagggagaaaaagtgagttcatgtgagagataattggggcctttactaaagggcaaggaaatgaagaggaaggcgtacaataaaactagatttcaaagcaaaatcatcatgttatacctgtgtcacagaggcaagaggaatcaagggtaattttaagacttctagtgtgggttttagggcttccagttatccatgcaagcaaaaatgaccaatacagtgtgcacaaaaataagtgtgctgaatttagagattatgaggttgcaagagacattatggtagatgatactgcttawgttctctgtgttaaattcagattacaaggacttgaagcataaaggtacacatatattttttaaaggatgaaagctaaaaaaaagttaaagacctgctacctaaggtttttggacttagctattaaatggggaacatcacaa

SEQ ID NO: 542591 - DNA, 648 bp, Homo sapiens
gcatatcattgtttctcaaatatataccagctaatagagaaataaggattctcacaatttattttaatttaatcttcttcacacatttcagacatattacaaawtcaaaaatggttaaacaagtttaacacctccagagtagtcattaaaaaatcgaatataatttatatgaaatagtgtgaagtgccaagtaagtagtaaacgatttaatcttatgacaaaatactacatattaatggaccaagtcatcaaagtgtctacaagtattaaaaataagacatctatgccagggacagtggctcacgcctgtagtcccagcactttgggaggcagaggtgggcagatcacgaggtcaggagatcgagaccatcttggccaactggtgaaaccctatctctactaaaatacaaaaaaaaaattagcccggcgtggtggagtgtgcctgtagtcccagctactctggaggctgaggcaggacgacaatcgcttgaacccgggaggtggaggttgcagtaagctgagatcatgccactgcactcaagcctggcaacagagcaagactccatctccaataaataaataaataaataaataaataaataaatacaaagacacctatgaaatatccttgaatttaaagcacatgat

SEQ ID NO: 542592 - DNA, 615 bp, Homo sapiens
gtgaggaagataaaagtaggaatagcagtgggaggagacttgtgttaatttccagtctccagcacagacgaagggaaatcgttccttattctgcctcacaggggacctcatgaagtctgccaacccaaatgaattttgcgatataacctcaagtggggaagaactcccttagccagagccggggcaggcagggttgtagggtgcaggcaagtgggaagtgtgttacagccataagtgcaggagctgggcacccaggctgtgtgggagaactggaagggatgtggccagaaggctgtagttcttgtattcataggaaggtagatggtccggagcagttttgagttctgagcttagatgacctggaatgtagctcactcctgctaccagaaaactatgggtgtgagatctgtccttcccagcgcataggagctgggtggggtttgctgcagcatgttactccccactctctgtatgaactattctttgcagcagaggcagttacactcctctctgtaacattaccccagttggcagaaaactaccctcccacccaacagcarcaggggccttggtttgctccacatgcagagattcagagaatagacctgcttgacc

SEQ ID NO: 542593 - DNA, 647 bp, Homo sapiens
agaagcaaagagaagaaaaggaacaagtatacatttacagtttttgttatttaccatttatctatttaccattacaatttattatttaccagaaattttttatttataatttcttgttctcctcatttgttcctgtgggttcaaatttaacatctagagttaaactcctagatgttgattccttagcttaaaatacatttgctcctctccccccacttttgctgttattggcaaatatattgcatttccctatgttatagacccaacaataygttacatacatattgtttcatatgattgctttttaaataagttagtagaagaaagaggataaatttgcatttacactttcttttatatttgtataattttcttttgtcagtgatctttatattttcatgagattcaaattactgtctgtagtcacttgctttcggtctgaagaattttctttagtattttttgtaaggcatgctagcaacaaattctttcagattttgttcatctgcaaatgtctttattttgttttcatttttgaaagacagctttgctagaagtaggattcttggttgataggtcttttttttctttgaaccctttgaatttgttatcccactaccttctgggtttcaatgtttctgattaga

SEQ ID NO: 542594 - DNA, 647 bp, Homo sapiens
agaagcaaagagaagaaaaggaacaagtatacatttacagtttttgttatttaccatttatctatttaccattacaatttattatttaccagaaattttttatttataatttcttgttctcctcatttgttcctgtgggttcaaatttaacatctagagttaaactcctagatgttgattccttagcttaaaatacatttgctcctctccccccacttttgctgttattggcaaatatattgcatttccctatgttatagacccaacaatatgttacatacatattgtttcatatgattgctttttaaataagttagtagaagaaagaggataaatttgcatttacactttcttttatatttgtataattttcttttgtcagtgatctttatattttcatgagattcaaattactgtctgtagtcacttgctttyggtctgaagaattttctttagtattttttgtaaggcatgctagcaacaaattctttcagattttgttcatctgcaaatgtctttattttgttttcatttttgaaagacagctttgctagaagtaggattcttggttgataggtcttttttttctttgaaccctttgaatttgttatcccactaccttctgggtttcaatgtttctgattaga

SEQ ID NO: 542595 - DNA, 623 bp, Homo sapiens
tttaaccaatgtctttgcagaagccattttctggaatacgtatatctttaaaaaaaaaaaaagaaaatgcatgtagaagttggttaacacttatttatagaacagtgtttttcaaacttttcataatttattctcctatcagaaagaaatactrctggtgaaccccaatatttgtatatgtatttatatactaatgattcacaaacacaaatgttatcactatgtaaagtatttcctaaaatgaactcaaaattgaaatgcaaaagaatgaagtaaagcataaatataaatgaaatttctcatatttttccatagttcatttaaaagcatggtgagcctgctgtgttatataaacacttccttgcagacttccttgtaagatgaaggagcatggcataatcatgttggattttgcgggtctgtatcttccacctaagcctgtttggggtctatcattttccctttcttcctcaagaggataatcagcagtgattttttttatgtattactttttaagttctcattttgtaacattaagtcaatgttgacccgtaagtagaatctgcataaaatgtaatgatttgtacctccatgataccatagtttcatgacactagtcaaga

SEQ ID NO: 542596 - DNA, 623 bp, Homo sapiens
tttaaccaatgtctttgcagaagccattttctggaatacgtatatctttaaaaaaaaaaaaagaaaatgcatgtagaagttggttaacacttatttatagaacagtgtttttcaaacttttcataatttattctcctatcagaaagaaatactgctggtgaaccccaatatttgtatatgtatttatatactaatgattcacaaacacaaatgttatcactatgtaaagtatttcctaaaatgaactcaaaattgaaatgcaaaagaatgaagtaaagcataaatataaatgaaatttctcatatttttccatagttcatttaaaagcatggtgagcctgctgtgttatataaacacttccttgcagacttccttgtaagatgaaggagcatgrcataatcatgttggattttgcgggtctgtatcttccacctaagcctgtttggggtctatcattttccctttcttcctcaagaggataatcagcagtgattttttttatgtattactttttaagttctcattttgtaacattaagtcaatgttgacccgtaagtagaatctgcataaaatgtaatgatttgtacctccatgataccatagtttcatgacactagtcaaga

SEQ ID NO: 542597 - DNA, 582 bp, Homo sapiens
  misc_feature (1)...(582): n = A,T,C or G
ctggctacaaaccagtcccggatgccggcagcccagccccgggctcaagcacnatccttcaaagcccagaacattaggcgtagggccaggccaaggaatcctaagaaggggatgatatttttaaaatctttggcgttagcaaaactgaaggttgcctggccagtgcttgtctctttctttttcccagctcagtgtctaatttgtgtatttccaggattccgaacctttccccagcagatcaggtctaagtgcaaacggtccctaagtcacccatgttccttaggctttttccctccttagaaacmaaaggtggacctttgccaagattaaatggcattccattcaaagctcccagtctgggtcagttcaacaagctcatgaggaggactttgaaagtgctatggataattttctaacaaggcacaactacccagcaggactgagaccaaaaaaagaaccatcttttaaatgtaagttcttatcagctctgggaaaaaaaaaaaatagacgttatttaagccaaagcttaaatttgggctaaagcctcagacttgaaaaatgcttgaagccagaattgggagg

SEQ ID NO: 542598 - DNA, 582 bp, Homo sapiens
  misc_feature (1)...(582): n = A,T,C or G
ctggctacaaaccagtcccggatgccggcagcccagccccgggctcaagcacnatccttcaaagcccagaacattaggcgtagggccaggccaaggaatcctaagaaggggatgatatttttaaaatctttggcgttagcaaaactgaaggttgcctggccagtgcttgtctctttctttttcccagctcagtgtctaatttgtgtatttccaggattccgaacctttccccagcagatcaggtctaagtgcaaacggtccctaagtcacccatgttccttaggctttttccctccttagaaaccaaaggtggacctttgccaagattaaatggcattccattcaaagctccmagtctgggtcagttcaacaagctcatgaggaggactttgaaagtgctatggataattttctaacaaggcacaactacccagcaggactgagaccaaaaaaagaaccatcttttaaatgtaagttcttatcagctctgggaaaaaaaaaaaatagacgttatttaagccaaagcttaaatttgggctaaagcctcagacttgaaaaatgcttgaagccagaattgggagg

SEQ ID NO: 542599 - DNA, 582 bp, Homo sapiens
  misc_feature (1)...(582): n = A,T,C or G
ctggctacaaaccagtcccggatgccggcagcccagccccgggctcaagcacnatccttcaaagcccagaacattaggcgtagggccaggccaaggaatcctaagaaggggatgatatttttaaaatctttggcgttagcaaaactgaaggttgcctggccagtgcttgtctctttctttttcccagctcagtgtctaatttgtgtatttccaggattccgaacctttccccagcagatcaggtctaagtgcaaacggtccctaagtcacccatgttccttaggctttttccctccttagaaaccaaaggtggacctttgccaagattaaatggcattccattcaaagctcccagtctggstcagttcaacaagctcatgaggaggactttgaaagtgctatggataattttctaacaaggcacaactacccagcaggactgagaccaaaaaaagaaccatcttttaaatgtaagttcttatcagctctgggaaaaaaaaaaaatagacgttatttaagccaaagcttaaatttgggctaaagcctcagacttgaaaaatgcttgaagccagaattgggagg

SEQ ID NO: 542600 - DNA, 582 bp, Homo sapiens
  misc_feature (1)...(582): n = A,T,C or G
ctggctacaaaccagtcccggatgccggcagcccagccccgggctcaagcacnatccttcaaagcccagaacattaggcgtagggccaggccaaggaatcctaagaaggggatgatatttttaaaatctttggcgttagcaaaactgaaggttgcctggccagtgcttgtctctttctttttcccagctcagtgtctaatttgtgtatttccaggattccgaacctttccccagcagatcaggtctaagtgcaaacggtccctaagtcacccatgttccttaggctttttccctccttagaaaccaaaggtggacctttgccaagattaaatggcattccattcaaagctcccagtctgggtcagttcaacawgctcatgaggaggactttgaaagtgctatggataattttctaacaaggcacaactacccagcaggactgagaccaaaaaaagaaccatcttttaaatgtaagttcttatcagctctgggaaaaaaaaaaaatagacgttatttaagccaaagcttaaatttgggctaaagcctcagacttgaaaaatgcttgaagccagaattgggagg

SEQ ID NO: 542601 - DNA, 636 bp, Homo sapiens
ttcattttatagatgaggaaattaagtcatagaaagctttactagtgtaagaaagttggtacagtttttagaattggcacagtggagattcaaattctggtctttctgacattttttctactgaacttccctaccttaattcagcttaagtttcttgttgaatgatataaatgaccatctgaagacctgagaacaaaccccaaccttgagatgctgatgtaattggactgaggtgaatccagtgcattcagtcttgaaaagcgttcctggtgatttcaatgcctgatacattttgagaaccactggacaaaattgtattattaactccacccaatagatatcttcctaacagcaaaaataattgcagctctgatttaccmaactggcctgcaggtggaatggaaagtcaacagctgaattaggcagaaatgagataaaataaaaattaaaatccagctttttctaagaccacatctttagggttggggcctaagaagtgctagaaaggtgaaatagaaacaggcacccatttgtcacatgacacctaggaaagaaatgaagtgcctgtgcttgctagtgagcagaatactttgcataccgaaatcattctagatttttctgtgtctatatgcattt

SEQ ID NO: 542602 - DNA, 629 bp, Homo sapiens
aaacggttataggccttacgttatgaaactgccaattgttaaaattttgacctayaaaattatcaatttcatagactccaactatcagagttctcagtaacgtattaaataacttcaataattaataccacttgattcatgccagagaagtcacagaatctttagccagagaagtcatagaatctttagccagagaagacgtaccacgggagaggataggatagagacagacttaacagttgtttactgaagagctccaaacaaactggcaaaaattcaaaacctgggctttgcatattaatcaatggttacatttgtgatggttcacaaagcaacataacataaaacattccgcttttaaagactgagatgataaacatcactaggtcctctgaattaaaattcactcataaatcaaaataaacagttaaacatcacacaggaataaaagagctaaggatactgatttaaaaaacatttgcaaatactttttcttttattcaaattgaaaatgtttttacaagttgatgggttaaaaagaaccagtctaaatttcaccttatctatgatttcagttatccacagtcaactgcagtccaaaaatgtaaaatgaaaaattccagaaataa

SEQ ID NO: 542603 - DNA, 584 bp, Homo sapiens
acaggtaaaaaaaaaaaaaaaaaaaaaaratttaacttctccataccatcaaatcatcagcagtacatacattttaccttttaatcataatagagcagtccttatgcccctagtaccagacttgaacaccaaaaatttgtgattagtagtgtaccaccaagcttgtcattatagagctttctagttcattccattagagaccaagatcaagggtcattgaagcatcatgagatggacattttggcagagtcaaaaataccatatggtgaagccaaactaagttgtactggcaggagtaattcatcaggccagcactacagaaagaaatcagaggagcttgcttttggtcagtgactttcaacccttttaatcccaacatgtcagtaaaatatctcactaagacagtgatttttaacccactttcctaaaagattctgatttttgcaccactacttgaaagaaaatctctgatttgggttattttttcatataaaggctccaagttgtcaatacttctcatatttccactgccttctaaattcttagctatatggtgaaacaaaggtttcacaaagtataaaatg

SEQ ID NO: 542604 - DNA, 606 bp, Homo sapiens
ttttttccacacaacgaaaactttccaagttgaaatttctcctcctaataataatgccagttatataggcaaatgtataatctgatattaaaaattaccaaacagaatcccagctactcaggaggctaaggcaggaggatcaggagttcaagatgcacctgggcaacatagtgagaccctgactcaaaaaaaaaacaaaaattatcaaatcgtctcactkgactctgactttggaaataaactcagaataagaaattctgatttgaccaaaagtttaatacaacagaaaggaatcataatactgacacagaacagattcatgagctatttagtccaaacttttcattttacagatcagaaatttaaggttaaaagtgaatttgcccagggtctcataactgttcagtaacggagatgagagcccacatccactgacttctactcggaggcttcgtgcactccactctgcttgtgttccctccttcatttaccttctgccaatcttaggactagctgtgaaggcaacgaaggagcaactcccactctgggtacatacatgaccagtaaacattaaaaaaaaaaaaaaaaaatcacgctctcctacta

SEQ ID NO: 542605 - DNA, 606 bp, Homo sapiens
ttttttccacacaacgaaaactttccaagttgaaatttctcctcctaataataatgccagttatataggcaaatgtataatctgatattaaaaattaccaaacagaatcccagctactcaggaggctaaggcaggaggatcaggagttcaagatgcacctgggcaacatagtgagaccctgactcaaaaaaaaaacaaaaattatcaaatcgtctcactggactctgactttkgaaataaactcagaataagaaattctgatttgaccaaaagtttaatacaacagaaaggaatcataatactgacacagaacagattcatgagctatttagtccaaacttttcattttacagatcagaaatttaaggttaaaagtgaatttgcccagggtctcataactgttcagtaacggagatgagagcccacatccactgacttctactcggaggcttcgtgcactccactctgcttgtgttccctccttcatttaccttctgccaatcttaggactagctgtgaaggcaacgaaggagcaactcccactctgggtacatacatgaccagtaaacattaaaaaaaaaaaaaaaaaatcacgctctcctacta

SEQ ID NO: 542606 - DNA, 606 bp, Homo sapiens
ttttttccacacaacgaaaactttccaagttgaaatttctcctcctaataataatgccagttatataggcaaatgtataatctgatattaaaaattaccaaacagaatcccagctactcaggaggctaaggcaggaggatcaggagttcaagatgcacctgggcaacatagtgagaccctgactcaaaaaaaaaacaaaaattatcaaatcgtctcactggactctgactttggaaataaactcagaataagaaattctgatttgaccaaaagtttaatacaacagaaaggaatcataatactgacacagaacagattcatgagctatttagtccaaacttttcattttacagatcagaaatttaaggttaaaagtgaatttgcccagggtctcataactgttcagtaacggagatgagagcccacatccactgacttctactcggaggcttcgtgcactccactctgcttgtgttccctccttcatttaccttctgccaatcttaggactagctgtgaaggcaacgaaggagcaactcccactctkggtacatacatgaccagtaaacattaaaaaaaaaaaaaaaaaatcacgctctcctacta

SEQ ID NO: 542607 - DNA, 608 bp, Homo sapiens
aaaaagaaaggcgggattttttttttttttttttaatgtttactggtcatgtatgtaccaagagtgggagttgctccttcgtgcccttcacagctagtcctaagattggcagaaggtaaatgaaggagggaacacaagcagagtggagtgcacgaagcctccgagtagaagtcagtggatgtgggctctcatctccgttactgaacagttatgagaccctgggcaaattcacttttaaccttaaatttctgatctgtaaaatgaaaagtttggactaaatagctcatgaatctgttctgtgtcagtattatgattcctttctgttgtattaaacttttggtcaaatcagaatttcttattctgagtttatttcaaaagtcagagtcaagtgagacgatttgataatttttgtttttttttkgagtcagggtctcactatgttgcccaggtgcatcttgaactcctgatcctcctgccttagcctcctgagtagctgggattctgtttggtaatttttaatatcagattatacatttgcctatataactggcattattattaggaggagaaatttcaacttggaaagttttcgttgtgtggaaaaaaca

SEQ ID NO: 542608 - DNA, 512 bp, Homo sapiens
actccttgaatatccagtgtgacccataaaatagtctgttaataccggatcttaatttttatgttattcattaagattttaactatattcagtacgtaatttggagacaaactagcatcatcaaaactgcctgtaaataaggtgtttagtctttctataaaaacagaatagagcagttacctaccagttaaaatatcttatatgaagaaaatagaataaagatccagtcatatatgtaaataagatgtactgattgtacgtaaatgaaaaatggaccctttaaaaattatttttacctgaagcttgtcataatttttttaaagcaaatatatatatggtgatggtacttttcaaagtgtgtattagtggtgatcacctcaaacataaacctctgttgtgaatcatttgtgtccttttcaactgtctttcagaggaaaggtaaaaaatcattaaacctkaaattcattgttaaaatcaaatatttgtcagcagtaactcaagctcatggttct

SEQ ID NO: 542609 - DNA, 556 bp, Homo sapiens
aaaatttctgtagtaattgtttctgggtataattacatttgatttttttctgtatgtttttctataagatttgtttttacaaaggttatatattttattactagaagaagcaggtaagctatttccatttgacgggaaagtggattgtgtgtgtgggtttttctttctttttttttttttttgagacagagtctcgctctgtcccccaggctggagtgcagtggtgcaatctcagctcaccamaacctccacctccccagtttcaagcgattctcctgcctcagcctcccgagtagctgggactgcaggcacgtgccaccacgcccagctactttttgtatttttagtagagacagggtttcacagtgttggtcaggctggtctcgaactcctgacctcgtgatctgcccacctctgccccacaaagtgctgggattacaggtgtgagccaccacacgtggccaaattgtgttattaattgatagtaagattcctgtagactaatcagttagcttgattcctttgaagtgatggaggcggaagaagaaccaagcca

SEQ ID NO: 542610 - DNA, 556 bp, Homo sapiens
aaaatttctgtagtaattgtttctgggtataattacatttgatttttttctgtatgtttttctataagatttgtttttacaaaggttatatattttattactagaagaagcaggtaagctatttccatttgacgggaaagtggattgtgtgtgtgggtttttctttctttttttttttttttgagacagagtctcgctctgtcccccaggctggagtgcagtggtgcaatctcagctcaccaaaacctccacctccccagtttcaagcgattctcctgcctcagcctcccgagtagctgggactgcaggcacgtgccaccacgcccagctactttttgtatttttagtagagacagggtttcacagtgttggtcaggctggtctcgaactcctgacctcgtgatctgcccacctctgccccacaaagtgctgggattacaggygtgagccaccacacgtggccaaattgtgttattaattgatagtaagattcctgtagactaatcagttagcttgattcctttgaagtgatggaggcggaagaagaaccaagcca

SEQ ID NO: 542611 - DNA, 548 bp, Homo sapiens
ctttcctggtcaccctgagcaatctctcaattcctcaaagcctactcatcagccacgttgaacatttcatcatcctcgaatctggttatagctttgtctttcacattttctatctagaatactcttacccacacactgccttatccaaaaacatcttcacctagtacactcttcttcatccttcaagacatgcacaaattagagcactttgatgttctttctgcctgcccagkgttctgggcactctgttcacaccttttaatgccccttgagccacactatggacacatatgtctctccctatgctggaagccccttggagccaaagaccatttgagtaatcacagagcctaacacagagacttcccaatagacagcaccacaaaaaatattttcgggatattacaacttagaaagattgagcaattttaaatataaaaagcaaagaacagcaaatatttgttgaagaattgaagaccaagaggaaaaagcttctgagaagagtcaaggaatcaattccctgttattcttacactggctgaccaatt

SEQ ID NO: 542612 - DNA, 299 bp, Homo sapiens
gaacataagacacacataaaatttctaaagaaaatggcatagtgggaaaaaaggcaagaaattagtctgaggaaayactcatatttggaggacagagagagaaggagaagtaaggaaggaagatatgagaactatgatgacaacagccattcattttgagagctaagaataccatatcttcattaataaattcatttaaatttaaatttcaaggtttttaactgaggataaaaaatgtactaaaccttaacaatccatgtactgtctcagatattaaaatagattacccatgtgacaag

SEQ ID NO: 542613 - DNA, 567 bp, Homo sapiens
caagtctctgatcaactactcctgagaaccaaatgggaaaaatttyagtgataaagcaaaaacacaagactcaattttatgtgtgcattgtgtgattccatggcaaaaacatgtagaaaatgattgaaaagaagtatatgggattatagataatgttcatttccttgtttgtatttttcttgctgaaaccagatttctttagacctcacttgcctgtgtataaagatacagttacattaagagtagaaacccaaatatctctggcataattccctgtgtgcttacacagaacttggctccttgtaaacccacttccttttccaacataaggaattcccaaacattattgatctgaggtagaaactaggagtatcctagactcaagtaggaaccttagcgatatatattttttatcataagcatgtattacaatatcttcattattctcagattctatattttcacatttatttataaccccagattaatacttgcagtgttttctggtcactcatggacatgtgcagagtgggaaaaaaaatggagccatcacatgcacatgttccc

SEQ ID NO: 542614 - DNA, 551 bp, Homo sapiens
gctgggaaccagccacctgggttccaagactacaccaaccactgaccaaggaagcaaggaacctgtctgcgcctctgccttctcatctcaaaggggctaacagtcgctggaaccccagggcctttgtgggagcaaatgaggtcctgggtaggaaattacctagcaaagcaaaaggaaatatatggttagaggttgaattattttgtgtgcttttgttttgttttgttttgagatgaagtctcgctccattgtccagactggagtgcagtggcacgatctcggctcaccgcaacctccgcctcccaggttcaagcaattctcctgtctcagcctcccgagcagctaggactacaggtgcctgccaccatcyctggctaatttttgtatttttagtagagatggggtttcaccttgttggtcaggctggtctcgagctcccgacctcaggtgatccacccacctcagcctcccaaagtgctgggattacaggtgtgagccaccatgcctggcctgttttttctaaagagacagggtctcactatgttgcccag

SEQ ID NO: 542615 - DNA, 490 bp, Homo sapiens
ctgctggacagataaggacggctgctctccacctcgcagactgctcttgttataagtagagatgggctcgtgctgaaacatctgaatgccaagcgaagtctgtgagcatcaaccccactccatgggtttgtctcctggtacccaaagaaatactgagttgtgtccacaacatggctgggtcttcagacccctggctcaccatgtgggtgtcttgggcagtttctatcacacatgggacaaggggagggagtttttctaacatggaaaaagattcycagcctgccgcccagcatgcaggtggcctcgctttgccgggtccgagaggctccccgtcaattttgcacgggatcctagctcttgtaggcagacaccagtgcactctagatacctcctgagacctccgtcctctgctttccgggcagctctcaccaccccaggccccggcatgaggcctttcctcagtcctgtggcctctcagaggacacctgat

SEQ ID NO: 542616 - DNA, 577 bp, Homo sapiens
aggccaagggagtggcagaactgggccgcctctctggttgacaagcaaaccacatgctaaggcttggagcaagagagaatttgtgtctattggcaaagaactaagccaggaagacatgggccatccctccgctttagggaagcatattttaaacctaaacgttgaacttcttctttggcctcaccagtgaaaacttgttgtctttagttcctaaagtttcttctactttggcacattccccagttgagcagcagcctctatgcttccacgttcaggaaaaattccagtcctcatatcttttgtagttcaccctcaagctctcccgcttcaccatccaatagtttctcccaaaccttggcacccccctagactttgcttccaatggtttcttccagaccacttttcctagatgaatatattcgtttaccttactaggaaaattattggaagattttttcttttacttgaaattggaggcattttaataactggcgaactggaatgtgtttctgtatttgtagacaaccatgwacccatgcaagtaggtgaacattccacagtggctgggtgaccacag

SEQ ID NO: 542617 - DNA, 437 bp, Homo sapiens
tctgattatggagcttacgttctagcagtaagaaatagaccattgaaaaggaattaggtaaactataggactgcagactgcagtaaccaccatgaaggaaatacagggagtggtgagaccaacgataaacaggagaggcctccttgaggtcagggaaagcstctccaacgggagacatttgagctaagacatgaaaaaggagagaacatgttctaggtaaagggaatgtccgcgaggctggaagaatttgttgtaatcaagtgaccaaaaggaggccagtgtagctggcttcggtaaacgaggagcggggtgccagggggtgaagccagagggtgaagctcggccgtcttctgggtcgtgggaagaaactggatttcattcttagtgccacgcagtgttggaagccaaaactgcattttaaaacacacacttgaaag

SEQ ID NO: 542618 - DNA, 437 bp, Homo sapiens
tctgattatggagcttacgttctagcagtaagaaatagaccattgaaaaggaattaggtaaactataggactgcagactgcagtaaccaccatgaaggaaatacagggagtggtgagaccaacgataaacaggagaggcctccttgaggtcagggaaagcgtctccaacgggagacatttgagctaagacatgaaaaaggagagaacatgttctaggtaaagggaatgtccgcgaggctggaagaatttgttgtaatcaagtgaccaaaaggaggccagtgtagctggcttcrgtaaacgaggagcggggtgccagggggtgaagccagagggtgaagctcggccgtcttctgggtcgtgggaagaaactggatttcattcttagtgccacgcagtgttggaagccaaaactgcattttaaaacacacacttgaaag

SEQ ID NO: 542619 - DNA, 566 bp, Homo sapiens
tgtctcaccatattacagattaaacaatgagttgaagcttaaaaaagaaaaataaatacagtgctttctaagcttacacattctccctctctctacctccttcacttcctttttccttcctttctacctttccttctcatttccattaattcaaagaatattcactaagtgactgctcagtgccaactactaatgatgaaatgaatgtgaatatagtcagaattatttccctcatcaagtttatattctaacaaagcaaaagcaatcaaacaaaaacaaagtaagaatcacagagcagaataagtgttgggtaaaatatataaaggcataaaacatggtataactgagggaaggctgaaatgcctttatattgtatggttagaaaatgtctccttgaaatttaagttaaaaaattgaaagaaatacttgtaagttttaaagatggtactggggagtgtactgttatgmagatggcaatgcataaaaatggaataagccagaccttggagttttggaggcatttagaagacagaatgcaagtctttcgggtatcagtagtgagaagt

SEQ ID NO: 542620 - DNA, 484 bp, Homo sapiens
atatgcttagtataggggaagaacaaattaattacatattgtctctttctctaggagaagaatggaatctagtaaaggaatatatacatgaagaaatgatagtrataaaaacactttaggtgtgctatctaaagtgtagtttacatacagaattataataaagtgacatagatgaaatgctccactcccctttgtggggtattaactgcttcacgggcaactgatatttgagccaaagtttaaaaaatgagtaagtaagtttttgtcttatgcataggaagaatagagctgtctgagtgaaaggtgaaatttgggaaaatacattgaataattaaaacttcatgcaattcaatatagctgtactttaggggcaaggaatgggtacaggaaaaaatgaggctgaagatgtaggctgcagtgaaacttaagcaaattttatacatcttctgaaacacttttgaaaacgttattgtaagtaaacatg

SEQ ID NO: 542621 - DNA, 484 bp, Homo sapiens
atatgcttagtataggggaagaacaaattaattacatattgtctctttctctaggagaagaatggaatctagtaaaggaatatatacatgaagaaatgatagtaataaaaacactttaggtgtgctatctaaagtgtagtttacatacagaattataataaagtgacatagatgaaatgctccactcccctttgtggggtattaactgcttcacgggcaactgatatttgagccaaagtttaaaaaatgagtaagtaagtttttgtcttatgcataggaagaatagagctgtctgagtgaaaggtgaaatttgggaaaatacattgaataattaaaacttcatgcaattcaatatagctgtactttaggggcaaggaatgggtacaggaaaaaatgaggctgaagatgtaggctgcagtgaaacttaarcaaattttatacatcttctgaaacacttttgaaaacgttattgtaagtaaacatg

SEQ ID NO: 542622 - DNA, 398 bp, Homo sapiens
cttctgtgttctaagtgagagctcaatgcctaaactaatttagtgcctttctgcaagagtctctctgatgcaattgttaagatagcattccagaccttggctgttttcttcaccactgactttctatcatattaaatgctctataaatattttgatacatttattaggtagagaatttggaaaataagaccatgataactcagcctctatatgtatgtatgtgtatatgtgtttgcatgtgcatatgtttgtgtgtatatatatacatatttaacaattttaatcatatcatataaaactgttacagtrtattggttaaagaggaaaggctctgtgctcaaaatatctgggctggaatgaccccagctctgccattcttaactgccagttcctccatg

SEQ ID NO: 542623 - DNA, 461 bp, Homo sapiens
atggtagaaaataagacagggtaattggacagaaagtgactaaggatagtaacattaaataagatagacatacatcagtgaaagtrcattcaactgcaagaaatgaaaaaaaatacaagtaaaataatgacactaattctaaggtcaaggtggacttcaggactacttcaaatcgacagcttaatgataacttcaaggggctcagatttagtattactttctttcttttctttctttttttttagatggattctcactctgtcgcccaggctggagtgcaatggcgtgatcttggctcactgcaacctctgcctcccaggttcaagctattctcctgcctcagcctaccgagtagctgggattacaggcatctgccagtatgccaggctaatttttgtatttttagtagagagggggtttcaccacgttactcaggttggtctcgaactcctgacctcagg

SEQ ID NO: 542624 - DNA, 461 bp, Homo sapiens
atggtagaaaataagacagggtaattggacagaaagtgactaaggatagtaacattaaataagatagacatacatcagtgaaagtacattcaactgcaagaaatgaaaaaaaatacaagtaaaataatgacactaattctaaggtcaaggtggacttcaggactacttcaaatcgacagcttaatgayaacttcaaggggctcagatttagtattactttctttcttttctttctttttttttagatggattctcactctgtcgcccaggctggagtgcaatggcgtgatcttggctcactgcaacctctgcctcccaggttcaagctattctcctgcctcagcctaccgagtagctgggattacaggcatctgccagtatgccaggctaatttttgtatttttagtagagagggggtttcaccacgttactcaggttggtctcgaactcctgacctcagg

SEQ ID NO: 542625 - DNA, 461 bp, Homo sapiens
atggtagaaaataagacagggtaattggacagaaagtgactaaggatagtaacattaaataagatagacatacatcagtgaaagtacattcaactgcaagaaatgaaaaaaaatacaagtaaaataatgacactaattctaaggtcaaggtggacttcaggactacttcaaatcgacagcttaatgataacttcaaggggctcagatttagtattactttctttcttttctttctttttttttagatggattctcactctgtygcccaggctggagtgcaatggcgtgatcttggctcactgcaacctctgcctcccaggttcaagctattctcctgcctcagcctaccgagtagctgggattacaggcatctgccagtatgccaggctaatttttgtatttttagtagagagggggtttcaccacgttactcaggttggtctcgaactcctgacctcagg

SEQ ID NO: 542626 - DNA, 461 bp, Homo sapiens
atggtagaaaataagacagggtaattggacagaaagtgactaaggatagtaacattaaataagatagacatacatcagtgaaagtacattcaactgcaagaaatgaaaaaaaatacaagtaaaataatgacactaattctaaggtcaaggtggacttcaggactacttcaaatcgacagcttaatgataacttcaaggggctcagatttagtattactttctttcttttctttctttttttttagatggattctcactctgtcgcccaggctggagtgcaatggcgtgatcttggctcactgcaacctctgcctcccaggttcaagctattctcctgcctcagcctaccgagtagctgggattacaggcatcygccagtatgccaggctaatttttgtatttttagtagagagggggtttcaccacgttactcaggttggtctcgaactcctgacctcagg

SEQ ID NO: 542627 - DNA, 595 bp, Homo sapiens
atttaataaattaaaattgggagtggaggagtagggcagaaggaaaaagaggaacatctctttagcatttgttcattctaacattcacatgtttgcttctccatggaattgttttactatgaacaggttcactaaggagccaattatgtccatgtgaaatgagaataaaagtgcaaactcattgagatcaggttcttctgaggagtggtgcttttgaaaaaaatatgtaaaataaaaatagaaacactctttgtcaaatacttaaattgcagccacagtagtgggacagccactacttatagaacacatgtctatttaaaccctttttttaggccaaagactgacacctatgcaattgacctaggaaaagaaaggataaaggaagraagagaaagaacacttcatgttagacaattcagtcaccttcattggttttgacataattagggactcagaattgctcctgctgaggcaatgggagccccactcaagctgaaagcatgaggaggtgaggaggcaattgcctccaggtcctcagggacagatctttgtctttccccaaatcaagcatacaactacaaagtcctgctgctcc

SEQ ID NO: 542628 - DNA, 595 bp, Homo sapiens
atttaataaattaaaattgggagtggaggagtagggcagaaggaaaaagaggaacatctctttagcatttgttcattctaacattcacatgtttgcttctccatggaattgttttactatgaacaggttcactaaggagccaattatgtccatgtgaaatgagaataaaagtgcaaactcattgagatcaggttcttctgaggagtggtgcttttgaaaaaaatatgtaaaataaaaatagaaacactctttgtcaaatacttaaattgcagccacagtagtgggacagccactacttatagaacacatgtctatttaaaccctttttttaggccaaagactgacacctatgcaattgacctaggaaaagaaaggataaaggaagaaagagaaagaacacttcatgttagacaattcagtcaccttcattggttttgwcataattagggactcagaattgctcctgctgaggcaatgggagccccactcaagctgaaagcatgaggaggtgaggaggcaattgcctccaggtcctcagggacagatctttgtctttccccaaatcaagcatacaactacaaagtcctgctgctcc

SEQ ID NO: 542629 - DNA, 687 bp, Homo sapiens
tttgatgcagatggtcacttcatyagcataaacactaagcagccagttacagggtgttgccctgcctccccagccctcttcctgagccggccttcaggctatcaggcaatatattttaagcaaaaagatagcctgctcataccactctggaggcctcttttgtgagacatgcagccatttcttttacgaaatcctaaaagagtgacaagtttctgggttcatgggacttaacggccagatgaagagactcacctattcctaaataaggtcatcagaatgcttgaaacttgtaatgagagctggcaggctcctcagctccccttccgtgggttgagcctctctgtatttgtggcaggtcctgaattagagaaatgggctctcacagtgacactgagctaaggcttggtggtccacagcctcattttgacaactcacctcccccagcacaaagaaaggaccctggggagcagggaaagcctagggatgcagggctccaaattttaaagtgaaaaagaaatgtaagagacaaacaagtccagtgggttttcaatattttttagtaggatatctcattttgcaaataacaccactgagtgagtgctaaagtatagaacaggaaaagcaaaactgttttaaaggagagtctggggctccagagccccatccacctgcctccatccccatccc

SEQ ID NO: 542630 - DNA, 575 bp, Homo sapiens
tccagcctggatggagcaagaccctgtctcaaaaacataaacaaataaataaataaaaattcaatttagttaacatatattgggtttattcttgatattttaagaaaattataacatatttttaaaatttttctgcttcagttcctagtatgrtgtcaacatatatagttcaatttgaggactgctggattagagaatggtactagaggaggtaggagagggcggaacccataacagaagtggagaaattcatctgagataagggagggatatttctccagtaagaaacagaaggaggggatgacacagatgtggagacatttttagatttggtggcaggaatttgaaggatttccctttgaaggtttcttttcattgtgatgtaggagttgaaatcactggctaaacataagaagaaagtgcaggggataccaggagtttgagcagccaggggagtggctctagggtacctatcagagccaagcaaagggaagacggagcagcatcagagcccccaggttggggggagtattcctgaatcatggataaatcttcagagagcattaccctgcgga

SEQ ID NO: 542631 - DNA, 522 bp, Homo sapiens
ataataatatcaaccagcatttacgatatgtatttaatttcttatttatttaatatttcaaccatacagaaatagaaagaatgatatctcaaacacctgcctgtccactcccaacatttcaagaattttartgttttgccataggtaacaaactgaatgtttaaactaatttatttctaggtgttttaaagtgtcctaaaatactttcttagttgcttagtccactctttatcttctaattttataaatgttcagttattcagttctacttctgctgttgattttgaaatctaactctactagatggacaacacactaggaattgtacacagtacacacacctcgatcaagatttcaagattgaggtgctcactgaaagtgaccaccttgccatctttagcttcagagagcaaacaattttactgggaaaatggttaaatggatctgttttcactttctcttttaaaagatacaatatggactgttgactccatgtattatgtagtgaggatgtgatgcaac

SEQ ID NO: 542632 - DNA, 472 bp, Homo sapiens
actggggtctcactcttcctttggaaatccagaaggtgacagaaaggatgatacactgctttgatgctgcacagggatcagcctgcgtgcctagagtttatcagaagacatgtgagtgtttttcatggaagaaagggccaaactggaaccatcctaattcctgctgtggagcaaagggagagggctgatggtaggacttaaagatcaatgcatcccctccccttctcatcttgagaattgcaggtaaagagagtccctaaggatgagaattccaaaaaattgaaaacagaacaccaactcatgagggtaagagttcagctctaataagttgcttgacccagatagctcaaagccacctaaccactatttttatttgctraatcggtcaactgtttgcttccttcccttcttgtccatagctgaatgagctgctgtccagcgtgaaagagtagggagagagcagaagctggtc

SEQ ID NO: 542633 - DNA, 623 bp, Homo sapiens
ttgggggtttagccatgaggaatactaagtaatcgatatttggctttcttttattagatgagcccaagaggcaggtatgatttttctaaaagtctacttagctcagttggttagaacatgatgctaatgagaccattatcttggtctcattttcttgtggtttaactttgcatagaagaaatttcttccatgctcacagaatttactcatgaagagaaacagtgtggcctgctcaagacaaagccatcatcacctctgggaaaccaaatcacagagcctaagctgttcctgtgtttctcacacctgttccttctttccattctgggaagaaaagtttagtgacctgtcacagcttgtttcagtaggcttctaatattctccgtgtctctagtctcttcccatcctaataatcytacacatgaaggccaggggcagctctattcatgccatcttcatcgatggccctgaagttaaaacccaatatctttgtatttaaagccttctgtgttcgatccctggttttccttcctatcttgactcctcatcctctttatcatttaatattgcactcagattgcataacccattagccctcaaattttctccatgtttctcacctttgt

SEQ ID NO: 542634 - DNA, 623 bp, Homo sapiens
ttgggggtttagccatgaggaatactaagtaatcgatatttggctttcttttattagatgagcccaagaggcaggtatgatttttctaaaagtctacttagctcagttggttagaacatgatgctaatgagaccattatcttggtctcattttcttgtggtttaactttgcatagaagaaatttcttccatgctcacagaatttactcatgaagagaaacagtgtggcctgctcaagacaaagccatcatcacctctgggaaaccaaatcacagagcctaagctgttcctgtgtttctcacacctgttccttctttccattctgggaagaaaagtttagtgacctgtcacagcttgtttcagtaggcttctaatattctccgtgtctctagtctcttcccatcctaataatcctacacatgaaggccaggggcagctctattcatgccatcttcatcgatggccctgaagttaaaacccaatatctttgtatttaaagccttctgtgttcgatccctgsttttccttcctatcttgactcctcatcctctttatcatttaatattgcactcagattgcataacccattagccctcaaattttctccatgtttctcacctttgt

SEQ ID NO: 542635 - DNA, 307 bp, Homo sapiens
ctttccctagtgcatattccttctttaggaccctgacaccacaatacctagtctgggtagtatgttactctccacataaaattccaacccaaaatagaaamgaatcacctaaagatggctttgttttccttcactcgcataagaaagacagactgaaattttgaaaaatgtcaacacctaaggaaaaatgtaacttaaaagtatgaagaaaatacacaaatcatacaaaaaaagaggcatgaatacggttaatcttatgaagtacagggttctgatttaggcatgaatacctaagtgactcatgcaa

SEQ ID NO: 542636 - DNA, 307 bp, Homo sapiens
ctttccctagtgcatattccttctttaggaccctgacaccacaatacctagtctgggtagtatgttactctccacataaaattccaacccaaaatagaaacgaatcacctaaagatggctttgttttccttcactcgcataagaaagacagactgaaattttgaaaaatgtcaacacctaaggaaaaatgtaacttaaaagtrtgaagaaaatacacaaatcatacaaaaaaagaggcatgaatacggttaatcttatgaagtacagggttctgatttaggcatgaatacctaagtgactcatgcaa

SEQ ID NO: 542637 - DNA, 546 bp, Homo sapiens
actatcaacaacctacttaccgtgaacacagcccaagaaagggcagaatgacctcctccatgcagaaggagcaggactggaccctctgaaccactcttgtagactcgaaaagtgtatgaatagttaaagataaaacatctatgtttttgctcactaaagtttttcattatttaatcatagtaataccgctagaaacttacatgcaaaactgcagactgccaaatgtaagagatgtaagcagacttttctgagacactaaccctctgtttgaagcatgaagcctgtgtgaccattttgttcaatgaaaaaaaaaaaaaattcccttkgccctcatgaggacataacccctggattctagaaatgaaactagttcaactcacttgactcatgaaaccttcccctgggcccctaagacagtatatcagtttcaagaatttaattcttaatcccttctccatgcattagagaattacagccaagaaagatattggcatggacttccaggcaatattccataaagaacaagtgaggaataaggtgaaataa

SEQ ID NO: 542638 - DNA, 534 bp, Homo sapiens
tccacaatattttaagttctgggcaggacaaaactgcctttccccttcccagattaagtcgagagtgtcagccctctgcctaggttatctcaacaatgctagccaagtgctatgctgacaatgcagcctttatgtgccagttgcaagcattctgggggtaaaaaagagtggtgaagatctgtctgggctactaattgtagcaggccagagtgaagtggacagtgtggtggggagtgaggtgggtgaaaagagcagacagttgggtcgggatgtgcacagcagaccctaagcaccttcaggcagcaacgaattcccatcagcaacttgtcccttgggcagcagtgagacacagcctggaagggaagaaaggtggcgggaacctgtcatagatgcctcgcttaaccccacaaccgtcccaggaagctggcactaytgccttcatcgtacaaaagataactgatacacggtaagggccaagtcactcgtgagacccaggccccatccctgctgtgggcatgtgtgcattcctgagca

SEQ ID NO: 542639 - DNA, 537 bp, Homo sapiens
gtgttcacaccggagcggggcagggagttccgcagggctgctggctccctttgaggaatggttactgagcacttcacaggaactgccttccgaagccctcacgatctctctatggggagggctctggtattaccctcagaaagctgaggccaggagagaacagtgaaggcccgtgccagggtggccaggcaggaaggagcagagtgtcccttccccagcatgtaatgcctctaagcatcttcaagggaggctcaggagtgactgtgataccccaaacccagcaggtcaagagatgccacggctcaccatgcttgtccataaccaccctggatggaggaaggacacaaagatctgattgcatctcctgggctgtgcaagggaggaggggaactgcaggaaggacttgggccaggtgcccaggcaacccttctcctagcagtgggcgtgcatttggaaataaaaggaagacatggcaaggaatgcctggtamcattacaggcatcaaaactgggatctgtcttcctgggtcacagccca

SEQ ID NO: 542640 - DNA, 440 bp, Homo sapiens
gcttcagttgcagagggtccagggagggaattgatttaatggacacattgccagcctgaaaaaaatcagagtcctgttgctgagtggggaagagggcatggatttggggtaggtgcccagcagtgcccggagaagcaggcctccagcaccacagtattggcattgctagttgtaacatccttctttgttgcctgtatttaacattctgtcaaacttttctcattcctttagcattccacacacaacataaaattagatttaaaagttaaattgagaatttccagggactcctgataagtttcttaggtcaactacgtagaacagaacactttccctgaagagtggggaggcatgtatgccacgtgtccctgggagcccagtgttcaaagctgacaaccctacccacaggrattgcccctcctgatcaccaggatccaaaa

SEQ ID NO: 542641 - DNA, 476 bp, Homo sapiens
ctgcaaatattcttttgaaagcatactgacatatcttccccaaatgcatactacacacacacaygcacacacacacacacacacacacacccacgtatacatgaaatgactattttctgtattcttactgaagctgaaatattcttttgcagtggctagaatggtctcgagttaaactgtaattcaatcaaatacgtaagaaattatcttttgccacaaacatcaaggagagaaattgtcttttgccacaaacatcaaggagattaaaaatttgaggacaaatgacatttacagacactgtcaattccctctcagctcggagctgttctgtacttcacagtttagacaatcattctgtaaaggacgggagatacaacttttagttaaacgtcccaggataaagtgctgaaccacaactctgcaggaggatatctctcatattgcctctggaaataccacaacgtagataatagcaa

SEQ ID NO: 542642 - DNA, 608 bp, Homo sapiens
gctggaagtgatcttggccttgcctctgaactcatgtcggatatgtagtcccttcaactcagatggcattttacatttactgcctggcatatttagtcatctgttcacatgtgtatgtctgttttcaaaaagcaaataataggattttcatgaacaggaagattaccatcctctgttctttccctcggtgccttgcatttgygggctgatgggaagcaggcagagcatgcagggagaagcctgcagagtggcaccccacctgcagaggtccacctgcagcccaggatgctgagggagcaaatgcatcccatttcatttttgtggggaatgagcttgcattcatggtgaatctctgataaaaggtgtgtagtgcatgtatatgtagacacaaacacttcaggcttggccaagagcaccacctcttgaggggtaccaaaaggaatgtgtttgtggccttaattcgggccagcaagaaaaagccacttggctgtggaagtaacaagaaccttgaaagaaaacaatattaagggtaagaggcagggcctccagcaggtatgtgttaaatgggatggtggcaagttcaaggccagaaatgccctaagtccagg

SEQ ID NO: 542643 - DNA, 641 bp, Homo sapiens
ccacagctggaagtgatcttggccttgcctctgaactcatgtcggatatgtagtcccttcaactcagatggcattttacatttactgcctggcatatttagtcatctgttcacatgtgtatgtctgttttcaaaaagcaaataataggattttcatgaacaggaagattaccatcctctgttctttccctcggtgccttgcatttgtrggctgatgggaagcaggcagagcatgcagggagaagcctgcagagtggcaccccacctgcagaggtccacctgcagcccaggatgctgagggagcaaatgcatcccatttcatttttgtggggaatgagcttgcattcatggtgaatctctgataaaaggtgtgtagtgcatgtatatgtagacacaaacacttcaggcttggccaagagcaccacctcttgaggggtaccaaaaggaatgtgtttgtggccttaattcgggccagcaagaaaaagccacttggctgtggaagtaacaagaaccttgaaagaaaacaatattaagggtaagaggcagggcctccagcaggtatgtgttaaatgggatggtggcaagttcaaggccagaaatgccctaagtccaggagttgtgagcacaggcattcccacactg

SEQ ID NO: 542644 - DNA, 608 bp, Homo sapiens
gctggaagtgatcttggccttgcctctgaactcatgtcggatatgtagtcccttcaactcagatggcattttacatttactgcctggcatatttagtcatctgttcacatgtgtatgtctgttttcaaaaagcaaataataggattttcatgaacaggaagattaccatcctctgttctttccctcggtgccttgcatttgtgggctgatgggaagcaggcagagcatgcagggagaagcctgcagagtggcaccccacctgcagaggtccacctgcagcccaggatgctgagggagcaaatgcatcccatttcatttttgtggggaatgagcttgcattcatggtgaatctctgataaaaggtgtgtagtgcatgtatatgtagacacaaacacttcaggcttggccaagagcaccacctcttgaggggtaccaaaaggaatgtgtttgtggccttaattcgggccagcaagaaaaagccacttggctgtggaagtaacaagaaccttgaaagaaaacaatwttaagggtaagaggcagggcctccagcaggtatgtgttaaatgggatggtggcaagttcaaggccagaaatgccctaagtccagg

SEQ ID NO: 542645 - DNA, 595 bp, Homo sapiens
aacctcaaaaaccatttgctgtgactctggctgtctttttctgagtcttgcattaagggtaagagatgtgggacttgacaaacacacattgctctatctggaagagttacttttccttatttctgtactacttcccacctctgatctctactagtttccatttccaaattccattatacttggaaatcttactttttcctggcttagtaggaactcttaaaagcttttgaaacagggatgaaagtctatatttcccctaactcccatcttcaccaggttattcaagaagaaaactaacaagaaaaatggctgagccaaaccaaaggaaaatgcrtgcctgcttccctagacctccgtgtaaacagagaggttgcttcaagggaagaatcccacagtgggcctggggagcacactcctgtgtccaggctgatgggcagcctgggagcaaagactatgggcagaaccagaggagagaggagaagcagcaacctcctcttacgagtttgccagacataagtgaagtcttgtttggacaaaaaagagcagtaaataatatccagaaagagctggacttccgtggtttggggaaattttg

SEQ ID NO: 542646 - DNA, 505 bp, Homo sapiens
catcagtactactcagacacattgaaaacctggtcctgtgtcaagtcccatgaagggaatccctaagggaatagagaagagaatgctatttaatgatttgatgcatgatagtaaccacaggagaataaaacttcgaaagagtctttataaactgggtttaatgaaactgatcatttccagttctattgtatatcatttactgccttagctggcaagactctagaaatagaaatagagaagattcttccttctcatatgtgtacattttaatatcttgaatatagaggactacttatagaattcagtgaagtcaccaaaggttgaataattagctatttctgccctttactagttgttagatttawcattatcaacctttgcagtgaaaagtagaaaaaatacaaactgcaccaacagttgggctagtcatacattttacacagtgacaatatcccattaaaatggtattcttaaagaggagatgtgtgaattaatatgcagtggc

SEQ ID NO: 542647 - DNA, 604 bp, Homo sapiens
aaaaaccaaattttattggtgttctaaaggaatcaaatgtattattctgctgaggactggggatactttcagaaaagatgtggcatgagaggtggacttggaagcatgtgacaaatttgacttctggaagagggactaggggaggccttttttaaatctatatttattctgaaaataaaagatagtaattccgtagatatataaaaattgtaggatttatgggttaagatggtctcctttaaaaaatgaattattgaggggtggatcaagatggmagaacagaagtttccactgactgtctccttcacagggacaccaaattcaacaagcacgtgtgcacatgcacacacacacacacacaaatacctccataagaaccagaatcaggtgaatactcacagtatctgatttaaacttcatatcgctgaaagaggcactgaagactgtgggaaagacagtcctcaattgttgacactataccttcccaattccccctgtagtagctgcaaagcatggagaaatttgtacactggagagaaggagactgcagtgattgtgagactttgtattgaactcagtgctgtcctgtcatagcagaaagcaa

SEQ ID NO: 542648 - DNA, 665 bp, Homo sapiens
gctgggggcagtagagatgagggtgtttgcaggggcgtactagtagaagggcagagaagatcatgtgttcaaaaggcccagggagaaaagagatcatggcatatttaacaaagtgaaagtaatctattataactggagcagaaagtaaagggagtgtggtattgtcctttatcctacagcactagaaaggtattaaaatattctaagtaaatgaatcactccatcaaatggaaaaattatgaatataaaatttggacttctattattaccattttgaactaaaactttatgttgatgtgtttattttctaaagtttttctgagaaataagcacaagaatgaatttttctcaaaattttttccgaagtttattttttacttctaatttaagaaaatagctgaattgttcgsaattttctgtcatgttttgctgtatattaaagtaataacatcttttaaaaggaaattggcaagtgttctttattagcaattttataaagatagaaccattttaaattgattgttgccaaaagtagaatacaaaaagtatcacagaattatgtgaataattaggaaataaattttacacctctttatgtgtatgtatgtgtgtattcttactgctggaatttcttaatctctgtcagcaatagcacttactttcaa

SEQ ID NO: 542649 - DNA, 571 bp, Homo sapiens
ttcccttaaaaagattacagcagggatttccagatcgaacccacccccacctctagagtttttggctgttttctaaagtcttgaattcaatgaggtgaaggaggaagaaagtgtttaggaagtcagtgggttccagaagagctggtgctgggtggggcagagtggtgagagatgctcctttcaaatggaaggctctggaacccgccaaaagggagtgcaagctggggcaatcttcctggacagccaccagagaaaggcgtcagaccccaccctcccgctgacatccacagacagggacatctcactggcttttaaaatcatcaactctttttatattgacacaaagaaataatgraaaggggaattctggtttacagtcatttcattaaattatccaaaacaacttttgaaacaaaagttataaaagtgaaactcaaaattattctctgcttaataaatactctcagtggctcagatatagttcaggcaaactagccattgatgcagccaaagccagggggtggagggggtcccggcgtgctccaggaggcctctccggtgagtccggcag

SEQ ID NO: 542650 - DNA, 314 bp, Homo sapiens
tggagtgagagtgggattagcagcgtggagcttgcctgagctcccaggcacctgatggatgctgrcagctaaaacctccactaaaccctagggcccctggtcaccatttgccagaaactctacaaagtgctttagaaacactgttgttatcccatctcacatatgaggactgaaggtcagagaagctaagtaactttcctaaggtcacacagcaagtaaacgggaagatggggacttgaacccagacccatctgactccaaatttatacttggcccactataatggaccagaaaatggtccttattttgtaata

SEQ ID NO: 542651 - DNA, 511 bp, Homo sapiens
gtcagctgtgagaacccaggagagggaggcccagggacagacaggtaacagctcttatttgcatgcagtggctgtgcccccatgaaggttttaggatctgtaaggcggctttgaaggagcccaagctccaaagcagtgtcaggaagtgggagttgtgtctgcaccactccctgggctcctgtcctcatcctgctcaccccctgcataggggagggggaacctcaccccactctgcttcacacacctctctcctcaggggggctgtgattctgacctacagtccttcstctctgtttagggtagctgtggcccaggcagggccggctcagccataaacatacacacacacacacacacacacacacacacacacgcactgaataggcaactcactgaaatagaactagttgattaattaaagcacctatgggatttttcacaaatcaaattagtatttttattaaaaaacttttagtgctattgagcctacataggaagaggcctacttatg

SEQ ID NO: 542652 - DNA, 511 bp, Homo sapiens
gtcagctgtgagaacccaggagagggaggcccagggacagacaggtaacagctcttatttgcatgcagtggctgtgcccccatgaaggttttaggatctgtaaggcggctttgaaggagcccaagctccaaagcagtgtcaggaagtgggagttgtgtctgcaccactccctgggctcctgtcctcatcctgctcaccccctgcataggggagggggaacctcaccccactctgcttcacacacctctctcctcaggggggctgtgattctgacctacagtccttcgtctctgtttagggtagctgtggcccaggcagggcyggctcagccataaacatacacacacacacacacacacacacacacacacacgcactgaataggcaactcactgaaatagaactagttgattaattaaagcacctatgggatttttcacaaatcaaattagtatttttattaaaaaacttttagtgctattgagcctacataggaagaggcctacttatg

SEQ ID NO: 542653 - DNA, 451 bp, Homo sapiens
ctgccttgagggattggatgagccttggccagctcttgaaggtaaaggaaagcacctacaaagattggcatctgggcttggctgtgcatgttttctattctgggaaaatatacataacacaatatttatttgaaccttttaacaaatgtgtgcactcagtggcattcaatatattcacagtgttgcataaccaacactactatctacacctgaaattttgattatttctaacgaaaccttgaagacagtaagcaatatacttcctttccccctatttccagcccatggtaatttctttttcttttcttttttttttttttttttagggaaacaataaaatcaattttaaatgtgcttacttttcatktggaagtcgttacagtatcatttgcaaaactcaacaaggaaagatgcctgtggatggccgtgttctgggagtcactgtgatgag

SEQ ID NO: 542654 - DNA, 451 bp, Homo sapiens
ctgccttgagggattggatgagccttggccagctcttgaaggtaaaggaaagcacctacaaagattggcatctgggcttggctgtgcatgttttctattctgggaaaatatacataacacaatatttatttgaaccttttaacaaatgtgtgcactcagtggcattcaatatattcacagtgttgcataaccaacactactatctacacctgaaattttgattatttctaacgaaaccttgaagacagtaagcaatatacttcctttccccctatttccagcccatggtaatttctttttcttttcttttttttttttttttttagggaaacaataaaatcaattttaaatgtgcttacttttcatgtkgaagtcgttacagtatcatttgcaaaactcaacaaggaaagatgcctgtggatggccgtgttctgggagtcactgtgatgag

SEQ ID NO: 542655 - DNA, 558 bp, Homo sapiens
ctggttggaaaaagtagtctacctcttttcaactgtgtgactggagcaagttctgaaacctcttgactttacatcttcaggracaaagtgggaataataacagggtaattgtgaggattaaataaaataatacctatggagagcacttactttctctggcacattctaagtgtctggtaagcattaaccagtcagttcatgggagtgggttggcattaatgccagaaccagggtttattttagtttgattcccaagtctaactctttcatgaccccagacggtctcctaaaacaattgtttctcatcctgagaattctttttttttttttcatgcactacttataaacttgatggaggcaatttccaatcatcagtaatctgaaataggcttggaaagatgacatatggccttatattaatatattaaatctttggttgccaagttatttgctttaatagtttttcccctctataggttgaattgttttaagttctgcaaatgtaatatatgccgttctctctgagtgcaaaagcaatacaataagtattagttagaa

SEQ ID NO: 542656 - DNA, 619 bp, Homo sapiens
tcccaatattcttggtccagctatttaaagtttgtgttagttttactgtattaaaatatattcatattttaagtttattttgcaatatatcttggaaaagaaaatgtataagaaatattagaaaaagaccaataaatatatattctattcatttctttatgggtgtaatttatttctcaataaaataccaggataattttaacaccatttatgaaagaagaaascaggtttcctccggacatttgactaactttcccaagcctggataatcaaagttctttttatagtttagacagggaaattcctagggtgggtaagagcttcgggctaataatttctgtggaacccctgtctggataaacatattgagtcaccgaattcctgtgcccacataattcctgcagccccacctcttgaaatcccacttgatgatggtcgttagtggcggcaaaagcaatagagagaccttccttgttgtcttcatcaggtcactatgaagatgaaacacgaaaagaataaccaggagggttccagagacagtaaaatctgtataatgtaaggtattctgtcactgtaatttgtcacgtctcctctaaatagctggataaggtcttttctt

SEQ ID NO: 542657 - DNA, 641 bp, Homo sapiens
ttctctatcccccagtgccattttcacasaacagcaggataagcgctcaaacactttgtcttagtctaagtcatctgcaccattctatctgctcccaagggagtaccagaaattgaaaccaaatatgccccaaactgaatgcaaatgcagtgagaaatatattagaaagggagctctaaccagtctcatacatagactatttatatgaatgtattcatatacatgcatttaaaattaaatgagttaatatttgcaaaacactgtaactttgcctgtcacatagtaaatgcacacaaaatattagttgctattattttaacatgatgatgatttcatgtaattcatgattacctaacacataattcctttattcccgtttgccaatataaatgacttgtctgagatctgacagctagcaagttagggaaataaagattgaattttgatcccttgaacatatttctttattggtcatccctttacttagccaatattgagtgcctgctatgtgccagccactgttccagtgctggacacatacagatatataggacttggtgcttcttcctgtggagctccctctctaaaagaaaagatgggccagcaactagctgctgcaatgccatctggtcagagctgca

SEQ ID NO: 542658 - DNA, 581 bp, Homo sapiens
aagtgttatgcactcagaaagtggttaccagcctggtgcctctcctttgcctttgagcgacccaatgcttgtcaccctcttgtcatcatcatctctgtgtgtgtgtgtgtgtgtgtgtgtgtgwgagagagagagagagagagagaaagagagagagaaaggagaggagagtgtttttgaggcagtatgatccgtggacagaacacccgtgctggggtcagacagctctggggtctgggtttgaatgtggttaggctgctcaccagttgtgtgacctaggtgaggcacacaatctctcagagcctctttcattatctgtgaaatggagacataatgataactatctcaagggttgttggaggacacaagtaatgtcacatgcttagcacagcacatagtaagaatttgacacataggctgggtgccgtggctcacgcctgtaatcccagcactttgggaggctgaggcaggtggatcacgaggtcaggatttcgagaccagcctgactaacatggagaaaccccgtctttaccaaaaatacaaaaattagctgggcatggtggcccatgcctgtagtccca

SEQ ID NO: 542659 - DNA, 391 bp, Homo sapiens
tctccctctctctcctgctatgtaccaccatttcctttgataattatgtaccaccatttcctttgataagaagaaactggggttctccaaagctgcagaatgccaagggtctctgccgaagtctcttatctctttttcttccttctcttaaaacttgaactcacaccacacctcttggctgtatcttttgggtggaaccagccttacagatcaggtgtctccccagcttttctctgggccctgttctcctacccctaatactgggttgagaatacacagaaatacacaaactcagtttctcttactatactctcacaacacwcttctgatgccagatgtgtgggtgttttgccccacactttaagcaagcaatcaattctgcagtggacgc

SEQ ID NO: 542660 - DNA, 639 bp, Homo sapiens
gccatgagaaatcaggagggattggaggacatggggaacactggaacatgagctgttttctggtccctggtcccccttacctgtagtcacaacagtcacatttaaagggccggtcctcactgtgacgaaagcgcatgtggttgcggagggaggaaggcagcgggcaggtcatgtcacacagagggcacttatagtgattcactgagagaagcagagaggaggctgtgatgtgagaacttgtggaaccttkgagggcaggagggaggctgtgggccgcaggccactcaccatggttgcgcatgtggtcccgcaatagccgctctgtggcaaatctcttggaacagtgagaacactggaagtgctgctctggggtggggcaggcagaagaaaggagggctgtaggtgatagtggagaggcacagaaaggagaggggaaccatcccaggcagaagggaaccacccaaggagaaaaggagagcttagggagctatgaatggacacagtatcatggaaagagcatgggacttagagaacctgagttagaattccagcttcaccacttactagctgtgtgatctcaggtaagtgatttaacctctctgagcctcagtttcctcatctgcaaaaagggggataaga

SEQ ID NO: 542661 - DNA, 632 bp, Homo sapiens
cctcgcagtgacccttcttccacttattcattcgacagtgttaactgagcattacttatgtacttccctctgggaatacaaatgtggcggtggggagagagacagggtccctgctatggaaaagttgaataatcacacaaatgtgaaattatcactacgtcacatgttgtaaaggtgaggggacaatgcctgcagaacatgcatggggggagattcaggctactgagggagacccaagaacatgtctcctaaaaagtgatgcttgaactgaaacctgaaggatgagttcagtgcaagcatcacttgaactgaagagttcagagttcactagctggaggggaaagaacattctagacagaggcaacaacgttcataaagaccttgaagtgggagagtgcatggcaagttccggaggagggcaagcatcactggggctcaaaaagcgagagggctcagggctcagacaggctgcagaaggcagggttgagacaggcgcagggaaagttatggagccagcgacaggtttttaaagaaacaggtaatgattaggttggattttaagaagaaccctctggctgcaayatgaagaaagaactgaaaggagacgtcactaggaacagggagatgttttt

SEQ ID NO: 542662 - DNA, 594 bp, Homo sapiens
tgccctcactgttttaaataaagaatcttacataagaatgttgacaacattcacacgtaagccattggcagaaaattgatctgcatgtcctagaccaatgattacaacgtgtctgtgggtctgtggtttagggggcccagcccatcattccttttccccttggcactcatgagagagaygccaagttcagtgtggatttttcttggtgctctatggagaaatggagtctgtgtgcttactgaagagtcccaaaaaccagagaccattttcatttactgccatcataaatattctccaccattcaagatgcctgtgtacacggctatttgggaaacttaagtgttggaggaggcaggggctgaaggtgtcaaaacctcctcagtaggataacccctttctcccctttggaccatctgccatctttcatgagtgtttcccatggtgtttttgcatccagagttgacaacaactcaattttgccttgaatttactcagtcttataaattaaaaatgtgcattttatataaagatgcattttatataaaaatgcacacctttaatctctatatggcagcatatacatatatatatata

SEQ ID NO: 542663 - DNA, 600 bp, Homo sapiens
gctgctgtctggttagtggaactaacaatttccttgatggaaattgaataaggtaatccaaaaagaaggctcttttagatgaaaaaacatggatagattattaagcgccaagttttctcttcaacctactgctcaccagtgctccctcctcagctccaaggctgtggagggctcatgaagtcacaatgttctactgagaatttagctttttttttttttttggagtgggtataccattttgtaattccacttgataatggcatctgattatttgatcatgacatcattatttgtatacaatgcagcaagaattttgtttttaatgtaggcttttaaatgggctttgatggaacttggtcccatagaaggaatcccagataaggcttttwaaaagccgagcccagccatggattcataccatcaaatacctatgagttaggtgaattcctctcgaggttccaagaatctatacaaagaatgtgtttattttgtatgggttcagcacaactcagttcctctttctcattttctgaaacttgaactgctctagtcttacccgtgtgtatagacctggactttgaggttggacagacatgcaaa

SEQ ID NO: 542664 - DNA, 554 bp, Homo sapiens
acttgacaaacctactgaaaatccatctttaaaactagaagaataaatagataagcattataaaaatatgcagggaattagaaagctgctrttaattaatacagcatgggagaagagatatactgaacttttgggcaaatcagacaagtatatattagaatataaatagtatagtggaaaccacaaatcaatgagtctgaaacaaataaatgttaagaaaaatagttttatatttggaaaaaaactgtttggatatgtagctcaaattatatccttgaataacagataattgagttaaatgtaaacactcaaataattaaaaaacaagctagaagaaatagaaataatcttcaatctcaaataccttttataaaataaatgcaaggagaagattggcaaagtaaaactttgataatttggtagttatgaacttaaacctctcatttgccattaaatatgaaaatataaatctccaggaatagacagtaggttgaacaaacatttttacattgttctctccaaaattacactaaaggccagatgtagtcggtcac

SEQ ID NO: 542665 - DNA, 554 bp, Homo sapiens
acttgacaaacctactgaaaatccatctttaaaactagaagaataaatagataagcattataaaaatatgcagggaattagaaagctgctgttaattaatacagsatgggagaagagatatactgaacttttgggcaaatcagacaagtatatattagaatataaatagtatagtggaaaccacaaatcaatgagtctgaaacaaataaatgttaagaaaaatagttttatatttggaaaaaaactgtttggatatgtagctcaaattatatccttgaataacagataattgagttaaatgtaaacactcaaataattaaaaaacaagctagaagaaatagaaataatcttcaatctcaaataccttttataaaataaatgcaaggagaagattggcaaagtaaaactttgataatttggtagttatgaacttaaacctctcatttgccattaaatatgaaaatataaatctccaggaatagacagtaggttgaacaaacatttttacattgttctctccaaaattacactaaaggccagatgtagtcggtcac

SEQ ID NO: 542666 - DNA, 554 bp, Homo sapiens
acttgacaaacctactgaaaatccatctttaaaactagaagaataaatagataagcattataaaaatatgcagggaattagaaagctgctgttaattaatacagcatgggagaagagatatactgaacttttgggcaaatcagacaagtatatattagaatataaatagtatagtggaaaccacaaatcaatgagtctgaaacaaataaatgttaagaaaaatagttttatatttggaaaaaaactgtttggatatgtagctcaaattatatccttgaataacagataattgagttaaatgtaaacactcaaataattaaaaaacaagctagaagaaatagaaatmatcttcaatctcaaataccttttataaaataaatgcaaggagaagattggcaaagtaaaactttgataatttggtagttatgaacttaaacctctcatttgccattaaatatgaaaatataaatctccaggaatagacagtaggttgaacaaacatttttacattgttctctccaaaattacactaaaggccagatgtagtcggtcac

SEQ ID NO: 542667 - DNA, 554 bp, Homo sapiens
acttgacaaacctactgaaaatccatctttaaaactagaagaataaatagataagcattataaaaatatgcagggaattagaaagctgctgttaattaatacagcatgggagaagagatatactgaacttttgggcaaatcagacaagtatatattagaatataaatagtatagtggaaaccacaaatcaatgagtctgaaacaaataaatgttaagaaaaatagttttatatttggaaaaaaactgtttggatatgtagctcaaattatatccttgaataacagataattgagttaaatgtaaacactcaaataattaaaaaacaagctagaagaaatagaaataatcttcaatctcaaataccttttataaaataaatgcaaggagaagattggcaaagtaaaactttgataatttggtagttatgaacttaaacctctcatttgccattaaatatgraaatataaatctccaggaatagacagtaggttgaacaaacatttttacattgttctctccaaaattacactaaaggccagatgtagtcggtcac

SEQ ID NO: 542668 - DNA, 645 bp, Homo sapiens
ctgcattttaaactcagacttatctcatgctgctagcaactgacgtcttctacacacgacagactatactgggctcaatatgagcacggccaggccatatagaggagttaggtccccaggagcccccacaaatactgagggattagagctaatagagaaatactacaatggtccttatctcaaatgcgtaattctggaaagcatcctagatacttcctagaggttgcctggatcaagcccccatggctcacacaaattatctcaaaaatattctgatattggctgggtgcagtggctcacgcctgtaatcccagcactttggaaggccgaggtaggcagatcatgaggtcaggagattgagaccatcctggctaacacagtgaaaccctatctctactaaaaatacaaataattagccgcatgtgtactaygcgcctgtagtcacagctacttgggaggctgagccaggagaatcacttgaacctgggaggcggaagttgcagtgaactgagatcgcaccactgtactccagcctgagtgacagagtgacacgccatctcaaaaaataaataaataaaataaaataaaataaattctgatattaaatcttcctacttcttcatctcactttccttgtctcctcac

SEQ ID NO: 542669 - DNA, 626 bp, Homo sapiens
ctgagaatctctactgaagacaatcaaaaatatttgggaagatttatgtcaacatctgaagcagcaaagaatatttaccttcatagactgtagcaatgattttgaatgaacctgcacatgccacattttaacctrttaatgaggatcatgtaggtgaaataagacttttcttgtcttattaattcaaatgccaaactaggcacgttgacagtttgcttattaaactgactccagactcaccgtacacagagatctgtggactacactttgtttactttacaagaattttgtttttgtttaaaaatttctgagatgtttatttaaactgaatttccatagtgagaataaagattgttaaacagaattctgcattttacgtgaaaaacagcttgtaaatatggattatctttccatgtattaactatattaataaactcacattgctaaatatgtaattaatacatgatcaaatatcctggaatgccccctcttctctctgattacatgaacctaatcaactttctatgattaatgtaaatccaactttatttctgaattcacacaccccatctcagactggacaaatctctccctaccccaaactcataatcattatgatcttatct

SEQ ID NO: 542670 - DNA, 646 bp, Homo sapiens
ctctactgaagacaatcaaaaatatttgggaagatttatgtcaacatctgaagcagcaaagaatatttaccttcatagactgtagcaatgattttgaatgaacctgcacatgccacattttaacctattaatgaggatcatgtrggtgaaataagacttttcttgtcttattaattcaaatgccaaactaggcacgttgacagtttgcttattaaactgactccagactcaccgtacacagagatctgtggactacactttgtttactttacaagaattttgtttttgtttaaaaatttctgagatgtttatttaaactgaatttccatagtgagaataaagattgttaaacagaattctgcattttacgtgaaaaacagcttgtaaatatggattatctttccatgtattaactatattaataaactcacattgctaaatatgtaattaatacatgatcaaatatcctggaatgccccctcttctctctgattacatgaacctaatcaactttctatgattaatgtaaatccaactttatttctgaattcacacaccccatctcagactggacaaatctctccctaccccaaactcataatcattatgatcttatctaggagtcttaatcaataagtcacaatat

SEQ ID NO: 542671 - DNA, 610 bp, Homo sapiens
tttccagtcaaatctttgattctgttggtgagaaagctggggctcaggagaagacagatgagtcacttatctcagtaaatcctgccttaacacaaccatgtaggtttttctgggttttttgttttgttttgtttttgagacagagtttygctcttgttgcccagcctggagtgcactggcgcaatctcggctcactgcaacctccgcctcctggcagttgctcccttcaagcaatcctcctgcctcagcctcctgagtagctgggattacaggcatgcgccactatgcccagctaattttgtatttttagtagagacagaatttcttcatgttgatcaggctggtctcgaactcctgacctcaggtgatccgcccgcctcagcctcccaaagtgttgggattacaggtgtgagccaccgcacccagctgggatgtttgttaaaagtatatatattcttgaaaataaagttaattcattaaattaaaaaagtttgtttctaggctctactccaaaattacagaatcagattctccagaatcttccttcaaataggaaacacctaaataagatgcaaacttaatttttctacaatgcaacaattttgttaaa

SEQ ID NO: 542672 - DNA, 632 bp, Homo sapiens
tccctccagtcttctgtctcttcttttcattgtacagcaggagcttttgaagcaccccattagccttataccagtacagggagtttttttaaaaaaaaacaaaacacgagcacaaacccacctttcattagttaaatccttgagcggtgcagtatcacacagattgtgtgtctgtagtcttagcaggaagattgggaatttggcataaaccatgccactgtttccgtgaacccaagttactttttcccagattactctggttttgtttggtgtgccaccagaagtcgctgtgtggttctttgctttgtgtacatgagcacatctcttgcccaaatagaattcagtttatcccaggcataaatgctgaaattttaagaagagctgtgtgccccctttggttctggaaaccccaygtacagccagcaaaaatggccttggaccacagccttcctgttcccagcaagcctccacaggctccaagatggcagacagagtccttcttagatcctaggtggtaggcacttgcttgtaagcaagtgcctcccattcctgagttcctgcagggagtttggttgtaaagaagagggatgggtttgtccatctattctaccaaaatttattcagcccagctg

SEQ ID NO: 542673 - DNA, 562 bp, Homo sapiens
aagttcccctaggtgccagccagttgctcccttcagcacggacattccaatctcagggcaaaagggaaaaggccttcaagtgtttctcacccagaagctgctcccttccacacactgagtactatgtttattaagaagcactgaggcctgtaatcccagcactttgggaggcggaggtgggcagatcacctcaggtcaggagttcgagaccagcctgaccaacacggagaactcctgtctctagtaaaaatacaaaattagccgggcatggtggcgtgtgcctgtaattccagctactcaggaggcagaggcaggagaattgcttgaaccctggaggcggaggttgcagtgagctgagattgcgccattgcactccagcctgggcaacaagagtgaaactccatctccaaaaaaaaaaaaaagcactgagcaactctcctgtcctcccacagggctgtacttcaagctgtgggcaagcccttaccatcgcctccgtgcatctgtcttccccsctgagctgtgcagagctgggaccaagccttcttcatccttgcctgacact

SEQ ID NO: 542674 - DNA, 537 bp, Homo sapiens
ctgtgccctgtctgacctcatggccacccacaagctggcaccccccacaggcctcttggggaagcctgtactttccaccgccggaggcgggtaccgcgtggaagccaggctcaggcggactcattctttttgaactttgggaacaggcctggtacaggctgagttctcacaagagacacacacccgtgtcactgtctcctgagctgtgccggacccgtcctacagactccacctcctctaggtcctggccctggcatctgccagggggattttaaatgagttgatatatgctaagtgctttgaaaggcgcctgcacggagggagagctgtataaatattcactattggtaatatttctcccatgctgttactctccaaagctgcccgataattctagagtgggttccggggacgtgcccgctgtttggggcctagaaatgaactygggaggttgttttgcttgctgagagctggtctgggaatgccccttgaccgttccctgccctgctcctggcccactcccagactgctcctgtg

SEQ ID NO: 542675 - DNA, 637 bp, Homo sapiens
tgagtggcctggggcaggtcacttcacctccctaaaccacattatctagatggatcccttctaaatccaccatcctaaggggctgggtctgagtcttttttccactctgaaatgtgatgctctgcctaacacgccagagctagcagtcacaacgatgcccagccaggagagaggtttgcccctttttgaccagtgatgcttcgaggtgttaatgcagacctggaggcaaggctctgcccatacccagcttcccctgctgctgggccccgatctatcttccctcctgctcacccacggcaccaccccttggctgcctttatctttgtggggtgacttgttcagatcctgaagcagtctctggatattacaaatggcaaagaatggtgtctttctcttggggagatgccaggccaacactttgacctgccctagcagctcagacagctccaccctggcagacagacstcacttactccaggaagcccctcgggtgccttggccctggtctcgccccgctgcagggattcctggggtgagctccaaatgcagaacacagttctggggtatatactgagcccactgaggccctagtacttttctcttcacctctgaccacctcagggatttgcccacaatg

SEQ ID NO: 542676 - DNA, 558 bp, Homo sapiens
gctgagctcataccctgtaagtctgaccacactacacagctttggctttatctagaatccagctccaatcacagtcgtgtctggccctaatctcatgaggaatgaaagacccatttagagaagaagcctctgtcaggcattaggagagaaacagaacttcgcagagctcatccatggggaatgagagcagggtaagtgcagcctttgtgattctctctctctrccctctgtaggatggctgctccatgaggtcaagactgggtctcctccctcctcccccttcaccaatgcctggtctcacggggctagttttgacccccacgctatggcatcatcgacctccctcccagctcctggctctcggcctaagaagcctctaggcaagatggctggtgagtggaaccggactcgcgactctgctgtgttcctgagtgtagtgctcagcctccatagggcgcggtgggaggcctgcctggtccaaactcagagagacgcaggaaggctgacgtggggaactcctgacctgaattcagggcctggatgctttgtggagagtga

SEQ ID NO: 542677 - DNA, 617 bp, Homo sapiens
tatactacacactttggtagaaggcccagagttgacagattaggtacattagaaatcctctgaacaagtatctaacagaaggaccaggaatagaggaggcagcagaggaagtaagagggagaaccagtatcaacatgcaatgccaggccggggtgcggtggctcacacctgtaataccagcactttgagaggctgagacaggtgggccacttgaggtcaggagttcaagaccagcctggccaacatggggaaactctgtctctaccaaaaatacaaaaaactattagccaggcatggtggtaggcacctgtaatcccagctactcggaagggtgaggcaggaggatcacttgaaccccgggaggcggaggttgcagccagccgagactgcgccactgcactccagcctgggcaacagagcaagamtctgtctcaaacaaaacaaaaacaaaaacaagcaacaaaaaaaaacatgcaatgccaaaacaagctctgaaagagcttgcctgtttgacacctgtttgcctcacttcaagtggtctctcacatttggccagagcctgacccccaaaccccaacctgggccatcagatctctggtcatatttttatacacacg

SEQ ID NO: 542678 - DNA, 600 bp, Homo sapiens
gcttggtgacagagggcaattttcttagcctccctgagcctcattttactcatttgtaaaatgagaataataatcatgcttattttatagtgttgataaattgggacagtgtagaggattaagcatggtccctagcataagtgttcaataaatgttacctctttgtttattccaaaggtgattctgttcttatcaaaattatatgggaattataaggggtgagaattcgttacatgtgaaatatttgtttactataccactaacagtgagcctcttgagaatagtgatctctgctgtctctttcctttggaacttcctgcagtccttgtaacaattcatacagaagctgcttgtagcaagatgtcaatcatttagctacaactggtgaaaatgcgcaaattttcacmaaatggttatctgtttctttttcttctaccccaaggtcaccatgtggtcttggttttatgggcgactacatctttagaactaattgatgatgtgcattttttaccaaagccgtgagtttttttttttttacaatgggttacctttgacatgagaacattcttgtttataaaggagagaaaattcacaatccca

SEQ ID NO: 542679 - DNA, 437 bp, Homo sapiens
ttaaattccaagtaatgtttaaagaacacaggatttgcattagaagtcttcctaattgtattgcatcttaacaggcaaagggaaaaagagttctttgggttgggggccaagaaagtatcctagatatctgaattggaccttgaatgataaggaaaaacmatgtcatatccacttcacagatgaagaaacacaggcaaaagaggacaaatgctctgtttgctcagtcatttagtctcctgtagaattatcatgtgaattgaatccttactgtggtgcccagccaactttgtcaggctcttctgtaactaaaagtaatgagtcttgtccacccacctgtgcacatcataggtactgtcagccatgtttggcttaagagcatcattgacctcaatgaccacttcagcttgggaaaggctgcagctgggctgggaccccag

SEQ ID NO: 542680 - DNA, 550 bp, Homo sapiens
tggtatcacctccaagactgacacwtgaactcagaataccaccaggtgggattcagagatgattgttaaaaccgtgaataaattacatgtatgtatcccattgtctctacccattttgaagaacaaaactcattctaggctttcctggccatccctcagacacacccgggctgtgcactgagcaccttcggacccaggacactgtgggtctcacttcatcctgtggctgcgtccctccaccagatgtaaagccccagtagcaggaagcacattaacttacctttcatttcagagttcctaggacagggtctgttacatagtaagccccaacaaatatttttttgaatatttgcaagaatgttaaatggaaaaagtgcaacatgtgttaatatacatgatgattgcagcaataggaaagtgtctgtagggtggagccttagccttcagatccctaaactgtcgccatgatttgtggatgttataactcctcccccacactgtaggtgagtgtggtagaaccaactcttcaatgtatcaaaaacttgtttct

SEQ ID NO: 542681 - DNA, 591 bp, Homo sapiens
acagaaaaggaaaggaagaggaaagacagacaggaagaaaataattacagaaaagatgacagaaagagaattggggcaaagaagaaaggagatggatggatggggagtcactgaaaggccacctgtgtagrtagcatgggaggaggaagggagacagggacaagcctcaggatgtgtctgggcagggagggcggggacccctgctgttcatagtcccagccactgctaattcctggtgagctgattatcaagtgttagccagtgagggcttacgatgtgaccctttctgggagctttctctccttcctccctttcacagatgttcttgggtgtctgcttgatgtcagattctgctggtccacagagtaacacaaataaatgacaccaagggctggcaaaatggtgctgggctccatgtcagacagacctgagctccgtgtttctaatgaaatcttcggacagtagcacctccctcatgggctgttgtggacaaacacaaggtcctcatattttttgtatgtcacaggagcatgcgtggcctccagccccaggtgccatgtgcaatggtgagccatgttcctttcccagcat

SEQ ID NO: 542682 - DNA, 480 bp, Homo sapiens
agtttgtagataagatccaaaatattgctatttctctgactacctaatgctttaaggttcatactttagcaactcttcttttaagcactttgtctacatgggtaatgcctacctcctattcatactttaaaaattaattacaactttttaggaatcatgtgtttcataattggttaagtagagaatcatagatgtgagccctatttcaatgtctttgtaagctaaagattaaagataaaggataagtccctacagaataacygttatcttagtttctggtcttgtctgatgtctaaaacaactactctgctatacctttcttaaagtgatcattaattatactatctaattctaagtcttttaaatttagggtacttgtttttaagattcattaaagcttttgcagtggtaaaacactgcaaaagggatctaatatgaaatagaacttatttttagattcgggtgcatgagaataaagat

SEQ ID NO: 542683 - DNA, 646 bp, Homo sapiens
ctatacctttcttaaagtgatcattaattatactatctaattctaagtcttttaaatttagggtacttgtttttaagattcattaaagcttttgcagtggtaaaacactgcaaaagggatctaatatgaaatagaacttatttttagattcgggtgcatgagaataaagatgttttaagatagttggcagatttggcatcttcactggtaaaatgtgtttttatttctatataattacaaaaaatatgtaatttatcctttcaagcagagactatagctggagattggagcatagccaaagtgttgaaaatcttgcagaagggagtgaagggtaatccaaaaattatacactggcaactctcacctctgcacctggaaagctagtttgaaagatcttggaaggtggaacacaaatcatctgggtgagcaaaactctttaggaataaatcagcctgagctttgcaaatgtaaatcattccctctctgccttgaaaggatactttaygatgcttaacgcagagtaaataaaggaggtttgccagatgtattcaatttagactttcaatgcctcttaaaagagatatttttatcctgagtatcaactgacagtggggaatctgtacctacatttagagaacacacaaga

SEQ ID NO: 542684 - DNA, 626 bp, Homo sapiens
aacattagtgaacatgtagaattgttcaggaatcaaaatcccttaaaggttgacttaagtagtaaactattttgcaaacttcagggaatattaaaatcataataataaacgctaacatcctgtaatattccmaaatatacttttctctctctccaagtacacctatgtactgctgttaagcccagcacgtgtagctgtcaggcaggagaaaccctattcattgtgaatcaaataaaatgctgtctgctacaaaaagaaaagtgttttccctactcttgagactgctttccaattttaagaatgtatgagacttctgttttaaaaatagaatttgactcttcatttcaattaataactgtataattattttcagagacttgatctttatgaggaagcagacatatttgccaaaaaaaaaagtaaataaaaattagcagtgtaaaaggataaaggcaagaaacctcaatgctaaatattcaactcccacattggcacctttacctcagccttctgtcagaaacagtgtaagtgatggaaaaatgaaaaagtaacatgtagcggccttgttttcaaagttggaattactggtgactgacaaaggaatctaccatctatgtctgcttgtc

SEQ ID NO: 542685 - DNA, 626 bp, Homo sapiens
aacattagtgaacatgtagaattgttcaggaatcaaaatcccttaaaggttgacttaagtagtaaactattttgcaaacttcagggaatattaaaatcataataataaacgctaacatcctgtaatattcccaaatatacttttctctctctccaagtacacctatgtactgctgttaagcccagcacgtgtagctgtcaggcaggagaaaccctattcattgtgaatcaaataaaatgctgtctgctacaaaaagaaaagtgttttccctactcttgagactgctttccaattttaagaatgtatgagacttctgttttaaaaatagaatttgactcttcatttcaattaataactgtataattattttcagagacttgatctttatgaggaagcagacatatttgcmaaaaaaaaaagtaaataaaaattagcagtgtaaaaggataaaggcaagaaacctcaatgctaaatattcaactcccacattggcacctttacctcagccttctgtcagaaacagtgtaagtgatggaaaaatgaaaaagtaacatgtagcggccttgttttcaaagttggaattactggtgactgacaaaggaatctaccatctatgtctgcttgtc

SEQ ID NO: 542686 - DNA, 571 bp, Homo sapiens
agctggcacctgacatactttatgtaacattgtgacaacagaaataacttggcacccctcttaggatgaaaaggaatcatgtaggtcagaggctgtctttttatttggatttattacaatgtgtcgaattgtgaatctgcatctctcaacctcyccagtgttccctgaatactacttaggattcagcataaatcagttgctggccagcagaagtgcaactttaaaaggaaagcccaaaaagagcagagttgaggtggggttgatgtataaaatgagaattccaaatcaaccatgagtctcactgcttccaaaaggagtgattaaatttttatctatccaaaatcttttgggaataggcaaacattgaaataggcctttattttttttcttttttgtttgtttttctttgcattgtgaagtgccagcattttcataaagttctgaagccgacatatattatctttcatgatttgaccctttctgacttcctgaagttttatcttttaatctttgccatatatattttgttcctaggtgttctctgaatgtattattgttgtcttcctgctta

SEQ ID NO: 542687 - DNA, 561 bp, Homo sapiens
aaagtgggtcagactggggccctccagagggcatggcccagggtgggggtccctctttcctgggcttaaaggtggtcctgccctcctttaccaccatggctccctgctactaccagcacaggggatgtaattgtcctctgtgtccaactgcatcctcaaaagtctccagtctagagagggagagacataaacaatgacaacagagtgacaaacacagaagaaggcacaggggtggctgtgagaacccatggccagggagcggggagaggggtgtcagaggaagcttcctggatgaggagacatccaaatagagacgttaagcaattattcagggaaagtggagaaatcgtgtttcagtcctaggaaacagggaggtcagaggcctsacaacaggcaaaagtggtgacaggcaaggatacaaatggagactccatgtcatatcacatatgatctattacatattatgatatgtagtctccatttgcactcttgcctgggtcctgcaaatcggaggggtggtactggtggtggtggaggcagtaatggtggtggtggcagtgg

SEQ ID NO: 542688 - DNA, 561 bp, Homo sapiens
aaagtgggtcagactggggccctccagagggcatggcccagggtgggggtccctctttcctgggcttaaaggtggtcctgccctcctttaccaccatggctccctgctactaccagcacaggggatgtaattgtcctctgtgtccaactgcatcctcaaaagtctccagtctagagagggagagacataaacaatgacaacagagtgacaaacacagaagaaggcacaggggtggctgtgagaacccatggccagggagcggggagaggggtgtcagaggaagcttcctggatgaggagacatccaaatagagacgttaagcaattattcagggaaagtggagaaatcgtgtttcagtcctaggaaacagggaggtcagaggcctcacaacaggcaaaagtggtgacaggcaaggatacaaatggagactccatgtcatatcacatatgatctattacatattatgatatgtagtctccatttgcaytcttgcctgggtcctgcaaatcggaggggtggtactggtggtggtggaggcagtaatggtggtggtggcagtgg

SEQ ID NO: 542689 - DNA, 513 bp, Homo sapiens
gttgttgagatccaagattgtcagatttgaaggcaatcttaatgcttattcaaatcaacctcttatctgatgtctgcatcttctctrcagcatccctgccaagtggtctggaatctataaacaaagattcaattatgttcagtataccatacttaactaaattacaaagttagataagtaggctaataaatgttaagaatttaaagagaggctggactaaaattaagttttctgattaattttagatcaccaggaaacttccaaatagaggcatactgctgtaagcagtccatttaattgctttcagtttaagtcgagaacattgttttccttgaaaaagcttgtctgattcttggccttgcctctgacttaacatttataagaaaatcaagaggacatttggcatatgtgccctgtttaagctatgctacaggttcataggttgaaaagtggtcctggggtgcttgcaacgctgggttaggcagggtggtgttctccactttgaatgtcaga

SEQ ID NO: 542690 - DNA, 535 bp, Homo sapiens
aatccacgtgagacagatgagaccattggaagaatataatatactgatgcaggaattattctgcctttggtgggggcagtcagtgtttcctgactgcctcatgcttgggktgaagctgcctcatgcttgggttatgatggcaaatattgcctccagtaggctgctcatgaattctttctgttgtgagatttatgacaggaaacgggatttttctgtaagcacagtttaatgactaacattcctacatgtgcagtacattcaggtcttttccttgggtgggcttcttgattgtatagccacctgaatgtccacttttattagacaacatcaattaaccttaccctgcaatgtaatattgcacgtgccatcattacccagagcacagagaacatgtgaaccactaggagaatggtgatgacattgttaacgtcactaggctatttaaggtggggaaaaccttcaataatttagtgatattaataattgcaatagttaatagttatcatatagtctctgtgtgcctgatactatgcta

SEQ ID NO: 542691 - DNA, 535 bp, Homo sapiens
aatccacgtgagacagatgagaccattggaagaatataatatactgatgcaggaattattctgcctttggtgggggcagtcagtgtttcctgactgcctcatgcttgggttgaagctgcctcatgcttgggttatgatggcaaatattgcctccagtaggctgctcatgaattmtttctgttgtgagatttatgacaggaaacgggatttttctgtaagcacagtttaatgactaacattcctacatgtgcagtacattcaggtcttttccttgggtgggcttcttgattgtatagccacctgaatgtccacttttattagacaacatcaattaaccttaccctgcaatgtaatattgcacgtgccatcattacccagagcacagagaacatgtgaaccactaggagaatggtgatgacattgttaacgtcactaggctatttaaggtggggaaaaccttcaataatttagtgatattaataattgcaatagttaatagttatcatatagtctctgtgtgcctgatactatgcta

SEQ ID NO: 542692 - DNA, 558 bp, Homo sapiens
cagaaaatatttgcatgcaaaagaaccagaaggtttgagatattcacattgtacatacctaatattttgaacaaataccttttgctgcgtagtaaacaaacccaaaacttattggcttaaaaacaacttaatatcatctctccaaattctgtggattgactggactcagctgaaagattcttgccaggagtgtctcatgtgattgaagttagacacagctgaggctggaatcagttgaaggcaggagactcaagtggcttcttcacccccatgtttggcactgcagctgaaggctggcttggaggagggcagaccagacatttttctctttccatgggtctgtccttagcatgttgtcrcagggtagttggactgtgacacactagacagcttcccccagaacaaaatcttcaaggttgcttatgacataactttggaagccattccaagtgattctgtcacattctctggatcgcacgttctctgtggaaagggactatatattactcatgaatgacaggaggcgtgattcactgcggggggcgggggcatctttga

SEQ ID NO: 542693 - DNA, 568 bp, Homo sapiens
tggtcattttttatatgtcagagactgtcaatttctattgcgtttcaactaattacctcagtttgttaaaactgaatatgaattcacatatttgacattcccaggcttcatgtgttcctgcttatcaagagctatcgcctaatgatatgtcccaccactctggggtttctcaggtgaggaaatgaagtggccarcacagatgggtgtcaagagaaatgggacagccatcatcaatggtgattgtctgctggcagtgcagttgtgtacaaccactgcctgagttgagtcagagctgaggcacaccaagccctgcagcccttagtgaggatctcggcactgcaatggccaggaagaggtggggaggcagataggctgggcacaaatgaaaaccacgcctctgatagagagctactttccaatcagaggtatcctgaccagagagaatcaaaggaagggaccataaataaattatgcattgcaggtctgaagactatctcaacttcaaatgatacacttaagttttaaaagtttcttgcatctggtggggaagggggctgtttcttgatgg

SEQ ID NO: 542694 - DNA, 536 bp, Homo sapiens
gcagtggtggtgtggggggatgtgggaataactgtcccctgtgatacagggcagagcgaaggcaggacagggagcagacaggggaccaagcaaacacacgggcacaaaatcatgcacaggcatcataaggctgtactgcaaagggacctcttcattttcatccccatatctgattcactcaggtctttcccatctcactaaatggcaatcccattcactcaatagctcaggcaaaaaccttagaagccactcttgattcctttgttgctacactctctgacatccagttcatcagcaaatccagtgggccaagtatccaaaatatattctgaatccccccacttctgaccatcacctctmtagtacaagccactgccccctctcctgcctggatgactccattcgcctactcactggtccccatctcccatcttgtttcaccacggtttgttctccacacagccaacaaatggatccattcaaaatgagagtcatcccctgtcatcctgatcttcaaacacactcatggtgctctc

SEQ ID NO: 542695 - DNA, 536 bp, Homo sapiens
gcagtggtggtgtggggggatgtgggaataactgtcccctgtgatacagggcagagcgaaggcaggacagggagcagacaggggaccaagcaaacacacgggcacaaaatcatgcacaggcatcataaggctgtactgcaaagggacctcttcattttcatccccatatctgattcactcaggtctttcccatctcactaaatggcaatcccattcactcaatagctcaggcaaaaaccttagaagccactcttgattcctttgttgctacactctctgacatccagttcatcagcaaatccagtgggccaagtatccaaaatatattctgaatccccccacttctgaccatcacctctatagtacaagccactgccccctctcctgcctggatgactccattcgcctmctcactggtccccatctcccatcttgtttcaccacggtttgttctccacacagccaacaaatggatccattcaaaatgagagtcatcccctgtcatcctgatcttcaaacacactcatggtgctctc

SEQ ID NO: 542696 - DNA, 505 bp, Homo sapiens
gatgttaagctggttgcacaatatattgtttaattatatttgggactaggaccacaaagaagaratatagagcttttaatggagaaacaaaatgagttcagtggcaaactagagtttcatgtaagattctctgaaaagctactttgaggtaaattttaaaagtgaattaaccaggcaaagagaagaaaagagcattccaggtagaagtaattggatatgcaaaggacctgaggcagaaaaggatggtagaataccccagactatgaaagcaagttagtggaacaagcagaaacatatgtaaacatgccaacttactaagtttaaaaaagtactttctttgggcaaatattaagtaaatttgatcataatatagaagtgtggtatccatgccatctgaggttttatgcctgttgtttagaactcaaagaaagaaagcataaatatagtctgaagacagaacaaattaatataagaataacttcactgaatactactgcactcctca

SEQ ID NO: 542697 - DNA, 580 bp, Homo sapiens
ttcaaatgagagtgcaaattcctactataagaggtgtggttatatacttactcaaatgctcacattgtaagaaggaatatagaagaattcctaaagatgcccagataaatggcagtgaactcaaaattcatatatgtttgttraaagatgccatggaaaaggagttttgattctgcaaccacagtaggaagcaactcggttgacttgggagagtttttaaaggtctattacttcaacgtagagatctgactgacataaagcctgtgcattttatttatgtattcattcatttatttattgagacaaggcttgctctgctgcccaggctggaggtcagtggcacaatcttagctcaccgtaaccttgaattcctgggctcaagtgatcttcccatttcagtctcctgagtagctagaaatacaggcatgcaccaccatgcctggctaatttttatttttttcgttgaaatggggtctttctatatcctaggctggtcttgaactcctggtgcctagtgatcctcctgcttcagcctctcaaaacactgggattacagacatgagccactgtggctggccaa

SEQ ID NO: 542698 - DNA, 580 bp, Homo sapiens
ttcaaatgagagtgcaaattcctactataagaggtgtggttatatacttactcaaatgctcacattgtaagaaggaatatagaagaattcctaaagatgcccagataaatggcagtgaactcaaaattcatatatgtttgttgaaagatgccatggaaaaggagttttgattctgcaaccacagtaggaagcaactcggttgacttgggagagtttttaaaggtctattacttcaacgtagagatctgactgacataaagcctgtgcattttatttatgtattcattcatttatttattgagacaaggcttgctctgctgcccaggctggaggtcagtggcacaatcwtagctcaccgtaaccttgaattcctgggctcaagtgatcttcccatttcagtctcctgagtagctagaaatacaggcatgcaccaccatgcctggctaatttttatttttttcgttgaaatggggtctttctatatcctaggctggtcttgaactcctggtgcctagtgatcctcctgcttcagcctctcaaaacactgggattacagacatgagccactgtggctggccaa

SEQ ID NO: 542699 - DNA, 555 bp, Homo sapiens
tcaaggctgctgctactgctgctgctgtaacagccagcaccacaggagcccagaactgctggctgccaccactaccagaactgactgccactactgggtacgtagctggagcaaagagaagaacaatggtttctccctcttcgccctttccatgcccaccgatgtctcccactgcttggatctaattggaagccagttggcaggattctggggaatgtagcttgcagggtttgctgagtctggaagagaaggaatggaattgaaaccaaacaggcaatcgaccagctcctttctctccttcatgaagaggtggaatgtgttctggatgaacctgccatggaatatggcaatgtgtgacatgtccttgccagctctgtgaatgartaaatgttcacttggctttcttttcattccccaaaatatttttaattttgagtagcttcaacttacttaatatttaaagatagactatgactacaaaaatcgaggaatacattctataatttgtcttccataatttgtttctttagaaggttttggaaggaaggcaactga

SEQ ID NO: 542700 - DNA, 660 bp, Homo sapiens
ccacaagggacccaggcacctctgtcctctcaagcgtccttggcacttgcttgtcaactgttgtctcaagatggaagaaccccttctagaaggcatcatgtccatatcccactaaagaagaagggaagggcgatcctgttgtagctcatgagcgtgataattgggtgttcatgtgcgtgtgtgagatgtgccaccctctgaaccttgttacgacattggcacattacctgtctgacctgacttggggaaaaaaaaaagaagaagaagggaaaggaattgagccatttgtggtggaaaatttgttggtgaaagacagcagcaaagcaatagtcaagcaagcttctttaacggactttctagaagtcccacttggtgacatgtacttacattttattcataaaaactgtgtcacakggacccttctagctgaaagaagtctggaaaatgtagtgtttttaaggctggatatattgttaataaaattggtgttctgttggtaaagaagaaagagatagtagatatttggtgacaacctgcagtctctactggaataagtatgcaaaaatactccttgtggctggaatgggaaatgtccactcccaccatgatcgcctgtgttgagtacctggaagagtggttctcaaaatgtggtcccagacc

SEQ ID NO: 542701 - DNA, 449 bp, Homo sapiens
gcatccaagacagggtcacgatggatgtattgtccttcctggttcccagtgtaaagccactcacaatggccatgtttgaacactgtatgtgccaggtgcagggctgagagtttaatatcattatctcattattaagtccccacaatggttttgagaatgtcatttatcaccattttgtagatgaggaaactgaggtttagaagctgacccacagtcataaatccactaaactggcatggttcccagatcccttcaccaggaagctacaaggtctcacatcacctgggcagtgtcccaccagcacatyctgctttgtcccacaggagtgacatgagagtgtggcaggtgtgttcagagccacaggcccacagcccagtcaggctgttcttgtgttgactgacagccttgggacttggtcacctgagccccagtctgggaggagacaggaa

SEQ ID NO: 542702 - DNA, 420 bp, Homo sapiens
ggaaggcaatagggtaacagaaatcaaagacataacttttgaccctgcaggacatgtacacaaagatgcatatgtaaaagttmatcataatcttgttcataatattgaaattttggaaacaacctaaatgtccaacaatatgagattagtttataaatatgggtacatccacacagtatgtatgaggactcttcttgttgcaagtaacagtatcatatcggatgtagcttaagccacaagagggaataattgacttaatcaagagaggtagacctagctcagatgcccctgttctgtaaacccttctctgacccaccaggcaggataaattactcctctgtgctgccagagtatgacctttatgtatctttctatccccaatgcctagagcagtgtctagtccaagctaggagcttagca

SEQ ID NO: 542703 - DNA, 420 bp, Homo sapiens
ggaaggcaatagggtaacagaaatcaaagacataacttttgaccctgcaggacatgtacacaaagatgcatatgtaaaagttcatcwtaatcttgttcataatattgaaattttggaaacaacctaaatgtccaacaatatgagattagtttataaatatgggtacatccacacagtatgtatgaggactcttcttgttgcaagtaacagtatcatatcggatgtagcttaagccacaagagggaataattgacttaatcaagagaggtagacctagctcagatgcccctgttctgtaaacccttctctgacccaccaggcaggataaattactcctctgtgctgccagagtatgacctttatgtatctttctatccccaatgcctagagcagtgtctagtccaagctaggagcttagca

SEQ ID NO: 542704 - DNA, 437 bp, Homo sapiens
ttggaggcccctgagggaggctgatggaaagcccagcaccaaaggaggagctgtgggaaggagaaggtcagagctggaggcctgaggagcaggcaaggtagtgggtggtggaaagggcctactgctgccccactctggcagggcccaccttgagctctgctggaggggagtagcagcctccacctgggcctcctgcctcccatctccaaactgtctccayaccactgcccaaaaaatcttgctaaagtaaaaatcagatcatggcattcccaaaacccttctgtgtctcccaactgcccacaagtcagagccattcttggctcttctttgggcacttacaaaacatccaactaacagaggcttaagcaagcggacatttaattatttcacataacaagaagtctacaagtaggcactcagagctggagcagcagctc

SEQ ID NO: 542705 - DNA, 624 bp, Homo sapiens
ggggagcaggcaggctgcagtgaggaggggcggccctccaggaccatatcggtggcccctgcaaatagagaagaaggggagtgaccggacatcccacagagtgaagtcaaggaaagaggacaaggggacagggaattagagaaggaatatgggaaagaggtgaagatttctaatttgatttcagaaataaattatttctgaatgatttccaatttgaaccagactggttcaagataggatgtgtgttaatatatatttcctgaattttaaaagaagtaactatttgtagtagaaatgtagaaattttggtatttatcaggaagaaatacaaattttacataacaaaataactgaaaatcccaacactcagataaaacttttgatatcatttcaktctatatccatctagcttccccctacccagtgtgtgcatctgtgcatgcatgagtgtgacttacttacttgtagggtatcattacgtgattgtgaatgcactgatttgcaatacatattttcttataatactaggacttctgaaacatttttatatccactatatatctattatatggctatttataataaatcaattgtgatttgtgtactcaatccccatgctgggca

SEQ ID NO: 542706 - DNA, 429 bp, Homo sapiens
tctcgttcctatcgtaaatccattatttataacacccagtgactctgttcccctgactgaatcatgatggacacaaatattatatattgattttccactacaaaaaaatgaaaacttgtttttctcccacttcttccctatccaccctcctcccattcttcaaatatggttagatcaatattaygtggttctattattatgactaaatatgttattcagagctgagtcatgtaggaaactgtgactacagttacttttctggcaactttttgttttctctggaattatcatcaccttgttttctcctttgcagagtttttttttttttaccaggaattcaacccaaactttcttcaggtcattttaattacctcttaataccttcattcataccacgtaggccatcaatttcatcttcttaacatccct

SEQ ID NO: 542707 - DNA, 656 bp, Homo sapiens
tgtccccaccaggtggctattttacaaagatggtcagtgttgagggttaagaagcaacagggatctgtggcatagttcccttgaggcaagacctagagaaactcccacaaataactggcaaggcgctttgaaggaagtggaccagtgggtgttagagtcataataagttgaataagcaaagaggatgtaaacctattttgtggtcacaggcccatgtcactggcagcattgagttacagcaatgtctttcaatactctccacttctctttcttttaaaaccatgctcaccaagtgaccttcagataataatttagcttcccaaatatttgccaacagggagagaatgcactggcatcgacggagtgcrctccagttctcctggaggctttattttgctatgttaatcaaattattcttctggtctacacagcaaatttttatgagtttggtaaatatgagtcagttctggaatgattatctatcatgtaaacaaacaaaattagattttagtcctgcaaagacgaaggtgagatcctgggccatgccctctgtgttagtctcctagggctgccattacaaaatactgcagactggatggcttcaaagaagcttattttctctcagtgatgaaggctgcaagtccaagatcaaagct

SEQ ID NO: 542708 - DNA, 677 bp, Homo sapiens
gaaattggcattgtttagtgatttaaatcagtacagcaacaaaacattgcccagaacagaaacctgggagcaggaccagctcataggcagcaaagggtgaagttgtgcaaggactcacgttctgctgtagccatcccataatcttaataatttttaacaatgtgcccctgtgtttttattttgcaaacagaaattatttgggtcctacaaattattattatgcctgggggcctgcatttccaaataattgtctggaacctcaacatgactatgcttttgaagttgttgaggtttttatttctgtgaggcaaatatttgtagtacttgcacaacttagccctcttccgtcccttcaattaatactttattccaatttgttatcatcttgtctctgtagccctggccaaatgaaagaaaggatggagattctgtggaaagtgcactcagactgtatctcctgctctctcttcttcgacttgctgatttaaaccacccaagaagtgatagamtacaaaggttactctctcacaattaccagttaaaatatttccaatctctacttcaccttattcccaaaatacaagaggtgattttgatatacctctttacagtttcacgtaaaatgaacaggaaatcaaaatatcattacaaattttgttatataaaaaggaaacagg

SEQ ID NO: 542709 - DNA, 677 bp, Homo sapiens
gaaattggcattgtttagtgatttaaatcagtacagcaacaaaacattgcccagaacagaaacctgggagcaggaccagctcataggcagcaaagggtgaagttgtgcaaggactcacgttctgctgtagccatcccataatcttaataatttttaacaatgtgcccctgtgtttttattttgcaaacagaaattatttgggtcctacaaattattattatgcctgggggcctgcatttccaaataattgtctggaacctcaacatgactatgcttttgaagttgttgaggtttttatttctgtgaggcaaatatttgtagtacttgcacaacttagccctcttccgtcccttcaattaatactttattccaatttgttatcatcttgtctctgtagccctggccaaatgaaagaaaggatggagattctgtggaaagtgcactcagactgtatctcctgctctctcttcttcgacttgctgatttaaaccacccaagaagtgatagaatacaaaggttactctctcacaattaccagttaaaatatttccaatctctacttcaccttattcccaaaatacaagaggtgattttgatatacctctttacagtttcaygtaaaatgaacaggaaatcaaaatatcattacaaattttgttatataaaaaggaaacagg

SEQ ID NO: 542710 - DNA, 567 bp, Homo sapiens
ctgctttcaactggacaaggttttatggtttctttgtctttcccccaacccacaaatgttctcaaacctcttgcatttatttatgttattttactttgcatgaatgggggaagaaacagtgttcagcaattcaatgatggctgaatggaataacagaatttcatttcctaagggaacatttgagagtgattgaatcaccctcartctacaagccacatttttgcactatttttctacttgactaattgattatgacaggtgtcacccaagctttgcagcttaggctgtccccatgctaagacagagccatagcaagcaacttctattgatgaaatagaaaagctatgcatggttatttttccttattgattttctagtatatgatgtcagttaattactgagagccattcactgcatacatgtaagtagtcattataaccatattttcaattgattttttccctacaaacataatcagttatttgtttgagctgaacagaaatgtaaatatctgcagttgtaaaaaaaaaattggatgtgtgtgtgtatgtgtgtatgtattatatg

SEQ ID NO: 542711 - DNA, 603 bp, Homo sapiens
gagcaggctgtgatatatttccccttctccatttggttcaaaataaaatgttctcaccccaaacctgcatttccttagaaccttcctctgagcttggtttttcattctactttgtaatttatctgcaaattaataataatgaacataactagttggcagtaatgctcagtcttctcccagtgcatattctcaagcaaccactgtacagagttctgaaaaggagtgttccagccaaagtcttaacataatctcacaaatttgcaaagccttccrtttagctggaccctgcaataatttaatgtatacctgtgatatggctaacatacactgtgataatgatggaggattaaagtgataaacagtttagacttggttccttctttcacagagcatacaatttgtaataggatcacaacaacaataacaaaaatgaccggattgttggagtccagggaagtgccctgacaggagagtttgtcttgtccagatcctgtgaacacccaggtagaggggcctaagccaggctggagatcagtgaggtgacactctaactgaaacctgaaggaggcccccacgtcagggcagcaaagcaattggaggaag

SEQ ID NO: 542712 - DNA, 338 bp, Homo sapiens
gagcaatggaaacaccttgctctcacagcrgctcacctcatcagcttttatccctgactcactcaccgtggtcttttatttgtttctgtttgtctgtttttaatccttctgaaaacctattcccatctaccatcttgagacatgttttcaatagccaaaaatttacagatggaaaaagggcagcacagctaggacaagaatttggatctcccatcttgcagcaacacattgttcaagctctgtagcatgtgctgtgtggtcacaggctgcacaagagcactgaggccaggggccacagtggcgtgtggctgttggcaaggcaggcagaggtacttgca

SEQ ID NO: 542713 - DNA, 605 bp, Homo sapiens
tgagcaatggaaacaccttgctctcacagcggctcacctcatcagcytttatccctgactcactcaccgtggtcttttatttgtttctgtttgtctgtttttaatccttctgaaaacctattcccatctaccatcttgagacatgttttcaatagccaaaaatttacagatggaaaaagggcagcacagctaggacaagaatttggatctcccatcttgcagcaacacattgttcaagctctgtagcatgtgctgtgtggtcacaggctgcacaagagcactgaggccaggggccacagtggcgtgtggctgttggcaaggcaggcagaggtacttgcaacctcacatccactagcacatccaaatgcatctttgctgagtcctgagagaaatgtgacaagtcagagtcttcttgcagtcttgtacttatggacagagagaaagaacccacagactagacagaatccttaatctggtcggggaccatgggttggatttacctagacaggcaagaatggggagagtatcagaaggggggacctatgaagaccaaagatgccaaggaggagtgagtgagacaaaattgccagggtccatgaagggag

SEQ ID NO: 542714 - DNA, 338 bp, Homo sapiens
gagcaatggaaacaccttgctctcacagcggctcacctcatcagcttttatccctgactcactcaccstggtcttttatttgtttctgtttgtctgtttttaatccttctgaaaacctattcccatctaccatcttgagacatgttttcaatagccaaaaatttacagatggaaaaagggcagcacagctaggacaagaatttggatctcccatcttgcagcaacacattgttcaagctctgtagcatgtgctgtgtggtcacaggctgcacaagagcactgaggccaggggccacagtggcgtgtggctgttggcaaggcaggcagaggtacttgca

SEQ ID NO: 542715 - DNA, 338 bp, Homo sapiens
gagcaatggaaacaccttgctctcacagcggctcacctcatcagcttttatccctgactcactcaccgtggtcttttatttgtttctgtttgtctgtttttaatccttctgaaaacctattcccatctaccatcttgagacatgttttcaatagccaaaaatttacagatggaaaaagggcagcacagctaggacaagaatttggatctcccatcttgcagcaacacattgttcaagctctgtagcatgtgctgtgtggtcacaggctrcacaagagcactgaggccaggggccacagtggcgtgtggctgttggcaaggcaggcagaggtacttgca

SEQ ID NO: 542716 - DNA, 605 bp, Homo sapiens
tgagcaatggaaacaccttgctctcacagcggctcacctcatcagcttttatccctgactcactcaccgtggtcttttatttgtttctgtttgtctgtttttaatccttctgaaaacctattcccatctaccatcttgagacatgttttcaatagccaaaaatttacagatggaaaaagggcagcacagctaggacaagaatttggatctcccatcttgcagcaacacattgttcaagctctgtagcatgtgctgtgtggtcacaggctgcacaagagcactgaggccaggggccacagtggcgtgtggctgttggcaaggcaggcagaggtacttgcaacctcacatccactagcacatccaaatgcatctttgctgagtcctgagagaaatgtgasaagtcagagtcttcttgcagtcttgtacttatggacagagagaaagaacccacagactagacagaatccttaatctggtcggggaccatgggttggatttacctagacaggcaagaatggggagagtatcagaaggggggacctatgaagaccaaagatgccaaggaggagtgagtgagacaaaattgccagggtccatgaagggag

SEQ ID NO: 542717 - DNA, 515 bp, Homo sapiens
actcctccctcttcccttcccttctccctccctcccttcctgtcattctgttttgtctcatgactagcacctatattatctcttgtccacctatttaattttcccccgaccatcccaggctgcagcatttttcccatccctacacagtggtaacatgggaccttgaggttcctgtcaccagccagctggtgactctgagaaagccatccaacccctgtggcctgattgctgccatccgcagggtgtctggagttmcgggagagggttgcacctggcctgggagggaggtgggtctggctatgacagtagcctctgctttcttctgggagccctggggtagtttacagagtctcttccagaatctgtgaaatggggataatgacactcacccgctggggtcctgagtgcccagcagagcacctgggatataattaatggggagtgttactcttgttgttgttgtccgtagtaatagttgtgatgtgatgcttaaattccctacagtgtgaaaaatg

SEQ ID NO: 542718 - DNA, 515 bp, Homo sapiens
aagcaagaggcttcaccacatcttctttcacaagctgtgcacctaaacatggagggttcaacagtgctttcgggggttgccccttatgcaaaacagatggcccagtgcaagcacagagcaacgcaagctaaaaatggggatggctgtgggtggctttcatggaggtaccctggggtgcaactaggtcttctctccgtgacggagcctgtcctagccccagctcaccagctcacagctcttccccagaactagcttgttcttgggggaaaacctttctttctcccacttcccccaccacagtgatgagcagatatgggtgtgtgaagctgagtcatcgtcacagaagtggaagggagcagaggctctcagcccccagggtctccctgaattcggttctggtgacccagttgcaggcaktatggtttacccctctggttctcagccttgcacactaaaagccaccctgggaccaattgtgccttggatccaggctttcagggtggggtaagacaggc

SEQ ID NO: 542719 - DNA, 515 bp, Homo sapiens
aagcaagaggcttcaccacatcttctttcacaagctgtgcacctaaacatggagggttcaacagtgctttcgggggttgccccttatgcaaaacagatggcccagtgcaagcacagagcaacgcaagctaaaaatggggatggctgtgggtggctttcatggaggtaccctggggtgcaactaggtcttctctccgtgacggagcctgtcctagccccagctcaccagctcacagctcttccccagaactagcttgttcttgggggaaaacctttctttctcccacttcccccaccacagtgatgagcagatatgggtgtgtgaagctgagtcatcgtcacagaagtggaagggagcagaggctctcagcccccagggtctccctgaattcggttctggtgacccagttgcaggcatyatggtttacccctctggttctcagccttgcacactaaaagccaccctgggaccaattgtgccttggatccaggctttcagggtggggtaagacaggc

SEQ ID NO: 542720 - DNA, 593 bp, Homo sapiens
ttcaagcatcaaaacttttaaactttcattttaactgcttgaaggaaacatccttctaaaatgcaccccaagctctcggtttccttattcagtataaaaccaagttttcctcctgcccccagtttgtctccatgcagggtggcgctgtcaggatgcccaggacagggacagggccatttcctgctgcagcaccacccacgtctccctgctaccttcctgagcctcctgcttcmcccagtggccgctgctctgcctggtctgccaggcctcagcctttctcagcgcctcctggcctgtatgattaaatcagtggctgggtacagtggctcatgcctataagtaattccagcactttgcaaggccagaggatggcttgagcccaggagttgaagactagcctggacaacatagtgagatcctatctctacaaaaaataatacatacatacatacatacatacatacatacatacatgtatgtactattacatacataatattgttatgtatataataaaattgttagagctggcaaatcagctctaacgatgggaactggaatgaccaggccacccaggagtaggagtgggccac

SEQ ID NO: 542721 - DNA, 592 bp, Homo sapiens
atacccctcttccccatgttcacttctccgaaacccattgatctttcaagaatctgatcaagttctacctactccaggcagccctccttggctggtctagtccatccccagccagtctccacagccagccatttggtcattgccatggccatttatttcctgagtgctcgctctgtgccaggctctgtgccagacctcgtggcccaagccctcctctcatgaggcccacaggctgctggtgccagtatggtacctatgtcagcccttgtcaccaggcttgctttagactctggttgccggccacagaatgctcccrgtgtcctctgcagctcctgactcttccaccaaccagcctgtacccagtgaaaacccctttcctccccttccaatgtagaaattcctgcctcccttccctttctggcttcagagaggaggtggaaagggaatgtatttgtgaaaggaacggagatgaaagaaggaaacagggagaaaagcctgggagacagaaactctcagctcccagtgccccctctgccttccccacctccaactcctgcctcaggcttggagaagcttcggagaaatctctctc

SEQ ID NO: 542722 - DNA, 591 bp, Homo sapiens
gcatctgggtgccaagggccggactaacagggcttggtatctgatgctggtgagctgatcgctttgttggggagacgggaagctgcacataaactctgaaacagaaaccataaaaagtaaattaatactccaagagttaactaatagttcagaataaaaagagaagcaatgtttcaaggccctacacgattagctgcccaatgaggagtacagacaatgagggtttgggttactctgaggagaaagcacccacctcaggctgctgggctcatggaaagccccggaggctggtttctggcatttttggtctattaactgctgttgtgaccactgaaatttgacttccaaggaccggaagcccagagctaattctgcggcttgttggtcaggggctgrtaccagtcaccttcatggggcaaaagcgcttcagtggcccctgtctaaaacagggggctgtgccatcatttcccctgcccaacctcctctgggagtgaggtgcagccaccttattacaccagcgaagagcagcgaggagatggaagagagccgggggtttgctgtgccacccctccctggtggggtgaatgagca

SEQ ID NO: 542723 - DNA, 591 bp, Homo sapiens
gcatctgggtgccaagggccggactaacagggcttggtatctgatgctggtgagctgatcgctttgttggggagacgggaagctgcacataaactctgaaacagaaaccataaaaagtaaattaatactccaagagttaactaatagttcagaataaaaagagaagcaatgtttcaaggccctacacgattagctgcccaatgaggagtacagacaatgagggtttgggttactctgaggagaaagcacccacctcaggctgctgggctcatggaaagccccggaggctggtttctggcatttttggtctattaactgctgttgtgaccactgaaatttgacttccaaggaccggaagcccagagctaattctgcggcttgttggtcaggggctgataccagtcaccttcatggggcaaaagcgcttcagtggcccctgtctaaaacagggggctgtgccatcatttccccygcccaacctcctctgggagtgaggtgcagccaccttattacaccagcgaagagcagcgaggagatggaagagagccgggggtttgctgtgccacccctccctggtggggtgaatgagca

SEQ ID NO: 542724 - DNA, 547 bp, Homo sapiens
tcattcacaaacagttactgatcacccactctgtgccactgctggagtcacaacgatgaccatggcacagaaacctctggatctcctggagctcacattttcatgaggaagtcagatgatacattaaaaattaaaattaaaaacctgatcataagtgttgtgctgagaattaaaacatatggawgaggcatgactggggccgctgtatacgtgtcagtggggagggctcctctgaggaactgacagtgaagccaagatccaaacaacaagcagacatggcgggagaaagcacttccagcagagagaacagcaggtgcaaaggcccggaggcaggaatgggctttgtgtgttcaagagacaggaggaagagcagtgtgacaggcgtgtcctggggtaatggggagaattaggtgggaggggctggtgggggcaggttgtatcaggcctggcaggggtgtctgaattgttttctaaggttagcaagaagtgttggaagagccatgttccgatgtatgtttcacagagatctttcggctgctgtgtggag

SEQ ID NO: 542725 - DNA, 528 bp, Homo sapiens
caatttacagaagaataacagcaaaaaaggatactgctggtacctccacctggtacagtggaggaaaatgctgctgaactaggagactgtggtgttgaggtttttcaattattagtattgttactacaaaaataatacatgcagtcagtaacacgtgcaaaggggtatacagtgaagtgtgattctccctcccactcgagaccccatcccagtctycagaaggtgcagtttcctgtgtattcttctagaaatatctcacgtacagacacacacaaacacacccacacacactttctgttgtggaaactggaatgtgctccccgcactgccatgcaccttgattcctggctttgcaacatatcttggatctttccaaatcagcatgtacataaatctacttcattccatttagtagctgcatagtattgcattgtcgagaaattcactaattgccatagccagaccccccaccgataagacatttaggttgctcctggttttgtgtcttcttttattacaaaccacaca

SEQ ID NO: 542726 - DNA, 528 bp, Homo sapiens
caatttacagaagaataacagcaaaaaaggatactgctggtacctccacctggtacagtggaggaaaatgctgctgaactaggagactgtggtgttgaggtttttcaattattagtattgttactacaaaaataatacatgcagtcagtaacacgtgcaaaggggtatacagtgaagtgtgattctccctcccactcgagaccccatcccagtctccagaaggtgcagtttcctgtgtattcttctagaaatatctcacgtacagacacacacaaacacacccacacacactttctgttgtggaaactggaatgtgctccccgcactgccatgcaccttgattcctggctttgcaacatatcttggatctttccaaatcagcatgtacataaatctacttcattccatttagtagctgcatagtattgcattgtcsagaaattcactaattgccatagccagaccccccaccgataagacatttaggttgctcctggttttgtgtcttcttttattacaaaccacaca

SEQ ID NO: 542727 - DNA, 522 bp, Homo sapiens
tctcctccatagcagagtgttggggataaaataacacagacaggtgtctcagactaatgcaataaaagagcaggacccttgagaaaatagtatgaaacatgattaggttggctctttggtatcctcacccttgatattctaggaagacttgagttaaawttttttttaaccttagatcatcaaagagaaatgtaattagagaaagatgggcaaagtattactcactgtgacatttaagcagatttaactttccctccaagtgccacttcatggccacaattatttcacccactgagagagagggagaaggctagcaaatggaagtggggctgggaacaattgcttctcattttctctctgggcttggtgtttatatgttgttgctgattcatctttgggggtgttagaaagtcctgtgggggattaggttcaggtgggctagctactcaggccttgccaatacctcctgttccttcgcttccctttgcttctctcgttcctcaaggaggggagggagccctc

SEQ ID NO: 542728 - DNA, 508 bp, Homo sapiens
cacactgtagggaatttaagcatcacatcacaactattactacggacaacaacaacaagagtaacactccccattaattatatcccaggtgctctgctgggcactcaggaccccagcrggtgagtgtcattatccccatttcacagattctggaagagactctgtaaactaccccaggggctcccagaagaaagcagaggctactgtcatagccagacccacctccctcccaggccaggtgcaaccctctcccggaactccagacaccctgcggatggcagcaatcaggccacaggggttggatggctttctcagagtcaccagctggctggtgacaggaacctcaaggtcccatgttaccactgtgtagggatgggaaaaatgctgcagcctgggatggtcgggggaaaattaaataggtggacaagagataatataggtgctagtcatgagacaaaacagaatgacaggaagggagggagggagaagggaagggaagagggaggag

SEQ ID NO: 542729 - DNA, 594 bp, Homo sapiens
atgactcaacaatgccattcctgggtatttatctcagagaaatggaagcttacatccacataaaaacctatacataaatgttcataatagtttcatttgtaatagtccccaaaaagccaatctcaaaacgtcacctattgtatgattccatttatataacattcttgaaatgagaaaattaaaggggggagaagagrttacgaattgctagttagggatggtgggggtgggtagggtagcacgcgggagatctttgtgggctggaatagttatcttgatgggtggtgggtacaggaagctgcacactgaagaaatagcacagcactatacacacattgtatcaatgtcaatttcctgggatgctgttgtactgtacttgtgtaagaagtaaccactgggcatagagggggtgaaggttacatggaacctcgctatactatttttgtaacttgcaatctatatttatttcaaactaaaaagtaaacaaatactggagaacacttagccgtggggggaaattataccattctgtggggactcaggcagtgctaggtgaatgaacaaatcccagttgcccttggggaagggtgggac

SEQ ID NO: 542730 - DNA, 456 bp, Homo sapiens
cgttctgcttattttttctgggtggttgaatttatgtgttcccatyctccattcctagagaatgccttctggccaagacttccccagtgctcaccccagcaggatctaggcagttctgtggctccctggcttttttgggcgatctgacgacatggcagctccttgccacagacaccaagatagatgtttccggagtgcagagccctgggggtgcggaaggacagcctctgtgaagatattcagcacagcaggggccattagtcaccaaggatcatttgacattttgaaatgaactcccgggctctcctaagtaagctggaacactgaattatgcctaggctagtggctgtgtctggggctgagggtccccgccaggaggggaggctgggtgcagcgcctcaatgccgggaagtgagcagcatagcgcatgcgcaggaacctcgctggtccgcctgt

SEQ ID NO: 542731 - DNA, 624 bp, Homo sapiens
ctatagtgtagattgagttactagatggaatttgtgtgtgtgtgtgtgtgtggccaactttcccctctccttttcacaatttctactttttccttggagatcattctgtatcagaacatatagaacatcttgttattctttttagtggctatacagtattctattttaatgaatgtagcttaatttgtttacttagcatttargtttatttttccccattcttgtagtgttgagtttagttatagagatggcgtctcgctctgttgccctggttggagtgcagtggcatgatctctgcttagtgcaacctccgcctactaggttcacgtgattctggtgcctcagcttcccgagtagctgggattacaggcacccgccactatgcctggctaatttttgtatttttagtagagatggggtttcaccatgttggccaggctggcctcgaactcctgacctcaagtgagcctcccaccttggcctcccaaagtgtggggattacaggcatgagccactgcacccagcccccattctttttctatgaaataatgcttcagtgaaaaaccatgggcatacatcatttcgaacagaagtgataagtacaaattccacttcaagaataaa

SEQ ID NO: 542732 - DNA, 642 bp, Homo sapiens
agttttaattgtaatatagttctaatgtgtcyagctaaaaatttactgtcatttgtagtacagaaagttaatttgcgtatatatatagacactagctttaaaaattaaatattacaatttttctaggctttaaaatttaaatttcgttaataatggtttgtattagttctgggacccttgagaagggttcagttactgtaattgtttttgcaaatgggtggggaatctactgcctttcttcctgccttattcagctaatgaactattctgattcactagggaggaaatgggaaatgaagtggtaattcaagggtgtattttgtaccccttggttaccaacaacctgaaaatgatccagggaaccaagtatttgtgttagtctgttagagatttctatctagaaaattttcaaacaatgtttataggttggaattctaggtggttctttacagcgtaagtttttaaggaaaggtagcatttagttataagggaatgcttaatatattgctgatttggttttgaatacttttgccttaaacataaaaatgttttagtatgtgtattttaatatcgtagcttatacaatatgtaaaaatacctattgtagctacaccaaactgcctgtgacagtctctgttcagc

SEQ ID NO: 542733 - DNA, 524 bp, Homo sapiens
taaaaattaaatattacaatttttctaggctttaaaatttaaatttcgttaataatggtttgtattagttctgggacccttgagaagggttcagttactgtaattgtttttgcaaatgggtggggaatctactgcctttcttcctgccttattcagctaatgaactattctgattcactagggaggaaatgggaaatgaagtggtaattcaagggtgtattttgtaccccttggttaccaacaacctgaaaatgatcyagggaaccaagtatttgtgttagtctgttagagatttctatctagaaaattttcaaacaatgtttataggttggaattctaggtggttctttacagcgtaagtttttaaggaaaggtagcatttagttataagggaatgcttaatatattgctgatttggttttgaatacttttgccttaaacataaaaatgttttagtatgtgtattttaatatcgtagcttatacaatatgtaaaaatacctattgtagctacaccaaactgcc

SEQ ID NO: 542734 - DNA, 443 bp, Homo sapiens
ctggcccaggtgctaagcccctcactgcccaggccagaagggcccgcaggccgcttggagtgcggggcccgctgagcccacccccacccggaactcacgctggcctgcaagcgctgcsggcagccccggttcccacccgtgcctttccggccacacctccctgcaagctgagggagccggctctggcctcagccagcccaggaaggggttcccacagtggagcggcaggctgaagggctcctcaagtgccaccagagtgggcgcccaggcagaggaggcaccaagtgtgagcgagggctgcgagggctgccagcacgctgtcacctctcactgtgaccgctgtcgatttatggcctcaagagcctcggtcttgcagagggaccacgccaggacctcacccacccagaatccgcaggtgggggagtccgcctccccaggacaga

SEQ ID NO: 542735 - DNA, 503 bp, Homo sapiens
tattgtctgatattcagattattcacagtaattttttttaattaataaccttcttaactatatataattttttatcctttccttcctatacacacaacacctaatatggtgttccacttttccttttccccatataattggacaaaaccacgttgcctctgattcttcaatattgggtgaaattcagtcctccaattttactccaggtttggaaggacgagagacaggaatccagtttcaagggactaaatgcagggccgaccaaagcctcggaggccctccctctattaagtatcttctctgttacccagttctccagcagttaactggttaacttgttaagatgtaaatctaaaagaatccctgggaaaatggaacagtgsgaatctagggttctaaaatttgtattagcaaagggtctaaaactcctttgtttacattgtcttaattattaaagaatccaatagcattaaacagcttgagagaatgtttgcccaggggaa

SEQ ID NO: 542736 - DNA, 571 bp, Homo sapiens
cattcgtaattctgtttttcctggtataatctaattagatgtgacatagtcaaatattgggggttatacaaattgatctgttaatatgtaatttttttcttgtgcttatggccatttttactctaagtttgattctatgggttaactataatattttrttactcattctcctaaatattatctcttctattatctgcccttaaaatttcttaatatgttgatgtaatatttgaataatttatttatagggaaacaaaagtacatttttcataaataatattactatgtatatagtaatagaagtctatgtattcacatgtatgtaatatatattttttccttaccacagtgctgttttatatttttaaataacctaaagtttttttttcttttttttttctttattattattatactttaagttttagggtacatgtgcacaatgtgcaggttagttacatatgtatacatgtgccatgctggtgcgctgcacccactaactcatcatctagcatatgtaatatattatgtgttatatagttatacaattaaacattattaagaagatggt

SEQ ID NO: 542737 - DNA, 577 bp, Homo sapiens
tagtagtaattaaggcttagtgatccacagagtctttcaaccattgsaaataagagcaaacacattgaaatttgggacaaatatttcactaacacttttcatcctaaaacttgaaatgaaagcaactgataaagacaataagcctactaaagaaacatgccatggaactagctgtaggtagatggacaagggttgagagggaaggcaatcagatggctagagtggtaagttttcaaaatattggcattcacctttcttagcttcctcactgctgcttagtggagtattttttggcagataatttctctgcatttttatgtgtttaatgagaaacatctttatattttgaagatgattgagatagtttcactttgagggctattttatctgtgctccaaaacccaaatagaagcttttagctgattaatgtgaatattgaaagcataaatacaaattaaacttctctccctctgtgtctcttaacccaatctttctgtttaactaacaaaataagcaaaaacagcacacgtatttttatttagaaacattatcaaaattaaggcaagagttccaaatg

SEQ ID NO: 542738 - DNA, 579 bp, Homo sapiens
tagtagtaattaaggcttagtgatccacagagtctttcaaccattggaaataagagcaaacacattgaaatttgggacaaatatttcactaacacttttcatcctaaaacttgaaatgaaagcaactgataaagacaataagcctactaaagaaacatgccatggaactagctgtaggtagatggacaagggttgagagggaaggcaatcagatggctagagtggtaagttttcaaaatattggcattcacctttcttagcttcctcactgctgcttagtggagtattttttggcagataatttctctgcatttttatgtgtttaatgagaaacatctttatattttgaagatgattgagatagtttcactttgagggctattttatctgtgctccaaaacccaaatagaagcttttagctgattaatgtgaatattgaaagcataaatacaaattaaacttctctccctctgtgtctctyaacccaatctttctgtttaactaacaaaataagcaaaaacagcacacgtatttttatttagaaacattatcaaaattaaggcaagagttccaaatgcc

SEQ ID NO: 542739 - DNA, 508 bp, Homo sapiens
catgaaaaatgtcagaggctcctgttgatcttatgtatggaagaggagacagacaacaacccaggaaatatatttatgtagaatgttttttcaaacaaaattatgctttaaaatgctgtacaaagagtaaaaatttttcttgacgtctctaattatttctcacactccaactgtcaattagttgttctaaactttaaaaggttgtcttcatgttggcataagtgatataaaactattgatatacatgaagatgttttgtyagaattttattctctctttgaaaatcctcccaggaaatagcaactaaataataacaaactcaaacaaaaattatatgattgatgtgtaaataaaactcatttttttaagaaaaatcataaatatttaggaaccactatagttttttctaaaatccaaagaaggaagattccagaatctttttaatgatggcctgctgtcaagaaatttgtaatattcattgttacattctggaggtttagttgaggaa

SEQ ID NO: 542740 - DNA, 633 bp, Homo sapiens
gatatcttatagcaacatttaaatgactttcttattgttctcatcttctcaatcaatattttcttgtcagtcagatttaaattagcaagattagatttcatatattcttgaaggcaggatatcacaaaacaatttagcaagctgtttgcaatcaatattatttatatattcacacactagagattacatagggacaaatataacaggaatatggcccaaatcatctagatttagagccctttaatcaacatttagaattatttacttctgtgggtagaagaaattatcgatatttactaaatgttattaactttttaatcactgttaygcctttagcaaataaatttatttatgtattgggtgattagaaatgactagctacaaacagatatgtagaaaagggacattaatactatacacatacacacacacacacacacacatgcaaagactaatagtgacagatacatgtacatagagagatatacacatatcatactttatggaatgctatattccatatttcatctgcataagtcactgatatactttaagttaaatcatgacaaaatgaattgtatggtttgaaagttccagaatgcaccattaaaaaggaggaatcagagtgtgtat

SEQ ID NO: 542741 - DNA, 617 bp, Homo sapiens
gtgttctcaatcgttaatccttgggaattatttgatgagttccaaagggcactaacagctaacagtcgatctcattaactaaggatctgttaaaacctgccaaggcaagaattttttctgggtttgacaatgacgtctctgaaagccttgaacttgaagagaagcacagtaaaaatatcttctgttatagccacaagttaccacattttgcaaaacaaaactgaataataaattatataggatagaccatgcccccacctttttaaaaactcattaaaaagtcttttttatctttgtttttccttaaccaaaattatatggctctaatcttcwttctacattctcttctagagttatggtcagggtatagatattttttgaaatgatactgaaaggtaacatttcagagagtttgaaggcattatgagtcttgattctgctagacttcagtgaaggaaaaggtaatattggagttcttcttcaatggcacctgtaagtctcatctgcataatcaagaatactgtattcacaccataaagggcactcttgaaatagggttttgagggccattcttttctcatttttatgatgcaggggaagtatttaaacgtttgagg

SEQ ID NO: 542742 - DNA, 619 bp, Homo sapiens
ctgcactctagcatgggtgacagagtgagaccctgcttcaaaacttcaacaaccaaacaaacctttaggagaaaacataggagaaagtctacatgaccttgggtttggcaaagctcttttttttcccatgcacaaaaagcatgatccgtgggaaaaaattgataaattatactttatcaaaagttaaaaaaattctgttttgcaaaagtgactgttaagagaatcaagacacagactaacagaaaatgtttttacaycacataactgatacagaacttgtatccaaagtatacaaataactcttagacctcaacactaagaaaaaaacaacaagagaaaaccacaaagcccaacttaaaaatatgtctacctatttaatgcaatttcaataaaaattcattcaggctttttctttggtagaaattcacagattctaaaatttgcatgaaaagaaactgtgcgtaagtagccaaaataaatgaaagagaagaccaattttgggggcttatacttcatgatttcaagatttattataaaactacagcgaatcaagatcctagtgtaaaaatagatgatagttcattggaacagaataaagttttcagctatagacacataa

SEQ ID NO: 542743 - DNA, 543 bp, Homo sapiens
tccttacatgtgaaattactgtagttattttcttatgccctccactttgtttcctcctcaataataaatcaagtcatattaacaaatgaaggaatttcatttaatgatttggagcttgactaatgaacttacttctatttcaagtaatttgaaatttaaagtaaatttgatttaaaatttgtctttgttttttagctagccaaatgcttttttmctcatcctataaaatacagacttaatatagcatcacattttttaaaacaaatgaagttgaatctgaatatattagaatcagaaggaactttttgctacagattgcatgttttaccttcgagtgctagaaactgttactttagaaggttatgtagtggttagttgagcaggaatcataaagcaaattaaggtaaatggtggactcttaacttcaggatggtagttacctctaatggaaggcaggaggatgggattgatgagatggacataggggacttgaaaagtactggttctattttttttcttaggttgggtactaattacatgggt

SEQ ID NO: 542744 - DNA, 580 bp, Homo sapiens
gctcatctttgaaatgtcaggtttccactgtagttcctgtcaatcctaatttgtttattaggttataccctttctccaaggggaagggagaaggtggagtgtgtgaggctccattgaaccacacttgcacttattaaaggcattgtaatgaggtctaagaagttttccttcttgctgcagrcagaacccagagcagagcagggcatgctaatgctttcttagcaacattgaacaatcgggcccaggataccattagcagcattcattctgcatttttcatatctctccctttctaattttatcccctcaagtcatgtactaacttcagggctagaaatgttttagctcaccattaatttctttcctgttgaggaatagaggtaagtcattgacagtattatattattgcttataataagtttaatatgaaatagaattatgtgacaggtcttggcaactgtctattgccttgaaaattaacacctcacctccaactttgtgttgatatttaataagtgctttgcttcatcatttgtctttcagcagcactcttagccatcccattgtgcaatgggagcag

SEQ ID NO: 542745 - DNA, 478 bp, Homo sapiens
aaaaaatgtgatctttggaaggtgaagacaaatctatatccatcatttatgaacttgctgttgcctataatgacaaacacaataaaatttccctgtagtaaatatacataaatttttatgataatatcaatgttactaatgcaacggcagctttcattccttgaacaattactgtgtgcctggaattatgctaagaactttaaaagcataatgtaatacatataccatgaggtaactactactatcatcttcattttayggatgaagaaagtgaggcttaggttaaataactttcccaaagactcatgaggcggaatctgcaaacctaattctagaacccatggtctttatttctgtgttataattgtctcagttcacaggtgaaggctaggctcaaacccaggcagcctgactcaaggcctcactcttttcattttactatgtttaaatttttgtgtgtgtgtgtttttacatattt

SEQ ID NO: 542746 - DNA, 478 bp, Homo sapiens
aaaaaatgtgatctttggaaggtgaagacaaatctatatccatcatttatgaacttgctgttgcctataatgacaaacacaataaaatttccctgtagtaaatatacataaatttttatgataatatcaatgttactaatgcaacggcagctttcattccttgaacaattactgtgtgcctggaattatgctaagaactttaaaagcataatgtaatacatataccatgaggtaactactactatcatcttcattttacggatgaagaaagtgaggcttaggttaaataactttcccaaagactcatgaggcggaatctgcaaacctaattctagaacccayggtctttatttctgtgttataattgtctcagttcacaggtgaaggctaggctcaaacccaggcagcctgactcaaggcctcactcttttcattttactatgtttaaatttttgtgtgtgtgtgtttttacatattt

SEQ ID NO: 542747 - DNA, 478 bp, Homo sapiens
aaaaaatgtgatctttggaaggtgaagacaaatctatatccatcatttatgaacttgctgttgcctataatgacaaacacaataaaatttccctgtagtaaatatacataaatttttatgataatatcaatgttactaatgcaacggcagctttcattccttgaacaattactgtgtgcctggaattatgctaagaactttaaaagcataatgtaatacatataccatgaggtaactactactatcatcttcattttacggatgaagaaagtgaggcttaggttaaataactttcccaaagactcatgaggcggaatctgcaaacctaattctagaacccatggtctttatttctgtgttataattgtctcagttcacaggtgraggctaggctcaaacccaggcagcctgactcaaggcctcactcttttcattttactatgtttaaatttttgtgtgtgtgtgtttttacatattt

SEQ ID NO: 542748 - DNA, 642 bp, Homo sapiens
tgccccaaattacctgaatttagaaaggaacacaaagttacagtgagygcattttattttagctcagacaaatccaacaccatggatagaaggagggaaagtaaagatcccattcagagccttcctcctccaagaattgaggggctttctcatttttctctctgtaaaggatcatttcataattcagctctcttacttttataagccacttttaaaacccacattcctgtgtgtatttatatctatttctgtgctttctattctgttctattagtaatcagtccattcaagtgtcagtaccatgctgttttaattatggaggctttatactgtgttttaataactggtcaagctatgtcccttactgtgctgcttttttcagagttgaaaaagatttaataaaatcacaaatttaattggatttaatccttcatgtaaacaatatacaaattattttcctccttgcctctggttcttattcttttttaatcatctttggtgaatttttttctttcatataagatcttaggagtagatggagaggagtgactaaatctcacaagaacagactcaatattaccacacagtaccgaggggaaaatccacccccatgattaaatcacctcccaccagaccccaccc

SEQ ID NO: 542749 - DNA, 642 bp, Homo sapiens
tgccccaaattacctgaatttagaaaggaacacaaagttacagtgagcgcattttattttagctcagacaaatccaacaccatggatagaaggagggaaagtaaagatcccattcagagccttcctcctccaagaattgaggggctttctcatttttctctctgtaaaggatcatttcataattcagctctcttacttttataagccacttttaaaacccacattcctgtgtgtatttatatctatttctgtgctttctattctgttctattagtaatcwgtccattcaagtgtcagtaccatgctgttttaattatggaggctttatactgtgttttaataactggtcaagctatgtcccttactgtgctgcttttttcagagttgaaaaagatttaataaaatcacaaatttaattggatttaatccttcatgtaaacaatatacaaattattttcctccttgcctctggttcttattcttttttaatcatctttggtgaatttttttctttcatataagatcttaggagtagatggagaggagtgactaaatctcacaagaacagactcaatattaccacacagtaccgaggggaaaatccacccccatgattaaatcacctcccaccagaccccaccc

SEQ ID NO: 542750 - DNA, 242 bp, Homo sapiens
atgtgcctagcaatgctggagcctggatcaaagttcagggagaccccagagacctgggcttctccccaaaagaccatcttgaaagaggctttccttgcctttcctggcaggaatgtggctgggctaaggagtcagtgagggccagagatttcggtgttggaggaagcttaaccttcaattctggactcgactaggcrtccacagggagcacatgggcagactccagatcacagagagaggtg

SEQ ID NO: 542751 - DNA, 380 bp, Homo sapiens
gctgtggctgtgtgtgtgtgttagtgtgtgtgtgtgtgcgcatatgtgtttttgtgtgtgtttatggggattgtgccacactgggctgacagcagcacagcccaatgtgcagagctgccaggtattgtgaagagcccatggccaccctgggcacrcctttgggcagtgttgagggcacatgagaatcaggagacctgtgggtggctggcaggagtagctatctgacccagggagtaggtgggctcacagcaggggcttagagcccagatcaagatcaagttgagtggcatgctgaattgacagtgtatgaaggtgtacaatgacatggaaagaggattctggagcttccgcaggaggacagagggcccctgagggccgga

SEQ ID NO: 542752 - DNA, 410 bp, Homo sapiens
tttgaagttgaaaggaataaaagagagagaaagaaagaragagatacttgagggtcagagcagacagagtcaccaaaagcatttttgtttgttaacatttttatttatatactgcctaaagtggcagtaattgagaaatgtttaggtaaagaaaaaaaagcgaccagaagagaatgaacctgtgaaaaattaagactacaactgatggaataaagtcaagcaaatgagagaatgtgatgttagaacgggtagaaagattaggtttggaaaaaaagaaaaaagagctcttcttctcagccaggatgaagttgaattaagatataatcacatttattaaataaagaaaatgtggtacatatacaccatggcatactatgcagtcatataaaagaatttaattatgtccttca

SEQ ID NO: 542753 - DNA, 622 bp, Homo sapiens
tcataggcatagccaagaaacaaatacttgaaatatattgaggtttytaggtgtagaataagcaccaactaatggctgaccagatttaagagatggaaaagagggacaaggcattcttcattgagatagttaatacaaagagaaaaaatagttgaataggtgagtaggcaagatagtgaaatagctgagagataaatgtgttaagtgtgaaatgttgatgagatgctgaaatggcatggactaaccccgtagttacatggatcgcctgatgacagagctggatgttagaaatttgtagtttgtgttgtgtaagtgacagatgaagcccgagcactgtttactgttgtcccagaagagaatgaaaatttaaaaaaaaaaaattgctcaggaaccaaagctgagaacaacaacacgtgcaaggaaaaaaaaaaatgcttacaatacagtctgggaaggctggtgtaaaactaggagaaaatctaagaggaaacattcatgagaattaatatttatgaaaatcaataaagatctaaaagctccagagaggtgatataagggaggaactgcaacatatataatgaatgcggcaattataagtccattagtgatctcagtaagataa

SEQ ID NO: 542754 - DNA, 622 bp, Homo sapiens
tcataggcatagccaagaaacaaatacttgaaatatattgaggtttttaggtgtagaataagcacmaactaatggctgaccagatttaagagatggaaaagagggacaaggcattcttcattgagatagttaatacaaagagaaaaaatagttgaataggtgagtaggcaagatagtgaaatagctgagagataaatgtgttaagtgtgaaatgttgatgagatgctgaaatggcatggactaaccccgtagttacatggatcgcctgatgacagagctggatgttagaaatttgtagtttgtgttgtgtaagtgacagatgaagcccgagcactgtttactgttgtcccagaagagaatgaaaatttaaaaaaaaaaaattgctcaggaaccaaagctgagaacaacaacacgtgcaaggaaaaaaaaaaatgcttacaatacagtctgggaaggctggtgtaaaactaggagaaaatctaagaggaaacattcatgagaattaatatttatgaaaatcaataaagatctaaaagctccagagaggtgatataagggaggaactgcaacatatataatgaatgcggcaattataagtccattagtgatctcagtaagataa

SEQ ID NO: 542755 - DNA, 622 bp, Homo sapiens
tcataggcatagccaagaaacaaatacttgaaatatattgaggtttttaggtgtagaataagcaccaactaatggctgaccagatttaagagatggaaaagagggacaaggcattcttcattgagatagttaatacaaagagaaaaaatagttgaataggtgagtaggcaagatagtgaaatagctgagagataaatgtgttaagtgtgaaatgttgatgagatgctgaaatggcatggactaaccccgtagttacatggatcgcctgatgacagagctggatgttagaawtttgtagtttgtgttgtgtaagtgacagatgaagcccgagcactgtttactgttgtcccagaagagaatgaaaatttaaaaaaaaaaaattgctcaggaaccaaagctgagaacaacaacacgtgcaaggaaaaaaaaaaatgcttacaatacagtctgggaaggctggtgtaaaactaggagaaaatctaagaggaaacattcatgagaattaatatttatgaaaatcaataaagatctaaaagctccagagaggtgatataagggaggaactgcaacatatataatgaatgcggcaattataagtccattagtgatctcagtaagataa

SEQ ID NO: 542756 - DNA, 634 bp, Homo sapiens
aggaaaacatagagtttttttttcttttataccaaccatttgtaattgctatttttattgtgtatcaatttattagaaatgacacaacacaggaacagcccaaatggaaaggatgcataaagcgaaggggagggacagaccacaaagctcccatgcagctctacgtgttcaccagcccagaagctctacgcattgctttaaaaataacatcattgtctgtaatacaactccacaggaatacaagacaaatgtgcaacaaatataaagagatcaatagactgattctagaagtcactagtacagtttcatgtctatatgtaacccatgtataaaacatggtayggaaaacattatatgtatatgaaatatttgcttattaaggtgaattctgagcccatggatatctttcttacttgaagtgtgttccttctgatggtgatggcaactttctctgtaggagtaactgaacaacatgcattccagtggcaaggagtctcaggcagaggatgctttctatgaggatcagcctctctaacctcttttatgtttggaagacagtagcttcgtggctgcattgctgatacctacagtagaccccagcagactgactgccagaccaggagcctatgctgtc

SEQ ID NO: 542757 - DNA, 634 bp, Homo sapiens
aggaaaacatagagtttttttttcttttataccaaccatttgtaattgctatttttattgtgtatcaatttattagaaatgacacaacacaggaacagcccaaatggaaaggatgcataaagcgaaggggagggacagaccacaaagctcccatgcagctctacgtgttcaccagcccagaagctctacgcattgctttaaaaataacatcattgtctgtaatacaactccacaggaatacaagacaaatgtgcaacaaatataaagagatcaatagactgattctagaagtcactagtacagtttcatgtctatatgtaacccatgtataaaacatggtatggaaaacattatatgtrtatgaaatatttgcttattaaggtgaattctgagcccatggatatctttcttacttgaagtgtgttccttctgatggtgatggcaactttctctgtaggagtaactgaacaacatgcattccagtggcaaggagtctcaggcagaggatgctttctatgaggatcagcctctctaacctcttttatgtttggaagacagtagcttcgtggctgcattgctgatacctacagtagaccccagcagactgactgccagaccaggagcctatgctgtc

SEQ ID NO: 542758 - DNA, 552 bp, Homo sapiens
cattactgcctgagctctgcctcctgtcagatcaatggtggcattagatttccataggagctcaaaaccctgttggaaaaattgtcttccatgaaagtggtccctgctgccaaaaaggttggggtcagccgacctagacaatcattctgaaggcctctatcatattcacacctggaatgctgacaaatatttttggtcaaagattcactagcacattaaatctgtaaaaaaattaaagttctaagttgtctaaaagaagctcacccaaagcaagaatccctgctttgggatctgtgataaagggattttagttgcccggcagcccacagrgacagcaaattcattcatttgtgagaaagaacgaataagggctgaggtgtctggctgttaaacgccccttactactcttcactatttttttctttttaaaattcctataacttattcactcaccacatctttatccaaattgtgatatatcctgagggggaaaaaatcatttgtattccccaccatctagatctaatagacattaatattttgacatgtttt

SEQ ID NO: 542759 - DNA, 641 bp, Homo sapiens
ggtgacagcagtggtgagtggtagtggtggtggtggtagctgtgtggggtgtggttgttattgagggttgtgtgggagatgggggaggtggtggtggtggtggtggtggtggtaggaaatggtgatggcagtggtgagtagtggtagtggtggtggtagttctgtggggtgtggttgtaattgagggttgtgtgggaaatggtgatggcagtggtgagtggtagtagtggtggtgatggtggtggtagctgtgtggggtgtggctgtcactgaacattgtgcagragatgatggtagttgtgagtgggagtggtagtggtggtggtagttgtgtggggtgttgtagttgaaggttgtgtgggagacggtgatggtagtgatgagtggtagtagtaatgggggatcatagttgtatatatttggttgaggtgtgggaaaaatatgagcagaggtaattattctatagtataaagtcaggtagcatgatgcctccagatttgttctttttgcttaggattgcttttgttattcaggctgttttttagcttcatatgaattttagcatagttgtttccagttttgtgaaaaatgacgttggcagtttgataggaacagcattaactgtagactgctttgggccc

SEQ ID NO: 542760 - DNA, 636 bp, Homo sapiens
aaattaaatacagatttaaaacattaaaattaaaaataatgttgtcattgatatatttaatatatttcctttcaaagtattaactattaagataaaagaacgtttactatttgatgtttaaactatcttgaagaagatgaattttactatttgatgtttaaaactatttagaaaaagtgttatatatatacatatgtaattattattttagggctttgtctagtaacaaaaatagcataaaaatactgagctattggatttctctgagtcatgtgttttgcgttaaataagaacaatgtggtctgaaaacacatgcatcagctctgcttgtgctgctgaaggtattgacagagtgatcaactgtgttcatttatttttcatatgactgatagagatgtgcacttgaattaaaagagacaggggcaaaaatagggaagagccttatttttactagcagtttgaaatgaaatccccaaagagcatcattcactactttggaaataacattcttattgctgaagatagagggagagaattgctgtcctgacaatgggtgtcaataaaaaagtgacattactagaggcactgtgattcaatagcaatttctaggagcasaaaaagttttcaaaagtgatc

SEQ ID NO: 542761 - DNA, 537 bp, Homo sapiens
aatatgcaatacatagtatatctatagttgttatatttaatacacttaacagtttttatatttaaaatgtctggatgcaatttctcttcaaaaatgttaaataccaaggacacatctatattttttggtaagatactatctattgaaagtgccatgcaggacagatataaaagtagcttgaccaagtctgaattctcactaatctcaggtgaaggaagccatttgctattgataaagctagttaatctccagagtacaacctgggctttatgtatttttagatgagaatcacaaaaattgatctgcacttgcttctcatacaagcttcamgtgccggctgcaataaaatctatgactgtgattcaaagtatacttccagtctgcatgaagaaagagactccaatgctgctaaaaatgaattatcttctttcttcaattttgaaaatgccttagaaaaattaactaattaacagatgcatctgatgagaatcctgtagactatcactcagagatcttctattgtatatgatgtaatac

SEQ ID NO: 542762 - DNA, 496 bp, Homo sapiens
tacacatgttatgcgattaggaagttcataaatgctacaataaatatggcactttaccttgaaaaaggcctgaagctggtttgtgtgggagtggacatcagaagggttgcagcttgtgagtttttgtgaggtggaggaaggagggttatctgaaagcaaagttgatcttataaaaattttaaaacataggcattcagcatcaggcttttataagcataaaaatgatcagaactatagtcactagacatattagcaattgttcttacaaggaccaaagcttggcccaaagaaggaaaaacctttctcctgattttctcrttgtcaaactgacgcaaataggctcttcctaactgtttttatttatataataaggatagccaaaggaaaagaaacacaggatagagggatgtaaacaagatggcttaataatcagaggggtctgaacccatcatagtttatttgtgtgaatgctgtctcaaagtaattactgtttata

SEQ ID NO: 542763 - DNA, 498 bp, Homo sapiens
attgagcttggtgtcaggttgggaatccaccatcagacctgggctgataggcaggcaggttggactcccaaatctccaaggctccctgtacccagccccgtgcctctcctttcctttagaccctgtcaggggcatgggtccccatctgagaagccttctctgtccaggasgggggaaggctggagacgcaggagcttctgagctctgctctgggcctcaggacctgctggaatgtggactccgtgatagcaggggttattccatcatgttgtcctagaacagtgcctggcacgtgggcgggccttggaggctaagaagcagttaactgggaagaggaagtgggagaggaaggtgaaaaaatcaaaaggggagctggaaggcatccaataatgggtgcctggtacatttcattgtgtggagagctgaggcataggcttctgagggcactgtgtggagctggagccacactgtcagggccagaatcctggctgcactgcc

SEQ ID NO: 542764 - DNA, 567 bp, Homo sapiens
ggtacaggaacccaggtcccttctaccttattgctctggcatcctgggatttggccttattcagtggtttaaggtgccttaccaccaggtctgcattccggccagtgggaagggtgaaggggaagaggagggcatgcccctttccatagccctgatttgtaacttgtatacattttgctcacatcccatgtggcatccctttggcacaacttagtcatatggccccatctaactgcaagagaggctaggaaggtgttttctttattttgggctgctatgtgtccagctaaaaatwctattgccacagaggagagaaaaatgaatatttgggaacaaccagagatttcttccacagaagtgtgacttccctcgtttctgcaactaaacttgttggtccagcagtggccccagaaggcactgacatcatatccacctggtgacatccatccagagggaaactgctccaacggttagaaaagcctgcctgggggccaggtaaaggatgaaggagatgagaaatttgtgcaacatccttttttttttttttttttttgcctggctgggccc

SEQ ID NO: 542765 - DNA, 538 bp, Homo sapiens
tgtttttctctttttaagcaacttggtgtttgtacattcaattcagcacactcatgtggatgaattaagggggatgggaataaaccagtgtctcccaagttcgccataagactcaccctgggtgtttgttaagtgcacatcttggagtccatcctgggcattctgattcaatggtctgaaacgggaccctggagtctgcaggtttaacaaattgcccatgtgatttttaatcaggcaaatttatgaacccctgtgctgtttccccagcgtatccagagcctgccagaacatggagattaattgcaaggatattcacgataacatctagatcaggagctacggcacggggaggccctcatgaggcycgggctgggagactgggtgaggcggggaggtcaggatccagtggagctctcagggcatggctttctgaggtcttacagcagccagagtttgtggctcttccttccagactctgccaccagccggactcatctgctgtcagggagtctccgttcacttctcttactcccaccag

SEQ ID NO: 542766 - DNA, 634 bp, Homo sapiens
aggtctctggactcctattctggtgctctgtgcacctgatactgcatctggcattgggggtggagagctgccctggatgcctctggaaggtcctgcccagcagagagaggatgagaaacctgtctcagggctgccccatcctcttcgtgtccttgttcttagtccagggtcctttcaccaaaacaaattaaatccaggcccgagctgtgtrtctggagccaccactggccttctgaaattcttcttggtgtggggctgagtggataaaggaggaccctgcagggctgctggcatcatcaggcaggagtggcacttcgtctgcttcttcccagttattgcaagttcttcccaggttcccttccatttcccagcagatgctaaatggagaagaggaaaaaagtgccctctaaagcttggttcatggggatattcccgtctttgggtttggagagattagaatttgaaaggagtgggggttatgcctatgtatctgtgcgtacatgtgtggtttgggaacaggcaacttctgcttcctaataaaaaaaaattaaagcttgaaagggatttgttaaatcaactaaagggggcccttggggtctccatctctcttctgtgcaaacccttgcccagtgtg

SEQ ID NO: 542767 - DNA, 634 bp, Homo sapiens
aggtctctggactcctattctggtgctctgtgcacctgatactgcatctggcattgggggtggagagctgccctggatgcctctggaaggtcctgcccagcagagagaggatgagaaacctgtctcagggctgccccatcctcttcgtgtccttgttcttagtccagggtcctttcaccaaaacaaattaaatccaggcccgagctgtgtgtctggagccaccactggccttctgaaattcttcttggtgtggggctgagtggataaaggaggaccctgcagggctgctggcatcatcaggcaggagtggcacttcgtctgcttcttcccagttattgcaagttcttcccaggttcccttccatttcccagcagatgctaaatggagaagaggaaaaawgtgccctctaaagcttggttcatggggatattcccgtctttgggtttggagagattagaatttgaaaggagtgggggttatgcctatgtatctgtgcgtacatgtgtggtttgggaacaggcaacttctgcttcctaataaaaaaaaattaaagcttgaaagggatttgttaaatcaactaaagggggcccttggggtctccatctctcttctgtgcaaacccttgcccagtgtg

SEQ ID NO: 542768 - DNA, 483 bp, Homo sapiens
atacctgaaaaaagaatcgattggctccaagatgcaaaaagggaactgcaaaatcaaaattaataaatgattacaggtctacaaaacatgccaactagtcaacagccacttaactcctagttgtatccaaattataattagtgtagaatgtgtctgcagtttaagaagactgatatgctctgggcctccaaatatcagactgaatagcatacggaggaccctggccctcctcgtctctgcctctgactcagaaaactcaagagggatgggaaggctaatccctccctggggaggggctcagmtgcactcccgttacaggggtcctggactaccccctccatgaaactttacataactcccattctttgtctttcggggcaatgtttccaaactacagttgatccaaacatcacttgggggttggctttagggcagggtcacacctgaatatccctaggttgagcctccaagtttcctgggctc

SEQ ID NO: 542769 - DNA, 403 bp, Homo sapiens
ctcatgcctgtaatcccagcatttagaaaggcagaggtggggggatagattgagcccaggagtttgaaacttgcctgggcaacatagtgagactcttttatccacaaaaagcaaaaaaaaaaaaaaaaaagacaaactaaaagrgagtgttcttcctaataatatgtttttctaggcacaagtctcatctcctcctctggaaaagcctgccctacacgttcagtcccgataagttctccacctcacccctctaattttctattaaccccaccccgcccacacatacgcagccttttcaccccttctgccttttcagcgtccttcacactactgaatctctggcttccacctctgccattaggaagctcttcctcctcttgctctccactttctcttgcaagtt

SEQ ID NO: 542770 - DNA, 375 bp, Homo sapiens
aattttctattaaccccaccccgcccacacatacgcagccttttcaccccttctgccttttcagcgtccttcacactactgaatctctggcttccacctctgccattaggaagctcttcctcctcttgctctccactttctcttgcaagttgacccagctttctctggaagcctctgcacaggctacctgggcaggccccagcatctgcacatgcttcactgcagccctctgggctcctttrtgaatgtcattaagtctctttctggtgtttcttccagcctgccttaatctgagggccccacacgagccggctcaggcctcctcttccttcgtacctccctcgaagcctgggattctgggcagtgagtgctcca

SEQ ID NO: 542771 - DNA, 365 bp, Homo sapiens
tgatgtcacctttataaacccacatgctggactcggagctgtcatattgtctactaaatccctcagaaggaggaagtctgaatcgagatggatttcaaatgttcgtttccagtcaaacggacttaaaactgtgcatgtgaggaggagttcaaggaagtcagccttgttctcctggaggagaagcctcggggtttcatgctagtcgcctttcagcaggagccaggctgtcgtggaggggagagctgagactccatcctgttgctccatggggtaaaagcagagccagttgttatcaacccaatgtggacagactccagytcaacagaagaaaagccagggaccttgagaccctctgagcatcctgt

SEQ ID NO: 542772 - DNA, 502 bp, Homo sapiens
tggaagggtcttcttgagatcaccgagtccagtggctcccaaacagcaatccccagaccagaatcagctggtgaattgttgaaacacagattcccaggccttagcccaggaggtattttaaaggtctccctagagaattctaatgtgtagctgggttgggaatcagagatctagtccaatttcaccacaaggaaaccaaggcccaggaaggggaggttcccactgtgcctgcgtccccatctgcaaggtgaaggaggagactgaggggggtgctaactctctgtgggcctggcattctgtcttcttccccactcttggctggagatggccagggtgataccttccttgccccatctcacccctcccctgacctgaggctgtgaggaggcaaaaggaacagtaaatctcagtcaaacagactaactgatcctgggctgttttacrtccgagtggaaatggggaaatctatccagcatttcagattcttatccagataattacc

SEQ ID NO: 542773 - DNA, 502 bp, Homo sapiens
gccatctgcaaggtgaagggagcatgggagggcttaggccagcaggagtgaaggggaaggacgatgccacagaagacacacaggacagcctagtgccaccacctctaggtgcgcctcttgaagcacagaataggatctgagtcctgttgttgaagcttggccttacygctttccaactgtgagaactcaggcaagctgtgtaatctttataggcctcggttttcacacctgtgaagtcggagggataatgccacttacctccacaggaggcttttgctggttaaaggagaaaagtcctggcacatactagatgctcagtaatcaacactgccttccttccctctcctagtgttgaaggagagcccagcgacttttaaaccttcccatgttatattacttcctatacaggaaaaattgccaagagctgaacagacacaaggtgcatccctagctgtcaccccaaatgctcctcccccgacagggtaggactcatcccagaggt

SEQ ID NO: 542774 - DNA, 450 bp, Homo sapiens
gtaagtgggagctaaatgatgagaagacatggacacaaagaggggaacacagacactgggacctaccagagagcagatgataggaggagggagaggatcaggaaaaataatgaatgggtactaggattaatacctgggtgccaaaataatctgtacaacaatccctgtcatatgagtttacctatgtaacaaamctgcacatgtacccctgaacctaaaataaaagaaagaatccagccattgcctcacttaattaagaaatttaaaatatgtatacccactgctttctgattctttctaagcactaagatacagcatgaacaaacaaaagatttccactctcatggagttttccttctagtgaagacaacagacaataaacaagtaaataattcaataaattatttcagatagtgctattaaaaatatgctatgaaaaaaagcagagta

SEQ ID NO: 542775 - DNA, 637 bp, Homo sapiens
agctggagttcaaatcctggttctgtcatttagtagttgtaaaattatgttagtcacttaactactctaccttagttctgtccttcataacatgggaaagaaatgtgccaatcttacagagttgagaagattgagatgataagaaaaatggctagagtagtgaccagcataaagacaatacttgggtaacttaagattttctcrttgttcttaacatgttgcagtcttatttagctgtggatttaattctgtttgttccgcgtgggctttatcatatattctaatgtaatattgtttttcagcaacttggggaaattcccattctattcattatgttttcaaatattgtttcctttctctttctgaatatcatttatatagcatactattaaaaaaaatattgcccataactttacctctttgtgtttcattttggataatttaatcttccagttcacagttcatgtagaaaataggcaaagatagggaaatcccaaaaaagaagactactaaggagttagtagccaattagatttgaagtataacaatgctacaataattgaaaatgtggtatggctcatgaattagtagataggtaagtgaaagagaatagaaactctagaaatagcctcaaata

SEQ ID NO: 542776 - DNA, 537 bp, Homo sapiens
ggaagagtcctctggtgtggtagtgagctccycattaggggacgcatttgagccaaggcccaccaggcagggtccccagctttgcggccagcctgggataagtgctgagggtttttagtgcttggcacttggtgtggggaatcaggctgcagaagttcccggagcatccacgttcctggcactctgcccagtgcttggtaggctggaaggtgggtttgggcatttctttccctgcaggtggctcatcgttaaccagcagccaccctgccccatgagctgggtgcagactatctgtactcaagggggattctccagggcctcccagccccaggactctggcgtacatctttaaccccagatgctggagaccagtctcctcttttcttacaatggaaggttggagatgtgagatcgtgagggcccgtgtccctgctgtcatcccctatgggttgtaggtcatctcctagagtgtcgtgtcactgtgctgaaggggacatggtcccagaaagagcagggatttgctcagtgacccacagc

SEQ ID NO: 542777 - DNA, 582 bp, Homo sapiens
ctacctcagcctcccaaagcactgggattacagatgtgaaccactgcgctctgcctccactggagattttcaygcaggaaaaagacacgagttgacttttgttttaatcataatcatattcacagcaattatacctttcagtattgagcattttctttgtgctaggcatcagctaagatactttatcgtgagtcaactcattgaatcccacattacagatgaggctaggagagttcaccaagcccagtcacatagtggagccgggacgaaccaccacattggaagagttcaataaacgttagtcattgttatttttgccagtatttgttttcacgagcgtcccctggcatgccaggtgttgggtggtagctttagctttgaaactgcctgggttggtgccagtgagctggactaataaagccatttcatcagactagggtgaagaatagggtgcactaccagcctctgcccctgctctccccggttgctgtggttataagctgggcacctggttctctcttggtcgctggcccctctccagctcaggcctgggtgaccctgatcccgcctggtgttgcccca

SEQ ID NO: 542778 - DNA, 627 bp, Homo sapiens
gggcagaccccacaggtggcagggtgcaggtgagctggagagaccaaggccaggtagttatgaaaagtctccaggggaggcaaggtgaaggctggaagggccccagccagggaacggaaggagagagcatagctgtcagaaatacactggatttagacttgatagcctgtggcaaactcacaccatgmgaagagagagcaagaagtgaaaaataaacgctacttgtagctcaaatgacctgatggctctgcgtggtgagccttacccattcccagaactttattattattattattatctttgagacagagtctcgctctgtcacccaggctggagtgcagtggcgcagtctcggctcacttcagcctctgcctccggggttcacaccattctcctgcctcagcctcccgagtagctgagactacatgtgcccaccaccacgcctggctaatttttgtatttttaatagaaatggggtttcactgtgttagccaggatggtctctatctcctgaccttgtgatccgcccacctcggcctcccaaagtgctgggattataggcgtgagccactgtgcccggccttcccagaactttaaataccatctgtaggttgacaattcccaact

SEQ ID NO: 542779 - DNA, 505 bp, Homo sapiens
gttttcacggttcctaccttcctctgttatttgaatgttcttgggaacacactgtcctcttctggtctcgggcttgtatggggggcaccaaaaggacagactcgggctttatgcaagcttcctttccacccttgccgcacagaaaccacacagagggaggcgtggcaagaccaaaagagacccaacagcaggatcctttccaaatctatcccttccagaggcaagcatttgtttggatgccctagcaaggagtggggggaccttcyttcagttggtgcaaagttaacgaaccatcttctgattttatggagagatgcaaatagtgtgttgaatataaatctctttgttgttgttttacaggactgtagaagcggccaggaagaaaaccaccccctcttaaggttgtttttgtgaccgttctttggagcattgttctaaaaatgggaaattacatattgctgtgccaagggcaacaaacacctgcagttaaaggaataccttccgc

SEQ ID NO: 542780 - DNA, 630 bp, Homo sapiens
ttttcacggttcctaccttcctctgttatttgaatgttcttgggaacacactgtcctcttctggtctcgggcttgtatggggggcaccaaaaggacagactcgggctttatgcaagcttcctttccacccttgccgcacagaaaccacacagagggaggcgtggcaagaccaaaagagacccaacagcaggatcctttccaaatctatcccttccagaggcaagcatttgtttggatgccctagcaaggagtggggggaccttctttcagttggtgcaaagttaacgaaccatcttctgattttatggagagatgcaaatagtgtgttgaatataaatctctttgttgttgttttacaggactgtagaagcggccaggaagaaaaccaccccctcttaaggttgtttttgtgaccgttctttggagcattgttctaaaaatgggaaattacatattgctgtgccaagggcaacaaacacctgcagttaaaggaataccttccgcgaggcggcttttcggagcatgcatgtttatagctccagccaggccagaccgagggctgctgcataagccctgcttggtgcatttcttyacttgcaaggggacagagtgtgggcttaggtttgggac

SEQ ID NO: 542781 - DNA, 561 bp, Homo sapiens
cttggttttctgtggtctttttctaaaagatctttcaagctggaagaaaaactgttccgttagaagttcatgtttcatctacataataaatatatcagattagaagacagcatcctagtagtaagttccaaacacatttatgagaccttttcattactttttaatttcccaaagtttcatttaagctctcagatttgacmaaaaccattttactaaacatatttttttttattgtatatggataaccttcaagacctaaagaaataccatagtgtaaaaatatgaaggatgttagctacacagaaggaaacatgtacttaacttttttattctctagaaaagaaaacatttaggtcttgggttagtttcctactgagaatcgtaaattcaaaggtacattaatacatcattaccctttaaaaacaatttatcaccaggcttgatgataaaatcgttgcaaaataccacaagaaacctgttttagaaattaaaacttggaagctaaaaagttaaacattttttttttccagtgaattgagagaaaaaggcatccaacaaatt

SEQ ID NO: 542782 - DNA, 641 bp, Homo sapiens
gaatatcccctggagaagtcatttacataattaaaccttggagtatctgaacatggttcagactgtgacctactcttgcatctgaggtgcctcagaagcagtgtcatatcatacacgtcctgctgctgcttgatcagcttcgcttctctatcaagccttctcattgtgacctggagagcttcttcaaataccacctacgagctgcctttcctccccatttcccactttgattttgctgaaaactcactttccttaacttaaactaatttaatctttttgctgttttctatgtgccctggatatcggagggattatttaagctgttttaatttttaatataaagaatatagggctctgattataatcatctactgagtacctaggaatgaatgtcatactctgctctgtttggacaatttgtgttttctttgtacagataattcagctccctcatgtaatacccatgttaacccagagaggtacatattatwatccctattgtacagaagaggaatctgacccttccaagttaagttagaaatgggtgggacagtgataatgattgaaacctaagatttgactcctgaatcccactgctcttaacctttggaaaatattgcccatcaacttctctttattca

SEQ ID NO: 542783 - DNA, 641 bp, Homo sapiens
gaatatcccctggagaagtcatttacataattaaaccttggagtatctgaacatggttcagactgtgacctactcttgcatctgaggtgcctcagaagcagtgtcatatcatacacgtcctgctgctgcttgatcagcttcgcttctctatcaagccttctcattgtgacctggagagcttcttcaaataccacctacgagctgcctttcctccccatttcccactttgattttgctgaaaactcactttccttaacttaaactaatttaatctttttgctgttttctatgtgccctggatatcggagggattatttaagctgttttaatttttaatataaagaatatagggctctgattataatcatctactgagtacctaggaatgaatgtcatactctgctctgtttggacaatttgtgttttctttgtacagataattcagctccctcatgtaatacccatgttaacccagagaggtacatattattatccctattgtacagaagaggaatctgacccttccaagttaagttagaaatgggwgggacagtgataatgattgaaacctaagatttgactcctgaatcccactgctcttaacctttggaaaatattgcccatcaacttctctttattca

SEQ ID NO: 542784 - DNA, 220 bp, Homo sapiens
atttatgaggagaggaatgaaaacacatctgtttaatattttcaaattattacccctgttacccctgcatctcagagggtaatcactggtctctggagttctgtgggtccctttatagtagtgtggctcagagcagtcttagaggaagatttacgcggcccttggggcccttcacctgactmacagcccctccctttttagaccatcagcccaaattctt

SEQ ID NO: 542785 - DNA, 614 bp, Homo sapiens
gcagttattttattaggtcggtgcaaaagtaattgctgtttttgccattaaaaataatggcattaaaagtaatggcaaaaacggcartgacttttgtaccaatctaatatctctgctgctatagtaaactaggaggtagggagaacaagattactggaaaatagataaggaagttgttgagggaagatggtcggcatttaacctaaatataagaatgtataagcatcacaagataccaagagcaatggtaatgggaatacggaggaaaaggaaatcggttcacccaaattgaaatagtcttccgttacttcttagccgtctctcctatggaaagctcacctaagttgaggtctgggaaatgctgagaagtgctgacctgtcagccacctagctactcctccgtttcttggtttggccttcttagaatggctatgattttgggcaagtacattacaactctttccctagtcagcttttttgtaaggaaggtatgataatactttacatcatggctgtacagtaacttaataaatggcattaggctgctttgaggttcacagataaaagacatattaagttcaaagtattactttatttcctttaaagtgccattt

SEQ ID NO: 542786 - DNA, 614 bp, Homo sapiens
gcagttattttattaggtcggtgcaaaagtaattgctgtttttgccattaaaaataatggcattaaaagtaatggcaaaaacggcagtgacttttgtaccaatctaatatctctgctgctatagtaaactaggaggtagggagaacaagattactggaaaatagataaggaagttgttgagggaagatggtcggcatttaacctaaatataagaatgtataagcatcacaagataccaagagcaatggtaatgggaatacggaggaaaaggaaatyggttcacccaaattgaaatagtcttccgttacttcttagccgtctctcctatggaaagctcacctaagttgaggtctgggaaatgctgagaagtgctgacctgtcagccacctagctactcctccgtttcttggtttggccttcttagaatggctatgattttgggcaagtacattacaactctttccctagtcagcttttttgtaaggaaggtatgataatactttacatcatggctgtacagtaacttaataaatggcattaggctgctttgaggttcacagataaaagacatattaagttcaaagtattactttatttcctttaaagtgccattt

SEQ ID NO: 542787 - DNA, 492 bp, Homo sapiens
gagttctggatgctgtgtcagccttgagaatacacctcaaagactttcgactctagggagggtaattgatcagggcttccactgctagactgaaatctactgctgtgcttgcaacaggaccaggctaggcactgatctaagtgttggataaattatgcagatatgctcagtaactttatgggatacatgctatagttcctaaataagttactatggtaaattcttaattatacactatatggtttgtattttctagctcttgagctgcattttttcccccctattgccaccygtggcagctctgctaattacctacctaatatccattattcctgtttttcttaccatcagaacttctgttttgctcaaggcaatagcatgtgcagccaaaaacttgatttcccaggagtggttataggacacagttctggccagtgagatgtaagaaaaagtctacggggggtgcagagcggggcggagcgtgggaaagcg

SEQ ID NO: 542788 - DNA, 600 bp, Homo sapiens
aactgcggatttttcccttgaagaagcccagtactttgcttgaaaagcaatctacttccttaaagtatcttcttacttcctactgttgattatagtagaaatcaagagataaattaatccaagtaaagatttagtcaagacactaagttattcttaaataaccaaacagtaaaattaaaaagtgatggaatgattttctacagttgacttaaacagtagcacagacatttttagttatgtctttcagaagtaaagttcattttcctctgccaccctcatgttctctatttcaaggatctaattctaggcactattttatttttatattttttcctactcatttgacatctttggtattttggtttgttttttcttcaactttttgttttaaaataattttaaatttacagaaaagtcacaaaagagtacagaatgttcttatataacttttcatccagcatccactaatcatcctagttaatggtagtaccagtatcaaaagaaggaacttcagatgggtacaattttattaattaaactagagacctaawttgaattttactaattgagccactaatgttcttttccaaattcagaatc

SEQ ID NO: 542789 - DNA, 489 bp, Homo sapiens
attctacttgaagactgaggggaaaacaaatgtaaaagtgtattgtgatagtaactgagtggtggtgctctttagagtaaatgatccaagaaatcctctttgagagggtaaaatttgggtccatctgaagtaacagagagttgtccaggcagagaagcatcaagcaatagccctgaaggggaaaagagcttattcagttaaaaaaaaaaaaaaaaaaaaaaacgacgaccaagatggtttaagggtagtgcatgagatagacagtagtatgagatgaggttttagaggcgcaaagggatgtatcgtgtccatcttagaaaacacaataaagacttcaggatkattctaactataataggacacttttgtagagttaagcacgggtgtcatgatctaatctgattgtctgctgtgtagacaatgaattctaggaacacagaacagaaacaaaggcaatgggtaggagactcctgaagtcgtgtgagtggg

SEQ ID NO: 542790 - DNA, 628 bp, Homo sapiens
cacttcatcatcaccatctacatcatttccatcattatagtcataacacttcgtacttccagggagagacagagggagaaataatttacataaaccttgtgaaatatgcagataagatttatattattcacttgacagatgagatgcttgagactcagaaatgaacctagaatcccagagctatgagaggccaccgtggtccctcaagagcctccccaccaccacacccatcttgagaaaactggcccaagagagtactgctgctggaataaccttgaccttcttgcacaatgaagagacagaaaagcagaatcaacacgcctgaagtgatgtttaattaatgatgataatggackgggatttgagaaatcttttcattttcgcttgctaataataattttagtcagagttacaagtagggttcttgaaaaaaaaacatatctgacgtataaagacaatggattcagggatacttgatcaaattgtttctgatgaatgaggacccacactctctgctgtcacaaacaggaggtggggcccaagaaacagtggtgaaagatgtttcaggttgatctgcaatggattattcacagcaacaatgaggatgatacagtttcagctttttcct

SEQ ID NO: 542791 - DNA, 655 bp, Homo sapiens
cctctgctctgcctttcctacctccctatccttccccagatggaatacttctctacctgctaacatatgggttacagttccttacagaattacaagaaagtaacaaagaaagagagtgaggaagaagcgggagaaagcaggcagtagagaaagagggaaataaaaccttttcttctacattaaggataaaaattcaatggcaaatttctaatttaagagcacatagtcttaagttcactctaaagtgtaactgattaaggtcatattccattcctcccccaacacacctctcttggcagctttttccaggggaaargaaggaaaaagtaccagggcattgaatgcatgaagggtgagagcaggggttgagggcacaagcaaaggagaggctggatgcagagaggagaaactgagctcccttgcctgcccagcctgcaaaaccggttctgctgatgtcactggggaagaaacagaagatagatttctaaaggtaatatgataatttggggctaggactcaagaacagaccttatacctgggtggaataagactggtatagaattaatccaaaccttaagaagctgttgaggcagaccccaggcacagacagagacacaaacacctctatgctgcaccatggcccaggcccagacct

SEQ ID NO: 542792 - DNA, 631 bp, Homo sapiens
acaataatatttagagttgaagagaatatttttaaaaatccgttcccaaaatgcagcacagagagacaaacaggtaaaacaaggctaagatattataacaaggaaaaaaaatccatttcactcacgaattcagatgcaaaaattctagacaaaatattatccaacagaatctgctatcatgtagaaagcataattgccaatgtgggtttactttagaaacacatattaatagattaaaagggaatatccatataattgtttcaataatttcataaaacacttaataaaattaaatataaattactgttaaaagtttccagcaaactaggaagggaacaaaattctctattattagtattattagcattattttaaacagsaaatgttagaagaattagaaatgagataatacactcacttttatcagttcaactgcttgactttgtatgggagatcctagctagtgtgattgaaacaaaataaaaagcttaaagttcagaaaagaataatcaaaatctcattaatgtaaatgatacgtgactttatattaaaaatttaaataaactatgaataaattttagaatcatatgggagtttagcaagattgctagataataagataaccaaacag

SEQ ID NO: 542793 - DNA, 648 bp, Homo sapiens
tgatccattagacattgttctacaatacaaatggctacatggctaaaagttccgtgccacagtggcacaagagccatgtgcaaggagcatccttgaaactcaggtttaaatgttgctagtttggtgtgcctgacgaatttttgaatttaatcaaatactatttgtagatcagtcaaaatgtgaaatacatagaagggcttccaattaacattaattcctttacaccctgatctccccgagtctgcagaggcctttccactgcacagaagcatggtccaaacagcctggtagtctggctgccttttttttttttttwaaccgacattttaaacctattatttgacctgtctccttaaggttcttcttcctgtgacagaaaatatatgagtaactattttcaggccaggcattatgggtaaaaatggtttaataaacctcaccctgataataatttccagcccaataatagaataaaagggggaaaatacattagctgtatgtaatttgagaatttattttagggcagagtttcatgcaaatcctaccatatagtcagatatttacattgcttatgtttaaagttgggttaggttacatgtgcatacataaccaaagcatactcttcaaagtcactttgtatgtccacag

SEQ ID NO: 542794 - DNA, 609 bp, Homo sapiens
cattacaaagaagaaaagatagaggtttagggtaaattcaaagctacaagttgagcttaaaaggacaattactaagaagtactccttcctgcccaaagaaggggagcaatagaacaacaggttgtgaaaaaccaggcctttaggaggtccatccttccaacgcctgagcaataatttcagaagataactaccctcaggtccaagcaaaactaatcatttaataaatgacttatgcattaggtttgggggagacaagagaaggaaaatctgggaaattctgcccttgtggatgccagaaagaaaggatgagaatataaaaaacagtgaagtgaggcttaattgctaaacacrggctatgaacattctagttggttagaaaagaaatataatgagagggtttgctcgactagatataaaaacatttctagtcctaagattctaaaattctaagagcattttctttgctagaaataacattcagagacttctgcctcctggctcttagaaaaaaagactaaaaactaactctaaagcggtggaagctgtgtgctttgtattcaggaataccagtcccagctaagagtgagggttcatgttgaaaacaaagac

SEQ ID NO: 542795 - DNA, 457 bp, Homo sapiens
ccaaacatgggctgtttgattacgtggaaaattgtccaggtttccttatcrctcatgaaactcttttatatccatcctacagagagatgactcatggcccaggtgaaattcaggtccaagctctggagagtgtgtggggactggtgaaaagacatggtaagatgaacacatgtgtaagtgtaagagcataaaggggctttgtttctattgtttgttagtgattgttttggatactgttttaaatttttcagtttggaaattgagtagtaataaagtctccttggagtagaaagttaaggaagagaagaataaagtgggaataggtaggtcagaggacagaagcctgggagttttactttttttgataaacaaagggaattcaaggaaaattttagtaagagagtcgtgtgattaaagtgggtttacggaaacaaaacaggatacttggacagactat

SEQ ID NO: 542796 - DNA, 435 bp, Homo sapiens
tcaaggatataatctaaacttctactttctctgctattcaagatcctcaaactgtataatgttgttctccacctttctttcctttgcccttttattcttgtgtgcctgcgtttaaaatggtgatagattgaatatgctaagatatttcttgcctctttctctmtgaacataactttatcctcctcttcaatatatcaaactgttatgctccaatacctatcttagatgcttatttggttatggatccttcctgaattttctttccatcttctactaatttctccaaaattcccagtagaagttaggtcagatatagctattcccattttgtgaaccgtggcattttgttcaggaaaagtcacagtggctaacattagtctttacattcaattagtatttattgctcagattgacttgctagctggagagccagaa

SEQ ID NO: 542797 - DNA, 303 bp, Homo sapiens
ttctattaattctttaagaaawagtgtgttataattgcttccctgaagcactctcatatctctgttattttggtcacatcatcatcatcatatctcttttattgagtgtgactgtttgccatgctattgcatgtgtggggaatgtgtgtatgtttatgtatgcatgtatatatgtatgcatagtaaatcacctttatgtatgcatagttaagaaacctggaagggactatgatttatgtgatttattcatgttaagcaaataatattcacattaactctgtgaataaatattgttctcatttt

SEQ ID NO: 542798 - DNA, 670 bp, Homo sapiens
ttcattgatgagtgaagtattagggagatttctgggccactaatcaaaagccacattctctcaccatctgtctgactcctggatctgtttttccattgattccaaattcagaagatgataaaaagggatgttatatattaactacttaacagctacaacaggaagatatccatcaagatggaaagattacayccagggaagtggttcacatggcagcccaagacattgcagagggaagagtctgggagagtacaatttaaccgcaaaacttggctctgccttttgtgacatttgttttgctttgcaatttcaacagcattttacaagagctggatttaatataattgatgaaaatggaacactacctaccatgtactgaaacgcagcaattttgccagtacagtaggtactgatgccccttcttttcttatggtgaagagttagacagtgggcccaagaaaagcttccaagattcattgacacttaccaatttcaaacagtgtggcacaacactagctgactgagaaataagagcagaagagagagcattatggtgcacaggagtttggcatgaggcaaggctttggggagattgagattttaatccacagagtcaaaagctgcggctgctgctccaaatcttgctttggtaatagttgcaagataagca

SEQ ID NO: 542799 - DNA, 670 bp, Homo sapiens
ttcattgatgagtgaagtattagggagatttctgggccactaatcaaaagccacattctctcaccatctgtctgactcctggatctgtttttccattgattccaaattcagaagatgataaaaagggatgttatatattaactacttaacagctacaacaggaagatatccatcaagatggaaagattacatccagggaagtggttcacatggcagcccaagacattgcagagggaagagtctgggagagtacaatttaaccgcaaaacttggctctgccttttgtgacatttgttttgctttgcaatttcaacagcattttacawgagctggatttaatataattgatgaaaatggaacactacctaccatgtactgaaacgcagcaattttgccagtacagtaggtactgatgccccttcttttcttatggtgaagagttagacagtgggcccaagaaaagcttccaagattcattgacacttaccaatttcaaacagtgtggcacaacactagctgactgagaaataagagcagaagagagagcattatggtgcacaggagtttggcatgaggcaaggctttggggagattgagattttaatccacagagtcaaaagctgcggctgctgctccaaatcttgctttggtaatagttgcaagataagca

SEQ ID NO: 542800 - DNA, 619 bp, Homo sapiens
tcagcatggcaaaggaagggagaatacgacgttatttaacacagttagaaaaattattagataatgacactcatatacagttcctctcatgcttgactaagaacaactaataccactgagaatgtagatttatatttactaccacagcagcaatggagaaacccggaatacatttggatgaatgtgttgatagctggtacaagattctataagcttttatatttgaacacaagcaaagagtaagtccagtaattgtgcatatctataaatgtgaatgtgtaaaattaggtgtaaaactgtgaacacaaaactatatgatgttatagtattctttacttcaaaagagatttaggaaagaactactaaagtgtgtgaatatagtggcaaataaaagtttctttgtttctgagtttccatgagtatagttcccataaatgccatcaactgaatgttggaatatgaataaattcatacatccacatagaatcttaaaagttaattttcttgactcatttraacacagttcttcatatggcaagggggttggagtaatagaatctctgtatcttaggtactgaattctaactcttctattactttgcagattttaggaaaagaa

SEQ ID NO: 542801 - DNA, 619 bp, Homo sapiens
tcagcatggcaaaggaagggagaatacgacgttatttaacacagttagaaaaattattagataatgacactcatatacagttcctctcatgcttgactaagaacaactaataccactgagaatgtagatttatatttactaccacagcagcaatggagaaacccggaatacatttggatgaatgtgttgatagctggtacaagattctataagcttttatatttgaacacaagcaaagagtaagtccagtaattgtgcatatctataaatgtgaatgtgtaaaattaggtgtaaaactgtgaacacaaaactatatgatgttatagtattctttacttcaaaagagatttaggaaagaactactaaagtgtgtgaatatagtggcaaataaaagtttctttgtttctgagtttccatgagtatagttcccataaatgccatcaactgaatgttggaatatgaataaattcatacatccacatagaatcttaaaagttaattttcttgactcatttgaacacagwtcttcatatggcaagggggttggagtaatagaatctctgtatcttaggtactgaattctaactcttctattactttgcagattttaggaaaagaa

SEQ ID NO: 542802 - DNA, 546 bp, Homo sapiens
aatgagagtgaccagaaaagcagaagcaccgaagttgtagtggattgtatttctatttgtttttcaataacaaaagagggcctggagaagatataaagaaggataaagtttaacttttgaaaatctacaaatrggttccccaaaattaaccagatgcacagcatgttcctatgatcaagtatcagcaaccaaaagtaggtgagaaaaataataaattttcagctttgaaggctgtaataatatcaccattataattcatcccaatatatcaacacaggctttacgttaacagacttactttcaaaaatagacatagcaccaccataacatttcttactttcagtctttggaaagaatgtcagggaaagctcccagcacgtgtttccatcaatcagagtaagtgaaggggagaaaaatggagaaaaagaaacagggacagaaaaccacagatcctgcattgtgtgggctgaggaagagttgagttccagctcctgaggagaaaacattctccaaagttccgcgccgattccagacagattccccaca

SEQ ID NO: 542803 - DNA, 604 bp, Homo sapiens
tctatctggattaacaaagagccacattacaaatgattctgttccctcggtgataaaagaaaaaattactgagaggggatatcatgtcataagactagaatactaggtttagagcaatttgttcttctttttttcaattatgcagtaatggtatccacatactgtattcagtctacaggcaatgtgattagaaagaaacaaacatagccttttttgaaacaaagagatgttatgcattaatacatgaagtggtggttcttttgctmtaataaatgcatagctggtgattccaccaatgagcaatttgttggaaatgttttattggttatgatttatggatgacaagtttgagtaattgttaagcttaattgcacttaaatgatggattttttcctcagttgtttatcttcagggcatggatgaaagcaaatgtgttggaaaaatgcagagttcagtggttgctaaatgagcttattaatgtttacatatgtaacaatttagtccattagtatgtatatgttggaatgagatgaccatctcatctctcagtctgcagaaattcctgcacaaactatcactattttatttttggataaacacacag

SEQ ID NO: 542804 - DNA, 604 bp, Homo sapiens
tctatctggattaacaaagagccacattacaaatgattctgttccctcggtgataaaagaaaaaattactgagaggggatatcatgtcataagactagaatactaggtttagagcaatttgttcttctttttttcaattatgcagtaatggtatccacatactgtattcagtctacaggcaatgtgattagaaagaaacaaacatagccttttttgaaacaaagagatgttatgcattaatacatgaagtggtggttcttttgctctaataaatgcatagctggtgattccaccaatgagcaatttgttggaaatgttttattggttatgatttatggatgacaagtttgagtaattgttaagcttaattgcacttaaatgatggattttttcctcagttgtttatcttcagggcatggatgaaagcaaatgtgttggaaaaatgcagagttcagtggttgctaaatgagcttattaatgtttacatatgtaacaatttagkccattagtatgtatatgttggaatgagatgaccatctcatctctcagtctgcagaaattcctgcacaaactatcactattttatttttggataaacacacag

SEQ ID NO: 542805 - DNA, 619 bp, Homo sapiens
cactttctatatgtagcaggatggggaatagggctcttctaatcatcaaggaagtttggttaagtacccaaaattgagaacaattaaagacaagttcttctgatgatgaataagacccctcctaggagcctgtaaagattactgaaagggcaaaagtggtcagagctgcaagtgggagtagggtagggagaagcttagaaaaagatgtaatatactgggtttttcttagtttacagaaatttatgcttatcaatgtgtatacatttatatgcagatatataaacatatatgcttataatacagaataaaatgcataaaggtgagattttatatatatatgaatgaatgaataatttcaaatttataaaacatttgcaaaggtagaacagagggtttctgtatacccctcactgaattcccrtattactagcaccttacattgtcatatgtctgtcagaatcaagaaactgaaattgacactggtatattagtaataactaaactctcagcattatttggatttcactagttgttcctctttctgtttcagaattcgaactaggataacacttggcatttagttgtcatggtgttcagtctctgctggtctgtgacagtt

SEQ ID NO: 542806 - DNA, 582 bp, Homo sapiens
gctattactatatatttgtgagcaaatatcatcacagacctgactcacgttagaagggaaattctcatcacctctgtcatcctttagaatggaaaaaaaaacttattcataaactcataaaaatcccaacagaagaaagtttaaaaaccatggaatatgacctcctggcaaatcarcaaatttgtttttaaaaaaaacaaatcatggtgactgccttaataattatgcagaataaactatttgtttctatataatcccctccatggttgaagactgtcatctttagcagcctctttatcgtatttaaccaaaaaatgtctctctctaacttcgacccattggtccctagctgtctctgggatctgtacagataaatgtaataactatccctaaaactactcatcaaatattataaaagtgcttttattcacttactgggtcatttttgcaaaccaaacaccatttcctccaacattactcaaatgacatggctttgtttttctcactgtcctggtcatcttgtgtgaaacaatgtttaatctcttaggtttcatacaggaatttaatgctcaaaaatgacac

SEQ ID NO: 542807 - DNA, 633 bp, Homo sapiens
agttctcattacacctctctcccatttcttttccctgcaattctctgtgatgggtatactgagggtttctcaatctcagcactgccaacactttgggatagctgatttcctattgtgatgagttgtttggtataggatgcccagcagcacctctgacytctacccaccagataccagtggcaccctctcccaaactgtaacaacccaaaatgccttcaacactgccaaacatcccacagggggcaaaacttcctgttatctctatatagtggcctctgaaaaccattcaacttgtagtaaaacaattgatttataattcctacatcaagagaagggtttcttttccaatggtctaataacaatcctaggcctaatgtccataatccaatgtttaatatatttaatcataattaaaataattttacattgataatatttatatagatgggcataagacagggacccaggatgctgtgatagtctacacaaatataatatacctgttttccatgctggatggagactttatgctaatttccatagacttctatcaatttatgtgaaggattctttttatattagttgttaaatttcttcttagaattttgacctttacctaaattattggtattt

SEQ ID NO: 542808 - DNA, 633 bp, Homo sapiens
agttctcattacacctctctcccatttcttttccctgcaattctctgtgatgggtatactgagggtttctcaatctcagcactgccaacactttgggatagctgatttcctattgtgatgagttgtttggtataggatgcccagcagcacctctgacttctacccaccagataccagtggcaccctctcccaaactgtaacaacccaaaatgccttcaacactgccaaacatcccacagggggcaaaacttcctgttatctctatatagtggcctctgaaaaccattcaacttgtagtaaaacaattgatttataattcctacatcaagagaagggtttcttttccmatggtctaataacaatcctaggcctaatgtccataatccaatgtttaatatatttaatcataattaaaataattttacattgataatatttatatagatgggcataagacagggacccaggatgctgtgatagtctacacaaatataatatacctgttttccatgctggatggagactttatgctaatttccatagacttctatcaatttatgtgaaggattctttttatattagttgttaaatttcttcttagaattttgacctttacctaaattattggtattt

SEQ ID NO: 542809 - DNA, 585 bp, Homo sapiens
ctgaagcatgcctgatagactaagcaggcaagatatggtctcctccatgaagatgatcatgcttttcaatgagtttctctaacaaagatcaacaaataccagtacctcttctctatggactacaagaaagtggtttatcccaagtgaacttcctagaaggccatcagtagaactttgcagaaaaacattgccaaaaatatgagattcayagagatcttttaggaaaaatattagaaacaaaatataaggaataaaaatatttacatcaattatattctttaaatgaaaagaagaaaaagctcaaatcatcaacttaagtttagaatgtaagaaagtagaaaaagaagaaaaattaaagttagcagaaggaagaaaaaaataataaattataaaaaataaaaaaataaagaatagagcagagattcttaaaaacagagagtagaaaaacaatagagaaaatcaatgaatccaaaagttggttctttaaaaatattaacaaaactgatgaacttttaactaggtgaactgcaaaaaaagatagagatacaaattggtaaaataagaaattaaactgtgtgtgtgggg

SEQ ID NO: 542810 - DNA, 510 bp, Homo sapiens
tgatgtatctcagatcttgctccagatgcagttactcccatgctttgaatacagtaaatgcttatccttcgtatctttaaaacaaaaagggtatagattcgggtttaaaaggacctgaatttgaggcctggctctctcatcaatgagcaattatgtttagatggttggaataagaacaaattttattataacattatcaagtttaactaaaattatggcaatgtctattttataggtttgtatagactaaatggagcatacgtataaagagtcacacacctaaggaatggtagattcttgttttkgttgatattctagagaaggcttttgttgatcactttgaacgtagagcaggaatacaatctgtgatggttaatattgagtgtcagcttgattggattgaaggatacacagtattgttcttgggtgtgtctatgaggatgttgccaaaggaggcttaacatttgagtcagtggactaggagaggcagacccaccctcaatcttgatg

SEQ ID NO: 542811 - DNA, 510 bp, Homo sapiens
tgatgtatctcagatcttgctccagatgcagttactcccatgctttgaatacagtaaatgcttatccttcgtatctttaaaacaaaaagggtatagattcgggtttaaaaggacctgaatttgaggcctggctctctcatcaatgagcaattatgtttagatggttggaataagaacaaattttattataacattatcaagtttaactaaaattatggcaatgtctattttataggtttgtatagactaaatggagcatacgtataaagagtcacacacctaaggaatggtagattcttgttttggttgatattctagagaaggcttttgttgatcactttgaacgtagagcaggaatacaatctgtgatggttaatattgagtgtcagcttgattggattgaaggatacacagtattgttcttgggtgtgtctatgaggatgttgccaaaggaggcttaacatttgrgtcagtggactaggagaggcagacccaccctcaatcttgatg

SEQ ID NO: 542812 - DNA, 666 bp, Homo sapiens
gaacttcaacaattgctattaatgtcagttctgttttgatgtttcacatatcactggccagaacttgaacttttatagttaaggttttgcatttaagtctttccttttaaaattatcttccatatccatgtatatttatggaatcctggaccttgttcccaaagcttcccctttatgcagaatattctataaaaatcacttgctttattttaaaaagtataaaaactcacatattataaaactttcaaggacatatttgtatttttctcaactccttgcatgatttaaattacttcttggtaaatacatgaacaatatggaaagaagagtccattkgatatttgtaaaaaatgaatgtaccgtgaaaacagtatattttaaaagtttcatgcgcagaatttatttgactaagcctatgagagtattgaattagtgcctttgtaaaaaataattctactggggaaaaaaagaagatcttaccaaattttaaaattagacagcactttattttataataaaacattatttaatttttaagaaaaattataattgttgaccaccagatggctcccatatttttaaaaattcagcagaaagacgtggaaactgttcaaaataaacagatttcaaagaaacaaaggtaaagaaaatgatataacctgtgaa

SEQ ID NO: 542813 - DNA, 628 bp, Homo sapiens
ctgaaaaattcctatcacccaatatttagtatactgtaactgtaatcattattttagagtatgcagcatctacttatttttaaaaatgtattaactgtaaaacagcctcaggcaggtccataagtacactctacgatgttcacagaatgatggaattgcctaatgatgcatttctcagatcgaatccctattgttaagagacacctgaytgtagttactttaataattgatcatttttagttcaccaggattttagaacacacacacatgcatgtatgcatgcacatgcaagcatggggatatttctttgaagaaagaaagtcaatttgataaatttagcttagcctaagtgtacagtgtttataaagtctacagtagggtacagtaatgtcctaggccttcacgttcactcaccactcactcactgactcacccagagcaacttccaatcctgcaagctctattaattgtaagtgccctatacaggtataccttttttatcttattttaactgtacctttcccatgtttagatatacaaatgcttaccatagtgttacagttacctacagtatattatacagcatggtaacacgctgtataggtttgtagccaatatagactgggtg

SEQ ID NO: 542814 - DNA, 628 bp, Homo sapiens
ctgaaaaattcctatcacccaatatttagtatactgtaactgtaatcattattttagagtatgcagcatctacttatttttaaaaatgtattaactgtaaaacagcctcaggcaggtccataagtacactctacgatgttcacagaatgatggaattgcctaatgatgcatttctcagatcgaatccctattgttaagagacacctgattgtagttactttaataattgatcatttttagttcaccaggattttagaacacacacacatgcatgtatgcatgcacatgcaagcmtggggatatttctttgaagaaagaaagtcaatttgataaatttagcttagcctaagtgtacagtgtttataaagtctacagtagggtacagtaatgtcctaggccttcacgttcactcaccactcactcactgactcacccagagcaacttccaatcctgcaagctctattaattgtaagtgccctatacaggtataccttttttatcttattttaactgtacctttcccatgtttagatatacaaatgcttaccatagtgttacagttacctacagtatattatacagcatggtaacacgctgtataggtttgtagccaatatagactgggtg

SEQ ID NO: 542815 - DNA, 503 bp, Homo sapiens
ggggctgtcatctaaaagtgaacatccatttagcctctgggttctggaggaaagtgtcccaagtgtgagcatttcaagagagaagcagcagtgcttttaaaggctgggcctagaactaccacaacatcacttttacatcactgtattgattaaaccatcatagggccagctaacattcaaggaggaagataaataaactccatttcttgattttttagagtgacaatttatggctatctttaatctgtcacaacttgcaaatgtctataacaaaatatttctcttgagctccagactggtatactctactgcctgcttgacatatattcctggatgcttcataggcgtgagggctgacttcatggcatgtgacatgtgcagtcgcacaggacctcacgttttggggatcacacacttggtttaatgatctgctattgcagtcttaaaattcataataatttttgtataaggagctstgatttttatcttctactggccctctt

SEQ ID NO: 542816 - DNA, 569 bp, Homo sapiens
tctcattttcagttcaattttcagcatcaaaagttcaaattatgaagcatcacctctgatgaaattgaaaactgaaagactacctgtgatttcaaaccaacctgaactgaaattttctggcttagaaactcttcagaaattctttatgcacttttgatttgaagtaataacttcattttaaaataaagtagctatagatgttgaggttgacttgcttttaatgactgtgggttttctcaacccaacacaggacaactagcctggccttagtcattgcgccaaacgagktaattaactccatggctactgtcctatccctattctttgacacagatgacagataggaaaagttatttgcaaaagcaactccaagccccaatttgcctatatcccttaagccccttctatacagaaactggagctgcttctgtctggccctgccttgctctctgcccccttagctgagccacttgatatctttgcaagctcagaccttacccaactctctcagcccaatggctcatcaggcaaaggaaatgtatgattatagatgttctgtcagtatctgc

SEQ ID NO: 542817 - DNA, 546 bp, Homo sapiens
agctgccactgtagaaaccagcaccctgtgggtgtaccttgaggggccatgcctaagctgcactgaaatctcttattttcttctgggggcttctctgatgagaggtaagggatacagtaatgcatgagcaacctgaaagtagaagggacttaaccccccacrgtatgaccagtgggcacatgagctaattaatcaacactctctctggggagtagactggtgattctcaaatgtgaacatgcacaagactcacctgatgagcttgttgaaatacaatatactgacccaccccctccccacttccaccacattttggattcaggatgtcaggatgatgcccatgaatttgcaggtatatcacagtcaaggtgatgccaacaaagctgatctacatttgtagaactttggggcatcaaattttgccatgtattctgtgcaggtcctgaggctcccagcacaattaagctatagtcacccacaaagatggccgactcttagtgtgtttttgcaatgccttccttgcctctgtttcactctccccagccc

SEQ ID NO: 542818 - DNA, 665 bp, Homo sapiens
cacaggacaggtaaactgaggtaaaaggaaagtaagacaagtaataatggaagcagtgcaaatggtatgcattgctgtggaagcattctattggcgatagcaagtcaccagatttgcccagatycaagaggtgggaaatagacattgcttctcaatggaagtagttacaatgtcacattgaaagggtgtgcatacagggaaggaaagcattatggccacttttgcaatcaatctactatatcctgtcttttaggatccaaatgatgtagttcaaatttccacgcgactttcctaaaatttctctgtattttctgtatgctcgtgatccccttgttaatactctgtaaatttttttcctgttgaattctctatcactatactaattattttgtctctgtatctgctgctatctctctgtagtccaatctcttctcctgtgttaccaaaggcacctttaatgcaagactactgtacaataaactgtgaaactgtggagtgtttggagataatggggtggaagaagtcattactaccagtatagaacagaaaacaacctaaaactgaacattagacccaactattccgttgttgttgttgctgtttttgaagatttttaaaaatttttaaattaatattgtacataatgaacacatctgttctttata

SEQ ID NO: 542819 - DNA, 395 bp, Homo sapiens
acgcgactttcctaaaatttctctgtattttctgtatgctcgtgatccccttgttaatactctgtaaatttttttcctgttgaattctctatcactatactaattattttgtctctgtatctgctgctatstctctgtagtccaatctcttctcctgtgttaccaaaggcacctttaatgcaagactactgtacaataaactgtgaaactgtggagtgtttggagataatggggtggaagaagtcattactaccagtatagaacagaaaacaacctaaaactgaacattagacccaactattccgttgttgttgttgctgtttttgaagatttttaaaaatttttaaattaatattgtacataatgaacacatctgttctttataagtttttcag

SEQ ID NO: 542820 - DNA, 558 bp, Homo sapiens
gcatgctgacttgttgcaacaagagagaatgaatgcacacagtggggaagcatagaagatctcagaaagagactgctaggagggacttattacagaactcaggcttctattaggtgatttggagatgatacaaggaaatgggagtttgctctgctttgmatgctgtcgggaagcagggatctttctataattgggtatcttcgtaattcttacccagatggctgaatgaagctgaagttgtgattatgactggtaaagataaaacaggcatgtgtatccaggaggaggtgatgtttgctcatttttgtgttaaggacgattatgcttttggatcctgtttttgtcccgtctgagtggcctcacctgatgttggcgtgctttgacattgtttatgtgccgcaagggaacaccacagcctagctgtaaataactggacgtgcctagaaaagtgacagcctaatgcataaaaccagttaagttccttgccgtcagggctacttttctcactctcaggccacccttttgtccaaaggcggaaaaggttaagctgcaaggtat

SEQ ID NO: 542821 - DNA, 610 bp, Homo sapiens
gaggctggccaggacagaaggcccaagacgggctcactcacacatctggtgggtggctgggtgccttggttcccctcaacgtgatctctcatcctgcatgaggctagaccggcttccttatatgacggtctcagggcagcattccgagaaggcccaggcaaaagtggcagggcttcttcaggcctaggttccagaacacactcaatgccaattctaccatattctgttggccaaaatgagtcttcaagactggccagattcaaggggtggagaaatatactccacctctggatgggaagggygatcaagttctttaacaagaattgaggatactgcaatgggagaagtcacaactatgaaacaatctgccacatttgataactttgttagcttccttcccttctcctatcttcccttccttcccttgtctcctaccattgtcttctggcatctcctctcaaataaatccttacacttgaatatttgaatcagtgtctgctgctgggagaacctaaaccaagagccacacaatcatttggcaggctgggagccaggctgcaggcgcagctaccaggcaggatagcccacaccatgccacagaggaagccag

SEQ ID NO: 542822 - DNA, 643 bp, Homo sapiens
gagtgggaaatgaacagggcattggaacccagggtggagagtcctttcaccctcagatgccgtctcagagcaggcctggctggcttgctggaggaactccagggaggtggagtctgtaccctgatttccacagaaataataggtgtccccttcctgaggcyttgagccccaagatgagggcacgttttgcattttttcttagaaattcttgaagccttaacaaattgtatctatgttgtttcatggagatgatagaatcacattctggaaagtttagaaaataaatcaaaggaaaaaaaacctcataggagtccatccctctgtgatcatgtgagtgaaatgcagtcatatttttgttcatctatttgttgttttttgggggggagtggagctgtaaacacaatatatgtatactttttacattctctatttcctattttacattaatgtcacagacattttcacattctgctatgctgttttcacaagcactgcttttaatggctacataatattccacttgaatagtggctcaacagccaagtttgctggcttcgcatgcactcaaaatgccataggttctaggccgcttggtgctgctctaacccacctcccttggactgctgtccagccatgtggggag

SEQ ID NO: 542823 - DNA, 498 bp, Homo sapiens
aaatataggactttgaaagctttaaaaaataggtaaacataaactgtttgggrgtattatctctaaaattttggagattttagttttttctttatacttttctgggcactccaaaaacatgtatttttgtaattggaaaattcagaaaagaatcaatgttacaaagatgtagaattccggccggccatggtggttcacacctgtaatcccagctctttgggaggccaaagtgggaggattgcttgaacccagcagttcaagactagcctgggcaacaaagtgagaccccatctcaaaaaaaaaaaaaatatgtagaattccacccctcccaacacctgccacatacctacaagcagcagcaacaacaaaacctcctaaaaaaccaagaacatcgtttgagggagaagtgagttggcacctgagttcaagattgtctacctggatgatttgtccgaataatgaaatggtggcaaactgcagccattcaagccaagggca

SEQ ID NO: 542824 - DNA, 602 bp, Homo sapiens
taatccaattccctgactttaggtaggtctgtatataagccatataaaatgaactattcaaacctggtttgagctgtctttggtccttgggctatcatttggacacctttcaaattcagaagctgcttcctattcacccatgctccttatagtctttaattattaaaaccaactagtaaggacattatctgagcattggttctaaatgattaaaacataccattttaatttctaatacatttgtatcataattataataaatatattaacataataactataacaaataatataacaaatatattctctctcacacacacacaacacaacacacacacataagaaaggtagaataatataaaggctttggaacagatatgaaaaacaatgttagggaaagattactgaaaaatgccaataaaatatctctctttggccttgggtatttatgraataagaagaatgtgtccagccatttttatgaaaattaaaagccaagaacacagatggctgagttgaagggagctgtatagcatattttaagtgtagaggacaaaaaatggcaagtgatagtaacacccaataaaccccaaaggttttag

SEQ ID NO: 542825 - DNA, 589 bp, Homo sapiens
agccttgtcagcctgccctcttctgaggtttggaccttgttttaaattgtgtgcatggtgggcttgagactctcttgtaatggaggtaatgggactatcactgaggggttcagcctatccaggtaggctaccgttctagtcatacccatcacttaaattctgccacagtctgcacagacggttggtcctccaggcatattgtcctattaagccaaataggtggacatcatgggatggatgaggtcatcatgaaaacagatttactggatttatggacctagtatatactatgtaacagatggaaaactgaattttacmatctataggtacctttgaaaggtcataaagggtaaaagtctatagttttccagaaaataattcttaaaactgggttttatgtctagatttaaatcatgtatctgtctgtagtgcttcaaatgtggccaggtgtggtagctcacacctgtaattcccagcgctttgggaatttgaggcaagaggattgctagaggccaggattttgagaccagcttcggcaatacggtgagaccttgtctctacccaaagaaaagaaaaaaaaaagccagct

SEQ ID NO: 542826 - DNA, 564 bp, Homo sapiens
tggtgctcttcatttcttcctttatagctgggtttccatcttcagcctgaagaaaatcctttagcaaatcttctagcagcagattatttcatcttctatcttaaaatgcctttaccttaacctcatttttaaaggatattgcactggaatatctggcttgatagttttctccttttcaacattttgaaagatgttgtcaattgtcttctgcgctttattgtttttatttatttattttattttattttttkggagacagagtctcactctctcacccaggccggagtgcagtggcgtgatcttggctcactgcaacctctgcctcctgggttcaagtgattcttgtgcttcagcctcctgagtagcactgggattacagacatgtgccaccacacctggctaattttttgatttttagtagagacagggtttttccatgttgaccaggctggtcatgaactcctggcctcaagcgatccacctactttggcctcccaaagtgctgggattataggcatgagccaccgcgcgtggacctggcctttattgtttatggtaagaagt

SEQ ID NO: 542827 - DNA, 628 bp, Homo sapiens
aggaaagtcagtgatcattaacttctcttctgttgcgtgcgaacatttatgctgagacgaacctactcagcagaaattcttcctccaaaaattcccttccagggtggtttcttccattgttagtttagaggcagctctactaaccccttaataaaaataaaaaagtttgtgaaggacacccaggaagccatttggtggagctgtcccacctcctctgccttgtttcctctttccagagccactagggaggacggtccagggcaaaggctgttcaacttacaagtaggaaggctgtttcttgtttttggtctgtcttcctgctaatacaagtcaacagttgtaatatgaagtagcatattaaaagctaccctggtcacacaagtattttctcctrtgtgaacagggtgtggatttgggtgtccacctgagtagtagaaataggaaccaaagcaggcctggctgggattccagaatgtgctcctagtatggaagttaggtactttgaggttacattaattaagtgggtagtacgcctgaggtctaagttagaccatttctccaaagtctcagactttgggtccataactcttccatttaggaagccttccaggatctacaattgaggaag

SEQ ID NO: 542828 - DNA, 628 bp, Homo sapiens
aggaaagtcagtgatcattaacttctcttctgttgcgtgcgaacatttatgctgagacgaacctactcagcagaaattcttcctccaaaaattcccttccagggtggtttcttccattgttagtttagaggcagctctactaaccccttaataaaaataaaaaagtttgtgaaggacacccaggaagccatttggtggagctgtcccacctcctctgccttgtttcctctttccagagccactagggaggacggtccagggcaaaggctgttcaacttacaagtaggaaggctgtttcttgtttttggtctgtcttcctgctaatacaagtcaacagttgtaatatgaagtagcatattaaaagctaccctggtcacacaagtattttctcctgtgtgaacagggtgtggatttgggtgtccacctgagtagtagaaataggaaccaaagcaggcctggctgggattccagaatgtgctcctagtatggragttaggtactttgaggttacattaattaagtgggtagtacgcctgaggtctaagttagaccatttctccaaagtctcagactttgggtccataactcttccatttaggaagccttccaggatctacaattgaggaag

SEQ ID NO: 542829 - DNA, 557 bp, Homo sapiens
tggtcacagtaatctcagatttaaaaacctccttgaggctaagaagctaagtcaaggtagactttagattttacctatagttttaaggttcctgggcctgccaggaaatgataatttttaattcagtgtaatgctgagaaccattgaagccaggcattctacacattctcaaatatgacattttaatcaaagccttggtaatacaaccagtgtttccaattgtatcctgttataacgagagccgatttttattgaacttargcaaatcatattgccttaagagtactcacaaataggctgggcacagtggctcatgcctgtaatcccagctctttgggaggccaagacaggtggaacacctgaggtcaggagtttgaaaccagcctggccaacatagtgaaacctccccccggccaccgtctctactaaaaaatacaaaaattagctgggtgtggtggtgcatgcctgtagtcccagctacttgggaggctgagacagaattgcttgaaccctggaggcagaagttgcactgaaacaagatcgtgccactgcattcc

SEQ ID NO: 542830 - DNA, 593 bp, Homo sapiens
gaaaaatgggagagagagtgcacctgggaaactggatttccaaaaagcacaaagagcaaaaattcttcagcattgttgtgaatttatttgattttaccaaagaagtacacagagaatgagacagacccctacgaacacgttctcctagggagaacggctgaggaaaatttcatgttagtagaatggttgcgtgtgtgtgtatgtatgtggagtacgtgtatgtgtgtgattttgcatatactgaattataatatcctatcctcactccatataccatgggatcatctttcagctcatcgaagagatttaccttataccttgtaaagctagcctctctttaaaaagctattttacctcttacatgtatctccactatgtacaaatgcagcatttatttattgggtttttttccagaattttgctatattaaatgctttaataagcgtctctataatatatatttatgtatccatgtcattacataattagattgaatataagagatgaaattgccacattaaatacttttatatgtaagtagagatacraggttgctgggatgtctacatgtaataaaaacaataaggagacat

SEQ ID NO: 542831 - DNA, 450 bp, Homo sapiens
atggttatgtaaaataatatatttatttttagaaactataaagtatgtaagggcaacatcctgtaacaaatactataatagcctccccaaatgagaaaacaatatattaatataaagacctgtgtgttcgtgagagaaagagagaaagaaataaaagatgaatattaccatttagagaatccaactgaggragatgcaggactactttgtacatttcttgcaaatcttatctgagtctcaaataatatgtccaagtaaaaatttaaaataaaataatgccaattattatatggagccttttagagatttcaaatgaacatcataatatggaaggacctgcaattattatttgcaaaattttgcttagcttttatttccaaaatatctgataagtagttacgtgtgcccacttgattgttgccataaatttctatattgtgaatttaacag

SEQ ID NO: 542832 - DNA, 450 bp, Homo sapiens
atggttatgtaaaataatatatttatttttagaaactataaagtatgtaagggcaacatcctgtaacaaatactataatagcctccccaaatgagaaaacaatatattaatataaagacctgtgtgttcgtgagagaaagagagaaagaaataaaagatgaatattaccatttagagaatccaactgaggaagatgcaggactactttgtacatttcttgcaaatcttatctgagtctcaaataatatgtccaagtaaaaatttaaaakaaaataatgccaattattatatggagccttttagagatttcaaatgaacatcataatatggaaggacctgcaattattatttgcaaaattttgcttagcttttatttccaaaatatctgataagtagttacgtgtgcccacttgattgttgccataaatttctatattgtgaatttaacag

SEQ ID NO: 542833 - DNA, 450 bp, Homo sapiens
atggttatgtaaaataatatatttatttttagaaactataaagtatgtaagggcaacatcctgtaacaaatactataatagcctccccaaatgagaaaacaatatattaatataaagacctgtgtgttcgtgagagaaagagagaaagaaataaaagatgaatattaccatttagagaatccaactgaggaagatgcaggactactttgtacatttcttgcaaatcttatctgagtctcaaataatatgtccaagtaaaaatttaaaataaaataatgccaattattatatggagccttttagagatttcaaatgaacatyataatatggaaggacctgcaattattatttgcaaaattttgcttagcttttatttccaaaatatctgataagtagttacgtgtgcccacttgattgttgccataaatttctatattgtgaatttaacag

SEQ ID NO: 542834 - DNA, 450 bp, Homo sapiens
atggttatgtaaaataatatatttatttttagaaactataaagtatgtaagggcaacatcctgtaacaaatactataatagcctccccaaatgagaaaacaatatattaatataaagacctgtgtgttcgtgagagaaagagagaaagaaataaaagatgaatattaccatttagagaatccaactgaggaagatgcaggactactttgtacatttcttgcaaatcttatctgagtctcaaataatatgtccaagtaaaaatttaaaataaaataatgccaattattatatggagccttttagagatttcaaatgaacatcataatatggaaggacctgcaattattatttgcaaaattttgcttagcttttwtttccaaaatatctgataagtagttacgtgtgcccacttgattgttgccataaatttctatattgtgaatttaacag

SEQ ID NO: 542835 - DNA, 454 bp, Homo sapiens
agccacactgttcaatgggtgttgaaacagtgacatcatctttatatatgaatargagcacattacttatttgctcaacaaaatgagtcccataatattttaaagacaagcatgctcctatgtcatgctttgtagaaaaactgaacccaagtaaatatttaaagctgaaaaatgcctctgaatttggcttatttactagaattcatttttaaaagttcattgtctttgacgtaacttcttattttaagcttggaatgcaagatgtttttggaagcccaggttttaatctagcacacaaacttcagaggagaaaggacgtttctctgcaaacacataccaaaaaatcatgtaacgttgtaaactaaagtcctagaggaagacgtgagaaatcattgagcccagattctttgcagggaaagggccataggaagaggtttctagtgatggggcagct

SEQ ID NO: 542836 - DNA, 454 bp, Homo sapiens
agccacactgttcaatgggtgttgaaacagtgacatcatctttatatatgaataggagcacattacttatttgctcaacaaaatgagtcccataatattttaaagacaagcatgctcctatgtcatrctttgtagaaaaactgaacccaagtaaatatttaaagctgaaaaatgcctctgaatttggcttatttactagaattcatttttaaaagttcattgtctttgacgtaacttcttattttaagcttggaatgcaagatgtttttggaagcccaggttttaatctagcacacaaacttcagaggagaaaggacgtttctctgcaaacacataccaaaaaatcatgtaacgttgtaaactaaagtcctagaggaagacgtgagaaatcattgagcccagattctttgcagggaaagggccataggaagaggtttctagtgatggggcagct

SEQ ID NO: 542837 - DNA, 675 bp, Homo sapiens
ctcctctgacgtctctatcaaatttcagtctgcctctctgataaggactcttatgactgcatttattttagagctcaccaaggtaattcaggtaaatcttctgatgtatagattcttaacctaataccttctgcaaggattgcttttccattagtaggtaacgtttacaggttccaggggttaggacccgatatctttggggatcaccattcagcacagtacatatgtgtacacatgttacatctgtctgccaaccatagatcccttgcatgtttagtccaaagtactagaaagaaattgcacccacccttgtctctttacgtgcacaggggagtacagtgattggatcagggaaactttattgttggctgtgtccaaatgcagggttagagttagggggcatggagtggggatttttggcaagaggggctttagaccactcctgggtttagggaaattaatccaagtatcttcccttgtatggatactgcctcctcycctggttcctgttgcttcatcacaggtggacctttagatttccctgctgggaggtaagtagttactagaccagggtctagacgaaccccctcccactggtcctgtaccagcactgaggaagtaatcaaatgatgtctcttttggcctctcttacactgtgcaaatgtgattattgct

SEQ ID NO: 542838 - DNA, 594 bp, Homo sapiens
tgtttatatatggcattaaataaaatatatttttaaattttttcacctattttattttactttttcatgtgtctatgaagacattttcatttgcatatgcaggttatattatattttcagtggacagttctggtctagcattaagtggcttttaaataactgttaagttgaatgtcaagcaaatggatgtatttattttgacttttaatttcaygtacagattgtttatataatacaattttaaaagtttaataactacatgtctgcatgtgatataaataagtgtgtgtctgtgtttaaatgaatgtacacacagtaaagtctagaaattaggtaatttattatcatattattgccctgtaatagttgcttctggcaatgactttccactacatttaatggtttttttggtgaataaatagtaatgttcttatcgtgtatattagaacagggcactagagttagttttaaatatagatgaagtgtgtttccaaaatgaggtgatttcaggatcagcagaattatgcctctgcctcccctaacatctcttcaaactgaaggttaatactacaatttatataatgtgctgtttcc

SEQ ID NO: 542839 - DNA, 528 bp, Homo sapiens
tagcacaggagcctacacattctgtcaaatggttgcttggacatagatgcctgtgaccgtgtgtttcagagcaacatctaactaaaaacataatttttttgtaggaaggatagaaatgtctcatggaagagaatgtgccataatgagagaaagccaaagtggataatgtaaacccaggacccagtctttcccatcatgatgtctgtcacgtgaccgggtccaggtcctgatgagatcagacgkgttttgggtgagaggaaaagaaaggcatctaacacataagctgtcattgggaacataaatattactgttctaccacctctttacaatatttggccagagctagtaaaagagctccctgtcctttacttcacaccatgatgtagcacctgagggcttcagagtcagaggcactcagaagacgtcctaattgcagaagtcctggtgctcaacagtgatgtggattttctgtagatacagatgtgtccagaatcagcataaaggttcacagggagaggcaggcagcag

SEQ ID NO: 542840 - DNA, 610 bp, Homo sapiens
tgtgctaccaatacatatatatatatatgcagacaaatttccaaactctatgctacacctatgcttcaatccaaatgggttaaatattatattatattatatttatataatatattaatagaataaaattgtattaatttgatattacttgtattaaattaatataaatatgtttacattttattatattaaaatacatgttaccatatatgtatataatataatataatgtatataataccatattttatccaacaatatgaaatattctggtgtttagaatgggctgctttaaataataagtatcactcataaaaaatttttaattataattccatgtgaagatcccacacttcacaccttgcctatatggggtaaaagcctattgctaaacaattattttccagttaatgcatwtaaattgtggcattcagggacaaataaaaaagataagaaagtctagttttttccaacaagtttatgagctattctcagctgataactgtagcgttaaaaatctagtagcttctctgtaagtaattattaattaattagtttcactctctcccttgtgctatctaagctgaagacatgcccaagatttcaaaga

SEQ ID NO: 542841 - DNA, 491 bp, Homo sapiens
ctgggtagtaatgaatgaaatttctatatttatagataaacttagttgtaatggttctgtatagttcattttctaagacagagaaaccatatarcaattccagtgtctgattcagcatcacaaaggatacaatgttatactgaaatagctgggagaattccatcactgatcctttacttttgttactaaatgcaaactaatatgttagatgaggagataaataagtgtgcacagtcattccactttttctgcacttaatttattccaacctaagaaaagaataagtgactttgtgtcaatttagaatatatagtttgaggctgggcgtgatggctcacacctgtaatcccagcactttgggaggccaagacaggcagattacttgagcccaggagttcaagaccaacctgaccaatagggcaaaaccctgtatctactaaaaataccaaaattagccaagggtggtggtgcacgcctgtagtcccagctac

SEQ ID NO: 542842 - DNA, 491 bp, Homo sapiens
ctgggtagtaatgaatgaaatttctatatttatagataaacttagttgtaatggttctgtatagttcattttctaagacagagaaaccatataacaattccagtgtctgattcagcatcacaaaggatacaatgttatactgaaatagctgggagaattccatcactgatcctttacttttgttactaaatgcaaactaatatgttagatgaggagataaataagtgtgcacagtcattccactttttctgcacttaatttattccaacctaagaaaagaataagtgactttgygtcaatttagaatatatagtttgaggctgggcgtgatggctcacacctgtaatcccagcactttgggaggccaagacaggcagattacttgagcccaggagttcaagaccaacctgaccaatagggcaaaaccctgtatctactaaaaataccaaaattagccaagggtggtggtgcacgcctgtagtcccagctac

SEQ ID NO: 542843 - DNA, 640 bp, Homo sapiens
gtgctcctgtggctgctgcaggggtctctggactgcatggggaaaaagggggttgaggtgggagctggaaggtcacaaagtagggatagaatggaagagaagccagattgagtcccaagtctggagcaaggaggccactggtgatgtgatcatgcccacagcagtgggagagtgggtgtgggacaggggtgtarggtggaagaggtcaagacacatgggatcagaggcccacaggcctgtactgcccctcagcacaattcctttggccttattgcttttgtccaacccccgagtgtctggcttcctttcatccccatttcggtgctgctttcattttacagccagcctggttgttttcattccttgtgtctgaagctcctgaagggaaggttttcttttcaaagttttgattaactcacagcttgagccccgagtttgtttgttatgaaactgctggcctaacatcggggtaataccttctccgcacctctccctgacccctacctttgggagccctggtgtgctcctccctgtccctgtccaggaatgaatgggctgagcctcctgctttttccaaagctctccaggctcctgggcagtggagagaagacctgggagttagactgcaaagccccagggc

SEQ ID NO: 542844 - DNA, 501 bp, Homo sapiens
gttgtctctaaatgagacatttttaagggcttatatactagtatgaactactctgcttttttttcttttgaattttctttcaaacacatggagtttaagtttttggccaagttttgctggccttggaggtatggtaataataataatgttttaacacttatgtagcactatgtgtcagacactaagtgttctctgcatgtttcctcaggtaaactccacaataacactatgaggtagataccattattatcctacttttgmagatgagaaaattaaggctcagaataacttccccaaggtcacacagttaggaagtaatggagctgaaacttaaggcaagacagtatgtctacagaatccatgcttaccaaggacaggatcctggaaagctggtacttttaaggcagggacagaggtcaaaatgtttgcgaagctccaaacagactgttaatcacaggacactatcatgaggtgggcatgtgcccaggagagccaattaga

SEQ ID NO: 542845 - DNA, 635 bp, Homo sapiens
cgccacaggtgaggggcctgcacccaagctcaagaaccactctgttggcatgatggcaggactcaggccatcctagtcctagtttcttgactctacctagccaagaagtctcttgtcacttctttactcctttattttaaaattttattataaaaatttttaaacatacagaaaagtaaaaagaatggcataatgaagaatctactagctagttccaattatyagcactctggcatactataatatgaatgcatatatatgtatgtataatatgtacacatgtacacacacacacacatatctatttgctaaactattacagacatattggttcttcattcccaaatacttcatcaagcatctctaaaagttgtcattgtttatataattacagcaatattatgcagtaaccaaattaatagttcctaatatcatttattatctagttcatgttaatacttccccaattatttccagaatatatattgtaacatttttagaaatggggatccaatcaaagatgcatttggttgttaaatctttcaaaatatgtaacagaccacttctcccactcccatcctactgccacacactttgttcactttcatactaaattcgacccctgggctatgaca

SEQ ID NO: 542846 - DNA, 635 bp, Homo sapiens
cgccacaggtgaggggcctgcacccaagctcaagaaccactctgttggcatgatggcaggactcaggccatcctagtcctagtttcttgactctacctagccaagaagtctcttgtcacttctttactcctttattttaaaattttattataaaaatttttaaacatacagaaaagtaaaaagaatggcataatgaagaatctactagctagttccaattattagcactctggcatactataayatgaatgcatatatatgtatgtataatatgtacacatgtacacacacacacacatatctatttgctaaactattacagacatattggttcttcattcccaaatacttcatcaagcatctctaaaagttgtcattgtttatataattacagcaatattatgcagtaaccaaattaatagttcctaatatcatttattatctagttcatgttaatacttccccaattatttccagaatatatattgtaacatttttagaaatggggatccaatcaaagatgcatttggttgttaaatctttcaaaatatgtaacagaccacttctcccactcccatcctactgccacacactttgttcactttcatactaaattcgacccctgggctatgaca

SEQ ID NO: 542847 - DNA, 635 bp, Homo sapiens
cgccacaggtgaggggcctgcacccaagctcaagaaccactctgttggcatgatggcaggactcaggccatcctagtcctagtttcttgactctacctagccaagaagtctcttgtcacttctttactcctttattttaaaattttattataaaaatttttaaacatacagaaaagtaaaaagaatggcataatgaagaatctactagctagttccaattattagcactctggcatactataatatgaatgcatatatatgtatgtataatatgtacacatgtacacacacacacacatatctatttgctaaactattacagacatattggttcttcattcccaaatacttcaycaagcatctctaaaagttgtcattgtttatataattacagcaatattatgcagtaaccaaattaatagttcctaatatcatttattatctagttcatgttaatacttccccaattatttccagaatatatattgtaacatttttagaaatggggatccaatcaaagatgcatttggttgttaaatctttcaaaatatgtaacagaccacttctcccactcccatcctactgccacacactttgttcactttcatactaaattcgacccctgggctatgaca

SEQ ID NO: 542848 - DNA, 635 bp, Homo sapiens
cgccacaggtgaggggcctgcacccaagctcaagaaccactctgttggcatgatggcaggactcaggccatcctagtcctagtttcttgactctacctagccaagaagtctcttgtcacttctttactcctttattttaaaattttattataaaaatttttaaacatacagaaaagtaaaaagaatggcataatgaagaatctactagctagttccaattattagcactctggcatactataatatgaatgcatatatatgtatgtataatatgtacacatgtacacacacacacacatatctatttgctaaactattacagacatattggttcttcattcccaaatacttcatcaagcatctctaaaagttgtcattgtttatataattacagcaatattatgcagtaaccaaattaatagttcctaatatcatttattatctagttcatgttaatacttccccaattatttccagaatatatattgtaacatttttagaaatggggatccaatcaaagatgcatttggttgttaaatctttcaaaatatgtaacagaccacttctcccactcccakcctactgccacacactttgttcactttcatactaaattcgacccctgggctatgaca

SEQ ID NO: 542849 - DNA, 627 bp, Homo sapiens
tcatcgctcacaggaatggccttttctaaaatgagagaaatgttctttcaagatcatatggatgatgccaaatattgtgatcatttgcatggccttggttctggttcctcctgtgtacagaatggcacaggcaatgcatatgaagagaaagccagcatkcagtcatgacatgaaatagtccttttatttttattttatttcgagctacacacatgcttgtatatagattttatctctggttgaatcccttgaacaacagacagtacctccccccatctttcatggcccattttattgtctgcctttcagtactaagcatgaccattcctatctcagatcttaataaaaagaaacacagtcaggttaaatttggccttaatttaatataatttaatggggaaagagacatcatattgaatattttgataaactttacctactcgaatttggtttatttttcccttttcgtaaattaactagcactgactgtaatttatttccctgtctcatatctctcccttccattctgcaggcgttttagctatttgagattgtgaaccatcagttttgcactttagagagtgattctgactcaaaacctctgttttatcagaaattttgtttttt

SEQ ID NO: 542850 - DNA, 530 bp, Homo sapiens
gagcttgtgtcagactgaagatgattgctagcagtgatctgaattatcccttagttaatcattctctaattaagtgtgggcagcttatctggcatagataattagaattttaaagaccactaaaatataagtaaattctgttttagatggttttctctctgagtactagaatagtaattacagctaccatttatattacgctcattatgttattaggcaccatgccaagatctttaaacataaaaaagtgtgatggttaattttatgtgtcaacttgactgggctaggaagtgccaagatagctggtaaaacattatttctgaaagtgtctatgagggcatttccagaagagattaacatttgaatcagtagactgagtcaaggagatttccttcaccaatgtgggaaggtatcatccaatccgatgatggcaaaagtagaacaaaaaggcagaggaagagtgaactctctctttcttctttaaccrggacatctatctcctgccctcagatgtcagagctcttagttct

SEQ ID NO: 542851 - DNA, 598 bp, Homo sapiens
gcccctcctctcaatttgatcacactactaacaatagtgtgcaacttaaaacttataaattgtttatttctggaattttttatttaatattttcagacctcagctcaccatgggtaactgcaactgtggaatgcagtgccttactgtgtgccattgttcttggtgtttgggatacatcaggaaataaaatagacaaagattcctgcctccatgaaatttatattctttgtataataaactggtggcaattttgaggttttttwaattttaattatttttcttttgagacagggtttcactctgatttgctgaggctggagtgcagtggcccaaactcagctcactgcagccttcacctccctggctcaaatgatcttcccaccttagcctcctgagtagctgggattacaggcacactccaacacacccagctaattttttgtattttttttatagagatggggttttgccatgtggcccaggatggtcttgaactcctgagctgaagtggtccacccgacttggcttcccaaagtgctgggattacagacataagccaccataaccccccaggggcaattttgagttttccattggc

SEQ ID NO: 542852 - DNA, 646 bp, Homo sapiens
gaccactctcgcagccaattccactttgtctcttataagcctcacccttggcaactctcctaagaaaagtgaaacttgacaatggagtttaaattaaaaataattagcaataaaaaatcaagttaggaggcacatagaaagtgcttgataagtacttgaatgaatgratgaatttaccccattaattaaatacttaaatttaccccattaataagaaaaaaaaaaaccctatattgcaaggttttttgaaatttgttccttggaacaccagctccagaatcagccggtaggtttggtaacactacagatttctgggtccttccccagacccactcaattagagcccttgagggacatgacttgctaacaaactgctcacaaactcctcagggaatgtcttggttagcaaagtttgcacagcagtgacccacaggcactgtagcctcatgaattctgagaaaagactgtcagtcaaggagttctgccatcatgattaatgtcaagtggttcatttccttgaatagtggtctggggaaatattaatagatactcactttagtttgtgggctggttaaatcaaaaaaagaaagcctagaagagccaaaggactcataaaagcaagtgaatgaaatacgcaacttcgctt

SEQ ID NO: 542853 - DNA, 646 bp, Homo sapiens
gaccactctcgcagccaattccactttgtctcttataagcctcacccttggcaactctcctaagaaaagtgaaacttgacaatggagtttaaattaaaaataattagcaataaaaaatcaagttaggaggcacatagaaagtgcttgataagtacttgaatgaatggatgaatttaccccattaattaaatacttaaatttaccccattaataagaaaaaaaaaaaccctatattgcaaggttttttgaaatttgttccttgsaacaccagctccagaatcagccggtaggtttggtaacactacagatttctgggtccttccccagacccactcaattagagcccttgagggacatgacttgctaacaaactgctcacaaactcctcagggaatgtcttggttagcaaagtttgcacagcagtgacccacaggcactgtagcctcatgaattctgagaaaagactgtcagtcaaggagttctgccatcatgattaatgtcaagtggttcatttccttgaatagtggtctggggaaatattaatagatactcactttagtttgtgggctggttaaatcaaaaaaagaaagcctagaagagccaaaggactcataaaagcaagtgaatgaaatacgcaacttcgctt

SEQ ID NO: 542854 - DNA, 568 bp, Homo sapiens
ataggcatgaacaaagcataatgaaacaggaaattttccttgatcccttctcaagccttgtgacaggggtgcctcacttactcagcccgcagcttttaacccctcgtgggagggggagcatgcaggtgagcaggtgcagaagctggagtgagtgcttttgggtactggaaggagcaaaactccgtgtagcctgatrgcggtgtctacgggactacctgttacccctgaagcaccagagggagtgtgttacagtgctcttttagctttgctgtctgcagacagcttcagtgtttaatagctcagtggaccctctgccttttcatgagggcagatggttagtgtgacagttttctgtatcccaagctcttgtctggtgtccaggaaaaaccaggttgcacaaattcaaggatagtaaatgtgggggattttattgctgatggaagtggctctcagtgagaaggggagctggaaaggggatggagtaggaagaaggcattcttcccctgatgtcccaatgtcaagttgtccctctgaagtgaagctgcttctctcttatgtcaaaccagag

SEQ ID NO: 542855 - DNA, 568 bp, Homo sapiens
ataggcatgaacaaagcataatgaaacaggaaattttccttgatcccttctcaagccttgtgacaggggtgcctcacttactcagcccgcagcttttaacccctcgtgggagggggagcatgcaggtgagcaggtgcagaagctggagtgagtgcttttgggtactggaaggagcaaaactccgtgtagcctgatagcggtgtctacgggactacctgttacccctgaagcaccagagggagtgtgttacagtgctcttttagctttgctgtctgcagacagcttcagtgtttaatagctcagtggaccctctgccttttcatgagggcagatggttagtgtgacagttttctgtatcccaagctcttgtctggtgtccaggaaaaaccaggttgcacaaattcaaggatagtaaatgtgggggattttattgctgatggaagtggctctcagtgagarggggagctggaaaggggatggagtaggaagaaggcattcttcccctgatgtcccaatgtcaagttgtccctctgaagtgaagctgcttctctcttatgtcaaaccagag

SEQ ID NO: 542856 - DNA, 487 bp, Homo sapiens
catatttgactttttgtagtctatttagaatcgatatttcaccatttcaagtggaatatcagaatcttaccaccatatgkatctccttaccttcctcctctttttgttgtaattgtctcatgtattacagctacatactttgaaactttttaaaatggtgttaaaaatttttgcttttaattgtcttacatattttaaagaactcaacaagagaagaataacctattatacttatccagatatttgccatttctgttcttgttcatttctaatgttccacatttccttctggtatcattttttcttcccctcttacctacctaaacaatacctggtggcccagcagagacaaagaatcacagcaagagaaagagaaatcaatttaattaaagatttaatggctgcaggactactcagaggcagttcctagtataacagcgccacctgctggaagagaagccaaataaactttttttttgttccaagg

SEQ ID NO: 542857 - DNA, 531 bp, Homo sapiens
ctgcatacccacaacaacactgccctgcccacagatgccccgcccttgacctactgcatcaacagaccacctacagatataccccacaacctgctctgactctgccaagcacagaggaccttggtgggcctccagagagctgtgggtctcctggtgacctaatctttggcttggaccacctcaaagggagggaggagcacagctcaccagagccgcctttgaggctaaggaaaggcaggcacggcaccagtgattggagggggctcctttaagacccaggaatggacttggtgaggggatcatctctctcccaaccctgtctgccccacgacagagcactgctgccaatgcattgaaatacactgagaggcacatggctcagctasagtctatctacaagcccttactgtttttgttcttcttcttattattataccttttaagttccagggtacatgtgcacaacgtgcaggtttgttacatatgtatacacgtgccatgttgttgtgctgcacccatcaactcgtcatt

SEQ ID NO: 542858 - DNA, 480 bp, Homo sapiens
acccgaaggctgcttggtgatgctaagccctggccagtcccagaggacactgggacacatatgccaactgagccccagaaggagcctcagactcccatcccagataataacacaggattactcagatatattattctccgcattgaaaaaatagcaacaccattgtgagyagagcctgctgaaagaagggctggcagcattttggagatgcattgctcttagttggttttatggcatatttgcatttaaatagattcgttaactcttttgctgaacttcacagtaatatagccttagaagtgctgactaatagggcagcatgtgcttaattttcactttgatcttaacactgatacattgtcttatcgtagccattccagtccaaatgacacttggaaagacaaggtttaaattagttttttgttctttttggttaaaacagacagcccttaggcctgcagacatggaaggtgctcctct

SEQ ID NO: 542859 - DNA, 480 bp, Homo sapiens
acccgaaggctgcttggtgatgctaagccctggccagtcccagaggacactgggacacatatgccaactgagccccagaaggagcctcagactcccatcccagataataacacaggattactcagatatattattctccgcattgaaaaaatagcaacaccattgtgagtagagcctgctgaaagaagggctggcagcattttggagatgcattgctcttagttggttttatggcatatttgcatttaaatagattcgttaactcttttgctgaacttcacagtaatatagccttagaagtgctgactaatagggcagcatgtgcttaattttcactttgatcttaacactgatacatygtcttatcgtagccattccagtccaaatgacacttggaaagacaaggtttaaattagttttttgttctttttggttaaaacagacagcccttaggcctgcagacatggaaggtgctcctct

SEQ ID NO: 542860 - DNA, 533 bp, Homo sapiens
actattattgcacccacccaccacaagtgaatgcatcatcaaggcccaagctgggaatttttgatctctgtagttagccactctcagcagcctctgcttttccccatgccatccacaggccaggcccagctaatgcagacatcccacacatgctgtcctatacatgaaagtgcccaagtcctccccttcaactatgctgtttgatatgatcccaagagtgtttcacagcatccttgatttyttaagtaagatgctccaggctctagccaggtacagtggtgcacaactgtattccccactactcaggaggctgaggtaggaggattgcttgagcctataaattcaaatcaagcctggggaacacagtaggaccttgtctctttaaaaaaaaaaaaaaaaaaaaaaaaaaattccaggcttatgttttccatctccttcagacctgaaataagccatttattatttatccaagaagccatgggttaccctagtggaaaatagtatttaatctggatgctaaaactgttcactgg

SEQ ID NO: 542861 - DNA, 533 bp, Homo sapiens
actattattgcacccacccaccacaagtgaatgcatcatcaaggcccaagctgggaatttttgatctctgtagttagccactctcagcagcctctgcttttccccatgccatccacaggccaggcccagctaatgcagacatcccacacatgctgtcctatacatgaaagtgcccaagtcctccccttcaactatgctgtttgatatgatcccaagagtgtttcacagcatccttgatttcttaagtaagatgctccaggctctagccaggtacagtggtgcacaactgtattccccactactyaggaggctgaggtaggaggattgcttgagcctataaattcaaatcaagcctggggaacacagtaggaccttgtctctttaaaaaaaaaaaaaaaaaaaaaaaaaaattccaggcttatgttttccatctccttcagacctgaaataagccatttattatttatccaagaagccatgggttaccctagtggaaaatagtatttaatctggatgctaaaactgttcactgg

SEQ ID NO: 542862 - DNA, 677 bp, Homo sapiens
ctggggctctgagccactaaaacccttaaacttatcaagtatgaacaccctttacctacacttatggttctctgcataaactagtatggggcataacatgtattaatatgtgtttactgggaacttaataattatttttgaaacagcaggagggaatatggcaggcactgtgcaaactccaacaatctccgtttagagcagaggatacgttcttttgctcacgtccactaagcaggtaaccagccaacatccttcccccatcccatctcttgcggaaaacaataaatatacaaaactgaaccttttaccggattcctcttccttatttgaaaaagaaatcctaatatcataagtgttacacaaacgagttgcagtaaatgtaatttcaagtttacactcatctctaccttgatacatttwaaaaaaaaaaaaatcagggtttctgtccgtaaacatctcatttatgtcgccagtaattcagcgatacacacaaatccatctcattcgtcacacttagttaggactttaaaggttatcagtctggggggaaaaagtctcttctgttctacccccatcacagccctattccagacctctgctatacaagggtatcaacaataaagttatgatcttgttttaagactgagaagaaaaaaatatttttcctcaagagtaaa

SEQ ID NO: 542863 - DNA, 510 bp, Homo sapiens
cacttaagatctctctgattgactcccattttgaccatagattggggcttgctgtgaaaacccactggtttgtatttatttttttctctcagggaaaataagagactctaaaaatacttacataagattaggcaatagaccagatctttctttcctgaaaattatagttcaaagtatattttattatgtttctattttgatagcaatagctccaaaccatgcttcatattccccactttgtcctacatgcatttactatccatttctcataacattatttcctgtggtctttgtaggaattgcttagattgctttattagctcttatagtacactttggtgtttgactggcctacataaayatagtttcatttctttaaagtaataattaaattatcattttgttttcttagatcctgccatttgctaactatatcaattttctcatcttgcgacagttacttgatttggccataccatttctgcttttcttttgttgacataccttttg

SEQ ID NO: 542864 - DNA, 563 bp, Homo sapiens
ccaaaccttaggctgggttaatcctatggatacaataacaaataaggcacagctcctgcctatggtrgagagggaggtacgcagtggaaggctccatgagtccagtaagtaaattacatagagaaccactctagatcataagatggtaattacgtgaaaacagcagccgctagatctatagtaagcctgaactaactaaattcaggaaaacaatgagtcataagctgcataaatttgtcattttgattctttaataaattagcaatataagaatcaaaaaccaagaaatatgttatcacattacacttaaacatatctgttttgagatggtttctttactcaatttatccatgactacatttttttttcattttctcaccaacatatctgcccatagttagcccattaattgccaatgatattcaagagatgtttaatattaaccgccacactaggacaaataaaaatattacaataacaaaacaaaacaaaaaaattccttaaaaaggcagaaaatggatcactatttctgctcctcttctcaaaccaaaggagagaagatt

SEQ ID NO: 542865 - DNA, 629 bp, Homo sapiens
ttacatcaaacccacattttcagctttaatgtatcttgctaaacatggcccacttctcaatgcaaaaaaaaaaaaaaaattctgccacttgagaattaaaatatatttctttyccagttataccctttgttatatctgtcacacaaataaaaagagaaatctgtaagagaaagactcatgtagcttaacatgttcaggcaatctagaaaatgtagcttctccagtgtttcctggaccagaacaaaaggcattccaagtgaaagggcaaactggccccagtaaactgctttgaaatttaagcccttgggtttggcactccagctgttgcaaggtaaaatcgcttcatgttaaaaaatagtctgttcttatcagtggtttccatgggtagcctttgtagttttctgaaatattttcatgacgcgatgaggtaagaagttgattctatttttaattctatttcctgagtcataatatctccctgcataaaacaggcactgatagaatgtttagttagaaaggtgtagttctaaagaaatcagattggtcataatatcttgcctcttctaacgtgtgatttttggggcgtatatatttagtttttaaatgctcctaaaatatttgtattggtt

SEQ ID NO: 542866 - DNA, 629 bp, Homo sapiens
ttacatcaaacccacattttcagctttaatgtatcttgctaaacatggcccacttctcaatgcaaaaaaaaaaaaaaaattctgccacttgagaattaaaatatatttctttcccagttataccctttgttatatcwgtcacacaaataaaaagagaaatctgtaagagaaagactcatgtagcttaacatgttcaggcaatctagaaaatgtagcttctccagtgtttcctggaccagaacaaaaggcattccaagtgaaagggcaaactggccccagtaaactgctttgaaatttaagcccttgggtttggcactccagctgttgcaaggtaaaatcgcttcatgttaaaaaatagtctgttcttatcagtggtttccatgggtagcctttgtagttttctgaaatattttcatgacgcgatgaggtaagaagttgattctatttttaattctatttcctgagtcataatatctccctgcataaaacaggcactgatagaatgtttagttagaaaggtgtagttctaaagaaatcagattggtcataatatcttgcctcttctaacgtgtgatttttggggcgtatatatttagtttttaaatgctcctaaaatatttgtattggtt

SEQ ID NO: 542867 - DNA, 663 bp, Homo sapiens
gcagtaaataaagtagccgtgggaggtatgcaccggaaacttcagcagagagcactggtgagagtctcattcccaactacacaccttcgtttgttgttctgggcggaagcgagttgcagtaacttgatactcatcccagtcccggttttgtattgagcacatcgcctttctaactctcctcagtaattccttctgattaaagagtagacagctctgaatcctctcgacctccgtacgcttctcatttcctttctccctgccttccaaaaatcaaaacaaaatggcttgataacttggaaggtgatataagcatttctttctgcagcagcttgaagtygtggtggggaaaactgtggttctgcctcggctgttatgttatctcatttaattgctaacatattgtccttagcttttgattcataaaatgttttccttggagttctgaagtaggtcttcagtgatttactaagtattagtataatgaaagggatttttttttttcacagcggcatggctcataacacaagagcgaatgtttgtatacttgcaagctctctggatgatattattgagctatgcttatttcctgctcaaaaaccttccctgcctttccattttctacaagataaagaccaattccttagctcagcatttgaagcctat

SEQ ID NO: 542868 - DNA, 663 bp, Homo sapiens
gcagtaaataaagtagccgtgggaggtatgcaccggaaacttcagcagagagcactggtgagagtctcattcccaactacacaccttcgtttgttgttctgggcggaagcgagttgcagtaacttgatactcatcccagtcccggttttgtattgagcacatcgcctttctaactctcctcagtaattccttctgattaaagagtagacagctctgaatcctctcgacctccgtacgcttctcatttcctttctccctgccttccaaaaatcaaaacaaaatggcttgataacttggaaggtgatataagcatttctttctgcagcagcttgaagttgtggtggggaaaactgtggttctgcctcggctgttatgttatctcatttaattgctaacatattgtccttagcttttgattcataaaatgttttccttggagttctgaagtaggtcttcagtgatttactaagtattagtataatgaaagggatttttttttttcacagcggcatggctcataacacaagagcgaatgtttgtatacttgcaagctytctggatgatattattgagctatgcttatttcctgctcaaaaaccttccctgcctttccattttctacaagataaagaccaattccttagctcagcatttgaagcctat

SEQ ID NO: 542869 - DNA, 634 bp, Homo sapiens
gtaccacaggcaagctggatgctgagctggaatcasaaacagaaattaacaacaaaaaattaaaacctacctaaaataatgatttaacactgaaaactcgactctttagtcaaaaagctcaactttagaagaagcccatatatatttaaagtaaacagtatatctaaggaaaccatatactgtcaccaggtaaagtcacctggacaagtcaatataaaccatagattgtcatcaggtaatgcccattttgtacacattcattcattcgttcaacaaatatttattggctgacttctgattgctaagaacactgttgggcacaaagcctacaaaaaatggaaataaactgattggcctcaatgagctcatagaccaagggaagcacagacaagcagtcatgtgcaaaactgttccacaaaagattattcctcgtgtcaaggataacgtctgggcctgcctgtcagacaagatgcaacaaaggaagtagcagaaaagctaaatcttaaagcaaagtcatgctagaaagagtcctgcatatgccaaaatatcttccatggagggtaagatcctcaagttttatccattttttttgagtaatgcgtttgaaaaagtatctcataaatttaaaatgtta

SEQ ID NO: 542870 - DNA, 537 bp, Homo sapiens
ctcggccctcctccgccacaccaggctccctgaaggtgtcaccgaccatagacaagctgccctacgtgccccacagccccttccacctcttctcctatgactttgaggactcctcctctgtccaccaaggagaaggaagcagagtcccagaaggaaaacaggtagatttgctcacctggaggcttgtttgagattaactcggggaggagaacacagtgtgytaactgcaccccttggcttggcttctgccatgtttttttgtggatttcagcccaagcagggagcagttgtggcataaacttaagttgctgacccctgactaaataatgaccagtgtttacataagatgcagagaaaattgtcatctgtttgaattaaggggatcatttgttaaaatatgattactagtaatgggtttttaaatgtaaggtttacatgtgtataatgtgtccaaatttatacatcttgtaccaagccaggtggcatgaagtctttttgatgctgaagaatgtatcaaagtcctttgctatctttccg

SEQ ID NO: 542871 - DNA, 537 bp, Homo sapiens
ctcggccctcctccgccacaccaggctccctgaaggtgtcaccgaccatagacaagctgccctacgtgccccacagccccttccacctcttctcctatgactttgaggactcctcctctgtccaccaaggagaaggaagcagagtcccagaaggaaaacaggtagatttgctcacctggaggcttgtttgagattaactcggggaggagaacacagtgtgctaactgcaccccttggcttggcttctgccatgtttttttgtggatttcagcccaagcagggagcagttgtggcataaacttaagttgctgacccctgactaaataatgaccagtgtttacataagatgcagagaaaattgtcatctgtttgaattaaggggatcatttgttaaaatatgattactagtaatgggtttttaaatgtaaggtttacatgtgtataatgtgtccaaatttatacatcttgtaccaagccaggtggcatgaagtctttttgaygctgaagaatgtatcaaagtcctttgctatctttccg

SEQ ID NO: 542872 - DNA, 570 bp, Homo sapiens
ccagttgaagatacacgtaagttgtgggggaaaaaaaaagctgcttgcttgtgaatgaaggttgactttgatttaactgagcaaagtttgtaaacttttaaaatcacttctccagcaggaacttggatactgtacaagtattgttcctattgatttttctgatgttcactttttgtggttttcatgggtctgtgtgaccacagatggactactcagtggttgactgcgattgartgggttataataaagaccgaccagttagtcattaaaaagaaccctcaccctccacacacacacacacacacacacacacaaatgctgaatagtgagttgtatgatctagttagtttggctgaaattgagaagcaaaattagactatgaggcatttgaattaattgcttagacattaggaaaaccaaaggagggaaaaacacattctgcttgttttatttccatagcgtcatttaaacacaattttagcaaagtgatcctgttaaaacattctgcaggatgtccacttgtggtgggaagggaattgttttagctgctggagtaggatgacaagctga

SEQ ID NO: 542873 - DNA, 570 bp, Homo sapiens
ccagttgaagatacacgtaagttgtgggggaaaaaaaaagctgcttgcttgtgaatgaaggttgactttgatttaactgagcaaagtttgtaaacttttaaaatcacttctccagcaggaacttggatactgtacaagtattgttcctattgatttttctgatgttcactttttgtggttttcatgggtctgtgtgaccacagatggactactcagtggttgactgcgattgagtgggttataataaagaccgaccagttagtcattaaaaagaaccctcaccctccacacacacacacacacacacacacamaaatgctgaatagtgagttgtatgatctagttagtttggctgaaattgagaagcaaaattagactatgaggcatttgaattaattgcttagacattaggaaaaccaaaggagggaaaaacacattctgcttgttttatttccatagcgtcatttaaacacaattttagcaaagtgatcctgttaaaacattctgcaggatgtccacttgtggtgggaagggaattgttttagctgctggagtaggatgacaagctga

SEQ ID NO: 542874 - DNA, 586 bp, Homo sapiens
ctgggctctgttagatgtcttttcattctcttggctggtaaaatcttttgcagaaactttaaaaaacttgatggctaacaaaactctacttttaagtgaaatcactgattcaagttggccagatatttgtcttaactgattacgattgctaattggaagttttcaaatgttaccttgggcccttggtgacctagaaacagccttaaagttaacagaaagtgtgagtcactgtgaggccaagatcaaactgcaatttaaggattcagtaacacagaaggctgcagaccaagacyggagggccatgttctttaccataaatgtaacaaaatatttctatgaatatcttatatgtcctatgcattttatggaactaaatgggacagtttaaatgtctgcattttatctaaaccttaagacggctttttgactagttgccacaaatgggtcataaggcactgctcctccaggctttcaggacagcaggcaagtctggggtgactgggctctgggctggtcttctgggagctgtacgcagccttgtccaatacgaggcattatttttctctgtgctgtgtgaaagaaggat

SEQ ID NO: 542875 - DNA, 484 bp, Homo sapiens
ttttgtatatgtgggtgtgtgttcatgatgagggacatagtagtctacatatagtgttgcatgttgaatcttattagcaaacatgttggaaacattttcccttgtcattacatgtttaagaatttaatgttttagtayaatattctatctgtgtgtataccataatatatataactagtccctattttttcagatttagattattttcaaagttttcacaattacaaatgctgttatgaggaagatattcattcataaatttttctgcaccgctagatctctagggaagatattttccatttccttatggtcttcactggatagaaatggagagagtgatgtataactcactattttctataagttactgtcataataagtgacaagttgaggaatagaacagaattatctttatatgatcttgggagagaagaaactgggcccaacatatttgctggcagcacttgaagctgccaacagccac

SEQ ID NO: 542876 - DNA, 611 bp, Homo sapiens
ctggccagctctttgtgccctgctctgggcatcttctcttccagccctgcctcactccctcagttttttattgttactgacctgtggccctgggaggccagtaggtgacaaaggagtatgttctcatggctcctaagatacaagatggagaataaagtaagcatactaaagatggaagaggaagagagctcaagagagttggtttaaataaaggtagmagatggactttttccagcacagatatttccttcccttagccccctcaccaccacgatcggaactccttccatctcttagattctgttcagccaggggctcagatgaccacagatttggattccatagggtcactgtatattcagaggccagcatgatgcggatgaattgcccatcagtgaacaaactgggagagagtagtgaagaatagccttgataccaactccaggaatctaaaaactatcctctgcttcagggcacattttctctccagcctacctgcctcttaagccacctcctcaacttctttcccttcatgccagactttgaagaaattatactgtgttcaccatctttcttttgtcgaattacatgtgcctaatatttgagcatca

SEQ ID NO: 542877 - DNA, 471 bp, Homo sapiens
ctggccagctctttgtgccctgctctgggcatcttctcttccagccctgcctcactccctcagttttttattgttactgacctgtggccctgggaggccagtaggtgacaaaggagtatgttctcatggctcctaagatacaagatggagaataaagtaagcatactaaagatggaagaggaagagagctcaagagagttggtttaaataaaggtagaagatggactttttccagcacagatatttccttcccttagccccctcaccaccacgatcggaactccttccatctcttagattctgttcagccaggggctcagatgaccacagatttggattccatagggtcactgtatattcagaggccagcatgatgcggatgaattgcccatcagtgaasaaactgggagagagtagtgaagaatagccttgataccaactccaggaatctaaaaactatcctctgcttca

SEQ ID NO: 542878 - DNA, 602 bp, Homo sapiens
acacccaagttgcttataatgatataatttttgttttactacttgygtttgagatgatgagaggaaaataattaaatagagaaataataaatcagtaagtattagtattttgtgttagatttagaaagtatatgtacaaatcatcatatggtgaaatatattgcatatctaacatttgagtgcattttaagttttgggtgataaaatagaatatttaaaagatattgagtattgacttagacctgtgaatttacattgaaaattataataaaattgtactaagtttgtaacttcattggaatgtttaagataagaatcaccatatttataattttaattttttagattttcttgtgtaggatgtgggaatgtcttgtcagtaactgaaaaactgaaaaagcaaatggcatatgttaaattaataaaatatttttataaaagattttaattaactgcatttgtgtaatgaagcatatatttatgttcctccttaaaattaattttgagaattattttatttataatagaatggaaacatacttgaaaaatacctagagttaaaatcatacatgttgagaaatcaaatgtctgcttttgatatt

SEQ ID NO: 542879 - DNA, 636 bp, Homo sapiens
tatgttgcaaagttctttcttttccttcttttcttctccttcttccttccaattgaaatatataaatatatgtgtgtatatatatatgtatgtatatacacatatatgtattttttctatggagaaaatcagtagatgttaattagtaactgaaacaagtttctatcaattttaaacatctaataaccattttgagtaaactrtatatacaccatttaatataattgtagagaaaaataaaataaaatattccaaaataatttcaaaactcccttaggaaagagccaagagtttcaatgtcaaaagagtttcaagatttgtattcttctatttgggatatgatgagtataaaggatttactaaatgtgctaggtcaaatatcactttgttctagaagcttgtaaaattataaattggaatactttctaaaaattatgaaaactactgtagttttctgagaattgagttttttcattgtttaaagctgaaatattggctgggcatggtggctcactcctttaatcctagcactttggaaacccaaggcaggtggatcacgaggtcaggagtttgagatcagcctggctaacatagtgaaaccctgtctctactaaaaatacaaaaattagctggtca

SEQ ID NO: 542880 - DNA, 636 bp, Homo sapiens
tatgttgcaaagttctttcttttccttcttttcttctccttcttccttccaattgaaatatataaatatatgtgtgtatatatatatgtatgtatatacacatatatgtattttttctatggagaaaatcagtagatgttaattagtaactgaaacaagtttctatcaattttaaacatctaataaccattttgagtaaactgtatatacaccatttaatataattgtagagaaaaataaaataaaatattccaaaataatttcaaaactcccttaggaaagrgccaagagtttcaatgtcaaaagagtttcaagatttgtattcttctatttgggatatgatgagtataaaggatttactaaatgtgctaggtcaaatatcactttgttctagaagcttgtaaaattataaattggaatactttctaaaaattatgaaaactactgtagttttctgagaattgagttttttcattgtttaaagctgaaatattggctgggcatggtggctcactcctttaatcctagcactttggaaacccaaggcaggtggatcacgaggtcaggagtttgagatcagcctggctaacatagtgaaaccctgtctctactaaaaatacaaaaattagctggtca

SEQ ID NO: 542881 - DNA, 622 bp, Homo sapiens
tgtaatcctggagatttgggaggctgaggtgggcagattgcttgagaccaggagtttgatgttgcagtgtgttgtgattccaccgctgtactccmgcctgggtgacagagtgagcccatgtctctattgaaaacaaaagaaaaggaaagaaaaaaaaattgaggggagagggttggaagcaaaaatggctggggagactgttacggactgaatgtgtctcctcaaattcctatgctgaaatcctaactcccaatgtaatggtgttagaagctggagccattggtacgtgattagatactgactggagctttcatgaataggatcagtactctcataagagaagcttaagagagatctctagctccttccaccatgtgagcatgcagggagaagatggaagtcaatgaagaggaaacgagcccttaacagacactgactctgctaatatttggacttcccaggctccagaactgtgagaaataaacttttgttgtttataagccacccagtctatggtattctgttatagcaacctgaatggaataagatggagaccatcagataaaacacttttaaagtttttctctattctttcatctggatttattggaaaatgcaagta

SEQ ID NO: 542882 - DNA, 549 bp, Homo sapiens
gtagacctacagagcatccctgctataggggaccacatagatgcccacacttctgagagttctgcaggaacattcccctcagccctcacccctctttgggggttacatttgatgaagaaaactgctttgtttggagtttcaggggcagtctgcatcaaaagactgatcactgcaggggtataaaggcacagttatctcaccccaacttggaaggggccatttcaattccagaatactgagttagtctccctctgccaaattgtccttccttctccattctacaggtgtgatcccaagtgcatttcctaataaacctcctgcacactaatctctatctcaatttgcttcttctcatagccatttagcacagtttggttttaaactrtttacatgaattaccttcttaaaataaaagttaacaaaaataagtaaagtaggctggcacaaattaaagtaaaaataaaatacataagtaaggttagtatacaaaattcacaccccaacgacctgtaatatagaggagtttaaattagagtgcaagctttaaat

SEQ ID NO: 542883 - DNA, 627 bp, Homo sapiens
aatgggagtcaaagttaccaattttaggcaaataccttcacaatgaaagttgactttagcactctttttctccttgatttctaactttcacttcatgttgggcctaataattcttagtttccttacagatcaacaaaatgttatttctccttttattctagctacttaaaatctttttcttggcatgggttaaagggggtatttagatctctatgcttgcagaaaaagaaactatgttatggtatatggaattttaaaattggtataaatgataagctattcaagtaaaggaattactatgtcatgtgcctcaaattaagcagattaaagagtaactcgaagagagtcttgcctggaagtaaataaacaaataaacagaaataactaagaacagtttcctaaatatgtcagatacagtgattgcaattgtttttcaagggagagaagagattcaaggttgacaagtatattgcaatgaatcaaatgggaaattttcttcgatttttaaaggaagattcccattacttgctgttaggttacaggtactagattcaaaattagtttagaaactatagagcttgcataaggrtattcattaaaccactgatccataagtttaacaagtga

SEQ ID NO: 542884 - DNA, 562 bp, Homo sapiens
ctgcagccgaccctgcgtccagatgagagagagccaggggtaaattgccgggtaggcagactatttggcctcttttacttcaatagtgagaggcagccatctcctcctccaaatcacagcaatggaagaacccagcaacaccaaagatggctcctctgctgtaggctggagctgggcccgttaactatcaaggttttccttttgctttcatctggaagatctggaaggcacatatgttttttttttttcctttccaatttttattttaggttcgggggtacatgggcaggtttgttatgtgggtaaattgtgtgttgcaggggcttggtgtacggactatttcatcacccaggtaagcagcacrgtatgggatcctcatcttcatcccacccccaccctcaggtaggccccagggtctactgtctcctccgtgtgtccatgtgtactcagtgtttgccttccagttataagtgagaacacgcggtgtttcgttttctcttctcgcattagttcacttagaataatgacctccagcttcacccacgtgtctacaaaagacatg

SEQ ID NO: 542885 - DNA, 565 bp, Homo sapiens
tgaagggtttctctccactcgaaggagtcacaactcttcaaccacagcttctcttcattaaaaaataaaatgtttgtctccctcaacaaacactcacatgcacaatccatcatcaatacctgtttgctctaccttctacctagttctggattgtagagtgggttaacttaaaatgtacgtctcctgacatctatgtagttctggattgcagagtgggttaatttaaaatgtatgtttcctaacatactcagtgagcgaactccatgccttccacttccttctctcttcctctcttagtctctaggagggcagcatgtggggcctaagggtcacgcccctctgggcrgggacgccgccatagaagaagacacacacatctgacacccaccccactgccccagcccaagcccaggccaggcacccctggaggcctcgccctggtgactgccctcccaccccccgcctgtttctttacaagtttcccctctcttgacctggtgctagcctggttccttccaggtcggcccagcgccacggaggctcctcgagactgtcttgcccaccc

SEQ ID NO: 542886 - DNA, 429 bp, Homo sapiens
ctcctaagcttgcttctcagatttgaaggtaagcctaaggtgtacatcaactttttaagaggtttgctcaatcaaaggttaagatgcatataaacagagaaagcatactattcatcatttgttatctgaaaggtagcatcaattgtggctgctgccaaaccaaggaacgaaagaaaatcatttaaaaagtaaatcaattctcagrtcgaacaatatgatactcaggacacaagagaactcatctaggtgcatcagaaggcaacgtcaagcattattcaaatggaaaaagtggcttttcacttctctaaaatcttaaaacgcaaatatagtggaataacagtatcttttatatgaatattgaagtagttgcttattgaggtaattatctaaaaataattaaagctaatacatgtcaaaaaatgataaagt

SEQ ID NO: 542887 - DNA, 390 bp, Homo sapiens
cctaccaaaaatattaatggtgaacatacttgttttgacaatcttaaatcactttaataccaccctgatttataactgttgtggacttgaaagtatgctttcagtttggaggtgtttgggtttattgtttcaaaagtgctgatggcagtgctaagatgttccactcttgcaaagctcagtctttgtgtgctgcggtagaagttctagaataagggtggggggagctggcttgcttggctatccccrtggcagagcatcagccccgtgagcgagcactgcttaagggagcagtgcttggcagtccttcacgtgctggaacagtccctgttagggatgggcagcctccacagaaccaacctctgacctttcagtgtgaggatcttcccagca

SEQ ID NO: 542888 - DNA, 310 bp, Homo sapiens
agttccatctttccttagggaggatgcctggataaagggagctggatgcctaagaaccaaagcctgggtactggagagatggacacttgtgcacagcacccaaataaacaagccttctttcctttgtcaagagctgctgtcgatagctaaatttagtcagccgctagagggaggtgctgggaagttaggatgagctgttttctcttgcccttaattcttcttgctgatktaggggaaagcaggaactccgcggattggataattaggtcaatggctttccacatagagaacaggttttcccatcgttggg

SEQ ID NO: 542889 - DNA, 622 bp, Homo sapiens
tcaatttacaatggttttattgagatgtaacctcatcataaatcaagcagcatctgtatcgttttagggtttctttctggctatggttgattatctagctttgtaaagttcttagaccttcaaatgagacaattttcctgattgttccgttttaagtcctcakgtacttttacataataggtgaatgttcttctaattctatttcattattactcttatgctaatcattctaggttcaatagaatttcttttctattagctcataagcatttaaaaaggcaacaccttcttgtattcatatgtgtccagaaagtatggcccataagagttatttaggtaaggatgaagaatttacacttgggacttgaagcagcttcactcctgtgaagaggagatgtatcttgacatcaagccacatctctgaactgcgcaactccactatccctacccaatctcccattcctcatttctcatctaccattagagaaaggccagcgaaagagaacttccgggtagtgggtctgttcctcagtaattcctcaagctcttctcagtatatgcaactggttccccagcagtagttacctgggctcttaaattttctggtctccttcatccatct

SEQ ID NO: 542890 - DNA, 622 bp, Homo sapiens
tcaatttacaatggttttattgagatgtaacctcatcataaatcaagcagcatctgtatcgttttagggtttctttctggctatggttgattatctagctttgtaaagttcttagaccttcaaatgagacaattttcctgattgttccgttttaagtcctcatgtacttttacataataggtgaatgttcttctaattctatttcattattactcttaygctaatcattctaggttcaatagaatttcttttctattagctcataagcatttaaaaaggcaacaccttcttgtattcatatgtgtccagaaagtatggcccataagagttatttaggtaaggatgaagaatttacacttgggacttgaagcagcttcactcctgtgaagaggagatgtatcttgacatcaagccacatctctgaactgcgcaactccactatccctacccaatctcccattcctcatttctcatctaccattagagaaaggccagcgaaagagaacttccgggtagtgggtctgttcctcagtaattcctcaagctcttctcagtatatgcaactggttccccagcagtagttacctgggctcttaaattttctggtctccttcatccatct

SEQ ID NO: 542891 - DNA, 622 bp, Homo sapiens
tcaatttacaatggttttattgagatgtaacctcatcataaatcaagcagcatctgtatcgttttagggtttctttctggctatggttgattatctagctttgtaaagttcttagaccttcaaatgagacaattttcctgattgttccgttttaagtcctcatgtacttttacataataggtgaatgttcttctaattctatttcattattactcttatgctaatcattctaggttcaatagaatttcttttctattagctcataagcatttaaaaaggcaacaccttcttgtattcatatgtgtccagaaagtatggcccataagagttatttaggtaaggatgaagaatttacacttgggacttgaagcagcttcactcctgygaagaggagatgtatcttgacatcaagccacatctctgaactgcgcaactccactatccctacccaatctcccattcctcatttctcatctaccattagagaaaggccagcgaaagagaacttccgggtagtgggtctgttcctcagtaattcctcaagctcttctcagtatatgcaactggttccccagcagtagttacctgggctcttaaattttctggtctccttcatccatct

SEQ ID NO: 542892 - DNA, 528 bp, Homo sapiens
tcatcttatgctgacattacatgttgtggtgttgcaaggcagaaaagatgctggactattgsttggaacaataaaaaaaaaaaaggaaaaaaatacaatgatttaagccctccaaatgatagtatcctggttttaaatggcttacaatattattacaagaataattaacagtttgaatccatataatattttacgtgttttacatataagtaatcctcattaacaactcaggaaagcaggtattttcagcccattttacggagaggaaaggaggctctgaagagttggagaagattctctgaagagttggagaagaggtggtgaaggctgggattcacaggcagggccatctgactctagccagcccagggcagcccaccatttattgtagctgcccatcagaaatgacacatctatttacctggcatttgctaaagcacccagagggactagacagactctggctagaggcacttgtcctgaaatctgattcctgcctgatgatggtgtctcttgtatcaatctctc

SEQ ID NO: 542893 - DNA, 528 bp, Homo sapiens
tcatcttatgctgacattacatgttgtggtgttgcaaggcagaaaagatgctggactattggttggaacaataaaaaaaaaaaaggaamaaaatacaatgatttaagccctccaaatgatagtatcctggttttaaatggcttacaatattattacaagaataattaacagtttgaatccatataatattttacgtgttttacatataagtaatcctcattaacaactcaggaaagcaggtattttcagcccattttacggagaggaaaggaggctctgaagagttggagaagattctctgaagagttggagaagaggtggtgaaggctgggattcacaggcagggccatctgactctagccagcccagggcagcccaccatttattgtagctgcccatcagaaatgacacatctatttacctggcatttgctaaagcacccagagggactagacagactctggctagaggcacttgtcctgaaatctgattcctgcctgatgatggtgtctcttgtatcaatctctc

SEQ ID NO: 542894 - DNA, 587 bp, Homo sapiens
cacttcctgcgagaatgactggcgcccccagctactctgtctctgtactgactgaggaagttctaacaggacagtaactgcaggatgagaacatgggaagaacagggtctctggagtcattcagcacctaggttcaaatccagacactggtacttactaactgatatttggacacaaagcttcaatttactgaactgtaaaatgaggcacatgttacctgatttaatttttaaaattgtattatattgtgttttatttcaataggttttggggaacaggtggtttttggttacatggataagctctttagtggttacttctgagattttggtgtacccatcacccaagcagtgtacactgtgtgcaatgtgtagtcttctatctctcacctccttccactcttcccccaccccacaaagtccattatgtcattattatgcctttgcatcctcatagcttagctcccacttataagtgagaacatacaatgtttggttttccattcctaagttacttcacttagaataatggtcttcagaccaggcatggtggctyatgccataatcccagcactttgggaggccaag

SEQ ID NO: 542895 - DNA, 645 bp, Homo sapiens
aaatgatctattttgcttgttttctttccttctggctttgttacacacgtaaaaccttcttccactttcctccaacctctccctctaaagagttaattagtcaccactgtatacaataaccatacarcatttgtttcccttaactcctctatcacactgtaaggtaattattttttatactgatgtctttacttccaaatcataattgtcttgaaggtaggttcagtgtttttaattcatccttgtacccatccgtgaagaacacaatggtagcacatgagaacccttcataatatttatggattgatttgctgtcatctgcccatttttcattgtagataatcctaatgtttgaaatgttagaagactatttagcatttcatattaactttatatatcctgcaggaagctgtaattaacagagattctgcataagagaatcagctttttattaattttttactatataagaaaaagttcacttactgcaatataaaaaaaattcatttactgtataagaaaaagttcatttattacaattttcccttatagtaaaaatgtaaaggtttagacaagatagacattctaacaacccaaaatattctgagtaaaactgttttttcctatatatagtaggaagaaaaa

SEQ ID NO: 542896 - DNA, 645 bp, Homo sapiens
aaatgatctattttgcttgttttctttccttctggctttgttacacacgtaaaaccttcttccactttcctccaacctctccctctaaagagttaattagtcaccactgtatacaataaccatacaacatttgtttcccttaactcctctatcacactgtaaggtaattattttttatactgatgtctttacttccaaatcataattgtcttgaaggtaggttcagtgtttttaattcatccttgtacccatccgtgaagaacacaatggtagcacatgagaacccttcataatatttatggattgatttgctgtcatctgcccatttttcattgtagataatcctaatgtttgaaatgttagaagaytatttagcatttcatattaactttatatatcctgcaggaagctgtaattaacagagattctgcataagagaatcagctttttattaattttttactatataagaaaaagttcacttactgcaatataaaaaaaattcatttactgtataagaaaaagttcatttattacaattttcccttatagtaaaaatgtaaaggtttagacaagatagacattctaacaacccaaaatattctgagtaaaactgttttttcctatatatagtaggaagaaaaa

SEQ ID NO: 542897 - DNA, 623 bp, Homo sapiens
cagctggccatcctgtcctgaagatcaaagcatgttactattgcagcagtgatcttggaaatgatagtcatccatgtgttgctttttccttaaatcatattctctgatatacgctgattggtacactctctggtcaatagttgtcatcttargatctctttttactgccttttggagatttcctttgccttactcctatactgggtatctatcctcttttctgttgtctcctgtgtcttgatttactctcttatttgatagaacatgtccttcagtagcctcctgaggaagaatggatatgagatacatttttgagattttgcatgtctatatatgtctatatatgtctatattctaccctcacatttgattggtatttctctgagtttggaattctaagtggaaaataattttttccttcacaatttttaaaagatgttgctttattgtcctctttctctcttgccgtggagaattttgcatccactcaggttccttatgtgtgatttgcattttttcccctcacttgaagctttcagaaactttacatcagtattctcaaattgtacaatatgggctttgatgtggctttattttcacttattgtcctgggcactcagtga

SEQ ID NO: 542898 - DNA, 617 bp, Homo sapiens
ctgtgagtctgggaccccacttttcctcttgggatcaagtgaactggccacccaaccacagatgatctggttataaagtgaaatgacagccatggccggactcctggactggatgcactacgggcacatgaacgtgctgcactctacaggcacgttcagctccagaaggtgatcggcactgctgagccccgccctccgactgccttcactcctgtctgggtgccttggtccatgcttttcttctccctccccctctgccagtctccatgatttacatccccttcatacctcctgtctcagctcaagcctcatgtcctcccaaaagctcgccccaccatttattctcttcctgtaatactcattgttaactcaatgcagaatcatgcttttaaaaacactatctactttctcttctttattacataccttgcttcccctactgaccaatctgcaagctctcataagacaggggccctcttccatttctctggcacctgctggggctcctttggtgactgtctgcaaagaggccccaacaacttcttccactactcctcccctcaagaggtagaatctctctctcrccatatctggcctagccatgagactggttttga

SEQ ID NO: 542899 - DNA, 601 bp, Homo sapiens
acttcattctgtaaacctatttcccagcgattttcaaatgctgctatgtatttactgactatggcctgtttcgaggtttaagaaaaataaattgtgttttcacaaaatcaggatatattgattttcctttttggcaatactcccacagttaaccctattgacttttgtaaaagtacagcttctaccagcagttcatggttcagaggtcratggttaatgcatgggcaggaggaacaaaggagcatattataaaactgataacagcaaatacagcacttactatgtgccagtgatggtactctgtgttctttacacctgttaactcttcaaatcctcacaaccttatcagaagggtactcttctccatcccatggttttggggtatgtgtgttccattttaaccatttttaagtgtatagttccgtggcattaagtatattcacaatattacataaccatcaccactatttccaaaattctttcatcatcctaaacagaaacactacccatttgggcaaataatattctcccttcccttcaaccctgggtaggcttctatatgtaaattctagatatcacatataagttggctcatacgata

SEQ ID NO: 542900 - DNA, 601 bp, Homo sapiens
acttcattctgtaaacctatttcccagcgattttcaaatgctgctatgtatttactgactatggcctgtttcgaggtttaagaaaaataaattgtgttttcacaaaatcaggatatattgattttcctttttggcaatactcccacagttaaccctattgacttttgtaaaagtacagcttctaccagcagttcatggttcagaggtcaatggttaatgcatgggcaggaggaacaaaggagcatattataaaactgataacagcaaatacagcacttactatgtgccagtgatggtactctgtgttctttacacctgttaactcttyaaatcctcacaaccttatcagaagggtactcttctccatcccatggttttggggtatgtgtgttccattttaaccatttttaagtgtatagttccgtggcattaagtatattcacaatattacataaccatcaccactatttccaaaattctttcatcatcctaaacagaaacactacccatttgggcaaataatattctcccttcccttcaaccctgggtaggcttctatatgtaaattctagatatcacatataagttggctcatacgata

SEQ ID NO: 542901 - DNA, 448 bp, Homo sapiens
tgtgccctacgcagtgctaggcatggttccacctgctttcagggaccattacatttaagcttcacactaacctgataaaataggtactgctgttttcccccattatatggatgagggtactgaggcccaaggggacatgaagtgacttgccccaaagtagacacccagctggtaagtgaccatgtcatgaytgaaacccagatctgcctagtctgaaactcatccttttaatgcttgagccaaataatggggctaagcatatatgcttgggacagtgagtgaagatgcatgcccttgtggataaaaacagtaagagtaggctctggagaggagcaggaatgatgagtcttggagggtggggaggattcgggtgggcaaagaagaagggtatcccaggtgataatgagaatgtgcacaaaagcctcaggcacagaacagaagatgctga

SEQ ID NO: 542902 - DNA, 448 bp, Homo sapiens
tgtgccctacgcagtgctaggcatggttccacctgctttcagggaccattacatttaagcttcacactaacctgataaaataggtactgctgttttcccccattatatggatgagggtactgaggcccaaggggacatgaagtgacttgccccaaagtagacacccagctggtaagtgaccatgtcatgattgaaacccagatctgcctagtctgaaactcatccttttaatgcttgagccaaataatggggctaagcatatatgcttgggacagtgagtgaagatgcatgcccwtgtggataaaaacagtaagagtaggctctggagaggagcaggaatgatgagtcttggagggtggggaggattcgggtgggcaaagaagaagggtatcccaggtgataatgagaatgtgcacaaaagcctcaggcacagaacagaagatgctga

SEQ ID NO: 542903 - DNA, 616 bp, Homo sapiens
gaaccaggttcaaattctggatcttctgtttcaccagcaatttccttaaaccctccgggcttcagtgtccccaccccatgaaggtgctgtgaggccagatgtcaaggcgcatgcactgcacttggctgccatcagctccagggagtcccggagatcaggaccagcacacrtactgatggcaggctctgggggcacaggttacatttggagcacagccagcagcacagatcaggcagacatttttggctgatcctgcagttaggagggccaatatgtagtgtgaaagcagcacaggcccaggattccccagaggtatgtttccttctcagccttgttctaaagagctgtgtgcctgccgctatgtgacctcctgctcttgtctctttcttcacctatagaacaagtaggctggacctcaggaggtccactaaatgctatcaccttgacccaaacaaccagccaccctcagccatatctgtacagcctgggcacagtgacagatggtcaaccacaggggctaccagccagactgcatgccaactgttccccgtgctctcgcacccactgtagctgaaaaacggttaagcatagacatgagcaggcccaacggacaaag

SEQ ID NO: 542904 - DNA, 551 bp, Homo sapiens
gctgtggcagtggcagtggcarctggggcagagctggggagaattattaggggagaaagaaacacaatcaaacggccttccttgaaaggtttcctaagggaagagagcctggggtatggagccccatctatgggatgagccattgggaagcacatggggtcagcactctgagaataatggagaattctccccctccgggctctgactttttcggtagcacagacttgggtgaacttcaggtggagtctatagtaaagtgcagcctaggggcttggctcaaaacagatgagctgaaacgtacatacctgatggctcaagcacaggcttggagccccatctctgccattttggtcccataacttctaccaggcacctcctgtgtaccgagccctgtgctaggccctggggatgcaaagaccaataaaacacaaatccctgccaggggaactcagggttcttttgtggcttaaaactggtctgagtctgggggtgagggtggggtggggtaggagacatttttttggaatgaaataagacatcctcttaaacac

SEQ ID NO: 542905 - DNA, 468 bp, Homo sapiens
gtttcaccatgttgcccaggctggtctcgaactcctgacctcaagtgatctgcctgcctcggcctcgcgaagtgctgagattacaagcgtgaaccaccgygcccggccccagcttccgttttttaatgttattatgtatcagtcttttttttccgggcacttaggcgctgggtcattaggaagcctttccccacacgcaggtcctagtcaaccgtgctttttagcggcgagtaggccctgcggctctgcccctaacatgggcgcggggcacgcggccaggggcccgtgggagggggacagggcgcgcgaacccaggttctcaggccgcgtcgccgcgcgtgcgcactgacagccgggccgagccagcccgggtcccgcagggaagaacgccagcggcgcgcggaggccgcgctgccctgggccgcgaggtccctatggctgccccaccggaagccccgcccccttctg

SEQ ID NO: 542906 - DNA, 564 bp, Homo sapiens
atgtctgggggtaggaatggttctttttctttctttttttcttttttttttgagacggagtctcgctctgtcgcccaggttatttttcttaccaagcactgcaggtagatacaaacttccaaaagaaaactgacaaaacactgctactgttaaaaaggttgaactgaaagggcaactttatttttcttgttctcctatttctgttctctaactttttgagctcaggtttaagacttgatcttgaaacttaccattatcttgtatgcttataacagccaattaaaaaggctacctctgccacctctgattcctaatactgaggctctctwaacaggaccctcatgcctaaatacatttctttgcaaatttccccctagaaaacaacgtatttcaatttgattggctatttcatgctatatatatttaactctttcattcaagaaaatgtaaaatttcacatttcctaaggtagatcccagttttcagcctttgggaaccggggagtataaaatacattattactgggcttcatttaggctcacatgaaatctcaacattccagta

SEQ ID NO: 542907 - DNA, 547 bp, Homo sapiens
taattcggcaggaaagggtggaattatgtaatgagaggcgctgcagtcagctcactccctatctggaagaaaatgcacctgggcctgtctcttacactagcccacaaaacaaattccagaagagatttattaaataaaaaaaaaaaaaccataatatgaatctkgtaaaaaaaatgtaaaatatgagaagaccttctcaaccaagacgggaaacgcagaagttatgaaatttggacaatttatttatttatttatttattttggagacagagtcttgctctgtcgcccaggctggagtacagtagcccaatctcggctcactgcaagctccgcctcccaggttcacgccattctcctgcctcagccttccgagtagctgggactacaggtgtctgccacaacgcccagctaattttttgtattttttagtagagacagggtttcaccatgttagccaggatggtctcgatttcctgacctcatgatccgcctgcctcagcctcccaaagtggtgggattacaggcgtgagccactgcgccagccgaa

SEQ ID NO: 542908 - DNA, 604 bp, Homo sapiens
atttgcaccaagtaacatttagcttctcactgaagagggtcccctatggaaggcttggctagatttactgtaggtaccgtactatttgatctgctgtgttcaggcagcaaaagtgaacatgaactctatgcagaataagatagcctgtctgtattgtaattttttttttttttgagatgaagtctcgctcttttcccccaggctggagtgcaatggcatgatctcagttcactcactgcaacctccaccttccaggttcaagtgattctcctgcctcagcctcctgagtagctgggattacaggcgcctgtgaccactcccggctaatttttgttttttagtagagacgggggtttcaccatgttggccaggctggtctcgaactcctgacctcaggtgatccacccgcctccgcctcccaaagtgcttggattacaggcgtgagccactgcgyccggcctgtattgtaatttttacattgagggttctcctcacatcttaaatgtattcatgtaacttgaatggcacgttcttaaggatgtctttgaacttcttattagaagtttgccgttctctgagagaactcgagatgctaactacagtg

SEQ ID NO: 542909 - DNA, 644 bp, Homo sapiens
tggaaggctggttgtcattttgtaggtttcagttgtgattataaaatgattgtgattataatgatgataaaatgctcagcctcctttcatgtgtgttgggagagctacaggtggcttgtgagaccatgtcctgttcacttgattttgttttacccatttagtcagatatttattctttgtgtgacaattttttactttggcagatgctgtgactccctgcagtaataaaagtgtaccaaggagtggaaaatccaaaacactgggtcatcctcaaaccatttgtgtttgtttatacctgcatttttaataggtccaagaagactgcagatcccataagaaagacggataatggccagtctgtttccgaaagagacgagaatcacctttttcattgtattttcgtgtctggtcactactcactgcctccttcaggccaggggcagctttaagctcctttgcatcaggttgacctcacaacaagggcatcttcaaggtgcaacccctcctggtgtgccttgcggcacaaccgagatgccrggcaggagaacagatggggagagagttcagatcgttttcttgccaccactaacccagccgtgaccctagacaagttaatttccctctctgaacctcagggtccccag

SEQ ID NO: 542910 - DNA, 602 bp, Homo sapiens
aaaatgattgtgattataatgatgataaaatgctcagcctcctttcatgtgtgttgggagagctacaggtggcttgtgagaccatgtcctgttcacttgattttgttttacccatttagtcagatatttattctttgtgtgacaattttttactttggcagatgctgtgactccctgcagtaataaaagtgtaccaaggagtggaaaatccaaaacactgggtcatcctcaaaccatttgtgtttgtttatacctgcatttttaataggtccaagaagactgcagatcccataagaaagacggataatggccagtctgtttccgaaagagacgagaatcacctttttcattgtattttcgtgtctggtcactactcactgcctccttcaggccaggggcagctttaagctcctttgcatcaggttgacctcacaacaagggcatcttcaaggtgcaacccctcctggtgtgccttgcggcacaaccgagatgccaggcaggagaacagatggggagagagytcagatcgttttcttgccaccactaacccagccgtgaccctagacaagttaatttccctctctgaacctcagggtccccag

SEQ ID NO: 542911 - DNA, 591 bp, Homo sapiens
ctctgggtgaaagtcccagcaatatggcattgttactgtgttgctgtaatttatgtaaatgcgttgtcagagatgaattaaaacttatagttgtaaatctacaaggacacagcagtaactcacacagatttattacttgtagacacgtatataagcctctggaattactgcctctactgtagacagaggttaaagaagaaggcaacaacttacatgccattatacctatacagcagtttgtcattcattggtagtggtatgaatgcaaaatacaggcatgtggactgtccttcacccaatacagcctaatccacaaatttcaacaagaatgctagcatcaaagaaagagcatcaaatgaggagtcagaaaatttgcttgtatacccatttactaagtttgttgtttaacttctctgagcccaagtttattarggataagacaattttttaaaaaacctgtcaatgtcccccaatgtactctgcatggcttttagtggtaaccatgcatgcattcattgatttaagaaacatttattgagtgctactatatatcagacacaagactgtatttttaggctaaaggaaatagtt

SEQ ID NO: 542912 - DNA, 521 bp, Homo sapiens
tttggaattttcatcaaggaaaattttcrtcaaggaaatacaagaaggctcatgagcttgagctattttcacatggtttaggcatctcactgaaagaagagcttcttttctaatttttcacctttttccatgaagcagatagagagctgtttactacagcctttgtctgggtttggcattgattttaaatcacctggattgatcatgtggttatgggacttaaaaaaatcccaccaaataccaaagcctctaaacacaattagaattgaggggtttttaatctgctagcattatgtccataggagtacattctaaattattcttaacttctgctcatgttaggtgaaaataaagcaccatgataatgtgtagtgtctgaggttcagcagatgctctctaaacacgtagaaatgttcctagttttcaaaatgaggaagcatctaaaatctatgtctgtcttggagtatttcactgccttggcagtttcctcagccaataagagaaaaatatgcaaatcaacc

SEQ ID NO: 542913 - DNA, 521 bp, Homo sapiens
tttggaattttcatcaaggaaaattttcatcaaggaaatacaagaaggctcatgagcttgagctattttcacatggtttaggcatctcactgaaagaagagcttcttttctaatttttcacctttttccatgaagcagatagagagctgtttactacagcctttgtctgggtttggcattgattttaaatcacctggattgatcatgtggttatgggacttaaaaaaatcccaccaaataccaaagcctctaaacacaattagaattgaggggtttttaatctgctagcattatgtccataggagtacattctaaattattcttaacttctgctcatgttaggtgaaaataaagcaccatgataatgtgtagtgtctgaggttcagcagatgctctctaaacaygtagaaatgttcctagttttcaaaatgaggaagcatctaaaatctatgtctgtcttggagtatttcactgccttggcagtttcctcagccaataagagaaaaatatgcaaatcaacc

SEQ ID NO: 542914 - DNA, 498 bp, Homo sapiens
aacgtttgttatatctgggtggtggttctataggagccctacagtattctttgtctgcttttctgtgtgtttgaaatatttcaaaatttaaaagaataatgcatacaggtatttgaggaatgaaggagcttctaatccaatcatggggcctgggggctgccctgatccccctattgcatttggaccatggccctgattaaatccaacagcccaaggtacagggggtgcccggtttgcattcagacttcttgattgcagagatgggcagtggaggaggagagaaggctctgcgacgtggcttccctgggacaatcccccaggggtgaacgacaggctctttgctgggttgcgcttccrggtgcagctaggaagaagggaggttgcttccactcctactttgggatttatgaaaacgatcactcatagacttctctgcaaaactgtaggaacccgactaaaggcgccagctaccaatgcatcttgcagccagttcgggat

SEQ ID NO: 542915 - DNA, 634 bp, Homo sapiens
cctccatcaagtggatatagattctttgctttcctactgataagaaaactaagaagccagtggtgcccatacctgccagacaagctcagaaggacaaaggagtcttaagtatctaaagtacatcatcaggcctgctgtaaacatgtgctaattaaagagtattaaaaatayagtgaaaatatagcttctatttatatacctgcttactcattaataaatcccgttctattctgaggtgatagatcaggctggaaatttttattttgttttgtttcaaaaagagaacgcagccagccaaacctcctcaatattctgagatttcccagagaaggccaggagtctagcactgctcgaattgtaggggtatgaagtaaatatgtgctgcatttgtgaaatccattgtattgcacctgtcaaatgctcagaagagtggcacacaggaagcactcaatagatgtaagctaatatttttaggagacaggagtcctaattgagcatggataaacaagatgacctgtgttctttggaaaacttggatttttgttttatgttttcatctctatgtggactccacaggtagatctgaacatcctatccaaaggagggctcctgtggttctgtttgtattccccag

SEQ ID NO: 542916 - DNA, 510 bp, Homo sapiens
ctaaagtacatcatcaggcctgctgtaaacatgtgctaattaaagagtattaaaaatacagtgaaaatatagcttctatttatatacctgcttactcattaataaatcccgttctattctgaggtgatagatcaggctggaaatttttattttgttttgtttcaaaaagagaacgcagccagccaaacctcctcaatattctgagatttcccagagaaggccaggagtctagcactgctcgaattgtaggggtatgaagtaaatatgtgctgcatttgtgaaatccattgtattgcacctgtcaaatgctcagaagagtggcacacaggaagcactcaatagatgtaagctaatatttttaggagacaggagtcctaattgagcatggataaacaagatgacctgtgttctttggaaaacttggatttttgttttatgttttcatctctatgtggactccacargtagatctgaacatcctatccaaaggagggctcctgtggttctgtt

SEQ ID NO: 542917 - DNA, 577 bp, Homo sapiens
tggcagaaacaagtttttaagggtatgaaatatgtggtttcatttaagcatggtataaatgattgtagaatgtgtagcatctattagggttggggaaggatctgattgatagtcagaattgcatactactgaaagtagatctacatgtactaagaagtatgttccgtacatcactcattctgtattcagtaaacactgctgagattatttgacatcacagtttttttctaagtcatgttcataatcgcctatttttgaacttttcctagttctaactaaattcgtagatttgcttttctttcatcctccacctccagtcattcatcccaaatttctaaaatttagtcytttataccacaaaacattacaaagttattttcacttgagatttcatgagaactactagaacccacagggatcctccctgtttctgatgttcctctgacctctgcctcctgtctgtgtgtactacatccccagactgagtcccagcgtcagctctctgagcttggtgtgatgtgtgcatgtccgtgggttcctttcccaaggcattgtcatggagatagaatggggtctg

SEQ ID NO: 542918 - DNA, 569 bp, Homo sapiens
acctgctacacagtaaggccatcaatcaacagtaactcctgacattaartgttctttctccaacatttctaaaagagacttttgctgtcttgagtattttctcatttatcctgaagtctcttctttggggctttttcttttccaccatgaatgttccaagtctgtgacgcctgacctgttgacccacctttccacacacctgtccagatctgagcccattacagagtggtctgcatagctggagtgttgcagtgctttcttttacttcctcatggagagtttctgtgattgtagtcatagtgccatctttaaaaagcttcccaactctcctgtctgtatctcatgtcatggcaggaagccagtgttttctctgactcttttaaaaggattctgtcttctggaagctaagtgcacatgtccaactctgcccaaaactttccagtcatagaatttaaagtgaaaagagtcacattcccacatgccctgggactttcactctgtcagccctttcctccttgttgggcagaactggttcaagaaaagacaggagtcaggagaaggtgctggga

SEQ ID NO: 542919 - DNA, 629 bp, Homo sapiens
tgtttaatttcatgccaactcatgatggcattttccagaacagaaaaaaataaacagaaaaaaaaagagagaaacaaaaaccaatgcaagatgagtttccatttggaaatcaaatatgtgtccatttatttgcacctgagattctagaggcaaaggaattccaagcttcgctagtggaccttgagttttccctccctactcacaatgactacaggggctctgggtgtcactttgagacctggcttcagccsaggtgtgctatgtctgcacagatgtgctgtctcctcaactgcttccacaccctgctgcaccccatgtgccgctgcccaggagccggcagagccccagcgggccctttgtcactcgctacccaatgtgcattctccagtgggcacagcaggcaaccctgctccgcgggcctctgcccgagccagggattacgggatgggcttgcctgcagtggcagatggtagtgcttagagctaaactgcatttggcgctttgaacatcttgaaaagatttctttagaagttaaacttggcttaggagtgacaatatgtttcagtctgtgtctttgaaaaggcctcagggtggtgcgaggggggttggctgtttcatggttccctgcc

SEQ ID NO: 542920 - DNA, 576 bp, Homo sapiens
tttgtaccctctgcgacagatcctgcctctggtcaaaccctgaaggtctgggaacacagagttcaagatcttttccctcaccaggttacctcccacagtgcagtgctgagggccagctaccatttgtggagcacccatgtgcagggactatgtcatttcttattccccagaacaattcttcaggtagctgttttataaattttacaaattagaactcttggattcaggtaccatccctaggtttcacaactagtaagctgagattcggactccaacgtgcatgttcctttcccagtagcacactgcttctcctgaagccgaagttccccttcagagaattatgtagatctcataattccctaggcaaaactggagctctttgaatccyagcctagccatccacactataccagtttaaggtgcaatcttgtgattattgccgctgatcacgattcttgataagcatccacaactgataagtctgacgcttctgttttacaccaattgccagttgtctcagagtcactgtgaaaggagggaaaagcttatctcttataaagttggttagcttcaaaa

SEQ ID NO: 542921 - DNA, 489 bp, Homo sapiens
accagtggatcctaatctgaatctctgtaaatatgactaatgaggtctgaggtgggaccagccttctgcatttacatttcccagagataactttgatgtgtaccccygatctaatccaacctcttctttttgtaaatagagacagtgaggcttgggaagatgaaatggtatgcccagattcactcagccagtaggcggtagagctaggcctggacccccatcctcatattttaactttccttccctagtaccattcacctcatagggctcttgtgggagttcttcctctgcacaggtgaaaagaattgggtttggagactgtgagatctgattcagatctaggctatgccactttctggctgtgtgaccccagagtttgctattgatgtctctgagcctatttttcttcatccaaaaaaaaaaaatggaggtaataatatgtacctcacagggtagactagaggcacataataggtgcttagtaaatgg

SEQ ID NO: 542922 - DNA, 489 bp, Homo sapiens
accagtggatcctaatctgaatctctgtaaatatgactaatgaggtctgaggtgggaccagccttctgcatttacatttcccagagataactttgatgtgtacccctgatctaatccaacctcttctttttgtaaatagagacagtgaggcttgggaagatgaaatggtatgcccagattcactcagccagtaggcggtagagctaggcctggacccccatcctcatattttaactttccttccctagtaccattcacctcatagggctcttgtgggagttcttcctctgcacaggtgaaaagaattggstttggagactgtgagatctgattcagatctaggctatgccactttctggctgtgtgaccccagagtttgctattgatgtctctgagcctatttttcttcatccaaaaaaaaaaaatggaggtaataatatgtacctcacagggtagactagaggcacataataggtgcttagtaaatgg

SEQ ID NO: 542923 - DNA, 524 bp, Homo sapiens
cagaaaagagactgaactaacatacaccaaaatgttaatagtgattagtatacgtgggggagtatgactcatttttactttgcatgtgtgtgtgcttttccaaagtttttacaatggggatgtattattctataaaaagacgatattgaaaatgtgctacatttgaagagtggcaaattttaacaataaatctaaaacaaataatagatgcaattaaagggggactagcaaaggtatcctcctttcgccctatggagcctcagttccctcatgaatagaggcagtaaacttacagggtcactgagaaaattaaataagttaataatctgtatatcatgcttggttctgggractgacacagagatttcaaatttttttttttttttttgagacagggtctcagtctgtcgcctaggatggagtgcagtggcgtaatcacagctcactgcagccttgaccacccaggttcaagagatcctctgcctcaggctcccaagtagctgggacaacagtccccggcaacc

SEQ ID NO: 542924 - DNA, 524 bp, Homo sapiens
cagaaaagagactgaactaacatacaccaaaatgttaatagtgattagtatacgtgggggagtatgactcatttttactttgcatgtgtgtgtgcttttccaaagtttttacaatggggatgtattattctataaaaagacgatattgaaaatgtgctacatttgaagagtggcaaattttaacaataaatctaaaacaaataatagatgcaattaaagggggactagcaaaggtatcctcctttcgccctatggagcctcagttccctcatgaatagaggcagtaaacttacagggtcactgagaaaattaaataagttaataatctgtatatcatgcttggttctggggactgacacagagatttcaawtttttttttttttttttgagacagggtctcagtctgtcgcctaggatggagtgcagtggcgtaatcacagctcactgcagccttgaccacccaggttcaagagatcctctgcctcaggctcccaagtagctgggacaacagtccccggcaacc

SEQ ID NO: 542925 - DNA, 692 bp, Homo sapiens
gatgctaatggtatgtctcctcttaagtctattttgtctgaaatcaatatagctgctatagctgttttttaaattcaggctagagtgcagtggtgcaatctcagctcactgcaaattccactttctgggctcaagccatccttccacctcagcctaccaagtgcctggaactacaggcacgcaccacactgcccagctaatttttttgttttgttttgtttcgtttagtagagaataggttttyggcatattgcccagactgtctactactcctgaactcaagtgatctgcccacttcagcctactgaagtgctgagattacaggtgtgagccatctcacctgacttgcttttgtatctagtagttcttatatgtttgatatttttctcccattcttttacttttaactatctgtctttgaatttgtatgtctcctttatttttaaatttaattttttctttgacacccaaaagttttatatagttaatatatacaaattgataatgtttggaggtaagtaaacacttgtaaaactatcacaatagattccctaaacctatacatcaaaaagttccccccactcttttattattattatttgtgtgtgtgtgataggaacacaagatataccctcagacaaattttaagtatgcaatacagtgttggtagtattttagtgttagtggtagcc

SEQ ID NO: 542926 - DNA, 653 bp, Homo sapiens
ctcattaatacacaaaataattttattaagattaaaatatacagttttaaaaatatgtaacttgctattactttcattctaaatatgtcaaataaataagaaaaaagttttctcaagatttgtgagaggatgtctgtgatggaatttattattattattatttttaggaaggaaaggtgtgatttgaaaatttcaacaagttaagaaaatctatggcaatttgaagaaaatcaactcaatattttaatttaatgagtgcaaaatagttttgaataagcccaattgacaaagacatattttaccaattagtacatgtattacaggtagaaatgactattcagcgtagtttkgaaggtggcctgaagcaaatgttgagaccacagttgaatagagagcaattgtggtgtatagttggaatgcttacataattgagcttgattataatcatccctctaatcacattttaaacttttcctaatgaatagatgaggatattagaaaaataaagaatgaaaaagcagtctatttaaaaatatttttaaaattatttatagccctcacattaatgctttctagtttaatattgtgactcctttccactcttaattcaggcatctattaatattttacattgagaaattaattcattacaa

SEQ ID NO: 542927 - DNA, 568 bp, Homo sapiens
agtgtgttcatcatggctgcttaaaatttttgtctgacaactaatatctctataatctccatattgccttcttttgattgttttcattaagtttgaaatcatcttggtgcatagaaaaccagacaaaaaacaaaaccagcaactgtttttctcccatactctcactcaacacagaacatttctggtcaccaaaatgtttattggagtatcggagtagggggagattttccacactaaccagttttttttcttttmttttttttttttgacggagcctcgctgtgtcacccaggctggagtgcagtggcgcgatctcggctcactgcaacctctgcctcccgggttcactccattctcctgcctcagcctccctagtagctgggaccacaggcgcccgccaccacgcctggctaattttttttgtatttttagtagagacggggtttcaccgtgttagccaggatggtcttgatctcctgacctcgtgatccgcccgcctcggcttcccaaagtgctgggattacaggcttgagccaccgtgcccggcccacattaaccagtttttaaa

SEQ ID NO: 542928 - DNA, 631 bp, Homo sapiens
ggtttttgcttgtttgttttcaactgtctatgattttctaaatacgcaatgatgtcatcagcaaacaaaaaacaaatacattatttcttctttcccaatctgtacacctttcattttactttcttgtataatcacagcagctatgaattccaatattatgtcgaatgggaatggtgagaggaaatacctttgcttttccccagttagtgtaaaaaagtccagtttctcagcattacctgtgttgttagccataaagcttttatgatattctccatcaagctgacaaattttcctctgttttgctaagagtttttatcatgaataggagttggattttgtaaagtacttcttcagcaacaattgmtataatggttttcctgttttaacttgttcatgttgtagaagacatttattgattttctaaggttgaactagcctaccatagttggaacaactcctgactagtaatggaatataataccattatacagtcatccctggacatcgatgggggattggtttcaggacttccccatacccaaatccgtgcacacccaagtcccacatctgactctttgtatatgtaagtttctcatccattgaatatatatttgtgatttgcatttggttg

SEQ ID NO: 542929 - DNA, 646 bp, Homo sapiens
aattaattagcctgtgatatcagaatgaagtatccaagaggatggatggtacttagtataagacaccacaaccatgagattctcttttaaataaaagtttatacatttggcatagtgtgtttgacaaacttgtgcattcagtcagacttaggagcacgatgtaaataaaatgagtttcaagagatattatgtaatttgtaaggrccactgagaaataacatgtttcagcactatgtttagggctggtaagctatcaagtcattaagtaactgttctcaagcccctatgactggaagtagaaaaactcgaaagcaagtatcagtccatgatagggtattatcaagaaaagataatttggatgtaaagtaaaaatctttttgcaagaaagatttcaaattaaactataaaataaattaaaattgtttaattataaggaataattgagttaattaaaatacatgaaatgcacaaaagatctcaagacagaatgctgtgtgtaagaaaatacttgttcattcttatataattatagagaatgtacatacaaggtctaacaacaatgcaataccatggataatgataacaaaataaagctgttgtttgtattgtttggcacttggtttaagtcaatgtattcacctccaag

SEQ ID NO: 542930 - DNA, 646 bp, Homo sapiens
aattaattagcctgtgatatcagaatgaagtatccaagaggatggatggtacttagtataagacaccacaaccatgagattctcttttaaataaaagtttatacatttggcatagtgtgtttgacaaacttgtgcattcagtcagacttaggagcacgatgtaaataaaatgagtttcaagagatattatgtaatttgtaaggaccactgagaaataacatgtttcagcactatgtttagggctggtaagctatcaagtcattaagtaactgttctcaagcccctatgactggaagtagaaaaactcgaaagcaagtatcagtccatgatagggtattatcaagaaaagataatttggatgtaaagtaaaaatctttttgcaagaaagatttcaaattaaactataaaataaattaaaattgtttaattayaaggaataattgagttaattaaaatacatgaaatgcacaaaagatctcaagacagaatgctgtgtgtaagaaaatacttgttcattcttatataattatagagaatgtacatacaaggtctaacaacaatgcaataccatggataatgataacaaaataaagctgttgtttgtattgtttggcacttggtttaagtcaatgtattcacctccaag

SEQ ID NO: 542931 - DNA, 582 bp, Homo sapiens
ttgagatttggtaaggaaaatgaaaaccaccgtgagtattccaagtggacactgtttgaaggcagataattggagacttattacacactattagaatgcctttgaatgaaaacaaaggacaatattataaataggagctcactattttagacacttactaagttgcttttgtgaaactgtagaattttagttagtgctggggatggggtggtggtggtttgatggaacctcccttaacatcttgcagcatcaaagccggtgtgagtgacttgctatgtgcaagcttggtggtgcttccaaatgagttcagataatgataacttctctgtttcttccgttttctaaatctcatgtgaaaccctctcattggcagaatcttatctggacctatgctataaatcagatactgagaaagattcttcctagattctcctyggccatccaaggagactgtaaataggggtgtcagacaggcttgggtaaccacaaaaagcccagcgcaattcattcctttgtcaattcagcatctgtatatgaacttttaacaaaatttcagctactgaaccattaaaaactgcattt

SEQ ID NO: 542932 - DNA, 570 bp, Homo sapiens
ctgcagtctgtgtatagcccatctgcaggtttatggtgatacagcaacaatctttgytttctgtcttttgagacgtctgaaacaggctaggaggggctcagggtagagagttctcaagccctcctccagctagggtctggttagccagagcccttcttggttaatctcagtgctgccagccaacatcaccacatctcagggttgttgctgggatggggacaggggtggcaaaaaggtcactggctctttagacgttttagctggtgagggggaaagctagcattgtggttagtgggcaggaaagaggaggaggaagttgcatttcaagagtagatcacacctattttgtcctccaacttagcaacatctatacacttttgatgtgcatactctttgaaccatcatcaatctgcttctaaaattttacccaacagacataattgtacagaagtatgcaaagatatacataaaggatattcattgctacattatttgaaatagcaaattatcagcagttgtttaaaaaagagaaatagatgtgtactcgtgtggaaagacaaccaagataca

SEQ ID NO: 542933 - DNA, 612 bp, Homo sapiens
gctgctctgctctgtgctctcgggaaaccttgacatttctatcacagctcttattacaattgtaattaacatttacctgcatgtttatccatgaatgtctgctccctcaagagtgtaaacttctggctctgcctacctcttctgccttggtatcttctgcaccttgcaccttacttacttattgcattcaatcaatattattgaacaaattaaggagtgaatgatctgtttcacttatggttggttagctcagttggttagcttgcagggcagaggctaaggtcatgggctggcccaattttacgcttttctccttttacagctcccgtcactagctttttctcctcaagcctgcactgcacacccaactgggayggagggtgcagatgaataaaggcaaatccatcaccaaaagtaagaaaacccttccacacttcctccctcataatttgttgtagatttgttgccatctgcaaagccagaaagacaactccagcacttcctgatcatcttgagacccacttaaactccctgagactgtaaaaatctctcctatttattcatttactaaaagtcccctggtcccccagcaaatacacatgccttgcagaa

SEQ ID NO: 542934 - DNA, 534 bp, Homo sapiens
tagagcttctccctggttactcctgtatctggatcattacaactttcttctccagtagattctccatatcactgccaaaggctgtcttttcctcattgttttcaactacccacacatttctgggactctacagccattttccattgccctaggcagcaagacttaagctctaagaaattcagccctgacagtctccgaagactctacaaccaaaataccctatgcttcaaagtctcccaagggccctcctacatggtctttattcctttgttttctcccttcctttattttctaaccctacttcccctccccccataagaaaacggagaagatacacagtgctctaccagttatgctgaagtcacactgaccccacgacaccagctcataggctcacccagccctctccaaggtaaacagtgcctgagcccttcctgtcctctttggcagcttcatcaggccacctgagagctttcgctgcccagtgcctgmttccttgttcttctgtcatacacccatctcacccccatccca

SEQ ID NO: 542935 - DNA, 632 bp, Homo sapiens
ctgagtccacagatgtcagcccggtttgtgcaagctgggattttgtgtttatatttgccatttaatttttgtaattgtttgttttctctaacatcctgtgactgcctaaaggggagaaatagatcgcaaggatggcttgtctggtttgaaaacaatagttttccatggatggggtggcaacctggaggacttggtctcctgttcctagtgccagctcctcacctgtgtctccttcatctcagagtggcttccgggctcctttgagactatctgacagctcttccatgagggcagggtcccgatacagggccatcagcataaggccattcttgggaattttcctaccctttgtgctttcttccgggcatgctatgttgtttttttcttaatcttcattctttctcagaaaccaattcactttttttgttwtaaagttgtcatattttaaaagtgactcttcttcttgagacaaataagtcccatgcacagttactcctctgtagctcaatgcagtgctgagttcacactctctctgagttaaggataacaagttagatacaagggaattcagagtgaacaagctagctgtgtgcctgggccattggttgccaagaaagcacttacatacatgc

SEQ ID NO: 542936 - DNA, 599 bp, Homo sapiens
tacagtttctgtttagagttccacagggaacattgagaggggctcagggagcccagaacttgcactcccccactgccatgcctgcttttttttttttttttttttttgctaytttattttactagcaaggagtggaatcaggtctaatgtatttttaacagctttaatgagatataattgacataccatacaattcacccatttaaagtatacaatttggtggtttttagtatgttcacaaggttgtgcatccattaccaaccacagtcaattttagaacattttcatcaccccataaaaaagccctttagcagctattctccattgcccccctccagccccaggcaaccactaatctactttctttctgtatggatttgcctattctgggcatctaatacagatgggacctttactttttgatgtgatcagtggccagtaccacaaggtcagagggatttaggcctctgagggacagaacctgcctagacgaggactgagctatggtcccggctcctggctcagtggtctctctgcgttgctttgagaagagcagaaagaagttcatataagctgtatgtgcatttcctttttaaagg

SEQ ID NO: 542937 - DNA, 599 bp, Homo sapiens
tacagtttctgtttagagttccacagggaacattgagaggggctcagggagcccagaacttgcactcccccactgccatgcctgcttttttttttttttttttttttgctactttattttactagcarggagtggaatcaggtctaatgtatttttaacagctttaatgagatataattgacataccatacaattcacccatttaaagtatacaatttggtggtttttagtatgttcacaaggttgtgcatccattaccaaccacagtcaattttagaacattttcatcaccccataaaaaagccctttagcagctattctccattgcccccctccagccccaggcaaccactaatctactttctttctgtatggatttgcctattctgggcatctaatacagatgggacctttactttttgatgtgatcagtggccagtaccacaaggtcagagggatttaggcctctgagggacagaacctgcctagacgaggactgagctatggtcccggctcctggctcagtggtctctctgcgttgctttgagaagagcagaaagaagttcatataagctgtatgtgcatttcctttttaaagg

SEQ ID NO: 542938 - DNA, 599 bp, Homo sapiens
tacagtttctgtttagagttccacagggaacattgagaggggctcagggagcccagaacttgcactcccccactgccatgcctgcttttttttttttttttttttttgctactttattttactagcaaggagtggaatcaggtctaatgtatttttaacagctttaatgagatataattgacataccatacaattcacccatttaaagtatacaatttggtggtttttagtatgttcacaaggttgtgcatccattaccaaccacagtcaattttagaacattttcatcaccccataaaaaagccctttagcagctattctccattgcccccctccagccccaggcaaccactaatctactttctttctgtatggatttgcctattctgggcatytaatacagatgggacctttactttttgatgtgatcagtggccagtaccacaaggtcagagggatttaggcctctgagggacagaacctgcctagacgaggactgagctatggtcccggctcctggctcagtggtctctctgcgttgctttgagaagagcagaaagaagttcatataagctgtatgtgcatttcctttttaaagg

SEQ ID NO: 542939 - DNA, 639 bp, Homo sapiens
gagggcattagctaagagtggtcagtgaggaaagtggagaggaagaaatagggctctccaaatcatcaagcaggcaacaatggtcattgattattcttcattgctctggtctgtaggagcgccaggcagaacagagctagcggccaaatcaccgataagctggagcatcaggaatcaatgactaattcacataagaaattaaacttcacagaaaacagtgaagagcagcaaaagaaaagcccttggaccctgtaaaatgccacagatgctgtggggccttgtggttgtgaccagtacggcaatgcacaagccaccagtccatttcctgcaccaacacaacagaatgagacatgctacccgctccccagcactctgtgggaacctcccagttacaacctgacacaccttcaagcctgstctgcctgcagccttgatctaaggcatcacaaagaagaaatccaatcaagcagattctatttgaacaccgaatgcacgtctgtattatccactccagtctgggtctccactggaggctgagggtctctgcacagaggagtagggcacagggagggaacacatgctggagtagccaccctctgacttcatctctgctctgggctggacatgaggtttggccca

SEQ ID NO: 542940 - DNA, 237 bp, Homo sapiens
gggggcccagagcagccccagcggaagatrctaggcgtttgggtcatatcaggccacaggaagcggggcagggaaggcttcctgaagcagaggcctgagcctcagaaaagagagaacagggagagcctcggagagacgaaagtcatggggatgggggaacaggaacagcggcttgggggcagagggcacaagcagaaggccacggaagctcagcagactcggcagggcaagctcagg

SEQ ID NO: 542941 - DNA, 627 bp, Homo sapiens
ttacggagctgcttccgccccggagcctctctggagccagcaaagaaagggaggcacagttcttatcccctgcttgcagagggggacacaggctgggcgggttttttttttttttttccccaagtcatttgtcctgccttaaacactcagggcccattgctcctctctgttacagaaattagcaaatgccaagggaatccaaaaataaagtcgttatataattttcagagcggcgggagtagggctggggaccctagggccgctccagtgggacttccctgaacccggttgtagaggatgatggcgcctttggccgaggggcagagttcagcccacatctccgtctcgrgcaatctctgcacgttctgtggggagacaacgagacccaggcattcaagcttgccacttctcctgccagggctgtgcccagaattcctgagcctcagagacctctgcactgtccttagggaggcatgttaaggggctgaacatgtccctggacctttcccttgcactgagggcaaatcttgtgactctggagggaattgtgacccagccaacacctcccctacaagatatgcattgccaggcctctgcaggccccagccctggcctccaagcaagatg

SEQ ID NO: 542942 - DNA, 627 bp, Homo sapiens
ttacggagctgcttccgccccggagcctctctggagccagcaaagaaagggaggcacagttcttatcccctgcttgcagagggggacacaggctgggcgggttttttttttttttttccccaagtcatttgtcctgccttaaacactcagggcccattgctcctctctgttacagaaattagcaaatgccaagggaatccaaaaataaagtcgttatataattttcagagcggcgggagtagggctggggaccctagggccgctccagtgggacttccctgaacccggttgtagaggatgatggcgcctttggccgaggggcagagttcagcccacatctccgtctcgagcaatctcygcacgttctgtggggagacaacgagacccaggcattcaagcttgccacttctcctgccagggctgtgcccagaattcctgagcctcagagacctctgcactgtccttagggaggcatgttaaggggctgaacatgtccctggacctttcccttgcactgagggcaaatcttgtgactctggagggaattgtgacccagccaacacctcccctacaagatatgcattgccaggcctctgcaggccccagccctggcctccaagcaagatg

SEQ ID NO: 542943 - DNA, 479 bp, Homo sapiens
ctgtgcccacgggcaagtgcttctcctgacagctcaataggaggctccagcagcatttggctgccccggatggaattgcacttgagactgcttgaagacacgtgtgacatccaggaggaggtgtcagtcacagtctgctctttgctgtttcaaccagttctgggaataattgaagaactgggtaaaaattacacaaaaactaagttcagaggagagtggttagcacgctgaaggattttacatgattgacacgtgacatttggtcacagagccagcattgtgaagctgagcagggccaactgcgaaaagggtcactccagggtggtcctaaggaaaaggcttgtttctggggctcgaaaagacaacaggagggccacctgcggaaagtacaagcagtcagattttaggcaaacattaaaagcrtgctacttttcattgctgtgcaaggagtatgtggccactctcgtggggttagatca

SEQ ID NO: 542944 - DNA, 529 bp, Homo sapiens
acttaccagccccagaactgccacctagcygagactgacagttcaacagcttcctttaggaaacaggaggacatagaatgatgctggaccgtcaatggggcccacagttagggcactggtgtgggctggagcaacaggcagggctgttagcgtttcaagattggggaggactgccatcagcaggggaagggcaacagagccaaaccaggatgcccacaagtcccaaggtgccaggacaaggccggagttgcatgttgtcctggactaattattaatagtgttccctttcaaaccaatgagggtcctgagggtcctggtttgggcaataaattatatggtcacccaacacattaaaaacaaaccggccaggcgcagtggctcacacctgtaatcccagtgctttggtaggccaagccaggtggattgcttgagcccaagaggtcaaggtcagccggggcaacatggcaaaaccctgtttctacaacaagtacaaaaattaggcaggcatggtggcatgcacctgtaatgc

SEQ ID NO: 542945 - DNA, 598 bp, Homo sapiens
cccaagtccattccctgggccttcaagctccctgctgtccctcccagcctcctcctcttgacagtctattcattctttgagcctagtccacttagcttctgtatggactgaagtgtgtcccgccaaaattcatacagtgaagccctaacccccattgtgactgtatttggaaatggtacctttaaggaggtacttaaggttgaatggagttataagagtagggccctcatcccatatgattgrtgtcctcacaagaagaggaagagacaccagggatgtgcacacagagagaaaaccataggaggacacagcgagaaggccgccatcttcaagccaggaagagagccctcaccagaaaccaatcctgcccacaccttgatcttgggcttccagcctccggagctgtgagaaatacatttccgttgtttaagccacctggtctgtggtactttgctatgacagctctagccaacgaataagccccctagttcatgaagcctggttggtaccccattgggaagggtactacaaggagctccctgttttccattaaaaaggtacactcaaggctggaaattgacttgcaagtggaggtggt

SEQ ID NO: 542946 - DNA, 598 bp, Homo sapiens
cccaagtccattccctgggccttcaagctccctgctgtccctcccagcctcctcctcttgacagtctattcattctttgagcctagtccacttagcttctgtatggactgaagtgtgtcccgccaaaattcatacagtgaagccctaacccccattgtgactgtatttggaaatggtacctttaaggaggtacttaaggttgaatggagttataagagtagggccctcatcccatatgattgatgtcctcacaagaagaggaagagacaccagggatgtgcacacagagagaaraccataggaggacacagcgagaaggccgccatcttcaagccaggaagagagccctcaccagaaaccaatcctgcccacaccttgatcttgggcttccagcctccggagctgtgagaaatacatttccgttgtttaagccacctggtctgtggtactttgctatgacagctctagccaacgaataagccccctagttcatgaagcctggttggtaccccattgggaagggtactacaaggagctccctgttttccattaaaaaggtacactcaaggctggaaattgacttgcaagtggaggtggt

SEQ ID NO: 542947 - DNA, 598 bp, Homo sapiens
cccaagtccattccctgggccttcaagctccctgctgtccctcccagcctcctcctcttgacagtctattcattctttgagcctagtccacttagcttctgtatggactgaagtgtgtcccgccaaaattcatacagtgaagccctaacccccattgtgactgtatttggaaatggtacctttaaggaggtacttaaggttgaatggagttataagagtagggccctcatcccatatgattgatgtcctcacaagaagaggaagagacaccagggatgtgcacacagagagaaaaccataggaggacacagcgagaaggccgccatcttcaagccaggaagagagccctcaccagaaaccaatcctgcccacaccttgatcttgggcttccagcctccggagctgtgagaaatacatttccrttgtttaagccacctggtctgtggtactttgctatgacagctctagccaacgaataagccccctagttcatgaagcctggttggtaccccattgggaagggtactacaaggagctccctgttttccattaaaaaggtacactcaaggctggaaattgacttgcaagtggaggtggt

SEQ ID NO: 542948 - DNA, 651 bp, Homo sapiens
cggcatatgacagctagtatagcatgaaaaggccacgaaaggctggagttctgataggttgtggcttacctattggggaataaaagaaagactatcctttctaaaaagattaaaaatatatatatatatatatgtatatatatttgagagatagtttgaagaaagaacaggcagatttaaaaaagaaccaagctgaaaccttgaaaataagaaagttattagaattgaaacaatgattagataatatataaattctaatgtaactatatgtaaataatatttaaatattattaatcacagtttaaaagagtaaactggaagacagaactgaggaaatctcagttcaaaatagtacatggaaaatattgaaaatctcagctcaaaataayacacagaagatattgaaaatatgaaaaagaagagctgtaaatagaatgaggtcaggtgtaatggaatttgataagagagaattaaaagaataaatgtcaggtaataattttaaatgtaataattaataacattccagaagaaaagagacataaatcctcagatcataatggtccactgaaagctgaaattagataactttaaaacacacagacagatatatacacacacacacacttacatgtgccaaaactcatcgtagta

SEQ ID NO: 542949 - DNA, 458 bp, Homo sapiens
aggtggatggaagagctgtggaaccaaasagagctgtctcaagagaagattctcaaataccaggtgcccacttaactgtgaaaaagatatatgctggtggcattaaagaagacactgaagaaatcacctaagaaattattttgagtagtatggaaaaattgaagtgattgaaaacatgactgaccgaggcagttgcaagaaaaggggatttgcctttgtaacctttgatgaccatgactccgtggataagactgtcattcagaaataccacagtgtgaatggccacaactgtgaagttaggaaagcctgtcaaagcaagagatggctagtgctccatccagccgaagaggtcgaagtggttctggaaacttaggtggtggtcatggaggtggtttcggtgggaatgacaactttgatcatggaggaaacttcagtggttgtggtggctttggtggcag

SEQ ID NO: 542950 - DNA, 584 bp, Homo sapiens
gctgttacgtctcaattcctgtgtgatttaacaaacctgaatttattggcttctgctaggtattttttatttgcttttgttttttttaagtaatatggttccctgaattaagtaaaagaaatatctgagccaccaaggaattgtgtgggttcttgccgtggagcagagggatgtcttgctttgagaaaatctaatatttaatatttactatagtagaaagaatactgaatataaaagctgaatcagaagacttgggctgggggcagtggctcacacttgtaatcccagcaccttgggaggccaaagtgggcggatcacttgaggttgggagttggagaccagcctggccaacatggtgaaacctgatctctactaaaaatacaaaaattagccaggcatggtggcacacacctgtaaccccagctactcatgaggctgaggcaggagaatcgcttgaacccgggaggcaggggttgcagtgggctgggattgcaccactgcactccagtctaggtgacagagcgatactccatctcacacacacacacacacacacamaaaaaaaagaagacctaggtttatta

SEQ ID NO: 542951 - DNA, 638 bp, Homo sapiens
gctgcattgagccctttgacattgcccatgcaaaccttggccttctacacttccatcatttctgccaagaatgcatttttttggccgggcacagtagctcatgcctgtaatcccaacactttgggaggccaaggcaggtggatcacctgaagtcaggggttcaagaccagcctggccaacatggcaaaaccccatctctactaaaaatacaaaaattagctgggcgtggtggtgcatgcctgtaatcccagcttctatgtaggctgaggcaggagaatcacttraatccgggaggtgaggttacagtgagccaagattgtgccactgcactccagcctggcagcctggatgacagagtgagacaccctctcaaaaaaaaaaaaaaataggtttctcacatcgcaaaagtagatatattctgtatagaagatttagcaaataggcataagcaaacgaagaaaatgaaaatctcctatcattccacctcagagagataattgctattaacatggtattatgggctgaatgtttgtgaccccctaaaattcatatgttgaaatcccaaaccgcattgtgactgtatttggggatagggccttcattaaggttaaatgaggtcataagggtggagccctgat

SEQ ID NO: 542952 - DNA, 638 bp, Homo sapiens
gctgcattgagccctttgacattgcccatgcaaaccttggccttctacacttccatcatttctgccaagaatgcatttttttggccgggcacagtagctcatgcctgtaatcccaacactttgggaggccaaggcaggtggatcacctgaagtcaggggttcaagaccagcctggccaacatggcaaaaccccatctctactaaaaatacaaaaattagctgggcgtggtggtgcatgcctgtaatcccagcttctatgtaggctgaggcaggagaatcacttaaatccgggaggtgaggttacagtgagccaagattgtgccactgcactccagcctggcagcctggatgacagagtgagacaccctctcaaaaaaaaaaaaaaataggtttctcacatcgcaaaagtagatawattctgtatagaagatttagcaaataggcataagcaaacgaagaaaatgaaaatctcctatcattccacctcagagagataattgctattaacatggtattatgggctgaatgtttgtgaccccctaaaattcatatgttgaaatcccaaaccgcattgtgactgtatttggggatagggccttcattaaggttaaatgaggtcataagggtggagccctgat

SEQ ID NO: 542953 - DNA, 288 bp, Homo sapiens
catgcccagctaattgttgtatttttagtagagatggggtttttgccatgttgaccaggctgttcctcaactcctggtctcaagtgatctgcctacctcagcctctcaaagtgctgggattacaggcrtcagccactgcctctggcctgtgttcttatatctcatgtccttcagtagcacccatctgtggcatcagcagctcaggtctggcttgactctcttctcttcttgcctcagcagggagggctctgcctcaactccctccagggtacagcagcagctgtaaca

SEQ ID NO: 542954 - DNA, 636 bp, Homo sapiens
tgtgagtcatgtgacagaagtacagacataactccaatgtgagaaatgtccttttttcattatggaaaataatttaaacactagtgctttagtgtgcactctcctgtaaggtctgtctttgtacagagctaagcacttgtttgtatgtgtttgtcaattgtggaagataatgaccagacaaataggtcgattgtcctattctcagaatgaattatcttctatggtaatgaagaactctttggcttagtcagaaggaattaacgaacctcggtaggaatgtatttccatcctcccaccctacagatataagaggttaaaataacagttcgcccaatttaagcccagtagtgtcagttttcctaatctcagtccaggtaggaattaagaaatatctcaagtgttgatgctatccaagcatgttggggtggaagggaattggtgcccagaaaatgggactggagtgaggaatatcttttcttttgagagtacccccagtttatttctactgtgctttattgctactgttctttattgtgaatgttgtaacattttaaaaatgttttgccatagctttytaggacttggtgttaaaggagccagtggtctctctgggtgggtactataatgagttattgt

SEQ ID NO: 542955 - DNA, 238 bp, Homo sapiens
cataggacacatgacattgaggacacaagacattgagcagttkgtctatgaaaagcactatgcaaggggcaatgaagaattcattcaagatgaaaaactggggcccttaacttcccagcctttacatgctaatgggtaggctagacaagaataaatcacccaaacccctgacaaactatatagagagttatcaagtggtaaaatcatgccgtaaaactataatgcaaggagtcattgc

SEQ ID NO: 542956 - DNA, 616 bp, Homo sapiens
gtgaacttattagaaatgcaaatccttgggtcccacccatacctcctgatcagaaactccggggtgggcccagcaatctatttaacaagtcctcgtggtgcttctgatgaatgctcaagtttgaaaatcactgctctgaaaagtgagattatgcttctgcagttagggtgcttccccattccagtccctaatacagtatgagattcaataacggtaactaccctcaagcacttactatttgaataagtagttgcttgagcgacacatttctaaccaaggagatgagagaagatgagagtaaaataacacacactttcttcctttgtctacacatttggtctaaagttacggggaacatctttatcccattacttttgagagtgtgaaaatgtgatgattgctcttttacccctttctgttcttccactgtgggaatattaacrgaaatgtttctcttcttctctgttctgagcctaattcacagcccagaaccataactcaaagacataatttgaagctatctactttctttcaaagtgccattgtcattttatcctggacacaggctagatttttgtgaaagtaataatatggatttataactcagcaatgtttt

SEQ ID NO: 542957 - DNA, 636 bp, Homo sapiens
ctgattcttttggttaaatctgagtgataattttcttcctaaacatcagttattcctcctgttcttagtgtaatgtgtacaattctggccaacggcggaagctattgctgttcaagaccttctctcggaaagtggtggtggttgtccctaatgaggaagattggaagaagaggctggagttgaggaaggaagtagagggagatgatgtgcctgaatctataatgctggagatgaaaggtgggtgtcttagtccattttctgctgctataacagaataccatagacttcataatttgtaagtaatagaggtttatttccctcattctggaggctaggaagtccaagagcatagcattagcatctggtgagstccttcttgctgcatcattccatgtcaggagggcaaaaggcaagagggcacatgtgagagaacttgcttttataacaaagccactttcacaataatggcattaatctattcatgaggatggaatcctcatgaccaaatcacattaaaagtcccaccctctcaatactgctcattggggattaagtattcaacacttgtactttggtgggacataactcaaaccatagcagtgggctaaaattgtacaagttaaagagatcttatcc

SEQ ID NO: 542958 - DNA, 484 bp, Homo sapiens
catctggttcaaaagcttcctttcacagatctgaggccctgagaagggaagtgttgggtccaagtttgaggcagagctaggggtagaaattgcctcagatttaccatcctagaatgatgcttggtaataggtggtagaaacactgtaaatgattgaacttctaaaatgtaagaacagacggggcactgtggcttatgcctataattctagcactttgggaggctgaggtgggaggattgcttgaggccaggatttcaagaccagactggggaacatctcgaatttaaaaaatttaagtaaataaaatttaagaacaaacacaaaatcatgcatgaggsctgggcgcagtggctcaggcctgtaatcccagcactttgggaggcccaggcaggtggattatctgaggtcaggagttcaggaccagcctagccaacatggtgaaaccccgtctctactaaaaaatataaaaattagccaggtgtgg

SEQ ID NO: 542959 - DNA, 621 bp, Homo sapiens
tggctgtgcccacacaggccagcacagagctgggtgttttagacgaagctcaaaattaaagaagttaaaataatttgaggaaagcaagaagcaagaatgtctgaagagaacaagatgagtggactggggaggggaggtgaagagagccagaccctaagtccagggaacatgtgttccagtggtgtaatgagtctttaggagaatatgatcaaggatcacttcgttttccaatttttygtgatgtaatatgatgacttatttgacgttgaacaaattaccaatgatagttttattaaccataaatcatggatagttgaaacatcagtgtctcaaatctgcctgtttttatttcaatgtgttttaatatttcttgaatattatttagcagatttctggatttcaaaaaaaaaaacgaaatctaatagaataagcgtagtggattctgcattaaagtagctattataaattaaaaacctttaagttacagaattgaaacagtgttaatccacatgagataaacactaaaatcggaggtacatctataactagacctttcacattaaaaaacaatgtgttctatgattctttattaaatacattatgtaaatctacctttatttt

SEQ ID NO: 542960 - DNA, 425 bp, Homo sapiens
aaatgtttcttattagcactatcttgctgggattttttcctcagtgtaattcttttctcgtgtttttttaaattggtagatttattctgtttatatttgttagttattttgaccctcatattttgygtttttcttataccacttttttttcacaattccttttttctctttcttgctttctatttgattgataacgatttctgtatttccttttaattctctgatggtttggaaactatggactgtatttctgtttccgtgagacaggttcactgtgtgctggtgacactttcaaaaacaacaagttacacaaaaaagttgattaggaacacacaggcatgaagagacaacagaagcctagggtgagtgttcccccacaactcaggaaactgtctgacaggaatagaatcttatttgcaatgggc

SEQ ID NO: 542961 - DNA, 621 bp, Homo sapiens
tggctgtgcccacacaggccagcacagagctgggtgttttagacgaagctcaaaattaaagaagttaaaataatttgaggaaagcaagaagcaagaatgtctgaagagaacaagatgagtggactggggaggggaggtgaagagagccagaccctaagtccagggaacatgtgttccagtggtgtaatgagtctttaggagaatatgatcaaggatcacttcgttttccaatttttcgtgatgtaatatgatgacttatttgacgttgaacaaattaccaatgatagttttattaaccataaatcatggatagttgaaacatcagtgtctcaaatctgcctgtttttatttcaatgtgttttaatatttcttgaatattatttagcrgatttctggatttcaaaaaaaaaaacgaaatctaatagaataagcgtagtggattctgcattaaagtagctattataaattaaaaacctttaagttacagaattgaaacagtgttaatccacatgagataaacactaaaatcggaggtacatctataactagacctttcacattaaaaaacaatgtgttctatgattctttattaaatacattatgtaaatctacctttatttt

SEQ ID NO: 542962 - DNA, 621 bp, Homo sapiens
tggctgtgcccacacaggccagcacagagctgggtgttttagacgaagctcaaaattaaagaagttaaaataatttgaggaaagcaagaagcaagaatgtctgaagagaacaagatgagtggactggggaggggaggtgaagagagccagaccctaagtccagggaacatgtgttccagtggtgtaatgagtctttaggagaatatgatcaaggatcacttcgttttccaatttttcgtgatgtaatatgatgacttatttgacgttgaacaaattaccaatgatagttttattaaccataaatcatggatagttgaaacatcagtgtctcaaatctgcctgtttttatttcaatgtgttttaatatttcttgaatattatttagcagayttctggatttcaaaaaaaaaaacgaaatctaatagaataagcgtagtggattctgcattaaagtagctattataaattaaaaacctttaagttacagaattgaaacagtgttaatccacatgagataaacactaaaatcggaggtacatctataactagacctttcacattaaaaaacaatgtgttctatgattctttattaaatacattatgtaaatctacctttatttt

SEQ ID NO: 542963 - DNA, 621 bp, Homo sapiens
tggctgtgcccacacaggccagcacagagctgggtgttttagacgaagctcaaaattaaagaagttaaaataatttgaggaaagcaagaagcaagaatgtctgaagagaacaagatgagtggactggggaggggaggtgaagagagccagaccctaagtccagggaacatgtgttccagtggtgtaatgagtctttaggagaatatgatcaaggatcacttcgttttccaatttttcgtgatgtaatatgatgacttatttgacgttgaacaaattaccaatgatagttttattaaccataaatcatggatagttgaaacatcagtgtctcaaatctgcctgtttttatttcaatgtgttttaatatttcttgaatattatttagcagatttctggatttcaaaaaaaaaaacgaaatctaatagaataagcktagtggattctgcattaaagtagctattataaattaaaaacctttaagttacagaattgaaacagtgttaatccacatgagataaacactaaaatcggaggtacatctataactagacctttcacattaaaaaacaatgtgttctatgattctttattaaatacattatgtaaatctacctttatttt

SEQ ID NO: 542964 - DNA, 612 bp, Homo sapiens
ggaataataagaacagaataaaaactctaagtaacaaaataatattttgggggcacctcttaaatggagggagtacagtgttcacrctggtgctctaagctgggtgtgcgagacagagctgctcttgctttcctgttctgtcatatcagtgcatctctaaaggcaacacaccatatataagtatgaagttctggcttcagacaaaactgcattaccctaggattgactcagcaggttggcacacttctgaatatattcgcagtgtatccacagaggaaaataataaacttcactcacaaaaagagacacagactcttggttatacaaataaaggttcaagataaagggatttggggtggatcatagtgtgtgtctgtgagattgcctcaattcaggcccacatctacctatgtggctgaaatatgaaggaagtactataaaacctatggctttatcatcatagaggatcatgcatgtaagccgtccacagcatagaggaagcggcggcacagggaaggaagcagccctcccaagagacgggaacagcagtgctatcttggtgccggcttgcgagagtaggcatggtgctaacaaaattggcaaaggctgttg

SEQ ID NO: 542965 - DNA, 564 bp, Homo sapiens
gctctcgagggatggggctaagaaatcaggtgatttagcaggagggcaattcaggagatgggaggagtgagccagtgcctgaatgggtgctcctgggtgccagggggtggggaggggttcctgtggagtgggcaggctttggcctggtggagcagatgagggtgtcccaacactagggcagcaaggcacgaaggcaagcctgagttaatgtgtgcgggcaggatgtgttctgcccccagccgaggcttttttagggcagaggcagagatggagccagtgaggtggtggcatagtaggtaggtgacagagagcaggagcagagagggggcttggcccttcatctcctctgggcaggacatgcccttcttttccttctctttctttcaaaggagccaggccctcccagcatccatggcttgctttctgcctccccttggctcctgggcaagcccacgcaggtgctcagagtccttcctgcattggctcctgcagacaggagctcctgttcccasatgctcccactggacaggtcctcttagaagtggtcctcttcacctttcccaa

SEQ ID NO: 542966 - DNA, 641 bp, Homo sapiens
attgacctgctgaggagctgctatggtaattgtgttaagatttagaatagctgtaatcaagatgggtcagctattgtttcacaggttaagaacaaatgatgaaatcgataatgaagcccctgtagtctaaggaaattttccagtgttgtcttcaatatttgcctcacaatctccaccttgcctgtcctctgcttttttccttctgtcctcctctgtccctcagacttctttgtctcctgtctctacctccttttgtctgcttgtctttccctctctcagtctctccttctcttttctcagcctacttgcctgtcttctttgggtttttaaatgcttttattgatgagccatagttgtacctatttttggagtacatgtgataattccttacctgtatacagtgttcagtgatcratcaggttaactgggttatccatcacctcaaacatttatctgttcttagtgtcaggaacatttataattattctcttctagctattttgaaataatgataaattattgttaattataatttctctattattaaatactagaagttattgcttccatttaactgtatttttgtatccattatctcctttgatttttattcaaacgagtctttctctgccactgacaca

SEQ ID NO: 542967 - DNA, 388 bp, Homo sapiens
atcaacaaagaaggcttctgtgaccaaatgtgtggagagttttccccaccaacaagcaagcaatcattcctgctgatggcacaattcaattctcmcaccctatcttcagattacatcagatttaatttataaattaaactttatcatagatatgtatgtataggaaaaaacagtttgtgattcagtactattcatggtttcttgcatccactgggggtcttggaatgtatctcccacaattaagggggaactactgcacttattttgttataacacaacacagcctctctagctcttcagttcaaactgttcagtttaggataaaacaccctatcaccagaagccaggaaaacataggaatcagaccagaaacaggaatccttgcaaa

SEQ ID NO: 542968 - DNA, 388 bp, Homo sapiens
atcaacaaagaaggcttctgtgaccaaatgtgtggagagttttccccaccaacaagcaagcaatcattcctgctgatggcacaattcaattctcacaccctatcttcagattacatcagayttaatttataaattaaactttatcatagatatgtatgtataggaaaaaacagtttgtgattcagtactattcatggtttcttgcatccactgggggtcttggaatgtatctcccacaattaagggggaactactgcacttattttgttataacacaacacagcctctctagctcttcagttcaaactgttcagtttaggataaaacaccctatcaccagaagccaggaaaacataggaatcagaccagaaacaggaatccttgcaaa

SEQ ID NO: 542969 - DNA, 388 bp, Homo sapiens
atcaacaaagaaggcttctgtgaccaaatgtgtggagagttttccccaccaacaagcaagcaatcattcctgctgatggcacaattcaattctcacaccctatcttcagattacatcagatttaatttataaattaaactttatcatagatatgtatgtataggaaaaaacagtttgtgattcagtactattcatggtttcttgcatccactgggggtcttggaatgtatctcccacaattaagggggaactactgcacttattttgttataacacaacacagcctctctagctcttcagttcaaactgttcagtttaggataaaacaycctatcaccagaagccaggaaaacataggaatcagaccagaaacaggaatccttgcaaa

SEQ ID NO: 542970 - DNA, 388 bp, Homo sapiens
atcaacaaagaaggcttctgtgaccaaatgtgtggagagttttccccaccaacaagcaagcaatcattcctgctgatggcacaattcaattctcacaccctatcttcagattacatcagatttaatttataaattaaactttatcatagatatgtatgtataggaaaaaacagtttgtgattcagtactattcatggtttcttgcatccactgggggtcttggaatgtatctcccacaattaagggggaactactgcacttattttgttataacacaacacagcctctctagctcttcagttcaaactgttcagtttaggataaaacaccctatcaccagaagccagsaaaacataggaatcagaccagaaacaggaatccttgcaaa

SEQ ID NO: 542971 - DNA, 300 bp, Homo sapiens
ttccacacagtccagctccatctaaaataagtaaaaataataataatgtttaagttaaacaagaaacattatcatgaaaataatgtatcatttacaaaatgtggcctttagtatttttagtgactagacataacttgaagtttgcttaaatagaaaaataatcacataaataaagtaaaatttctacttattttaagtttagrtaacagaggatgtatatgtgtaatgctgtttagagtaatcggacaaaaatacagttaatattgatctattgcatatacatgattttagaaaggtagt

SEQ ID NO: 542972 - DNA, 487 bp, Homo sapiens
cccagctccagttccctgggtgggccctyatcaacatcccatcccggtctctttaggtgttggtgccaaacggttttgcaggaggacattgaaagtctgaagcccagtgcggggctgagttctatttagggccggtcatgaagtgctttgggaaggggagaggtatgcaagcatgtgtaccccactttccaaatatatgccaggccaaaggcagactggaaccccacccaccttctgtgtggccaggcaagcctgcgcaggcagaggctgaggctgagagacacccccaggtgtcagggagaatgccgtcggcccaccggaggctcctgcgggctgtctgtgcttgcagtctacaggtggacctatttccgtcacaccagacaatgctcacaaagagcccagcccagaacctggcatacagcaggtgctcagtaattgcgtgtctcctttctgattggggtcagagggaggtgcacagggcttctgg

SEQ ID NO: 542973 - DNA, 542 bp, Homo sapiens
ctgcagacctctcccttaggtctggacattgccaactgcctgctggtcacagcacccgcatgtttccatttatcttgtccaaagctgggctcaccgtcatcttcctggaatctctcatcctccctcttagtgaataagtccaccctccacctcgtcacccagggacagtcccagaaggcccctagcgtccagctctgtctggcccaaagcatggtggcgacaagccatgccacatccagctccctggtttgtctgggtgctattccttcagtagctcgacctccaccctgtcccccaccgtctcttacccggaccacccaggagacatttctcctggtctcctttcctccaattatacccctctatagtctcctctccccaaagaagccaacaygctcctcctaaaaacacagatttcaccacatcactccttccaaacatgcgagatgtggggtcctcaagagaaaggccaaactgcctagtttgtcaggaaatgcatgtcaccacctggacaagcccttcactctaactcaccccacctg

SEQ ID NO: 542974 - DNA, 533 bp, Homo sapiens
aggaagcatgaaggaagcagaacgctatgactccatgtgtccagcaggtggctacactgagcggtctgtatcggtccatccccattgcagccgggcagccccatccarcttgccttgtaaggctcggggtgtggcttcctgtccttctgcaaagcccacctaagtcacaaagcccctctttcccctttaccctacttttcattcgcttttctccgaatgactccctagcctgaattacaaaatcacgaagacatttcacaaacccccatgccctcaccccgcacaaccccgagagacaagaaagagacgccagagcagtgggctccggggtagtgggattcctggatcgcttcctcctgggctggtgcctgcttgatgcagggctcctcagaaaccccctggtatctgcccacctgggttgggagtccctgagtacagaggtatagggaccactgtggttttttgtggtgtggaagtgaggtcatagaaatcagggaattcctatatgtctgtcattcagagaagttaatgca

SEQ ID NO: 542975 - DNA, 533 bp, Homo sapiens
aggaagcatgaaggaagcagaacgctatgactccatgtgtccagcaggtggctacactgagcggtctgtatcggtccatccccattgcagccgggcagccccatccagcttgccttgtaaggctcggggtgtggcttcctgtccttctgcaaagcccacctaagtcacaaagcccctctttcccctttaccctacttttcattcgcttttctccgaatgactccctagcctgaattacaaaatcacgaagacatttcacaaacccccatgccctcaccccgcacaaccccgagagacaagaaagagacgccagagcagtgggctccggggtagtgggattcctggatcgcttcctcctgggctggtgcctgcttgatgcagggctcctcagaaaccccctggtatctgcccacctgggttgggagtccctgagtacagaggtatagggaccactgtggttttttgtggtgtggaagtgaggtcatagaaatcagggaattyctatatgtctgtcattcagagaagttaatgca

SEQ ID NO: 542976 - DNA, 599 bp, Homo sapiens
ctgtgtgtttatccaaaaataaaatagtgatagtttgtgcaggaatttctgcagactgagagatgagatggtcatctcattccaacatatacatactaatggcctaaattgttacatatgtaaacattaataagctcatttagcaaccactgaactctgcatttttccaacacatttgctttcatccatgccctgaagataaacaactgaggaaaaaatccatcatttaagtgcaattaagcttaacaattactcaaacttgtcatccataaatcataaccaataaaacatttccaacaaattgctcattggtggaatcaccagctatgcatttattatagcaaaagaaccaccacttcatgtattaatgcataacatctctttgtttcaaaaaaggctatgtttgtttctttctaatcacattgcctgtagactgaatacagtatgtggataccattactgcataattgaaaaaaagaagaacaaattgctctaaacctagtattctagtcttatgacatgatatcccctctcagtaattttttcttttatcaccgagggaacmgaatcatttgtaatgtggctttttgttaatccag

SEQ ID NO: 542977 - DNA, 590 bp, Homo sapiens
taacaaccctcacaaagcctgacatagtggtagaagactgtaacaaaaaagccgaagactatatttttaagtgtacrtgaaactgtttccacaacagactgtatcctgggccagaaagaaaatctcaacatatgtcataggactgaaactattaagagtgtgttttctttgtgcatttatgcaagaaagcaacagaaaaataatacttgaaaaggttcaaatatttataaattaagcaataatcttcaaaataaccaaatgagtcaaagatactaaattatgtacctataggatgcagttaaatctgtgcttagtgagaaatgtataggcttaaatgcttctaatcgacaaaaggaaacattcttaaattggtaacctatgtgttcatttcatgaagctagaaaaaaatccagcaaattaaatgtaaacaaaccaataaagaataatttagagcagaagtcagtgaaacagacaacaaatggacaatgaggaaaaatgaataaagccaaaagttatttttttggaaaagactaacttggtagatatgaaaatgtttagtgtgaattcccttcaaaggtctttcttttcag

SEQ ID NO: 542978 - DNA, 559 bp, Homo sapiens
attatgttaagattaagtcataatcaattagggtgattcctaatgcaatgattgttgccctcataaaaagagaaaacagataaagacacagactcacaggtaggatgctgtgtaaagacagaggaagagatggaaattacatgcaagcaagcttagaaatggcaaggattgccagccactaccagaagctaggaagaggcaaagaaagattttaccagactctcacaggaaacatagtcttcctgacaccttgatatcagacttctggcctccaaactgtgagagtataaatttctattgttttaagtcacccayttgacagtattttgttatggtggccctaggaacctaatataaatatgaagatgcagttaggaaaattcacattatcaaacctgttttccacataacaatgtgtttgattaataacgactacctttactgcaaagaaaataaggtgacatatttgagtggatcaaatcttgagagtgatttctttgatctcattttttttttcctaccacataaacagttggtttctatagagaatatggaaaag

SEQ ID NO: 542979 - DNA, 626 bp, Homo sapiens
tgacccccacacctgtaaatttgactttatttaaaaataggatctttagagatgtaattatgttaagattaagtcataatcaattagggtgattcctaatgcaatgattgttgccctcataaaaagagaaaacagataaagacacagactcacaggtaggatgctgtgtaaagacagaggaagagatggaaattacatgcaagcaagcttagaaatggcaaggattgccagccactaccagaagctaggaagaggcaaagaaagattttaccagactctcacaggaaacatagtcttcctgacaccttgatatcagacttctggcctccaaactgtgagagtataaatttctattgttttaagtcacccacttgacagtattttgttatggtggccctaggaacctaatataaatatgaagatgcagttaggaaaattcacattatcaaacctgttttccacataacaatgtgtttgattaataacgactacctttactgcaaagaaaataaggtgacatatttgagtggatcaaatcttgagagtsatttctttgatctcattttttttttcctaccacataaacagttggtttctatagagaatatggaaaagcaaactgcaaa

SEQ ID NO: 542980 - DNA, 646 bp, Homo sapiens
tatatgggaccaatttaaaatactggtatttcaaattatgcttatctacattacattaaatgtaaattcatttagcacccaaatttaaaaggaaacttattccaccctgggtgacagagtgaacactgtctcaaaaaaaataaataaataacattatattttctatgagatgaatttaaacatgaatacaatttcagtttaaagtataaataaggaaagagatacactaagcacatattaagaataaaaatgttgacatacatatgtagcacttatcacttctcttytaggggaagaaaacagattaccaatatcaggcatgaagaaggatatattactgcagttcctattgtcttagaataaagaatggcttaagtaattttatgtcaatgaatttgaccactaaaattatataaacaaattatttttaaaaccaacttaaaaagatataatagttggcctaggcttatgtatacaaacacacacacacagacacacacacacacacacacacacacactcacaaatattaaattatcaaaaaccttccccaaaagaaaacgcgaagatcagttggttttactagtgaatgctaatatttaaaaaacataccaactagacataataatctttcatgtatattctt

SEQ ID NO: 542981 - DNA, 646 bp, Homo sapiens
tatatgggaccaatttaaaatactggtatttcaaattatgcttatctacattacattaaatgtaaattcatttagcacccaaatttaaaaggaaacttattccaccctgggtgacagagtgaacactgtctcaaaaaaaataaataaataacattatattttctatgagatgaatttaaacatgaatacaatttcagtttaaagtataaataaggaaagagatacactaagcacatattaagaataaaaatgttgacatacatatgtagcacttatcacttctcttttaggggaagaaaacagattaccaatatcaggcatgaagaaggatatattactgcagttcctattgtcttagaataaagaatggcttaagtaattttatgtcaatgaatttgaccactaaaattatrtaaacaaattatttttaaaaccaacttaaaaagatataatagttggcctaggcttatgtatacaaacacacacacacagacacacacacacacacacacacacacactcacaaatattaaattatcaaaaaccttccccaaaagaaaacgcgaagatcagttggttttactagtgaatgctaatatttaaaaaacataccaactagacataataatctttcatgtatattctt

SEQ ID NO: 542982 - DNA, 477 bp, Homo sapiens
gctgctcagcaaaacacaggtttagaagggaaagagaaaattaagtattatttttgaatcagagtgccttagaaaataaacaaaatatctgacatatttgaaataattatgcagttaggcaatgacacagattctatgcataagaccctgtcctttgtaagacatttttcttattttgtagragaaatataaacatggtgaaaaggcaatttaatgctattaatataagacttaatgcagttgaaatttaataatgaattgtatcttttttagaacatgaaaggttgcttcttcttaaatcaaatatcactaatgtttgcacaatcttggataataatataactgaaaatacttttgctttcattctagtccccaaatatatgctaagagtaacaaaatgtagtgagcatataaattgtgtggtccacttcattacttcatgtcttagtggctattataaaccagaaactaaatgga

SEQ ID NO: 542983 - DNA, 643 bp, Homo sapiens
tgctcagcaaaacacaggtttagaagggaaagagaaaattaagtattatttttgaatcagagtgccttagaaaataaacaaaatatctgacatatttgaaataattatgcagttaggcaatgacacagattctatgcataagaccctgtcctttgtaagacatttttcttattttgtaggagaaatataaacatggtgaaaaggcaatttaatgctattaatataagacttaatgcagttgaaatttaataatgaattgtatcttttttagaacatgaaaggttgcttcttcttaaatcaaatatcactaatgtttgcacaatcttggataataatataactgaaaatacttttgctttcattctagtccccaaatatatgctaagagtaacaaaatgtagtgagcatataaattgtgtggtccacttcattacttcatgtcttagtggctattataaaccagaaactaaatggagtagacctacagacrtatatatgttggagaaatgatagatttttttttttggttgtatctaacactgaagtaaaaatatttcataatatattaggcacctaaaagcattttgtaaggcaaaccattttgcatctgaagaaacttagacccataaagactaaacaaccc

SEQ ID NO: 542984 - DNA, 602 bp, Homo sapiens
atgaggaaaagcatgataaatgcagagctttccaccaagtatgtggttgatgttgaataaataaacaatgaatatatgaatgaaaatcttctgacatcctgatgacagaatacatttaccttttcaatgtcagaaaaaaatgtgaaaagtagattgagaaaaactttgagaaatacaagtgtagggaacagagtgttatgaaatctcatatatccatcacacagctttgagaattaccaacccacagccaatcctgtttcatgtatgtccttactggcttctgatttcttccaataatattcctggagtaaatattgctgttttctgaatatgacttattaacaattcaaccttcgtgcaaaaattaagaactatgtaataattattaagtcactccaataaatttacttaatgctttgagctttgcattttataaactactcttttgtcatagtttaaccctctctaatttagctcttgtttcaacatctcagtggttctttgtaaatatgcaatttctctctctctmtatatatatatacatatatatacaaatatttatttgcccaactagcaaattcgcattatcaaatatatattct

SEQ ID NO: 542985 - DNA, 327 bp, Homo sapiens
agctgagtatttttgggaagttaatgatttgctcagcacataccaggcctgcagccccctttccaggagtgactccttacacactggttatacgtgtctgttgaccactgtaacatcatcctggccacataatttaaccagtacccctgacccaaaggtgacygttataggcttgccagaaagctttatgcaggaggaacaattctgtattggagagcatctaaactgaattaatcagattctctgtgttagagcacatcacacacacacacacacacacacacacacacacatcagggtaggtagaaatagaaaggttgaaaaacc

SEQ ID NO: 542986 - DNA, 436 bp, Homo sapiens
gttcagagttatattttaaactaatggtctattgactcctagtaccagttaataggctgggctatctctacttttgctggagaataaaatagtatgaagttaactataatattttcttcttacagcaacaacaaaattctgtaagaaagatcattcccacccaatatgstgctctttaaatggtccacagcttaaaatgtatatgaggtcatatacgcttatatttgcctaaagaaattctggagaatagacccaaaactaataaataaaagtaattaattacctgtgagggctggagagatgaaaattctagagataaaggattttaaaaagtattccctggaagacattttctatttttaaattcatgagctatgtgaatatgttaacgattgagaaagaaaaatccccagctatctaggcagacttcccaaag

SEQ ID NO: 542987 - DNA, 509 bp, Homo sapiens
catgatgaagagtgcatggtccgtgacaggcaaaccaaaactaaaaacaaatgagctacrggaactgagtgcttaatggcatcagatctttttactaaatatgtttatttccacaacagagaagttgcttcccagtggcacacccagatgcttcatggaagggcacacctctggggtggtgctgggttcagactggcatggtatccacacttctcctgatgctagctttctctaggccctctgttagctcgtcccgcttctgatggacacatttttttttccctttgctatgtcaacaccatcactatgatctcatccatcaggtatattactaagcaagaaaagaggctctgtcttctaaacaattcaaataagacctggtacctcttccacacaacagttccttaggtgtttctgcaaactctaagagtgccttcagatgacaccctttccccatcacccccctaggaggcagaaacaccaaacagaagctaccaaagtggccagac

SEQ ID NO: 542988 - DNA, 591 bp, Homo sapiens
gtcctgtcttcattacaacacttcattacaacaaccataagtaaatggaagtgttggacttttcctgtaagaatagttgaatttaacttctcaatcttgctctctttctttctttctctctttctttcttttttttgagatacagtcttgctctgtcgcctaggctgggatgcagtggcgttatctcagctcactgcaacctctgcctcctggattaaagtgattctcctgcctcagccttctgagtagctgggactacaggcatgtgccaccacacctggctaatttttgtgtttttagtagagacggggcttttccatgttggccaggctgatcttgaactcctgaggtcaggcgatctgcccacattggcctcccaaagcgttgggattacaggtgtgagccaccgtgctcggccaaacttctcaatgtttcatttcccaccccagctcatcctacctttctgagctggtaaccaaattcaaggcatgaagkttttttaaccaaaaagagcaaaacctttgtaatttaaatataatcagcctcccatttgggagatactctgcaaacatcttcatgacactctgggac

SEQ ID NO: 542989 - DNA, 590 bp, Homo sapiens
gtttgtgtgcactatataaaaaaatatatataattttattttatcttattttttttgaaagagggtctcactctgttgcccaggctggagtgccgtggcgtgatcttagcttactgcagcctccacctcctgagctcaagtgatccacctgccttggcctcccaaagtgctcgaattataggtgtgacccaccatgaccagtctatatatatattttaaataaagtttatttttgagtatttttaggttcacagaacaattgagtagaaggtacagagwtttcccatatattccctgcccccatgtactcacagccttctctactatctacatcctgccccagagtagtacatttgttgtaactgatgaatctacattgactcatcattatcatccaaagtccataatttacattagcattcagtcttagtgtcatacattcaatgggttttggcaaatgcatcatgacatgtatccattagtataggatcatatagaatagtgtaactactctaaaaatcttctgttgtattttatttattaaaaaagagagatatgaattatatatggcaaaatgttaaagtctgaca

SEQ ID NO: 542990 - DNA, 616 bp, Homo sapiens
atccttccccgggcttgactaggctgcagtgacccccaggtctctggctgagttcctatcactacagagagctcttccaagactcagccattgcttccaagtgttgggctctagaatttttgactaaattttaaaatagttgtacaaatgtcatatcatattttttccccagaaggagctgccaactgtatattctctagccttgggaaatcttacgtttgatgctttaaatttttgagaatgctgagttctgaacagtgcatgatgartttgccttatatgagtgtttttgagattgagcagagtctgcttagcccacatatgcaaatacatgctggtgtgaagtggtaatttataagaccgtttttttgttccactgggccaatatggctttgtcaaattattccaactgtgaagtctcatgggtcatggtaagaaataatttctctactgaccacagttgagaaatcctaaagaaatgaggaagatgggcaggaataatcagagttatctcaatagcctcctcctctgcattaaatttagcaaagatcattgctttagacaacccaaccctctttatttgattctttttacacggattgatttccaagatcat

SEQ ID NO: 542991 - DNA, 616 bp, Homo sapiens
atccttccccgggcttgactaggctgcagtgacccccaggtctctggctgagttcctatcactacagagagctcttccaagactcagccattgcttccaagtgttgggctctagaatttttgactaaattttaaaatagttgtacaaatgtcatatcatattttttccccagaaggagctgccaactgtatattctctagccttgggaaatcttacgtttgatgctttaaatttttgagaatgctgagttctgaacagtgcatgatgaatttgccttatatgagtgtttttgagattgagcagagtctgcttagcccacatatgcaaatacatgctggtgtgaagtggtaatttataagaccgtttttttkttccactgggccaatatggctttgtcaaattattccaactgtgaagtctcatgggtcatggtaagaaataatttctctactgaccacagttgagaaatcctaaagaaatgaggaagatgggcaggaataatcagagttatctcaatagcctcctcctctgcattaaatttagcaaagatcattgctttagacaacccaaccctctttatttgattctttttacacggattgatttccaagatcat

SEQ ID NO: 542992 - DNA, 616 bp, Homo sapiens
atccttccccgggcttgactaggctgcagtgacccccaggtctctggctgagttcctatcactacagagagctcttccaagactcagccattgcttccaagtgttgggctctagaatttttgactaaattttaaaatagttgtacaaatgtcatatcatattttttccccagaaggagctgccaactgtatattctctagccttgggaaatcttacgtttgatgctttaaatttttgagaatgctgagttctgaacagtgcatgatgaatttgccttatatgagtgtttttgagattgagcagagtctgcttagcccacatatgcaaatacatgctggtgtgaagtggtaatttataagaccgtttttttgttccactgggccaatatggctttgtcaaattattccaacwgtgaagtctcatgggtcatggtaagaaataatttctctactgaccacagttgagaaatcctaaagaaatgaggaagatgggcaggaataatcagagttatctcaatagcctcctcctctgcattaaatttagcaaagatcattgctttagacaacccaaccctctttatttgattctttttacacggattgatttccaagatcat

SEQ ID NO: 542993 - DNA, 578 bp, Homo sapiens
ttacctaaaggttaggcatattccctaaagggatggaccactccttgaaattgtgaaaaagcagaacattggttcagggcatctaacaaagaaagraaatgaagagggaggcaagaaaggaagaccccctgcaaagattgataaagaaactgacctgggagaatacatgattaaagtaatagtaataaactgtgtatttgtgtatatacgttatatatacattaactaatttaaaataagacctcatagagaagaacataaacagcagcaacagaaacagataaatggagatcatcacacttaaaaatacaaagtgaggatccaaacaacaccattcaacacactgaagtacaaattggaaggaatagaaaagacactactggaagctaagttaaaagaaaatcttaagatcataacaatacatgcagctgaaaagaaaataaattaaagcaaatacaacaaagcccacagaatcagaatgtagaaatgatccaacatgaggataattggtgtcctaaatgcaaagtgccccaaaatatggaacagaagaattcagaagatgtaataaaggggattac

SEQ ID NO: 542994 - DNA, 578 bp, Homo sapiens
ttacctaaaggttaggcatattccctaaagggatggaccactccttgaaattgtgaaaaagcagaacattggttcagggcatctaacaaagaaaggaaatgaagagggaggcaagaaaggaagaccccctgcaaagattgataaagaaactgacctgggagaatacatgattaaagkaatagtaataaactgtgtatttgtgtatatacgttatatatacattaactaatttaaaataagacctcatagagaagaacataaacagcagcaacagaaacagataaatggagatcatcacacttaaaaatacaaagtgaggatccaaacaacaccattcaacacactgaagtacaaattggaaggaatagaaaagacactactggaagctaagttaaaagaaaatcttaagatcataacaatacatgcagctgaaaagaaaataaattaaagcaaatacaacaaagcccacagaatcagaatgtagaaatgatccaacatgaggataattggtgtcctaaatgcaaagtgccccaaaatatggaacagaagaattcagaagatgtaataaaggggattac

SEQ ID NO: 542995 - DNA, 578 bp, Homo sapiens
ttacctaaaggttaggcatattccctaaagggatggaccactccttgaaattgtgaaaaagcagaacattggttcagggcatctaacaaagaaaggaaatgaagagggaggcaagaaaggaagaccccctgcaaagattgataaagaaactgacctgggagaatacatgattaaagtaatagtaataaactgtgtatttgtgtatatacgttatatatacattaactaatttaaaataagacctcatagagaagaayataaacagcagcaacagaaacagataaatggagatcatcacacttaaaaatacaaagtgaggatccaaacaacaccattcaacacactgaagtacaaattggaaggaatagaaaagacactactggaagctaagttaaaagaaaatcttaagatcataacaatacatgcagctgaaaagaaaataaattaaagcaaatacaacaaagcccacagaatcagaatgtagaaatgatccaacatgaggataattggtgtcctaaatgcaaagtgccccaaaatatggaacagaagaattcagaagatgtaataaaggggattac

SEQ ID NO: 542996 - DNA, 607 bp, Homo sapiens
ttcttattaggcaagtaattctgagcactttaaggttatctcccaagagccagtcaaatatcagatttttttttcatgtgaaggtttgaacaaccaaggcctgctgagttaatcttttaccgcatggcactatttggagagttcccattctggacctaattcatattattctctcagatgtctttctaggaggatgttaattttgcccatttttatagatgagaaaaagktctcagaaagattaactacactctgcaatgtaaagcagctagtattagtagagcctagaatcaaactcaagctgtaacactttgttcttgaaggcatgaactgtaaaatatacctctaaaaactatgacttaagatattgcaatagccacagaatatttcagtgtcattgaaaacataagatagatattgaatcccttggtcttatttttctggcatgtttcagcaaattctgcctgaatttgtgcctgaatggacattaacctcatgagagacctacaatagttcctttgcattcagagtctgagttctttccagactagggatgctgcatagaatggcctgggctctaaatatatccctcccactggctgctgtt

SEQ ID NO: 542997 - DNA, 492 bp, Homo sapiens
gaccccaagtgacaattttccagagacataatttatgtattaaagctggctagtgggggatgtttcttgaaggtagggtaggtggttaacaggttttctttatatttaatcacctaacaaatcttataccagagcacactccccttataaagggagggctgatcgcggtctaggtgggtgggctaggcctgggggcgggtaaagmaggaaaattctcagggtcttgcacgctcccccaactcctgcgtttaccaggatcaccacgtttagagtggagccctttatcttccgcagcaaggggtcaaacggctggccttatgcgtatttttgtctttcctgggtgcgcccggagctaagaagggaaaccgtggcggttagagaccagaagtaggctctgtcactatggaaaccgaggacgctggggctcgtgccctcctattggggctgagttgctgagtctgcgcagttttcatctcatgtcggtcacgcccc

SEQ ID NO: 542998 - DNA, 492 bp, Homo sapiens
gaccccaagtgacaattttccagagacataatttatgtattaaagctggctagtgggggatgtttcttgaaggtagggtaggtggttaacaggttttctttatatttaatcacctaacaaatcttataccagagcacactccccttataaagggagggctgatcgcggtctaggtgggtgggctaggcctgggggcgggtaaagamggaaaattctcagggtcttgcacgctcccccaactcctgcgtttaccaggatcaccacgtttagagtggagccctttatcttccgcagcaaggggtcaaacggctggccttatgcgtatttttgtctttcctgggtgcgcccggagctaagaagggaaaccgtggcggttagagaccagaagtaggctctgtcactatggaaaccgaggacgctggggctcgtgccctcctattggggctgagttgctgagtctgcgcagttttcatctcatgtcggtcacgcccc

SEQ ID NO: 542999 - DNA, 492 bp, Homo sapiens
gaccccaagtgacaattttccagagacataatttatgtattaaagctggctagtgggggatgtttcttgaaggtagggtaggtggttaacaggttttctttatatttaatcacctaacaaatcttataccagagcacactccccttataaagggagggctgatcgcggtctaggtgggtgggctaggcctgggggcgggtaaagaaggaaaawtctcagggtcttgcacgctcccccaactcctgcgtttaccaggatcaccacgtttagagtggagccctttatcttccgcagcaaggggtcaaacggctggccttatgcgtatttttgtctttcctgggtgcgcccggagctaagaagggaaaccgtggcggttagagaccagaagtaggctctgtcactatggaaaccgaggacgctggggctcgtgccctcctattggggctgagttgctgagtctgcgcagttttcatctcatgtcggtcacgcccc

SEQ ID NO: 543000 - DNA, 485 bp, Homo sapiens
cgtctaaggccaatatataaaactcaattatatttctacgtactattaagaaacagtggcaaaagaaatttttaaaataacatcaaaatataaaatgcttaaggataaatgttataaaatatgttcaagacctataaactaaaaactacagaacattgctaataaaaattgaaaataacataagatttacttatctatttaagatacattatgcttatggtttggaaaacttaacattgttacggtgtcttgtctccccaaattgctcaaaatttaagaaacccaaatccaagtcccagcaggcttttgatgggggtagaaattagtaaatggattctaatggttatacgtgaatgcaaaagcagtacaatagtgaagacaacaacattagaagactcttgaaatctsattttgaggtttattacagagtcatgcaaatttaaaagggcatagtggtgcaagaatagaaatgcagattaagagaa

SEQ ID NO: 543001 - DNA, 615 bp, Homo sapiens
gtttgggcagttccttcagacccccgataaacttgtttgtggaggtctgggggagtttcttcagacccccaataaaaacttgtttaatcttgaacaggtcctgttaagaattccttctttattttctcatgcttcaaggaccaggaaaggcctgggcaaaactyttggtgggcttttgttacataccagcctttctataaagacactggctctttcagcttttaatatttaacttaactagtgctgaaacagtggttacggaggcctgtctgttcagctgttagtgagacctggcctgccacttaagagcaaatataaatttaaaataagaaaaacaaaagtttaattctccctgttgaaaaggagggaaaagcacccaaggctggagtggtggcaccgccaggttctgtccatcccttggctccactgcgctattattatgcacttggaccttcaggctgccagcccctgtcctcaggtctttctcccaggcagcagaaacgagcaagaggcatgtgtaataggcttaactgccaacagaaccagcactttgagagcgttgtgctggaagccacacccagtggcttccatctgcttctcactggtcactcccat

SEQ ID NO: 543002 - DNA, 615 bp, Homo sapiens
gtttgggcagttccttcagacccccgataaacttgtttgtggaggtctgggggagtttcttcagacccccaataaaaacttgtttaatcttgaacaggtcctgttaagaattccttctttattttctcatgcttcaaggaccaggaaaggcctgggcaaaactcttggtgggcttttgttacataccagcctttctataaagacactggctcyttcagcttttaatatttaacttaactagtgctgaaacagtggttacggaggcctgtctgttcagctgttagtgagacctggcctgccacttaagagcaaatataaatttaaaataagaaaaacaaaagtttaattctccctgttgaaaaggagggaaaagcacccaaggctggagtggtggcaccgccaggttctgtccatcccttggctccactgcgctattattatgcacttggaccttcaggctgccagcccctgtcctcaggtctttctcccaggcagcagaaacgagcaagaggcatgtgtaataggcttaactgccaacagaaccagcactttgagagcgttgtgctggaagccacacccagtggcttccatctgcttctcactggtcactcccat

SEQ ID NO: 543003 - DNA, 615 bp, Homo sapiens
gtttgggcagttccttcagacccccgataaacttgtttgtggaggtctgggggagtttcttcagacccccaataaaaacttgtttaatcttgaacaggtcctgttaagaattccttctttattttctcatgcttcaaggaccaggaaaggcctgggcaaaactcttggtgggcttttgttacataccagcctttctataaagacactggctctttcagcttttaatatttaacttaactagtgctgaaacagtggttacggaggcckgtctgttcagctgttagtgagacctggcctgccacttaagagcaaatataaatttaaaataagaaaaacaaaagtttaattctccctgttgaaaaggagggaaaagcacccaaggctggagtggtggcaccgccaggttctgtccatcccttggctccactgcgctattattatgcacttggaccttcaggctgccagcccctgtcctcaggtctttctcccaggcagcagaaacgagcaagaggcatgtgtaataggcttaactgccaacagaaccagcactttgagagcgttgtgctggaagccacacccagtggcttccatctgcttctcactggtcactcccat

SEQ ID NO: 543004 - DNA, 439 bp, Homo sapiens
gtggcccatgctgctgctctgcttatggagtagccattcttttgtttctttacttgtctaataaatttgccttcactttactctatggactccccctgaatcctgtcctgtgccagatccaagcaccctcttttggagtctggatcaggacccctttccagcaacacgaggacttccctgtgacactggtagaacttcttcttttcagaggaaatgcagttctctttttagtttaccaggagaggctgaattatgtctataayaaccttcagttgttttgttatcattgatgtgatttcttaccacaggtagttaaagcctgccttcatttgtctcttggtcaattattcttctgagaatatcagaggttttgaggtttctgaagtatttggaataatgggatgatattgaactataccaggggctctcaagctctgga

SEQ ID NO: 543005 - DNA, 630 bp, Homo sapiens
ctgatacttacggaaaacttgaatgtgattgattttgaacaatttggcatttgggaaaatctctttctctatagctattctccaaaaatcggcatgattttttaaagggttttatggaaatatccaattattgacatattaataagggttatttgaataaagggggcagcatttaagtaacttagggcttttcagagcttaaatatgcaaatgagcattagaaatttttaagacagaactatagtatatagtatatatagaaacaaagtatttgatcatggagttcttattttttaaatttaatttaattttacaaaggaatacacacattgttaaattcaaacaatgtagcataatacagagtaaaaagtaaaattctttctaatttactcagttcctgtaaaccaattcttcttcccagaaataamctcagtgaaaaatttcgtgtgtttctttccaagttttgcttctttgctagatactgacaaattgccctcaaaagagatttttgccaattattctcccactggtagtataacaagatatttgtttccctatgtcatgccatgccagatagcatcaattacttacatttttcggcaatctcaagggtaaaaaaatctatttcaa

SEQ ID NO: 543006 - DNA, 466 bp, Homo sapiens
taattaaaagctaagaatttagagtaagaagagattcctgggttcagagcagggagaataatgttagggtgaatgaacacagctcctctaaacagggaaaatgtgagaagaccccctgggaaagctgartggcttggtaaatatcaaaagaagcacttggcaggacatactgtgttccatgaggatatgagtggtggttgcatattttttgtttggtttacaaatattttttaaatttttacattgttaatttgttatgcatatgtaatagttgtacatatttatggagtacatgtgatattttgatgtaggcttacaatgtgtaatgatcaaatctgagtaaatgggatgtccatcacctcaaacattcattgtttgtgttgggaacactccaactctactcttctagttattttaagacgtacaataaattattaactgtagctgccctatcatgctactgact

SEQ ID NO: 543007 - DNA, 593 bp, Homo sapiens
acaggaataaaatatttcagcaagaaagtaatattcagagacaactgcagaaatagcatattttgctgttaaatggaaattgtagaggccacagtgaatttaaggattgggaaggaatgagaaattggaactaaattggtggtgcagtgctgatgtggacagagtgtggtagaaactataaacaatagtagaaagtatagagtacttttgttaccaacacaggtgcttgtgaagcctccctgagtgctgggggaagaggaatggtaggggtcagctgacggaggtragtggggtgcatggaagtttttcttatctaggttcttagagctctcgctattggatgatactcctgcccactcagttatcatgagtcattaatctggctatcatttccttctattaacctcttcattacatccccccttctaccatatttatttatgctcctcaaaacagagaaacaatattttcgtttggtttttatttagtctctatactatcacagtatttatcaacaaatttcacacatctggtgacaaacaaatgctgaattaaatgtgtgatttctggaatggattaacaacttaataagt

SEQ ID NO: 543008 - DNA, 600 bp, Homo sapiens
taaatagaggaagttttgcccgcctacccatggctcacctcctgctgtgcggcccacttcctaacacgccacaggagttggagacccctgctctacacaaacactgaaagccagacacagcagccggaaggatgagagagtaaaggacgactctttggtccctagcttggatgactgtacagatggcgaggccatcacggagacagatgattccagagaaagaacagtttctgatattttgacattccaggccaagaaactatgtaaggacaaacaaaagatcctgaattatacggccccactagtggktgaagtctcacttcaagaacatgatggcttgactacatatgcaataataagagaagatgaaatcacactccagagagccagtacaccaccgtggaagaaagatatttgaaaatttctcttttgttttccagatttgctaaataatgtttaaaatcacctaaccaagttaaaatccctgttctcaatgaactcgcacgtgattcaagtcagtgtcagagagagtgttttaatatacaaccaatactatcattttcctactaggaaaaaaaacaaaactgcgataaagctgta

SEQ ID NO: 543009 - DNA, 644 bp, Homo sapiens
agattccttctggggcgacagaaaatgttttgcaaccacgcggacgtggtggttgtatgacattgtgaatgtactaaatgcgcttaattgtttactttaaaatggtgatgttatatgaatttcacctcgattttaaaaaygtgacatttcaccaagtcatagaaaagatgcttcgcttgtataagttatgcgacaaaaagataagcacttttaaatatttcttgataagttttttgtttccagggttttaaatggcaacgtgctgaatatttcactatttttcacttccttgtacatttataactgacagtaatagagtttttaatgctttgacaaaatttttaagaagtcacagaacaattgcattttttccttttcatcactaacattgttttgcaccgtttcagcttctatggacattcttatggtttcatactgagtactgcctgtgcacatgtatttcactacacccccgccccccaaccaacccctccaccccccaaacacatcccatacccattacagcacgttgttgcagggaggattctgagatgcgtcttctacaatagaaaaagatgtgctgggcttgctgtgaaaaagcagaggaagttagaggtgggatattagtggtgaagttggtagaa

SEQ ID NO: 543010 - DNA, 644 bp, Homo sapiens
agattccttctggggcgacagaaaatgttttgcaaccacgcggacgtggtggttgtatgacattgtgaatgtactaaatgcgcttaattgtttactttaaaatggtgatgttatatgaatttcacctcgattttaaaaacgtgacatttcaccaagtcatagaaaagatgcttcgcttgtataagttatgcracaaaaagataagcacttttaaatatttcttgataagttttttgtttccagggttttaaatggcaacgtgctgaatatttcactatttttcacttccttgtacatttataactgacagtaatagagtttttaatgctttgacaaaatttttaagaagtcacagaacaattgcattttttccttttcatcactaacattgttttgcaccgtttcagcttctatggacattcttatggtttcatactgagtactgcctgtgcacatgtatttcactacacccccgccccccaaccaacccctccaccccccaaacacatcccatacccattacagcacgttgttgcagggaggattctgagatgcgtcttctacaatagaaaaagatgtgctgggcttgctgtgaaaaagcagaggaagttagaggtgggatattagtggtgaagttggtagaa

SEQ ID NO: 543011 - DNA, 644 bp, Homo sapiens
agattccttctggggcgacagaaaatgttttgcaaccacgcggacgtggtggttgtatgacattgtgaatgtactaaatgcgcttaattgtttactttaaaatggtgatgttatatgaatttcacctcgattttaaaaacgtgacatttcaccaagtcatagaaaagatgcttcgcttgtataagttatgcgacaaaaagataagcacttttaaayatttcttgataagttttttgtttccagggttttaaatggcaacgtgctgaatatttcactatttttcacttccttgtacatttataactgacagtaatagagtttttaatgctttgacaaaatttttaagaagtcacagaacaattgcattttttccttttcatcactaacattgttttgcaccgtttcagcttctatggacattcttatggtttcatactgagtactgcctgtgcacatgtatttcactacacccccgccccccaaccaacccctccaccccccaaacacatcccatacccattacagcacgttgttgcagggaggattctgagatgcgtcttctacaatagaaaaagatgtgctgggcttgctgtgaaaaagcagaggaagttagaggtgggatattagtggtgaagttggtagaa

SEQ ID NO: 543012 - DNA, 644 bp, Homo sapiens
agattccttctggggcgacagaaaatgttttgcaaccacgcggacgtggtggttgtatgacattgtgaatgtactaaatgcgcttaattgtttactttaaaatggtgatgttatatgaatttcacctcgattttaaaaacgtgacatttcaccaagtcatagaaaagatgcttcgcttgtataagttatgcgacaaaaagataagcacttttaaatatttcttgataagttttttgtttccagggttttaaatggcaaygtgctgaatatttcactatttttcacttccttgtacatttataactgacagtaatagagtttttaatgctttgacaaaatttttaagaagtcacagaacaattgcattttttccttttcatcactaacattgttttgcaccgtttcagcttctatggacattcttatggtttcatactgagtactgcctgtgcacatgtatttcactacacccccgccccccaaccaacccctccaccccccaaacacatcccatacccattacagcacgttgttgcagggaggattctgagatgcgtcttctacaatagaaaaagatgtgctgggcttgctgtgaaaaagcagaggaagttagaggtgggatattagtggtgaagttggtagaa

SEQ ID NO: 543013 - DNA, 510 bp, Homo sapiens
tgtagctctgcaaagagcctgcagatcacagacagactctgcacagagtaaggtgctgctcctcaatgggggaggaagaggagaagtcagttctaaatgctaacaaagaaacagtgcagaggacaagtccaaatgccggcctgtacctcgagggacctcatggccacgtgtcagcaagggaaaccagcccccatgaaaacaacaggaggtgtayggtccctagtggccagaaaggcgcagtcccacctaatgggtgtgcccagcacacacctctagccatgcagccttgcacagatgcaggcccagtgtggctagattgccaagaccttccagaaacctggaaatctcgatttgtattataatatgggatctcccaaacgttggctcaggatttgcatttttttgtttcagtgctccacaggccaaataaactcatgtgtggattcagtctggtccacagggaccaactgtctgcaaactttggtctgacctctgatccagaagggctta

SEQ ID NO: 543014 - DNA, 615 bp, Homo sapiens
agtcccagctacttggaaggctggggcgggaggattgctgaagcccaaaagattgaggttgcagtgagccaagatcacaccactccagcctggcgacagagcaagactacgtcaaaaataaaaaacaaaaaataaaaataaaaagacggggtgtttcatttggaaaagaagaaaggggggttttcaattatttggagggctcttgcttagaggatagcatgggcctgttttgtataagtccccaaaggaacaacaaaggcaagggctcagagaggcataaagaataattctccaggcattgattgtccgtccatagaaggaatatgaggacctcataacagagggagttctcagcccctggacctgttcaagcacagaccagcacatcttttggctgggaggctatagcaattgtaccaacatctgatagggggctcaactagatgacaaggtttctttcaaattggatggttatgataatgagtgaaatttagacaagaatttgcaaactagggagggtcccacagagaatgatgctgaagagctgaagaaagaagccaaaaaargaggccagagaaagagctccaacgaggctgtctggtagcaatgatgaat

SEQ ID NO: 543015 - DNA, 577 bp, Homo sapiens
aaaaaagaaaaaagaaaaaaaaacacagagaaaagagcagttcaaaaaaaggggatgggccaggtgcagtggctcatacctgtaatctgagcactttgggaggtcaaggtgagacgatcatttgagcccaggagttcaagatcggcccgagcaacatagtgagacctcatctctacagaaaatcaaaaaattagctgggcatggtggcatgtgtctgtggtcccagctacttgggaggctgaggatttcctgagcccaggaggttgaggctgcagtgagccatggtggcaccatggcattctggcctggggaacagagcaagacaccgtctcaaaaaaacaaaacaaagcaaacaaacaaacacacacamaaaaaaacaggaataaggtggtcaatagaatcagtctattgagagatcaagtaagataaggactgaaatagctgttagatgtcttggaagtcagtgatagctcttttggtggaataattagggtagaagtcagatagatgaaataaaaggaagagaaatgaggaattgaaggcagcaagttatagaaaattcaaatgaatggggaga

SEQ ID NO: 543016 - DNA, 511 bp, Homo sapiens
aagcacctaataaggcacttgtaaggattaagtgaaataatgcccagctaaggtattagctccatgatggaaaatcacctgcacccacagatagtgggttccagtggcctggacagaaccagaaccaagtcttctgccrcgaaagttcacactcatcagacatgataccgtgtactcgctttattcttgtttgcgtagctcttgaagttgcatttcaatcctgtggatgctgtgtgtttatagggggataataatagtactctgtcatagggttgcgtcaccaagcagtaaagcagccactgcagttagcacaatgtgtggacacggccagtactcaagtcatggcgcatctgctgctggcgctcccccttctcccataccacatatggggtttcccactcattctgcgtgtatttttggtctgcctactgtgtaaagacaatcttttcgcatatggctaggaaaagacttcccacgtttccactaacccgataacataattcacaagagt

SEQ ID NO: 543017 - DNA, 635 bp, Homo sapiens
ttggaaagtagtcattttagccagcccacttaaagagtggggagttatgttctatcttcttgagggctgagtatccacatcaattatttggaattgttctgaatgggagatttgactattctacccatttatctatttaataactcatttatatcggtatggactcatggatatttattttacttcacttctttatttttcaagttgtttcaactttggtcattggaagctcttggctcttgtgttcctttgacatatctaacacctccatgtatgtatgtgtgtagtgtgtgtgtgtgtgtgtgtgtgtgattaaatacttcttgctttctgggattgaaaggttctctatgctcattttgtatatttcctgtttcagccttagaatcagccatttctccaaggagtctttgtttgttttagtgagtagattattgactaaaaggaaatatggcattgaatctaacatgactggacattattttctttactcactctcacttatgaaagatttggtactttttctcctgtcagtttcacaggaatagggtgaatgrccttataaaatcattagatttatttgaaaggggagactttcaaaatgaagaaatgtaactcctgaagaaaattaagaa

SEQ ID NO: 543018 - DNA, 544 bp, Homo sapiens
tgttcattagtaacgaggcagcacttgccaaaacattgatagccacctttacagccacctctttgtctctgtcaccagtggaaaaccatatcccagtccctaaaattgcccttccctgcaaaggtcccttccttcggaggagtttctcagatgccaatccataatgcagctaagtgttcacagtgggcacaggactttggagttgcaggtccttagagctggagggggtcttagtgatcattttcctgccaaaagaggctggggccacccaaggggacacattttgcagagtccacagttttgccctatgttggccatatttactggagggtggggtctggagttgtgtgcctcaggtctgctgtcagccagtttcatcctccttccactccttctgagaaagtgtgtcgtgcccagaccacctkggcctgggtccctcttcctgttttttttctagctctccaaagcctggagcactggctgtgtggttgtggtgaaaatcaattcagagtccttttatctccacattaagcctccatagcca

SEQ ID NO: 543019 - DNA, 590 bp, Homo sapiens
tccctctgcctttacttctttacaggttggactctatcaccagagtcctgtctctcccttctccttgtagatcaaattcctagcttaggtctttgcacaaagcagacagatactcaatayatatgtacttcacagatttaagacatgaaagggtggatcataaaattctttacaagctcatcacaactcctaggaaacgattcttctctcttttcccaccagtggagagctgaaatgcatgatgagtcaaggaaagtcatagtttattggatgctcacttaaaataagaaagcttcagttcattagaacttatggatgtgagtaaggggtgtggggaattcacagacgtgatgagagatttttggtggctgctctactgcatgtactaagcaaattttatatatcaaaactagttggcctctctgaatccttgatttattattttaaaatggaagacaccataccactttcattccctttattgttggtatcattgaagtagcctgaagctaagtattgcattttggcacaactgaggtgacaggaaaagctagtgatgcagctatgggtccaggctgcctttcctccat

SEQ ID NO: 543020 - DNA, 591 bp, Homo sapiens
gtccctctgcctttacttctttacaggttggactctatcaccagagtcctgtctctcccttctccttgtagatcaaattcctagcttaggtctttgcacaaagcagacagatactcaatacatatgtacttcacagatttaagacatgaaagggtggatcataaaattctttacaagmtcatcacaactcctaggaaacgattcttctctcttttcccaccagtggagagctgaaatgcatgatgagtcaaggaaagtcatagtttattggatgctcacttaaaataagaaagcttcagttcattagaacttatggatgtgagtaaggggtgtggggaattcacagacgtgatgagagatttttggtggctgctctactgcatgtactaagcaaattttatatatcaaaactagttggcctctctgaatccttgatttattattttaaaatggaagacaccataccactttcattccctttattgttggtatcattgaagtagcctgaagctaagtattgcattttggcacaactgaggtgacaggaaaagctagtgatgcagctatgggtccaggctgcctttcctccat

SEQ ID NO: 543021 - DNA, 590 bp, Homo sapiens
tccctctgcctttacttctttacaggttggactctatcaccagagtcctgtctctcccttctccttgtagatcaaattcctagcttaggtctttgcacaaagcagacagatactcaatacatatgtacttcacagatttaagacatgaaagggtggatcataaaattctttacaagctcatcacaactcctaggaaacgattcttctctcttttcccaccagtggagagctgaaatgcatgatgagtcaaggaaagtcatagtttattggatgctcacttaaaataagaaagcttcagttcattagaacttatggaygtgagtaaggggtgtggggaattcacagacgtgatgagagatttttggtggctgctctactgcatgtactaagcaaattttatatatcaaaactagttggcctctctgaatccttgatttattattttaaaatggaagacaccataccactttcattccctttattgttggtatcattgaagtagcctgaagctaagtattgcattttggcacaactgaggtgacaggaaaagctagtgatgcagctatgggtccaggctgcctttcctccat

SEQ ID NO: 543022 - DNA, 591 bp, Homo sapiens
gtccctctgcctttacttctttacaggttggactctatcaccagagtcctgtctctcccttctccttgtagatcaaattcctagcttaggtctttgcacaaagcagacagatactcaatacatatgtacttcacagatttaagacatgaaagggtggatcataaaattctttacaagctcatcacaactcctaggaaacgattcttctctcttttcccaccagtggagagctgaaatgcatgatgagtcaaggaaagtcatagtttattggatgctcacttaaaataagaaagcttcagttcattagaacttatggatgtgagtaaggggtgtggggaattcacagacgtgatgagagatttttggtggctgctctactrcatgtactaagcaaattttatatatcaaaactagttggcctctctgaatccttgatttattattttaaaatggaagacaccataccactttcattccctttattgttggtatcattgaagtagcctgaagctaagtattgcattttggcacaactgaggtgacaggaaaagctagtgatgcagctatgggtccaggctgcctttcctccat

SEQ ID NO: 543023 - DNA, 512 bp, Homo sapiens
atgttccaataattaaactttaagaaggtttatttaagtgcttaaggaagcagatctttggagagttttttaaatgatggatttatatgtgtccatttttttaaagagaaactaactattttgataacctagtatagggctccacactgtttaaagcatttttacatatattaactcaactaatccttataatgattcggtgagatagatattattatccccattctatagatatggaagtkgaagttcaaaggttaagcaatttatccaaaataatatagctgtactaagtgacaaagtcaggatttgaatccagttctgttttcaccttacctgccagcttcccctaactgaaagctggatgatgacccgaaggaccagtgagactgcagcttccggaactcattcacagcagtaatagttatgtctagtatcttactcaactgttgttgctacatctaccacagtgcctgtctcagtccttttgggctgccataagaaattaccaaaga

SEQ ID NO: 543024 - DNA, 598 bp, Homo sapiens
gctgtgttgccagttctcctgcagctctgggagggaggaaacttctcctctggggctgaaagagctgtgtgggtaaattccaggactctyaaaaataatctggtctatataagttttccacttaaatataaactccacgaaggcaggaaccttgtctagagtcttgtgtttcagccttgtatctccaacacctagaccatagttggcattcaaatatttgttaattgaataaacgtatttattttaaaacagcttcattgaggtataactgaaatacaataactgcacatatttagtgtgctattttggtaagtttacacacacacacacacacacacacacacacacacacaccccatcaccaataaaaataatgaacatattaggtcaggagtggtagctcaagcttgtaatcccagtactttgggagggtgaggcaggcggatcactcgaggtcaggagttcaagaccagcctggccaacatggtgagactcccgtctctactaaaaaaatataaaaattagctgggcatggtggtgcttgcctgtaatctcagctacttgggaggctgaggcaggagaatcacttgaacctggg

SEQ ID NO: 543025 - DNA, 558 bp, Homo sapiens
gctggccaattctgcatctaaggtaggaaggatcatctgctttcactgtggtgtgttgcttttgcttgtaactaggtgggggccttagtaagaattccaggaacattgtgccataaatttggatttggggagggggaggaggtgtaggagaacagtagtttggtaagaggttgaaattcagaatttgtttttttccagctccctgtggttcccagaaagaaacctttttataactctcaggtgcaccatttctctcttttccaaatatgctcaatgaaaaccggtgcctcccttcctatcaggactggagcagagctgagcgggggtrttctgagcaactcttggttctgctcctgaaaggggcaggatgtcagcacctggtgtgcattaattcaagtgttgtttgcctggcatgtgcaacttttttcagcatggctgtcaggtgttttttttttcttttttttttttccttttctgaaaaattgaggaacgcatgctctcagactgggttcaagaacaaggtgaggtcagttccaggagtgaaagatctgagtggtc

SEQ ID NO: 543026 - DNA, 617 bp, Homo sapiens
aggattggagtgtgctttcttctgaatttatcccattaggaagyagactatctcaaaagagaaaaaaaatgtcattaagacttcactgagcactgtgtaaggcttaagaaaggtcaggaaccacctcaagagtatgcggaggtcctgaggagcacgatgacagcttgactcacggtgagagtgtgttgctccaggaagggccacctctcctcctaccatagagtcctcgctggggctgctggggggaccacccactacccttgcttgtagcacttattttaccctgggctcactaaacctgctcatctccactacaacattcaagaaccgtcaaactcctgatccagtaaccttctatgactagcgtgcatcatggcatttacagtaaagctagccctctacagctcacacctctgactgccaaaggcacatatagaggccccattgccgggtctatcgttcttgcagcagtacttctaaaattaggtgggtatggtataatacaagttactttaattctaatcccctggcagaatttatagcatatccattcctcattctatctctctaagggataatcataacaagttctatttgcttctgacagactgacctaa

SEQ ID NO: 543027 - DNA, 607 bp, Homo sapiens
tgaaggattggagtgtgctttcttctgaatttatcccattaggaagcagactatctcaaaagagaaaaaaaatgtcattaagacttcactgagcactgtgtaaggcttaagaaaggtcaggaaccacctcaagagtatgcggaggtcctgaggagcacgatgacagcttgactcacggtgagagtgygttgctccaggaagggccacctctcctcctaccatagagtcctcgctggggctgctggggggaccacccactacccttgcttgtagcacttattttaccctgggctcactaaacctgctcatctccactacaacattcaagaaccgtcaaactcctgatccagtaaccttctatgactagcgtgcatcatggcatttacagtaaagctagccctctacagctcacacctctgactgccaaaggcacatatagaggccccattgccgggtctatcgttcttgcagcagtacttctaaaattaggtgggtatggtataatacaagttactttaattctaatcccctggcagaatttatagcatatccattcctcattctatctctctaagggataatcataacaagttctatttgcttctga

SEQ ID NO: 543028 - DNA, 530 bp, Homo sapiens
cctaggaaatgtagtttgggagtcctggccgcagtgtcgaagagcagctaaatgtagaagatgggctcgaggctgctagacagtaagcaaatcaccaaaacaaagctctttgtctgatataataaataaatgtgctgtttccttcaatcagcatgtgtgttaaaagacctaaaatggacatgatccgtgtgcagtcttgattcctatgttcttatgggagcacctygtggcactctgcttctagaatatttaaagatataaatttctgtataatatggcaccaaaacaagtcaagtactttatctggtgtttttcttgatgccctagtgctgggggtgatgggggcattgtggggactggctgctctggatttagagcaaagttgtatgtctaaactaaaagtcataggcacctttaggataaattttttttgttttcttataattacaaagtgagtaattcatgtatacaggattattataaagagttcgtacagtacaggagtgtatagagcaaaatatgagatttcc

SEQ ID NO: 543029 - DNA, 530 bp, Homo sapiens
cctaggaaatgtagtttgggagtcctggccgcagtgtcgaagagcagctaaatgtagaagatgggctcgaggctgctagacagtaagcaaatcaccaaaacaaagctctttgtctgatataataaataaatgtgctgtttccttcaatcagcatgtgtgttaaaagacctaaaatggacatgatccgtgtgcagtcttgattcctatgttcttatgggagcacctcgtggcactctgcttctagaatatttaaagatataaatttctgtataatatggcaccaaaacaagtcaagtactttatctggtgtttttcttgatrccctagtgctgggggtgatgggggcattgtggggactggctgctctggatttagagcaaagttgtatgtctaaactaaaagtcataggcacctttaggataaattttttttgttttcttataattacaaagtgagtaattcatgtatacaggattattataaagagttcgtacagtacaggagtgtatagagcaaaatatgagatttcc

SEQ ID NO: 543030 - DNA, 650 bp, Homo sapiens
ggaaaaaaataatttcatttgaaatgaacaaaaaacttatcagggcaaaggaaagcagtaatggtgataaaaaatacagcatcatttcttttttcaagttccacttacattttaaaaatcattgtttttgagaacgtcattctgtgtctggaatttattccttcttgtgggttcctggtcttgctgacttcaagaatgaagccgcggaccctcatggtgagtgttacagctcttaaagctggtgtgtgcggagttgtttgttcctcccggtgggttagtggtctcgctgacttcaggaatgaagccacagaccctcacaatgagtgttacagctcataaaggtagtgtggacccaaagagtgagcagcagcaagatttattgtgaagarcgaaagaacaaagcttccacagcatggaaggggacccaagcgggattgctgctgctggctggggtggccaacttttattcccttatttgtccccgcccacgtcctgctgattgatccgttttacagagtgttgattggtccgtttttacagagtgccgattggtgcgtttacaatcctttagctagacacaggtgctgattggtgcgtttacaatcctttagctagaaaagttctccaagtccccactcgacccaggaagt

SEQ ID NO: 543031 - DNA, 514 bp, Homo sapiens
aaccctcaaagcagaagaaatgctgggcccctcttctctcttgagaaccctgtgatgatcactccaaggctccccgcagcttggaaagcatgtctgctcgggacaccaacccctgctgaggtatagccctgtcytcactgtaatgtaggcgttgagtccaacagaaacctggatgaggctcttcctgcacgacggtcagggtggaagaagccagcagtctgtctgcatcctgctttgctctggtatcattgctcctttcatcctgaccctcctatggtggctgtgttcctggctccagcctctctctctgcctctgtctccatctctctccctacatcacccagagcccatccctcccatctcatcctttacaagggattccccaggacctgccccttgtggatggcaaagttgtggctactcacagcattgacagccaggtccccgcggatgtctgctggcgtgatctcatggagcagagcggctccggccacagcccccagcagctgggcag

SEQ ID NO: 543032 - DNA, 514 bp, Homo sapiens
aaccctcaaagcagaagaaatgctgggcccctcttctctcttgagaaccctgtgatgatcactccaaggctccccgcagcttggaaagcatgtctgctcgggacaccaacccctgctgaggtatagccctgtcttcactgtaatgtaggcgttgagtccaacagaaacctggatgaggctcttcctgcacgayggtcagggtggaagaagccagcagtctgtctgcatcctgctttgctctggtatcattgctcctttcatcctgaccctcctatggtggctgtgttcctggctccagcctctctctctgcctctgtctccatctctctccctacatcacccagagcccatccctcccatctcatcctttacaagggattccccaggacctgccccttgtggatggcaaagttgtggctactcacagcattgacagccaggtccccgcggatgtctgctggcgtgatctcatggagcagagcggctccggccacagcccccagcagctgggcag

SEQ ID NO: 543033 - DNA, 586 bp, Homo sapiens
agctggtgagaactggcaggccctggggagaggaagagagggaggaaggggaagggagcctcccacaggagaatccagactctccctgggttccatctttaggtgcagcagaggtgacggggactgtgtgtgcttgcgttggacagcacacaggtgtgcctctgagaacccgtggagccaggctcataggtctgggcccgcggtggggccggcggtggccctgtgagcgaatgctggaggagggctgatgtggctctgcacattcgartgaacgtgcggaggaaaggagacgcacacacccggaacatgcagccctcgggcacgactgaggtcagtgtgtggccgcgagccccggactgtgtggggtcagtgtgtgtgcgcgcgtgtgcacgggactttgtgagcccgcagacctgccgctcctgcaagatccgacacgcagacacagcgacccctgctggccacaccgccccaaccacggcgcttgtcagccccaagccctagctggaagcctgcccaagggccaggcgaggcaacctgcaggaagctcagggccggtagccccctctgacttagtgccttgcct

SEQ ID NO: 543034 - DNA, 492 bp, Homo sapiens
gaattgacacagagcccctctgcacctccaggttcagtagagcctcttccataagcggatagatactcagactccctgtccccagcggttcaggccatacaaagccacctctgcccctctagctgaatcccatcccctactgtgtccctttctctgtcagccaccactccstggcccacccccaagctctagacccacagaatccaggtctggtgagctctgagctgccactgctgggtctccaggccctcatctccagggagccaggggaagggacagactcacccagtgagcggggctgaaccgattcatgaccaccgcagggccaaaagagcgggctgggttcatggagcagccagtgaagtagatctggatagagacagggcggtggagagaaaggcaacatcctggtccactcccacagaatctggactctctcaaggttacactgcagtccaggggctcagccaggtctcaaactcaggctggcaa

SEQ ID NO: 543035 - DNA, 574 bp, Homo sapiens
ggcttgaaagagcaggcggggacggtggaaaacaggcggtggaaggagggtgtctgggagctaggccgggttgagccgtggctgtggccgcggccggtgaggacgccccctgctggagcactgtgatgggattcggagcagcgctgtctgacagttgacgtgagatgtgtttcctgctctgagctgagtcacaaatgccctctactctccccgaaaggtcggtaaaagtgggtcacacagcaggcctgtgagtctggtgctttggggactgagggagaagggagcgggtagatccacagtcggggcgaagcgggacgaagtgaagagagcagccmccggccgcggctggcaggagaggagggtgggagttgtgtccccggactcagacagcctctgaaggatggagggcgttggatcgttgcagctctgagacacagcgtgagccatttgatttctgtgtagggtttccagataaaatacaggacatccaggtaaatttgaatttcagataaaaaacaaatgatttttgtttgtataagcatattccaagcaatatttgggacatacatactaa

SEQ ID NO: 543036 - DNA, 509 bp, Homo sapiens
caccgcagtgcctagcacaggccctggccctttagaggtgctcagtacatgtttgttgagtgaatcaatgagcaaactgccagcccttataccccccttaagcccacttgtgccctgccccacacctgctgtgttgcagccacgtggtggtcctcagggacctggttcagggtagaggttgattcctggagcttggatggagagagggagcatgtgcatgtgtgcmttggtggaatgagaaggggccaggaacaagtctgcccacatttgagaaagattagatgtggggggctagggtcagggaaacctttctaataacactgctttgtgaaacagtgagttcctacctgcttggagggtccaagcaggctgagcaaaatgccagaaaagcttggcaagggtttgtgcaccaggggaagggttgaataagctgactaatggggtcctgtcagctctgctgcgtggaggagtacaggctgcaggctaataaagcttcctcataggaggca

SEQ ID NO: 543037 - DNA, 509 bp, Homo sapiens
caccgcagtgcctagcacaggccctggccctttagaggtgctcagtacatgtttgttgagtgaatcaatgagcaaactgccagcccttataccccccttaagcccacttgtgccctgccccacacctgctgtgttgcagccacgtggtggtcctcagggacctggttcagggtagaggttgattcctggagcttggatggagagagggagcatgtgcatgtgtgccytggtggaatgagaaggggccaggaacaagtctgcccacatttgagaaagattagatgtggggggctagggtcagggaaacctttctaataacactgctttgtgaaacagtgagttcctacctgcttggagggtccaagcaggctgagcaaaatgccagaaaagcttggcaagggtttgtgcaccaggggaagggttgaataagctgactaatggggtcctgtcagctctgctgcgtggaggagtacaggctgcaggctaataaagcttcctcataggaggca

SEQ ID NO: 543038 - DNA, 413 bp, Homo sapiens
cccctccccactccacaaccctactggccgtgccagtgcctcttcckggctctgctctgaagaaccaggtcctggatatggaagcagaagttcctttctgcccccaggcaggtgtggagctgcttctgcctcccctccctcagtcccccaccccagggcttctccacctcctcctgtcaggtttgagcagggtgtgggttgggggatgaactcctcaggaatgagacaggcaggcctcaggagggggcctgcacactctcccctgaaggagcaatcactgatcagtccacccaccccagcccagaggaacccacgccacttccaggttgtctgggtggggcgtcggggaggcctcaggggaggcattgggactgtttcagtggcagagggtgggcgacctaatagagaaggtt

SEQ ID NO: 543039 - DNA, 605 bp, Homo sapiens
ctgcagagccccctccccactccacaaccctactggccgtgccagtgcctcttcctggctctgctctgaagaaccaggtcctggatatggaagcagaagttcctttctgcccccaggcaggtgtggagctgcttctgcctcccctccctcagtcccccaccccagggcttctccacctcctcctgtcaggtttgagcagggkgtgggttgggggatgaactcctcaggaatgagacaggcaggcctcaggagggggcctgcacactctcccctgaaggagcaatcactgatcagtccacccaccccagcccagaggaacccacgccacttccaggttgtctgggtggggcgtcggggaggcctcaggggaggcattgggactgtttcagtggcagagggtgggcgacctaatagagaaggttctcactggctccttcagcctcatgtaacgcattgcgagaaatgggcctcaagctctgaatggaatgaacataagtctaaaagtcatgcctcagccttggatttgtgtggccatttttacttttcgaagtgtttttctaattgtgaggaagttagggcatatatcgccatccccactagaaaag

SEQ ID NO: 543040 - DNA, 562 bp, Homo sapiens
agggaggtggtgccagctcaggagtgatgagcagacacgggaccatgcctgcacaagcccttgattaaggtgactgggcctcggtaatgaccgtttctaccacgtgggcctgttgtggaggataaagtggaggtgttggctgagaccctgagtgagaaagtgctgatgccacagagccaggagagaaaggggagccacctcctgcaggatatgcagaaccaagtggctcagacctggcagccgcttctcagcactgccctcagcaagcaagatgcccagagctggagaggggatgaagaaagcaggctttttggatcattgtttttaaagtactgagtatacataaatacttagagactgtgagtgaggatggaygaatacaaccgcatgggaccacacacggtttaaggcacttcctgttcatgttgacgtcctctggcgttttctccccattcctacataaccaaaaccctcaattatctttctttgctttttctttgtgtcatacatgcatattcttttcaactcaagatgagacaaagctagttatgagcctaactgg

SEQ ID NO: 543041 - DNA, 657 bp, Homo sapiens
cactttgtgttaagcaaaggatgaaaaagcaaagaaaacagaagtgaacctgacattgtggactttttgttctaggcctgaggtcaaaagaggtcaaaaggttctaggcctatgaaagtccagatgttaacaagtttaggctttctggactgtacagcctccattgctgctactcagctctgtcactgtatcctaaagacagccataaacagtgtctagatgaatgagtgcagttttgatgccaaaaactttatggacactggaatttgaatttcccatgcatttttaaatatacrtcacaaaatatccttattttgattttttctgcttagaaatataaaatgcattcttggctttcaggctgtaccaaatccagagattggccatattttgcccacaggctatagtttttcagaccctgttctagaggatgaggaaggtaaaaataggcaaacaggcaaatgaagtgagtacatactgtgaggaagcacacacgagggctaaaccggagaccaggagacaatgcctcccataggaagggaaggctggaggcttctgcaaagatgaaacaggctgagaagcagctggcctaggaatgtccttaaagggcttgcaagcagagggaacagctcacatacagaacttaagaccgaagaa

SEQ ID NO: 543042 - DNA, 531 bp, Homo sapiens
tcctgtctcaaaaaaaaaaaaaaaaaaaaaaaaaaaaggaaggaargaaaagaaaagaaaaagaaatggtaaatttcagagactcttcaaggagaatatgtcaaatagtacttaaagctgttaaggcttccaaccaattcttgaagtccttgaaggttcgtaggaaagtcaaagaggggagaaattgcctggagaaaacggttaacgacgcagggctggatgaggagttagtctgtggattgaagaagtgaaaggttattagacataaggctatcattacctctacttgatctttagaagaacagaacgggaggaaatatcctaaagaatccacacaaggaagtttgtggacaggaatgctgttggatgattgcgtgaagttgggaaatctctccaacttgtttcattaataagaaaataaatcatgtctggggtagtttagccatgttcttgctcttggcttgaaacaatggttgtcaagttgctgccgggggctataaaacttgatttggtcccgagttgaggaaaagg

SEQ ID NO: 543043 - DNA, 287 bp, Homo sapiens
aacaaatgttaattctattcatggaatagataggccatggaaaaggttagggagcactgctgcagaccagaacttcccaaatgtgtgaaaagagggctccacagtcactttagaaaatgctgtgtattgtataccactttgtgaatatactcacaaaatgcagcagcataataaaggctctgagaagctctcagtktagggaacaaggtaggagacctgttaactttgcttaggccttccagtatcagactatatagctggttaacttacatccttaaatccaataa

SEQ ID NO: 543044 - DNA, 520 bp, Homo sapiens
tgtcaccattttctttggagctctctcttacatggacttacaacctgaatctactgtgtttcaagagcaagaaaakccagcatccatattttgtggcattatgactctcgtgttaaacttccttatctactgcctgtgaaattaggaagtaaaagaagctctacagttaacaaggaaaaagtattaatacatgtagactgagggtaaattattaacactgagtgtcagaagtatcctgtggtgagcgccctgccatatttgctgatagcatattggtcaaagcaagttgcaaggccaacccaaacctggattcaaggtgttggagtaacaggctctcctgtctgatggaaagatctgcaccactgcatcacgatgatgtgaatgtaacaaaaacttggggaccatttttataacctaccacaacatgttcttactagagtaaattgtttcttagctgacaccctaatcagaatatgaatcatcctgccacagatgttgatatgagaaacaaactgaatct

SEQ ID NO: 543045 - DNA, 515 bp, Homo sapiens
acacatgacatttatgagttctccatcttataaaggcacctcgataaagtttgtggcacctcaaaacaattacagtaataacagcaaagatcactgattacagatcatcatgacaaataataatggaaaagtttgaaataatgcaagaattaccgtaatgtgacataaaaacccgaagcgagcatgtgctgttggaaaaatggtgccagtagacttgcttgatatggtattgccacatacctacaatttgtaaaaaacaccaatttgtaaagctaaataaagctaggtatgcctttaataggtttcaacttgattcagaacaaggaatcctaaattcatttagctgtctttgagtcaaagcaggaaaccttatttcagggagagagctcttggggctaatacatgtagaaatagaaataatatctctgaagtattrattgtcgtagagcttttggcttactttcttcacaaggccctacaacacaataattggataattgggtgaattgttaaca

SEQ ID NO: 543046 - DNA, 590 bp, Homo sapiens
tctcacaattggcccacgaggaaattcactgtgggcctcacgatctttgccctaaaacagttctattgaatttcaccctggcaatgtaaattggtagcttatcttcacaggtgcaggacaaagaacagaactcaaggtcatccctctgctcacctgagacctggaagcccttgctttgagttgccctaaaccaatgtacatcttacacttattgattcatgtctcatgtctctctaaaatgtaaaaccaagctgtgccccraccaccttgggcacatgtcgtcaggacctcctgaggctgtgtcatgagcatgtccttaaccttggcaaaataaactttctaaattgattaagacctgtctcagatacttttgggttcacacccttttgtcacatagccaagccagtctggctaaccggttatgccatgtgcaagccatctggttagtaacctggcccaggtgctgccaggcaaatcatgaactttaaacagcatacaaatcaccaattagctcacctatccttatcttggtcaggtatcagtgcagacttccaggtctccccagagagaagtgcagagcttccccaggg

SEQ ID NO: 543047 - DNA, 534 bp, Homo sapiens
ctcaggaggctgaggctggagaatcgcttgaggccgggaggcagaggttacagtgagccaagattgtgccattgcattccagcctgggtgacagagcaagactttttctcaaaaaaaaaaagcaagggggacctatagcgatggcaactcttgctctaactggttcctctctgcctctctgcaaaggttacaaggttaacagagtctcctcttttattaaaaacccaataatcctggccaggcatgatgacttacacctgtaatccsaacactttgggaagtcaagacaagaggatggcttgaacctgggaggttgaggatgcagtgagctatgatggtgccactgctcttcagcctgtgtgacagagcgaggccctgtctcaaaataaataaataaataaataaataaataaataataaattccaatgattaaattcagaaggaatggtagaatttggaactcattgttttgcaacttctaatgaaacaatggatctagggcaaaaatcatcaacagatgccaaaaccgtaag

SEQ ID NO: 543048 - DNA, 321 bp, Homo sapiens
gaccaccatctggaaagagtgagggtgagaaaagttagaagggtttctgtcccttctgcctggcacacccactacttgagtgtagaacagagcagtcggggctggactcacgtcgccatctgagttctcgctggctccgatgtcgctctggatgttggcaatggggctggttgggccggtcagcagagaggtgccggtgtcaacaatggcctggcagccctcagcgcaggcgatggcctctccgttcatggtgatgctgagggcaagaagcaagttaagctccctgagcyctcaggggtacttctctccaaggaggaacta

SEQ ID NO: 543049 - DNA, 625 bp, Homo sapiens
gcacaccacattctcaaatatctattgcataccagacaaactatgctaagtgcataagacacaatggtgggtccaatgggccttaccacatctagtggaggagaataagcaatcaggcacctaaaattcaaatgagaggaaatttttttaaccaaatgcagaaatactaaaattacatgttgttataaaaccatgacagataaagcaaagtcaacaaaaggattcaatacagaataaaatcctattctgtctattcttatccatctttcaaatacaaccaaagaccaaacttctccaagaattccaacacagaagtaagtctctctttttttcctgagttcctaagctacattacttagggcttaccacattgtttagcgccaactggatattttttcataccacttcttaccattgcacccaccttgcctcctaaccgaggacagggactgcattgctctcaatccttgtcccatacctctgagcatggtgctgaagctttataaagacaccaaaacaggtaaaaataagtcaatgcttctgaaatgactgggaacacgaaaatagttctcaacttctttttggtgagcattcatattrtgctgcatctctatgctaggcacac

SEQ ID NO: 543050 - DNA, 549 bp, Homo sapiens
gcaaattgatctgttcctaatacgaatgaaactggcctaaaaataggactttgggtcccatgggccttgtgtgagtggtcagtttaaccaaagttacttattcagcatcacccatgagactggtgtggwctgccaatacaggaagaagggaattgttctatttgtgcataggagggatacttaggctctggtcatctgtgggagatgagtgaaaagaagtatagttgtgaagagcagtcagtgggttaggaatcacgctgcctggctttgagtaccattcctggtactaactagctttgggatcttgtaccagactgatcaacctggcactttgtgcctcagtttcctcattagaataagtagtactactgcttatgtcatttgtttactgtaagaattaaatgaattaatgtacataatatataagaacaatgactagcacaagataagtgttcaattcatgttagtccacagaagaaaagattttagccatgtactgaccatcccagtttgtatctcctgccctgcctcttttgattcctgttggaa

SEQ ID NO: 543051 - DNA, 487 bp, Homo sapiens
cttatctccagggctggagcttcaaagagatacatgcacacgactcccctgggtcagatgggctgtgtcacagtgagttggggataatttgggatcagtcaacataacacacataacacaacccattaattttttttttcaaaaagcgaagtttattttactttttcccattatgaaagtcatcaatgctcattatagaaaatttggcaaataacaaaaagtggaaagaaaaaaattccttaataatttagtatatttgatatattyatccttaatccttaatcttttactatgttatatctttaatagttgtgatgatatactttttgtaataaatatatatttgtgttgtggcttttttaaaatttaaaaacataacaaatatttccccaaatttctatattgtttgggtaaacaattttaatagctgcataattgtttatatatagcatagtttatttaactgtttactcgctgttaagtattt

SEQ ID NO: 543052 - DNA, 487 bp, Homo sapiens
cttatctccagggctggagcttcaaagagatacatgcacacgactcccctgggtcagatgggctgtgtcacagtgagttggggataatttgggatcagtcaacataacacacataacacaacccattaattttttttttcaaaaagcgaagtttattttactttttcccattatgaaagtcatcaatgctcattatagaaaatttggcaaataacaaaaagtggaaagaaaaaaattccttaataatttagtatatttgatatattcatccttaatccttaatcttttactatgttatatctttaatagttgtgatgatatastttttgtaataaatatatatttgtgttgtggcttttttaaaatttaaaaacataacaaatatttccccaaatttctatattgtttgggtaaacaattttaatagctgcataattgtttatatatagcatagtttatttaactgtttactcgctgttaagtattt

SEQ ID NO: 543053 - DNA, 560 bp, Homo sapiens
tcattatagttatgatgaagtgaaatattaatataatcgactcactgcatttcctccactgtttttttgtcatcaagatatggtagaagattctccttgcctatttcaatgtgacacagccatctcagcagttgttttttgtttccttatttctttttgttttcagcagttattaatgctagcaaatcaggatttttccagccattcacagctatgacacatcatttcacactgttcttcagtgtgttctaaaagtatttctgtctgtctgagtctttcaggtttaatgagctcagcccaaagagcagtgttcctaaacggggcatggcagcaagagctcatggccattctggyacagaattgaggccacgttttcacagtaataaacagaaaaatgtcgtatttctctacccctttttaatttgagaggatgtcagtagctttgtgtgaaaggaatcatgctccagagaaaaaaaacaggtttttttttcaaagggcagaaagtaaacatttcatttgattgagccactgatagagcaatccactctgcatcttccaat

SEQ ID NO: 543054 - DNA, 518 bp, Homo sapiens
gcctgggaactttaaaatggagagcgtttaattggaaaacccgaattttactaagaggccaggggattcatgggaacatgaaaggagtgagactaggattaagttttttgagcaaaggagagtagaagaaaactcttacatcacaagtaatgatgttctggtaagacagaaaactcagggtgggttagggagcaccaggcacacccagagtgtggcaataggtagtgttggctcaggagttaaagagacttaggtgtaaagcctggctttgaacttgggacagttttttatcctctttgaattctagttccttcatttataaaacagtaataatacagtaataatgtctactctggaggcttataaggaaatgagataatgtaagaaaagaggccggtgatgtcactcaataaggcaaatatctgcttagagtcgtaataataatatatattatatatataaaactaatatataatgtatataagtaatatatatrtaacatataattatatataata

SEQ ID NO: 543055 - DNA, 616 bp, Homo sapiens
ttccaaaagaggcctcctcaggagattttgagcaatttcagcaaaatgagattaagtgtctcttaagtcaatattttgcaggacaactggcatatacatgtattgcattgtgttatttctaagaattgtgtcaaatttcaggctttaccctataaagtataaagtactaataccaaaaatttatttggatttytgttattttttttctagataattgtttcatagatatagcccaagtgatacatgtgtatacaaataagtatgtgtatatgcaaatatatagaaaactcccataaatctaatatgcatatgtttgaggtaagaatatattgacagaggatttttattcccctaaattagaacaatcacttacacatcacaaagcttagagcctttgaaatgccacatttgtgttttattattccatttgttacccaaaactagatattttagaaaatgcttgttctatcagtttttgtagccataaatcctctagcaaattatcttgtcattataaattttattttaaatgattctctgaaagacacatgacttcttagttagaaaaagaaaaagtacttgcagtttgtttaaattcacttatcgagaaattgta

SEQ ID NO: 543056 - DNA, 616 bp, Homo sapiens
ttccaaaagaggcctcctcaggagattttgagcaatttcagcaaaatgagattaagtgtctcttaagtcaatattttgcaggacaactggcatatacatgtattgcattgtgttatttctaagaattgtgtcaaatttcaggctttaccctataaagtataaagtactaataccaaaaatttatttggatttctgttattttttttctagataattgtttcatagatatagcccaagtgatacatgtgtatacaaataagtatgtgtatatgcaaatatatagaaaactcccataaatctaatatgcatatgtttgaggtaagaatatattgacagaggakttttattcccctaaattagaacaatcacttacacatcacaaagcttagagcctttgaaatgccacatttgtgttttattattccatttgttacccaaaactagatattttagaaaatgcttgttctatcagtttttgtagccataaatcctctagcaaattatcttgtcattataaattttattttaaatgattctctgaaagacacatgacttcttagttagaaaaagaaaaagtacttgcagtttgtttaaattcacttatcgagaaattgta

SEQ ID NO: 543057 - DNA, 616 bp, Homo sapiens
ttccaaaagaggcctcctcaggagattttgagcaatttcagcaaaatgagattaagtgtctcttaagtcaatattttgcaggacaactggcatatacatgtattgcattgtgttatttctaagaattgtgtcaaatttcaggctttaccctataaagtataaagtactaataccaaaaatttatttggatttctgttattttttttctagataattgtttcatagatatagcccaagtgatacatgtgtatacaaataagtatgtgtatatgcaaatatatagaaaactcccataaatctaatatgcatatgtttgaggtaagaatatattgacagaggatttttattcccctaaattagaacaatcacttacacatcacaaagcttagagcctttgaaatgcyacatttgtgttttattattccatttgttacccaaaactagatattttagaaaatgcttgttctatcagtttttgtagccataaatcctctagcaaattatcttgtcattataaattttattttaaatgattctctgaaagacacatgacttcttagttagaaaaagaaaaagtacttgcagtttgtttaaattcacttatcgagaaattgta

SEQ ID NO: 543058 - DNA, 616 bp, Homo sapiens
ttccaaaagaggcctcctcaggagattttgagcaatttcagcaaaatgagattaagtgtctcttaagtcaatattttgcaggacaactggcatatacatgtattgcattgtgttatttctaagaattgtgtcaaatttcaggctttaccctataaagtataaagtactaataccaaaaatttatttggatttctgttattttttttctagataattgtttcatagatatagcccaagtgatacatgtgtatacaaataagtatgtgtatatgcaaatatatagaaaactcccataaatctaatatgcatatgtttgaggtaagaatatattgacagaggatttttattcccctaaattagaacaatcacttacacatcacaaagcttagagcctttgaaatgccacatttgtgttttattattccatttgttacccaaaactagatattttagaaaatgcttgttctatcagtttttgtagccataaatcctctagcaaattatcttgtcattataaattttattttaaatgattctctgaaagacacatgacttcttagttagaaaaagaaaaagtacttgmagtttgtttaaattcacttatcgagaaattgta

SEQ ID NO: 543059 - DNA, 623 bp, Homo sapiens
cttttttcagagaatcatattagaaaccaagtcacgagcctgaggtacccttaaggctactggggtgacattgcttccacatttcctaagctgatagaatatggatacatacatacatacatatgtgtgtgattatgtgttttgtgaactaactcatgtatatacttatgtctataataattatttctgtaattatctgtatctatattaagcaaatcatgattttatgctgtgtctccaagtctaacacttatcatatagattattctcactcttctctttgcttatctgtatatgcccactccaagagtggaaaacatggttcttagcacacatatccaattacttaatttattccaatacacatgatgtatatcaatatccaaattgttcacttgygcctccatcaaaaataactttatcaactataatacagtactagtgtgctgtttcttttgcctttagtcttagcatctccactcatctccaaagttgcttagctaagcattttcctgctcttccctcccccatcttaactacagttaactccccctcaccttaactgcagttgtttcatgtatagtcactcatcacttaatgacagagatacagtctgagaaatt

SEQ ID NO: 543060 - DNA, 623 bp, Homo sapiens
cttttttcagagaatcatattagaaaccaagtcacgagcctgaggtacccttaaggctactggggtgacattgcttccacatttcctaagctgatagaatatggatacatacatacatacatatgtgtgtgattatgtgttttgtgaactaactcatgtatatacttatgtctataataattatttctgtaattatctgtatctatattaagcaaatcatgattttatgctgtgtctccaagtctaacacttatcatatagattattctcactcttctctttgcttatctgtatatgcccactccaagagtggaaaacatggttcttagcacacatatccaattacttaatttattccaatacacatgatgtatatcaatatccaaattgttcacttgcgcctccatcaaaaataactttatcaactataatacagtactagtgtgctgtttcttttgcctttagtcttagcatctccactcatctccaaagttgcttagctaagcattttcctgctcttccctcccccatcttaactacagttaactccscctcaccttaactgcagttgtttcatgtatagtcactcatcacttaatgacagagatacagtctgagaaatt

SEQ ID NO: 543061 - DNA, 439 bp, Homo sapiens
tggtctcgaactcctggcctcatgtgatccatccgcctcggcctcccaaaatgctgggattacaggtgtgagcccctactcccggccttcacctttaatttttaaccctactaagttcagtgagcagtcaaaggtcttgtgtgmgaacgagatgtagagaggtgcaaattcaaacaataaaaacaaatgattttgtaaactcaaataaagcaaatcaaagaaagtaaaacattgttccgaactgaagcaaacctagggattgatacattgtatagcacgatgatgtgcagcaaacaatgtcagagtacatatttcaccttagttctcattgatgtgtctctgatgcataagaataaaacagagcaagaaatagaggaaatgaatgcaaatgtagtgtggaaaggtgaggaagaatttattagccatatttcatgtaggc

SEQ ID NO: 543062 - DNA, 668 bp, Homo sapiens
gaaaatccctaattcattcttgataccctctctcaagcacttcaaggataaaatgagttttgctgagatagaattatctttgggtgggtgtgactgggacacagcttgaacatacctaaggtctcagaatattctgcaccttgacctgtgtgccaattaccttgacattttacatggttaaaatttattgagtttacaattatgtattttttctgtatgcttcttatcttaaaaacctttttacatgggatttgtgaattgactttcataaacacaacgtatttggtttgagggtcaaagtgcaagctgtagaggactaataaacatccaagattgcgtgccaattaaaatacaggaagcccagttaaattggaatttcgataaataccaacattatttttcctgtaagyatgctccaaatatttcatgaacatacttataataaagagtatttaactaagtgtcctacaaatcctgtacattttgtttgctaagtcaggtaatcttaatcggaagtaatccacaatcactgtaaatcagcaataaaatattgcatttttgctttttacagttatatagtatttgccacctatcttgaaacagctcacattttccttgtaatactatgaagctgttataaatctactctagctagagaaatttgcaag

SEQ ID NO: 543063 - DNA, 561 bp, Homo sapiens
tgcatttttaaacagaccgtttccatttgataagtgaatcttattgaaccctttgtctcttgttaattattgagtctgattgtacccaccccacagccagaacatcaggttagagagtcccaagacctccatggatcaggaatttgcttctgagaaggaaagtaaaagtgatcttcaaaatcaatgtgacaagtgactgtgtcatggaggtgaggcatcagaaacccaaagacatctttgggtgctactaaaacttctatccaaatggctctttctgacaagaaccagcacttgcagtattggaagtatacacatagagcaaatcaattcctactacaccgtcaaggttgtaggccattgaaaaggacatcaaatcaaatcaaccctgctcatgggccctacctaaaagtttacattagctttccttccccattaatagtgatttggtcacctgtatcaacaaagccataaaatctgaatttcctcacgtctcccaagtttcccagcatgcttggatagatgtgaayggcttttagtcccgagtggggactgggacacctc

SEQ ID NO: 543064 - DNA, 469 bp, Homo sapiens
gatgtgaacggcttttagtcccsagtggggactgggacacctcagccaaagttttagtcatctttttgtttaaagccagagaggaagggggaaggatcagggcaaagaggaaagaaaggccctgtaaacagactgttgtggtgcagcttgtggcccagccacttgaacttacagacttttcagccaggtcttcatggccgacaccatgccagatgacacattcatccggagtggatggcattgcagtagaggagccctgcacttagggagccttggagatccctgaattcagcagccacagttgtactactttctggctggggccacggagtttgcaccctttggttgaatcaaacctaacttattcagatgcaactcattttctaaggagtgttttcacactgctataaagtactacctgagactgggtaatttataaaaaaaaaaaagaggtttaattgactgcaca

SEQ ID NO: 543065 - DNA, 602 bp, Homo sapiens
ttctcagggctgttctatctaaatcctctggtgagtcagtttcatatttcgttatctgtttcttgatatttcccacttttgagagtaatcctgtaccaacttttcttaygaattatgaaaagtatgattcatacttttacattatgaaaagtacgtatgattatttttcttacgaataatgaagcatctaactcaaaatagcttgaagaataaagaagaagaatttcttgagtcatgtgactaaaaagaccataaataatcatttgggcttcaagcagtattgactctaatccaattttacttctctgcttatctctcagctcaccctctttgtgtaatggttttgtataaaagccttactttgactttccttaggcattaggttgaaaagtaactactctcgtaataaacaggaatgaaggagccactaaaccattacaaatatccagtgctttagtccatccctgaattaattattgtggaaaataaaatctacaaattggcctaaggctgtaatttgtgtcaatcctttaaccaaatataaagacataggaccagaatcatacaaattgactcagatctgcgttgtccaatatgataac

SEQ ID NO: 543066 - DNA, 602 bp, Homo sapiens
ttctcagggctgttctatctaaatcctctggtgagtcagtttcatatttcgttatctgtttcttgatatttcccacttttgagagtaatcctgtaccaacttttcttatgaattatgaaaagtatgattcatacttttacattatgaaaagtacgtatgattatttttcttacgaataatgaagcatctaactcaaaatagcttgaagaataaagaagaagaatttcttgagtcatgtgactaaaaagaccataaataatcatttgggcttcaagcagtattgactctaatccaattttacttctctgcttatctctcagctcaccctctttgtgtaatggttttgtataaaagccttactttgactttccttaggcattaggttgaaaagtaactactctcrtaataaacaggaatgaaggagccactaaaccattacaaatatccagtgctttagtccatccctgaattaattattgtggaaaataaaatctacaaattggcctaaggctgtaatttgtgtcaatcctttaaccaaatataaagacataggaccagaatcatacaaattgactcagatctgcgttgtccaatatgataac

SEQ ID NO: 543067 - DNA, 628 bp, Homo sapiens
aaattggccttgtatgtgactttgtgccttccgtctaaccttctgtctgattatgctacccaaggcttctgaatcctaccctatgggggcttgtaacctgctgcctcccatcagcctcccatctccaggcattcatagatccctgggggccctgtggtggtaagaggtatgtgctgactgttaccccctctgcctggctggcagctggattgcagcctgcaagatcctgagctgaggacccagtctgctgtgaccaggcctttatatcccagatcactgacttaattctaaatcccccaagtcagaggctgagattgttgctgaaatgctgtctgctcagcaaggactgatgtgggaactctgccaggctggatctgaaggtgacaggcaagccccaccttccatagactcccaacccwtggacactgtgagataataaacacaggttgttgtaagctggtaaatatctgataatttgttatccagcaatagaaaaagagccaccatattcgagctttctgctgcctcctctggccaggctgtcttgtttgtatgtgacctggtccccccagtgtcatgttctatcctcccagggcagaatgtccttccagcagctgctctggagtct

SEQ ID NO: 543068 - DNA, 473 bp, Homo sapiens
ctattatcaagtgtttccagaaacttggctgtgtagaggtggaaagagacagggcggagctgcaggggtgaggggtgtggagggacaactcagagtcaatttcccttcctctcctttgactctgattggtttggtttccagatgtctaaaaaccgatgagaaagtcctttgcggggggagggggtagatataaagataaaatagatcattcaaaggggaaaagggctaatccatacagtgagatttccgagaaggcagcaggggtggggcagggaggcccagagcgcaggtggagagtgagcctggtgtggagttagccacttctccccagaggaaggcaaggatgtggagggtgaaagcgggmtcgcagacacggtaggagaaagacaggcacagccatctggtagcttctattttctctgtgaagtgggatgctcagtcatcggctgagagggaggaggaggagcgggcag

SEQ ID NO: 543069 - DNA, 550 bp, Homo sapiens
aagaaaatttgatgttagacatctagcttccagaactgtgagataataattgcttattgatttaagccamacagtttgtgttagtttgtcacagcagccttaggaaatgaataaacaatcgtttaattatatgtgactagaaatactaaaaactagctttagaaaaaaatcaaaaatagaatcaggccagtaaatgacagagttataattaccagaataaccataaaatatgtgttcaataaaatatatgatattttggaaagtttttaatcagagaattaaagttgattaaaaggtcacatgtaaagtccagaataaatacgtatataatacatattctgcatccagaatacacacacacacgcagacatggacacacacattattatgcaaataactaattttaaacacatattggaatcaaatgaggagaaaatcagttaattgtagaaagctcagtggaaaagattcaatctgaacaatggactattaaaggactagttcattaatattaaaaatagcttaaaagttgtatgtataggagtcaata

SEQ ID NO: 543070 - DNA, 631 bp, Homo sapiens
gtgtttgaattggcatacaaagtcattctgataatgatagaatttgtgtaatagttttcatgtgaaagctgagactaagataagcgcttgcatgcaccatgcatcatagcagttctcctaacacatatctgtccagaaaaaccaggatttagaaacaataacaaatttgttcaatggatgttgtatgttttcatggctcttttttacaaatgaggtcagtgtatgtgtaattagattaactcacttcagtatgcttatctcatggtaacacaaaatatagattcaggaaaatcaactactcttattcattaaaacattaagttcagttgtgtaatatttacagttatgcctcaaaattatgggaaaacaaggggaaacgttgttccttaatgtaccaaatagcagacaacataaacccctcagttcactgtgacacagtttccyaattaccctacttgatatatttttgcactccattttaacttacaaatagtatgatacatattcttctcaagatataaatcaattgaaatatgtgataactctatacagtttaattttttttaaagcaaatggtagcagtattaaactgtatttatttaaataatttaagaattgagagctttaatgt

SEQ ID NO: 543071 - DNA, 558 bp, Homo sapiens
aaggcaactaggcaagtcatgcataaaaagtgacttcagacatcacccaaggaaggagaaaaatgatgaaaccatagaaacaccactaggtctcagatgctcttaattcaccagtatccctgccttgaaaacaaatgcagccttttgaagtttggtcattggaaaggtccaagcaaagctgaatgaatttattttaagaaagttgtatatcagatgttgcattaagtagaggtttgagctggatgacacataaatcacatgmaatccaaagagtctataattatttgtatacgtacatatatgtccagagacagtatgcttactgattaaattttgtttcaaaatgcaaattcaactaaagctttattttatcacatgtaaatagctgtaattctctaaatcacacattgcttcttagaaacttctgagtaatttctgattctttgaacagtcccttaacagtcttatatattattccattttacagatgagagcatcagagacaataaccaaggtcttatagataccaagtgaggaatctgggattagaagtcagtc

SEQ ID NO: 543072 - DNA, 637 bp, Homo sapiens
ggcatatttgatattcagtacaactatcacattggacctttaacctgtgggataagagctatcgtagtgagggaagaccaggtggagaactttcacatgctctcccctgcctcatccaaattaatgaatcaaaacaatattaaatcctggggactgggagtggtggaaattaatactgtcctaaagattctaaatgacacaggggtgatgtttcacatcatatctccatttaatccccagtttggaccctgaagaaactagatggatcttggaagatgacagcatgctatcataaactgaaatcaagtagtagtgctaattgtagccaccacaccacatgtgacatctgtgctcaagcagatgacatgccctcaggcacgtggtatgcagacattgatctggcaaatttattctctttttcctgtcagaaaagaaaaacagaaacagttttagttgtgaaaaggacaagagtatacatttaacagttttgcctcagtggtataactgccattctgtcatgatatggtttgaagagatatgaactgttatatcaataatatcaaccatttaatatgtacatcaaatatkcactgggtagtgagcattctaagatgttgtcatagactgctgaagtccc

SEQ ID NO: 543073 - DNA, 593 bp, Homo sapiens
gctgctgtctggttagtggaactaacaatttccttgatggaaattgaataaggtaatccaaaaagaaggctcttttagatgaaaaaacatggatagattattaagcgccaagttttctcttcaacctactgctcaccagtgctccctcctcagctccaaggctgtggagggctcatgaagtcacaatgttctactgagaatttagcttttttttttttttgggagtgggttatcccattggatacatcccacatgaataagggcattctgataattggatcatgacttcattatttgtatacaatgcagcaagaattttgtttttaatgtaggcttttaaatgggctttgatggaacttggtyccatagaaggaatcccagataaggctttttaaaagccgagcccagccatggattcataccatcaaatacctatgagttaggtgaattcctctcgaggttccaagaatctatacaaagaatgtgtttattttgtatgggttcagcacaactcagttcctctttctcattttctgaaacttgaactgctctagtcttacccgtgtgtatagacctggactttgaggttggac

SEQ ID NO: 543074 - DNA, 607 bp, Homo sapiens
ctcttctctctgccagtggagccagggattttttatgggctcaggatgggaggcagggcaggccatgggtggttttggaaaaggcaacattcgagtgggaaaacagggatgtaaattctccctttggaccatggtatcaggcttttcagcttgagggtggggccctcactgggacccaccctcttctgcccagaatttccctgtctcctgtccctatcagtgacatraaactgaaaacaatctgaatgctcattaatagggagaaggttgaataaactataatatagccataacatggaattttacttagctatttttaaaaatgaattaaatttgtatccatttatctggagattatccttcatgtactatcaagagagaaaaacaagttgtgaaaaaatacatgctgtatgattggattttttttgcaaacaacagtaacaaaacacccttatttaagatatatatgaatatatatgtgcatgtgtttataggagcttggagaaacatgtagaagaatgcataccaagtgttaacattggttacccttggagggacaggaataaaaaagggtaggggaaaatgttcaacgacaaaaaataagaac

SEQ ID NO: 543075 - DNA, 564 bp, Homo sapiens
ccatgactggagactaaaaataggggtgtgtctgacagcccattcccacccctggcacccaagccagtccactcggccacagggagcggggaaaagggttgtttagaagaattttcttagcctcgaatacatgtgttgagcttatggtatgttttgtaaaagcagatcccagccctcrtttcaagggctctttaagatttccttaggagaatctcaaagagaatggcaaaaatgcctaagtttcacaaaatacaaccttgaattcactttaaacaaaggaaaaagtctagttttaggaaagaagggagagtgtgttttacatgtaacaacaaattgttttttcaaagtgctgggtacagaagaggtatgaattgaagtttaatttgaaaagattggatatcagcattctgagattacagaaaattcaacgcgtgactcctcaggttcagtgcgtgctcttagacataggtgaagggaagcaaaagttcctattggaatactaccactcacctccttcccaactcccattgccccctccaccagtaacatacctgtgtaccttac

SEQ ID NO: 543076 - DNA, 316 bp, Homo sapiens
ttttttttttttttggagagcaaatgggtcctcagttaacttgactgcctgacagttgaccaaaawtctgctcaaggctcaagttttagcctgtaagactttgtactcaacctcaaacagctgtctgagcactcaaaaggctctttttattttttctataccttactttgtttctttttggggtgagggaacgcttctttcagatcacgatcatagggagattattggattccttgttgggagatagtaagaaccctagttctgctactgacttgatatgtggctttaagcaagacttgacttcactctggctaga

SEQ ID NO: 543077 - DNA, 633 bp, Homo sapiens
aaaaaaaaatccacggttaccatcatacttaatggtgaaagactgaatattttccccctaagatcatgaacaaggtgaggacgtctacttttaccattactattcaacacagcactggaagttttagccactgcaatcaaccaagaaaataaatgtaagacatacaaatcagaaagaaaaaataaggctttctttatttacagataacatgattgtttacatagaaaatctcaaggaaactattaaaaatctcttagaacttagaataaacaccagtttggagtgtctaattaacctctccaaaggaggcaaccagatacgcacttgatcaggtgcggtttaagtaataagtatgcaagacttattctacatttgaaaatcaatcaatgtgatccaccgtatcaacaagctaaatgattagcagtaactgtagayttttttacagcggtgctttatcaaatggagaatgagttcaacaaaattgcagaatacaagataaacacacaaaaatgaattgcatttgtgtgtactaacaaataacatatagaaactgaaattaataacacaatattatttaagatcactccaaatacaattaaatacttaggtatgtacttaacaaaacatgtacag

SEQ ID NO: 543078 - DNA, 484 bp, Homo sapiens
gtatctttttaggaagataaatctatgaggatgtctatgcaatgcaaacaaatcatatttcactgcataactgaacatatggagattaggaacctcataaattgaattttaaatgaactgaccttattggatccttgacaaaagggaaaaagaatgtaccaacaagaatggaaatatattaatggattagatttatcacgagtatcaaataaaataaaatatactctcagataaaaaatatgataatatacagtaattcatattctactggttagtttaccattgacctcttccctctcatacttcccattataaaaatagtgtgcagttattcaagagrtgttgttcagtgtcaggcactgtgctaggtactggatatcgtaagtatgatgaagaaaaaagacaaaggtgctgttctaaaggcacttgctgtaaaatggaactgccagcaaataagacattaaaatcaggtgcaaccatcata

SEQ ID NO: 543079 - DNA, 468 bp, Homo sapiens
atatttgtctttctgttctggtctcctattttagtcctgtagtcagctaagacttgcagactccagactcttaacctttacatgtaacatttattttctgggtgtttcttgctttgtttatttttctttcatttgtttttgttgttgaatcataattactactcacgtgacagacatagacttttcttcttacttatccagggttaatgttggattcaatgtgatatatcttcataatttacttgcccacctaaagaacatctttcacaaacatttctattaaaaaaacaattcttcgtctcttcctgtatgatcactgctgttctgtacgttcccattacttaaaacttagcagcaatttgcctttaaaaaaatttttttaactaggctttcctctaaatctagcacttcagataycttctttaccaggaagagagctcactcagagcactagtgctaactgctcag

SEQ ID NO: 543080 - DNA, 524 bp, Homo sapiens
atatcagaggtggaggaagtctatagcatcttcagctctagccctatactctctattttatacagagaagcaagagatctggaaaaggggcagaacctactcagatcctgatctctagacccatggttcagaactattttaactgtgccatacagcttcaaataatccaaaacgaaaaatgtaacagacaagagagcaatgaaatgtgttacctgatcttaacatatcaggtaaaatatctactaaatggagtagcatgaagataggttacaaagagasgaatggaaacaggatgcaaaaatagattgaatggtttggctctgtgtccccacccaaatctcatctcaaattgtaatctccacgtgtcatttatccttatggttggttattgattgaactttatctctgtgatcttattatgaacgattttgctctctctggatggcagtagtcttaaatagacatatattttatgaaaaaaatgttattttttaacctactccttcataaagaagtggagaaaa

SEQ ID NO: 543081 - DNA, 522 bp, Homo sapiens
ccctgcagtgactggcataaaggtcggatggggacaggagcacaagaacaagatggggtgagacagsaaagatagttggacgtctccatgaatatgttagcctaggatgtctctgaagctggttgatggtgacctttccttttagatttgaaattcaggcttcagtgacttcaggcccatattttatatgttatacattaacagaatgctactggaaggagagacccgagccaggggggtctgtgaagtgcatgcttagttagcgagtagctgaaaaacattaattaaaaaccaggatacctaactcattgccggtggagtgagagtgtttaaaatctctaagactgagggaaaatagccgtggtaaaggggttcagcgggaccttacctggcaaccccatgtgctccctcgccctgtggacgtgatcctggctaaagggcagggctgtttgagtctcgcttactgattttagaaatacagcacttttcctcaccttttctcttagcataggacaattcgtg

SEQ ID NO: 543082 - DNA, 485 bp, Homo sapiens
atcagaattctgttgaaagaacacatgagtcagagtcctaagcagtgaatacgaggataagctctgccattggctgaaggaaaactcgacgctaataatagcttaggcttggagtcagcctgtctagtgtgtgacctgaagcaagttactttatttctctaaagagcagttccttcatatgtattgtggggataattacagtacttgcctcacaagatagaacaagatgagataaatcgtgaaaagtttagcacaatacctagcacagagtaaatatctacacatgtaagctgtccttattacatgaggcagtggaagatgatttaaacttttaccatttaattattcaatgggaataataataataatacctgcastataggctgcaggaaaaaatgagatgaataaatgcacacataaagtgtcattatattgaaattaacatatggtcttcaacaggatgggactatgtttcttctttgttg

SEQ ID NO: 543083 - DNA, 559 bp, Homo sapiens
accaaattcttaacacaatttgcagactgtttgtactcaactctgtgtcttttaacaatagccctgttgcagggaaggatccagtggggaaggagggtgtaaaatctatggtttaacagctattgaaaggaagccaagaaaatagctccttccacactggcttttcccagcacctttcctcccaggcagcttgtgtctattggtgtctgcatcgataaagagaaattcttatttgtacctgatgttagactcatacctcttctgcggttgaacttgaggttttgcacmctgggcatgctgggctgtttctgtggtgacggccgctgcagctgcacctgacttccacctccatggctgacagaccctccagctgctggatgccactgtgacaaaattaaagtgctcgcatgaaatctagctagaaagtaatttcttctgaagaggtcctcagagcataattcctgactttaaaatttaaagagatcccatggcagaaatgattttcctagcatttctctgcaggcaggtaaaggaacttaagccctctccaaggggatgg

SEQ ID NO: 543084 - DNA, 433 bp, Homo sapiens
gtgctggggtatttatctggcagctccaattattccctaattgaggaaatctcctggacccttccccagcccttctggcctgcactgcatgtgggcagggcaggctctggcagccagacaaagccctcaggcaaagagctgaaggtactggcagttagaagttgggctgtcgtgccccgcagtggtgaaggccaggagagtgtggcagcacatgacagagtctgctacaagagagtctttccatgagcagaatttctgggtcatagggcacatatrtattcaaccattgcagatactgccaaacagtcttccaatctgttgtcccagtttgccctcccaccagcagcctaggagaactcccgcaaggctgtgtccttgccagctcttggtattgacttttacatttaagccattttgataggtgtttaatgtt

SEQ ID NO: 543085 - DNA, 533 bp, Homo sapiens
ggcagattaataagagaaaaataaaaagactatatatcaaagtttacattaccacaaccyaatttataaggccaaataaaaatatgttgctttttattattcacgagagcacgttcccaatataccctcattgacagataatatgaatgctacactgtcagtgatttccaatattttgcatagcagactgctgcttttcaaccaaggttccctaggctgcatactcctatgcaaaataaagtgtgcttggcagttgatttggctttatgtcaagcattttggtttgggaaatatgaaactggagaatgggtctttgaacccaagtataagaaagaacaagtttgcccaatcccctgcaactgaaaaatagttttgacatatagaggcctcagataattgaaggatttaaagaagatggttttcctaaagtgggtttcaaaacttcttcttatattaccttttagatggtagatggaacattgttgggcaggtaaaaattaagtgagagtcacctccaagtctagggagggaca

SEQ ID NO: 543086 - DNA, 654 bp, Homo sapiens
agttgaaattaccttctggagtcaaaacttaaaagtgcatagtttttcaraatcaaagcttctacccatgtgactctaaaaattgttaacagaatgaatttagaagtgacagaatgatggtatcatcccaacccaaattcctttcgtccagacttttgaaaaattagaacaaaacaaacagaagaccaagggagagaaagactagaaaaattggtttagccaattctcatttggctagtttgaaattggaagctagtacaagacaggggatgagggtgggggaagaagcccaatgttacaataggacttcaggcttgtagacatgttagtatatgcagagtctctttgatttagcagaagtgagtatccatgcctgggctgacatatgcagtcaaggccattatgtgtcacgacctctcccttagcctacaagttcctagaaggcagcaaccaggcctctgtagtattcctgactgattctttttggagccatggatacaatgaatgtttgggacaatgaggacaaatggcttcttgacgctttcagggaatctgtacacttcacagacaggttcggtgtctcagaaaagtgacctgtaaaggttaaatacagtattacaaatcataatgctaaaacatgagaacgtgtgttat

SEQ ID NO: 543087 - DNA, 454 bp, Homo sapiens
ccctctgacacccagactaaccggccctggccctgtccatcgcctacccatgggcagcacaaaggtatgtggtcagagtcgtgcagcaacgctcatcaagccagggatgattcccatccagaggggatgcaaagggaggcgggacagggtgagggattgtgtgagactggagaacatcatggaggacagaaaaggccccgtggtgtcctgtgctctcccttctctctcagcttggggagggaccttgccaccgactgcgtggtcagtaacagagtagcttccccggccagaaaggctgcttgtcacgcatcgtgcgttttccttctagtaacaaaagtctttggatatttggatgctgagcagtaatggggtgttggaagccagggcctttgtgctggtggggaggggaagcaaggagagagatggsggagggcccattcccgaacagagggta

SEQ ID NO: 543088 - DNA, 568 bp, Homo sapiens
tctgttgtcagagggccatcttttctccttttcagtttgagtgaacacaacagagacatctgcagagctctctgcagctctgacaaggttgccctgcctgccaaccctcagacttctaggcagcataattgaagagatcagaaaagaatattaacccgttgaccatcttgggctgaggtgtaatgaccaaaaagtcactttttaaggtgactgtgagtctttcttagtagaggaagacatgagattctctgtcagaagagtcaggccagtaggaagtgctatttcttggtagtgattgttcgtggggtttcagttcatctgagcacttggaagaggatgagaagttcattttcaaggtagacccagtgtttcatggtggggttacactgaagcctgaatgctgggtcacatcattcatgtctgatttggcttgtgtaatgacagtagtgctttggatgtgtgtagtttggatgagggttactstttttcttttaccgccaggcctgacactgcccttttagcgtaagattccagaatctcttatgcagtagcatggaatgtatggcca

SEQ ID NO: 543089 - DNA, 533 bp, Homo sapiens
ttatggcttaaggccaaatccaaccaacagcttctttttataaataaaattttactggaacactgtctgacctgtttatttacatattatgtatggttgatttagcgtaacaatggcagagttgggtgttttcaacagagaccacatggccagcaatgactaaaatattttctatctggtccttcaagaaaaatgtttggtgacctcagtgttagaagattgtttttaggtatttaatggtgccattctggaaaagttggcattgttggaagagttcaaattgatgyatgtgtagcctaagaaaaatggggccatatcacttcctatgaagaaacacaccaaaattttaattcaattcttaagttgttgtcttgattatctaagttctgtctctagtctcctatggctatttttgtggctttgaccctagctgacccagcctattgtcagtagttaagaaggtagattccaagtgctcaatgtcatgttaagacttccttgctacctactaagggaagtcatttttttagcca

SEQ ID NO: 543090 - DNA, 460 bp, Homo sapiens
ggacatccagcccagttcattcctcaaagtgggaatactgactggggaaccacctatggaaaagactacagtgaacatcacaagaaatgagaggatgatggctcagttcatgggaacagcattcttcttggaccttaactcattagtaaatgtccttggtaaaaattaattaattaattaatttwaaaaagcagcaaataatttctggccaactgatgcccacgcatctcctctctcataagtgaacaaatacttcttcccctctgagggactccacagtgtcacattctccaggagattaacctcatgtagttattagcagtcacctgagaatttcacattaaccagtcctcggaagacagtggcacatcatggataagagcctagcacaatgactggaattttgggaagtggtcaataactaccattaagagctattctgctttgtagctcactagtc

SEQ ID NO: 543091 - DNA, 539 bp, Homo sapiens
cactggtctctccagtgcacacactgcctaccttgggggctttgcacatgtgattttctctgactgcagcattcttcctggtttttcccttggttagatccaattcacctctcagttcaaacagcacttcctcagggcagcatttcctaactgcccttyctccctgagaccagactggtcccctttttaggggtgcttagagatgctggaacttatcctttgtggcattattccagcttgtaatgataaatttattttagaatttgaataggacctgtctcaccaccacacacacacgcacacacacacacgcacacacacacacgcacacacacacacgcacacacgccactgtatccagcaggcagcatgattcctggcatatgtggatgctcaagaaacatgtgctgaatgagtgaatgcaggtgatatgccctgaaccctcaggaacacccttaaacctcactgcctcgccgtcatcccaacttccttactgcgttttcacacgctgaccaaagtccagacaaggctactatgtc

SEQ ID NO: 543092 - DNA, 454 bp, Homo sapiens
actggtctctccagtgcacacactgcctaccttgggggctttgcacatgtgattttctctgactgcagcattcttcctggtttttcccttggttagatccaattcacctctcagttcaaacagcacttcctcagggcagcatttcctaactgccctttctccctgagaccagactggtcccctttttaggggtgcttagagatgctggaayttatcctttgtggcattattccagcttgtaatgataaatttattttagaatttgaataggacctgtctcaccaccacacacacacgcacacacacacacgcacacacacacacgcacacacacacacgcacacacgccactgtatccagcaggcagcatgattcctggcatatgtggatgctcaagaaacatgtgctgaatgagtgaatgcaggtgatatgccctgaaccctcaggaacaccc

SEQ ID NO: 543093 - DNA, 454 bp, Homo sapiens
actggtctctccagtgcacacactgcctaccttgggggctttgcacatgtgattttctctgactgcagcattcttcctggtttttcccttggttagatccaattcacctctcagttcaaacagcacttcctcagggcagcatttcctaactgccctttctccctgagaccagactggtcccctttttaggggtgcttagagatgctggaacktatcctttgtggcattattccagcttgtaatgataaatttattttagaatttgaataggacctgtctcaccaccacacacacacgcacacacacacacgcacacacacacacgcacacacacacacgcacacacgccactgtatccagcaggcagcatgattcctggcatatgtggatgctcaagaaacatgtgctgaatgagtgaatgcaggtgatatgccctgaaccctcaggaacaccc

SEQ ID NO: 543094 - DNA, 621 bp, Homo sapiens
tggtcagataaaactgctattatcctagagagttctattaggggtctgtgatatatcatctccagaaatagctaccatcaattcctgccttccctgttcatatgtatcactccacattgagagacagagataatttcaccgccccccgcccccctccacctagaaagaggtcttccctggaaagagatcaggccactgtgcccaaccgaatgcagtggaagtgactttctgaaccctggccttaagaagaggataccttccacttacctcctcttggaatctagccaccatgtcatggcaagaccaagccaaaaagagaagccacatggagaagagcaagattcctgagtcaacagtcagmgcccactagcaatcatgtgagtgttccactttggagattccagcccaggggagccctcagatgactccagtgccagtcaacatcatgtagagaagctcccagtggagcgtagttaacatgcacaccttgaagatatgattaaatagttgctgttttaagctactaagccatcagttatgtttgttttgcagaaacgggtaacagaaactgagtctaaagactggcttttcatctttcagtgctattgattaggatgcaat

SEQ ID NO: 543095 - DNA, 606 bp, Homo sapiens
agtatattgtttgtagcatttctttttctaagtactctacatatccacccagtgtttttcaagagttacccccaagttaaagctgtcaatagccctttatttcccacaggataaaatctgaacatatagactttatgcacaaagtccctcatgatttattctattcatctttcctctctgcctctattttttcgctggagcttctctcgtacatttaaggttggtgaaaaagtcattgcagtttttgccattacttttaatagaatgagtcattgcaccaactgttgtctgaaactctccttctatttcaggctttcatgattttgacatttgttcctttcttttagaatgcgtgcctacctggtagtttcttccttttcttctgtgaagcctcttctcatgtgtcaccttccctgtgatggtctctctgactattcaggtgtcaggaaatcctccattcctgttgctctcacacccctatcycccatctccctctaatgctattgttgctctcacaccccatcccccatctccctctaatgctatcacatgtttataggtgtgtcttatccacttgatgaataaccactggggacaaaggcttat

SEQ ID NO: 543096 - DNA, 537 bp, Homo sapiens
ctgcatatttttaatgcacacaaggggaaataaaggcagcagatggttttatgtaatcttcctatgaattttgaactgagagtcctcattcatgaagacttgaaaaggttttgttgttttttttctttttttacacgtcctctgtgggtcaagccaaccagctctggacatgccctggtgaggctgtgtgtgtttgcctctgccagggcagggaagctgagaggagcctgcttgccttcttctggcctggtttccactccgtgttctttcttgtggttctttgtctgtgaacacacgagtggtcctcaacrttctcagtgttcacaatggaaaactcaaggcaaactcatgaatccttcataggcataggtgtgctgtgaaaatctgaaccttatgttcagtcttatgtttgaaatgactgaggatctgtgctatggcagggacatctgtcagcgagagggtcaaggggaacaggtggggcagatgcaccagtgtaagagaaaagataacagttcccacttttaagtgagagcatgc

SEQ ID NO: 543097 - DNA, 628 bp, Homo sapiens
ttccaggatatatgcactgaaaggggaaatgagggggccagaagcatggcctacatttatagagtgctcaataagtgttagctgttattaagaacctattctgtgctagatatatgctaagcacataaacgtcatttcactccatctttataaaaccttgggatatgacttakttctcagattttataggtgaggaaactggggcctccctagaccagactggcagagttgtttccttacagcataagttaatgaaaagacaagtcagcaaactttggaaaataatttggcattatctagtaaagctagagataccaggcctatgaacctctaattcctttctgaggtatatacccaacacatcagcattctcaaaagacttgtacaaaaatgtccatagcaccatcatttgtaacagtcaaacacgggaaataacccaaacccctcttaacagtagaatcgataacttctggatacctggatgatggggtatcacaaaggaacacactggaactatccacaatttggatgactcttaaaaagatgacattgagcaaagagggtcagatacagagagatatgtattggatgattctatttgtatgaaaaatgaaaacaggcaaaacag

SEQ ID NO: 543098 - DNA, 535 bp, Homo sapiens
ttcccaatgggctcctgcacactgcctgggagccaggagggagaccttccaggacctgccacctggtgccagggaggggtgagcccgcaaacccaacaactagaccagatgggtgactgggcagccagggaatgtggaggaggactcgaaggctgtccagagcttgccatttcatctctctcagacctagtttcctcatctgcaaaatcaggctaaagaaaattaaataagttttgggattccggtggagctagaaaataatacttatcttcctggcctaaaatcaaaattaattaagacatagaggagtcagacagataacaataataataaataaataaataaataaataataacagcaaatactttatagcatcatgaccactagttaagcattaatacttatttagtatttcctatttgtcaaactctgttctaagccctttatgatgttaactaatacaacatttctataaggtaggtactattcttagccccatttkatggatgaagaaaccaaggcactgaaagttta

SEQ ID NO: 543099 - DNA, 575 bp, Homo sapiens
atttttataatatttaataatgatcacgatcatcaccttaaagttacgaaaatgagtaatatgaatggatccatgtactggtgaatggactagaccggtagctgatggacaaacaggcccactgcttctaaatgctgtccaaacatgtccccagaagacagagacaagrtccctcctgtctggctgcaatagccttcatacattcacacagtttgatcctcctggtgttttctttaatctagtaacagtcagaataaaacctgaaaaggattttcttctgcacagttatgcctttcttcccaatccaaacacaactgcatgcctggccccttgaaatgctccaaaacaaaacaagaaagcccagccaaatccctcatcgtgttttatgttattttcttggctgtacaaacttaggaaccctttgtttcttctgctccgtccttggacttttccttcccacattcacctctgtccagagctgctatatcagcagcaagggctcccagctagcagagggggagaggggtactctgagggaacgcaagctggaactgattaaccatctcagacttcag

SEQ ID NO: 543100 - DNA, 648 bp, Homo sapiens
attccagctgtcccacttcccaactatgactacaggcaagttcctgaatctctcagagctgcacttcctctatttcagcacggcggaaagatgcctaacttgcattgctcttccatcagtgatagtgtagccaggcatgcttagccttgcggtctacccgtgacagatagataaacagatgatagttagatagatagatagatagatagatagatagatagatagatagatagagagatagatagatagatgatagatagatagatagatagatagatagatagatagatactgaccttttgcaactttatgctatggtttaataagtggtgctagatgatgctaaaggtacaacagactttcacatcctactgcttcaaaggagtggtccagcttatttaacagcctcatcttaaaactacatgtagcagagacaacaccctaaacttaggtctatagcttaaacctttattcacaattaatgtatgacccaagtttaactgttcatagcwtatacaaaaacagggttgtttggttaacagaaaggaaagctttatgccaagacacctccctcccacaaaaagagaagaaaatgccacttggaagcgaatttaataaagatatgttaagttgggcacatctgcttcc

SEQ ID NO: 543101 - DNA, 590 bp, Homo sapiens
gcggaaattagaagcaaaaatgatcaacgaggaaagcgactaccacgacttggagttggtggttcagcaggtggagcagaacctggagctgatgaccaaacgggctgtaaaggcagaaaaccatgtcgtgaaactgaaacaggaaatcagtttgctgcaggcgcaggtctccagcttccagcgagagaatgaagccttgcggtgcgaccagggggccagcctgacagtggtgaagcagaacgccgacgtggccttgcagaacctctgggtggtcatgaacagcgcacaggcttccattaagcaactggtttccrgagctgagatactgaatcttgctgccgaaatccttaaatctgtagacagaatttctgaaattaaagacgaggaggaagactctagaggacccctgggtgttctcagcatgaagctccgtgtatgccctgagatcaccactgcttgatctaaatgtgcagttgtgtccttaaatatgcagccttcacccagagtaaagtgtttatcccaagagtccagtgtcgtgccctcagccagttcttggccaccgcaatgggagcagccctggccgagttgcc

SEQ ID NO: 543102 - DNA, 590 bp, Homo sapiens
gcggaaattagaagcaaaaatgatcaacgaggaaagcgactaccacgacttggagttggtggttcagcaggtggagcagaacctggagctgatgaccaaacgggctgtaaaggcagaaaaccatgtcgtgaaactgaaacaggaaatcagtttgctgcaggcgcaggtctccagcttccagcgagagaatgaagccttgcggtgcgaccagggggccagcctgacagtggtgaagcagaacgccgacgtggccttgcagaacctctgggtggtcatgaacagcgcacaggcttccattaagcaactggtttccagagctgagayactgaatcttgctgccgaaatccttaaatctgtagacagaatttctgaaattaaagacgaggaggaagactctagaggacccctgggtgttctcagcatgaagctccgtgtatgccctgagatcaccactgcttgatctaaatgtgcagttgtgtccttaaatatgcagccttcacccagagtaaagtgtttatcccaagagtccagtgtcgtgccctcagccagttcttggccaccgcaatgggagcagccctggccgagttgcc

SEQ ID NO: 543103 - DNA, 479 bp, Homo sapiens
gtctgggtcctgccctcagacaccatgttgtactgtaatttgtctgggaagtagcctggtttcaggactcaaagctcgctaggtaattccaatacacagcaacattcaaggacagaaacactgcctcagaccttatttcactccacccatgaaaataatactgtctgggaaaagatgccagctcagtgggctggaacctaagagatacttagtaaaggacacaaacctcaggtacccttcctgaagagaccttggttacatgtgaactcagatgcaggyacccgattacccagaactgtactgaatcccacagtcttctcctgagtacccagatgttccatgctgcacgcagagctcaatcctaaggacatcacctgtgctaacagcagcagttaggagaggattttcaggaaatgatcaaataaaacttgattttttttttttttttttttttttgagaaggagtctcgctctgtcgc

SEQ ID NO: 543104 - DNA, 476 bp, Homo sapiens
tgcatgagactcgttcaggagacatctgcaatgcctgtgtcctgcttgtgaaaagatggaagaagttgccagcaggatcaaaaaaaaaaactggaatcatgtggtagatgcaagggytggacccagtctaaagactacattgaaaccaaagaaagtgaaaactctatctgggaacaggataaaaagcaaccagatcagtaaactgcagaaggaatttaaacgtcataattctgatgctcacaataccacctcaagtgcctccccagctccatctcctcgttacagtaaccagtcagatgacggctcagatacagagatggcttctggttctaacagaacaccagttttttcctttttagatctcacatactggaaaagacagaagatatgttgtgggatcaactataaaggccgttttggggaagtcctcattgacacacatcccttcaagccttgctgcagcaataagaaagcag

SEQ ID NO: 543105 - DNA, 530 bp, Homo sapiens
aactgaagtaatccagagctgaaactgaattgtaaagattttcaatgaagtcacagaacacaaacaaaagtcgattatatttacacactcagcaagccctctaagaaatgtgccccaagaagcattaacctttgttttgtgccatcctgaggacttgtacattttatttttcagatagcttaacatttttaatcgagtgtgttctctaccatgyggtaatgctttggtactattcatacagggtctcgcctgtcctaaagacttgccatttccccaagaggagctttgattctgctttagaagttttacaaaaattaaaatctttatcaaatattaatatgaagggaggcacaggatgcaacatatatagtcaagttacctctctgtatatttagaagttactttctcctccaaggtatttgcaacagaaagctcagtctgtcctgcttaataatcagtagtacaggtttgaatcatcacaagcttggcaagaccttaatatttcaaaatcattaacaactacctctagg

SEQ ID NO: 543106 - DNA, 645 bp, Homo sapiens
ctgcgtttcaccaggggcaaaaagctcctttcctcctctctttcctcctcgccacttgcccttccccggggccacgaggaacaagtgcaagtgtaggcggctgtctctaggagaaagtcattgtcgcggcagaaggggcaggagagagccccggggaccgcctggactcccagcgcttccagagacggccccacaagggcccctgtgttcaggagcctagaaaatcttgtaacatttaaataatcgatattgtgggaggtggggataggagaataggagttagtccgctcctttttttcattcattcattcgcactccccaccccgatacatacagctccatcgtaagttttcaggccagcgccccggccccatgctttttctaaatctaaacrgagaacccagtcactgcccagagcccgaagtctgtgtgggccatactgctgttgcatcagacgattatacgccccccccaccttttaagttactttcattttatagagctcctggggcgtgcgaaggaagtggtgcattgcaaatgtgaccatgcctaagttggtaacaggctgctgtctctggcgcttgtgtgggatggaaaaagctttgtctaccttttgtgatgtcttaggattctgaccttgtttct

SEQ ID NO: 543107 - DNA, 501 bp, Homo sapiens
gcaagatctcggctcactgcaagctccacctcctgggttcacgccatcctcctgcctcagcctcccgagtagctgggactacaggtgcccgccaccacggccggctaatttttttttttttgtatttttagtagagacaggatttcacygtgttagccaggatggtctcgatctcctgacctcgtgatctgcccgcctcggcctcccaaagtgctgggattacaggcgtgagccaccgcacccggcctaggggtgcaatcattcttatatttgctggagatgtagccagggctcaggagctgagcagagcccatcagtgcactgtggagcacagcctgttggagtccttgggctggggccactggacaaagtgctgccactgcagcccctgccagggtggcatttctgtggccttatcatctgtttctgtttcttgtcccatccctgagctgaggctggagctgcagaccctggtccagtagccatggacagaggcagcag

SEQ ID NO: 543108 - DNA, 520 bp, Homo sapiens
aaatgtatttctctaagtcaggcacagaaagataaataccacatgctctcactcatatgggggagctaaaaaaaaaaaaaaaaagttgagctcacagaagtagagagtgaaactgtggttattagaggctgggaaagataagggggaggggagccagggagaggttgattaacagatccaaagttactgctagataggaggaaagagttctagtgcgctaaagctctgtaaggtgaatatatttaacagcaatttattgtatgttttatagaagctagaagagaggattctgaatgttcccaacacaaagaaatgataaatgtttgaggtgatggatatgctaattaccctgatttgatcattacacattgttacaggtatcacaatgtcactctgtatcycataaacatatacaattgtatggcaactaaaaagaaaaacgaaacaataaataaacagatagaagcatggagcctggagttcaggctgtggactggcccgccttgccaccctgtggatt

SEQ ID NO: 543109 - DNA, 650 bp, Homo sapiens
tggctcccttcagggacttctgcaagctattctgcccctcagttttctcttctgtaaaacgggagcagcagggagttctcacagtcagcacatttttgagagtttgagagtggtggtgctcacatcttaactcctcaaaagaatggaaggtggaaaaaagctgggccacaacaacctccatcaacctcatttgctttgccctgggctgagctcagcctgccccatgaggcagaaatcataaccatgaccctgaggcataaaggaaaaagcctgttcaagaatgccgtcctgggaggctcctctggggtcattcaggagtaggctttattttctkggttttctctagcgaagacaggagcagcaaagcctgagttactggcactgcttctccaagaatctgcccatatgggagctaggatgggcatagaggtagaacaaccctcactggatatagtttgtgaccttgaagtgatccaactctaattgtattgataacaggtactatgtggcttagggctcgatgtgctctttcttttcgagtatgttctgtctccccagttagattgtcaacttgtagagagcagagacattgctatatttatggtattgtccacagggcccatccaagtgctgggctcagccgacattgc

SEQ ID NO: 543110 - DNA, 650 bp, Homo sapiens
tggctcccttcagggacttctgcaagctattctgcccctcagttttctcttctgtaaaacgggagcagcagggagttctcacagtcagcacatttttgagagtttgagagtggtggtgctcacatcttaactcctcaaaagaatggaaggtggaaaaaagctgggccacaacaacctccatcaacctcatttgctttgccctgggctgagctcagcctgccccatgaggcagaaatcataaccatgaccctgaggcataaaggaaaaagcctgttcaagaatgccgtcctgggaggctcctctggggtcattcaggagtaggctttattttcttggttttctctagmgaagacaggagcagcaaagcctgagttactggcactgcttctccaagaatctgcccatatgggagctaggatgggcatagaggtagaacaaccctcactggatatagtttgtgaccttgaagtgatccaactctaattgtattgataacaggtactatgtggcttagggctcgatgtgctctttcttttcgagtatgttctgtctccccagttagattgtcaacttgtagagagcagagacattgctatatttatggtattgtccacagggcccatccaagtgctgggctcagccgacattgc

SEQ ID NO: 543111 - DNA, 650 bp, Homo sapiens
tggctcccttcagggacttctgcaagctattctgcccctcagttttctcttctgtaaaacgggagcagcagggagttctcacagtcagcacatttttgagagtttgagagtggtggtgctcacatcttaactcctcaaaagaatggaaggtggaaaaaagctgggccacaacaacctccatcaacctcatttgctttgccctgggctgagctcagcctgccccatgaggcagaaatcataaccatgaccctgaggcataaaggaaaaagcctgttcaagaatgccgtcctgggaggctcctctggggtcattcaggagtaggctttattttcttggttttctctagcgaagacaggagcagcaaagcctgagttactggcactgcttctccaagaatctgcccatatgggagctaggatgggcatagagrtagaacaaccctcactggatatagtttgtgaccttgaagtgatccaactctaattgtattgataacaggtactatgtggcttagggctcgatgtgctctttcttttcgagtatgttctgtctccccagttagattgtcaacttgtagagagcagagacattgctatatttatggtattgtccacagggcccatccaagtgctgggctcagccgacattgc

SEQ ID NO: 543112 - DNA, 528 bp, Homo sapiens
acaacactacaaaattctgtttcttggattaagaccatagaatgcacctgcgggtaagtgttattactttttttttcctttgcgtacacctattaagcaaagagatattgtagtcattgattcctaaaaactctgttaataaccaacatcatcaggtgcatgcaagcagaaggtagttaaacgcaacctgctactgccaagaacagtcccctggagcctctcctacctaatcgtttactcttacaaatacacagacaagtcagygcagaactaatgtaaaacccagggggcaaaaagtaataggaagctcaactacttaagcttcctagatcgctggagaaaattacttctaaacaattacattacattttgttagtatcatcttctccaagccaagaaagagaacagtttttgattaataagcaaaagagaaattggaaattgtaaaactaaaatagtaaagtttaaattatgtttgtgaattaaataatagtctattctttttttctaagaccagcttattaaaga

SEQ ID NO: 543113 - DNA, 568 bp, Homo sapiens
acagctgtaggttttgaataatctgtcttttctccaaacacccttcatcataatggtagaaactcttcagtaataatatataataacgaatcttcmtacatagaatgaaatgcaacccagtctatagtggtaaacagtggttaccacactgccttggagtttgtgaagaagcatataaacccaggggccttgatggtggcagtcaactggggatacgccattatatttatcccaaaggttcatatttatggtataatggatcattttttctaaaaaaaatgctagatatttatgaactgctcaaacaacatttgttttataatcaatctttactcccgggctgggattgtacagatctcagtttaggttgagttgttgataaacacgcaagggaaacctgtctttcatgttctttgcctctatgtttttattagtgtatcaaaatgaattgtatgtatttatgctcagaatattcacaagtttttttaattctttaatttttaatttttaagatgcattggccagctattcaattttataagttgtaactttagaatatcttataaca

SEQ ID NO: 543114 - DNA, 568 bp, Homo sapiens
acagctgtaggttttgaataatctgtcttttctccaaacacccttcatcataatggtagaaactcttcagtaataatatataataacgaatcttcctacatagaatgaamtgcaacccagtctatagtggtaaacagtggttaccacactgccttggagtttgtgaagaagcatataaacccaggggccttgatggtggcagtcaactggggatacgccattatatttatcccaaaggttcatatttatggtataatggatcattttttctaaaaaaaatgctagatatttatgaactgctcaaacaacatttgttttataatcaatctttactcccgggctgggattgtacagatctcagtttaggttgagttgttgataaacacgcaagggaaacctgtctttcatgttctttgcctctatgtttttattagtgtatcaaaatgaattgtatgtatttatgctcagaatattcacaagtttttttaattctttaatttttaatttttaagatgcattggccagctattcaattttataagttgtaactttagaatatcttataaca

SEQ ID NO: 543115 - DNA, 584 bp, Homo sapiens
tgttggtttcctttttcagctcaaaccctttgcgggatagaggctcagtcttgggcatattacttttgagaacactctggcctacaatctttttgtcctggcttgtgggatgggtttcctgtgctgagataatcaaacctgaagctgctgcttccccatccactgtctttagctcctaaagtaaaaatgtcactcagagagaagcaggtcgatgccccacatcaccagagccatagttcagagattttgcccagggggaaagcaagcatcagaacacactgaaaaggtatgacctcatttgcaaatgtttacaaaagttcaagcctaagggtactcttaaaaacttatgggagttgtgagggaaaggcaagttaaagtagattgatagattctttgcaggtagacaccaaactgtatgtaggccaacragtttgccagagaaaaacagaaaagagacagctagaaacagccctcatctagtgaagacaaatttcaaatgctgaccttagaaactatctcttcaaaatagactggatttgattggattagtttgtaacctatggcatggttgaaatcaatagaca

SEQ ID NO: 543116 - DNA, 563 bp, Homo sapiens
cttttaaacaaccagatctggtgagaactctagcaagagaacagcaatagaaagatcatggtctttataaggaggaatatcagaatttgaattttaactcttttacttattaaatatagctgyggaccagtgtgtttatacttttacagcaattagaatagtgactaacagaaaaagttcaaataattttagctattaggattacttttaaacatttattcatatctttttctgtacatcctttaaaataatttcattgtaatggtcagtaatgaaataagtagtaatggattcattataatactgaaagtttacttaaacaataaatccatatttagacatacataaaagtggcaataaaagtttatttagctacaagaacattgagatgcacagtgagccaggaagtgtaccatatgccatgttacacctggatgctgtgtggtggcaccttaatcactcttctaatgtcattatagttcctgaatattggaagacatatggtattttgcctccttagtggcgcattttcatcctagcttggttgacagttatttactatt

SEQ ID NO: 543117 - DNA, 634 bp, Homo sapiens
tggcaatgagaccagctaagtcctcactgaaggctgaagctccaaatactgaaaaaagtcaattctaaggtatttattataggaaagaaaagttaaaggcaatcacttttaataaattcccaaaccaaatcaaatcaaaatccaggtctatggaagaaagaaatgaagactgtgcaagtcataacagcaatagtgaagccccaatgcaaatattgggtaagctttaactcatctaatgaacatttatttagtgtcttgtagttttgctaggtaaggtgaggaatagtattaacaggaatacagttcattctctcaagaagctgacttgctcaggagaaataaacccatcacatggaacgtgaaacatcagaaaagaagcgcagtttacctctgaaayacttggggatcaagtcagcagcatatctgaggaggaagagagagagaatattccaaaatcctggctactggaggactattagaagtgagtctatgaatgtcaaagcaaaagacagtcattacatgagaaaattattgacctaggagtctttttattcatcctgctaataaaagaagattgtttacagaatctacaatggggttgaacctacaagtatgaattaaatggattagaggc

SEQ ID NO: 543118 - DNA, 591 bp, Homo sapiens
aattaattttaatatggagaaactgctctgctgaggccttagcaaatgaaattattactaatatgcttaagcaagacttagactcagaaagggatcatacattttatatgtcatgttcaaatattttaaaggggttacataygataaatatttgatcccagaaaatatttaaaatatttttttttcttattattcttttttgaaacagagtctcgctctgtcacccacgctggagtgtagtagtgcagtcttagctcactgcagccttgaacttccaggctcaaagtgttcctcccacctcagcctcccaagtagctgggacttacaggcatgcatcatcacacttggctaatttatttatttattattataacatttataacaaacatgcacatgtgttttatgtatgtatgtatgtatttatttagtagcgacaccatgttgcccagtctggtcttgaactcctggcctcaagtactgcacccacctcggcctcccaaagttctgggattacaagcgtgagccacgggggtctacagttagcttgtaccccttccctttttgtgtgactatattattctatatgaaacg

SEQ ID NO: 543119 - DNA, 629 bp, Homo sapiens
tggaaatttgcttacatttgcttagaggttgacagcagcctccctggctgaggccttcttgctatgcagtagtgcaccgtgcccattccaattgtgtaaactcctgcctagattctgccaagctcttttgaagatctggttcaggatgagcctgaactgggtcctccatctgtcactgcccctttttcacagacgggtggggcgctttggggcctgatgctttctgggaggagcttgagggtaggctggtacctggcaggtgaggagtggagtctacagctccaaatgtgaaaatgaaataagatcaaactcaaagaggggttgaggacaagtgagcaagtttgttgatgattaacttgcagatccttcccgtgtcccttaccctctggactggcctttgctgggtgagccttgcagtcaaagccggcagctaggatttggggtgcacatgtctctctgctagggctstgagggcatggggactctgttcttggagctgagaaaccttgcttctctttccttccagccttgcgggccttgcccgtgtgggactgcatcagagcgtactgaaatcactggccctcatctggtttcagagctgccagttaagctgttagattctcccaccc

SEQ ID NO: 543120 - DNA, 580 bp, Homo sapiens
tctatttctgtttcttccaactctctctcatctcccagaagaggagaagatggtgtccacattgtcatcaagttatggctggctccttcctgccttacatttctctattgactctggtcctaacatctgttgtttctacttccaaagttttagattgttcttttctgtcaatttccattggctgtattcaaatccttattattttatgctgaaatttctataattgtttctaccttttctttgtggttccagcctttttctattctaatgtccccctactcactcactmactaatcttaaaaatgtattttcatcttggctgtctctctacaaaagtcttgagtggctcttcacttaatcttcattccagtgccttggctgtcaaggtcttctgtattcttggctcatattctaggagtaataacttctccttcacagcatcttgttctgcaaagccatccctgagtgctggtccctgtgcctgctctgtgcatcctgggcttcccatcgttgcctgattgttctccttggccagtcggggcctctcctggccgcttctcaagctcgcctactctgctac

SEQ ID NO: 543121 - DNA, 568 bp, Homo sapiens
gttcctggtatgtcccactagttaaatgaaggtctagggtcttcttatctgtaataaatgtttcaggtgataattattactgctggcaagaaaaagatgaggttcattcaataaacatttattgcactcttaattaggttagaggtattgcatgatattcaaaaactaaattattaaaatcattttgtgatcaaatgattttgcatttctgatyatatttttatatgttttacataatgtttagcctagggaaatgctcactctcaacattaaatatggtcatgagtcacttaatgatggggatatattctgagaagtgcctcattaggccattccatctttgtgcaaacatcatacggtgcacttacaaaaccctagatggtacagcctactacacccctaggctgtatggtagagcctattgctgctaggctacagagctatatggtatgtgactctactgaatactgtaggcaactgtaaaacagtggggagtatctgtaaacctaaagctaaatgtagaaaaggtgcaatgaaaagacagtattataatatttcaggaccactg

SEQ ID NO: 543122 - DNA, 568 bp, Homo sapiens
gttcctggtatgtcccactagttaaatgaaggtctagggtcttcttatctgtaataaatgtttcaggtgataattattactgctggcaagaaaaagatgaggttcattcaataaacatttattgcactcttaattaggttagaggtattgcatgatattcaaaaactaaattattaaaatcattttgtgatcaaatgattttgcatttctgattatatttttatatgttttacataatgtttagcctagggaaatgctcactctcaacattaaatatggtcatgagtcacttaatgatggggatatattctgagaagtgcctcattaggccattccatctttgtgcaaacatcatasggtgcacttacaaaaccctagatggtacagcctactacacccctaggctgtatggtagagcctattgctgctaggctacagagctatatggtatgtgactctactgaatactgtaggcaactgtaaaacagtggggagtatctgtaaacctaaagctaaatgtagaaaaggtgcaatgaaaagacagtattataatatttcaggaccactg

SEQ ID NO: 543123 - DNA, 559 bp, Homo sapiens
ggtcatttgcatgttggtacacacagcattgaagaggattgaagaatttgcttgacataaaattgaccatttacatgggatggtctgatagagtttctgaattttttgctaaaaaatgaccctttacctggctttccatggcatctgaaatttctgtttcttctcattttttttttaagktcagccagtgaagatcttatgaaaaaacaggcactatcctgaaaaggaacatagactcaactatcaaaactttagcactaatgcttccatcatgttgctctggcatagagcagtaactcagggaatggaactctgcaaggatatgttttcaggttctatgcaaaagtcagcttgagatatggctgctgtgatttatggggatcagtgtctcaaattaatcaagtatgagtgaatcttataggtcttccagggtaatatcaatgtagttcattaatgtgaagaaacaacattttataataggaatgaatgaaaaaaaaattctgtagtatgtttcctctgtgaaacagagacctgtcattcaaacaccaaatgctacaga

SEQ ID NO: 543124 - DNA, 559 bp, Homo sapiens
ggtcatttgcatgttggtacacacagcattgaagaggattgaagaatttgcttgacataaaattgaccatttacatgggatggtctgatagagtttctgaattttttgctaaaaaatgaccctttacctggctttccatggcatctgaaatttctgtttcttctcattttttttttaaggtcagccagtgaagatcttatgaaaaaacaggcactatcctgaaaaggaacatagactcaactatcaaaactttagcactaatgcttccatcatgttgctctggcatagagcagtaactcagggaatggaactctgcaaggatatgttttcaggttctatgcaaaagtcagcttgagatatggctgctgtgatttatggggatcagtgtctcaaattaatcaagtatgagtgaatcttataggtcttccagggtaatatcaatgtagwtcattaatgtgaagaaacaacattttataataggaatgaatgaaaaaaaaattctgtagtatgtttcctctgtgaaacagagacctgtcattcaaacaccaaatgctacaga

SEQ ID NO: 543125 - DNA, 581 bp, Homo sapiens
tactcaccagcagttacctcagttgcagggaactgcctcatccaggatgacggcccctcctaggggacagcctatggccaatgactggcttatgaagggatacagacgtctgaccacgtgcttcaaacaggattagctccaagaggctstcccagctccaaacttctgtgtagagccacctgagaccttttttgccacaggaatacaggtcagttgcttcatcagcttacaggtgtatctcctgaaaacacctgcaataactttctgtgtcaagtctatttcaagtctgtttccaagtctgtttcccagtacacaatctcaggcagcctcactcacacccattaccacatgccccaagcagaacagcactggaacagagagcaggagagtttcttgtcttggccccatctcctttaagttctctgtttattcaaacctacctaccctctcaaaacctaggtgggtaatcctccctccatgcctcattttgaatctatgagggtacagagattattaaatatacactttgcaaaacactctgttccttctaacaaaaaaggccagtaaagacagtaaggcaa

SEQ ID NO: 543126 - DNA, 581 bp, Homo sapiens
tactcaccagcagttacctcagttgcagggaactgcctcatccaggatgacggcccctcctaggggacagcctatggccaatgactggcttatgaagggatacagacgtctgaccacgtgcttcaaacaggattagctccaagaggctgtcccagctccaaacttctgtgtagagccacctgagaccttttttgccacaggaatacaggtcagttgcttcatcagcttacaggtgtatctcctgaaaacacctgcaataactttctgtgtcaagtctatttcaastctgtttccaagtctgtttcccagtacacaatctcaggcagcctcactcacacccattaccacatgccccaagcagaacagcactggaacagagagcaggagagtttcttgtcttggccccatctcctttaagttctctgtttattcaaacctacctaccctctcaaaacctaggtgggtaatcctccctccatgcctcattttgaatctatgagggtacagagattattaaatatacactttgcaaaacactctgttccttctaacaaaaaaggccagtaaagacagtaaggcaa

SEQ ID NO: 543127 - DNA, 581 bp, Homo sapiens
tactcaccagcagttacctcagttgcagggaactgcctcatccaggatgacggcccctcctaggggacagcctatggccaatgactggcttatgaagggatacagacgtctgaccacgtgcttcaaacaggattagctccaagaggctgtcccagctccaaacttctgtgtagagccacctgagaccttttttgccacaggaatacaggtcagttgcttcatcagcttacaggtgtatctcctgaaaacacctgcaataactttctgtgtcaagtctatttcaagtctgtttccaagtctgtttcccagtacacaatctcaggcagcctcactcacacccattaccacatgccccaagcagaacagcactggaacakagagcaggagagtttcttgtcttggccccatctcctttaagttctctgtttattcaaacctacctaccctctcaaaacctaggtgggtaatcctccctccatgcctcattttgaatctatgagggtacagagattattaaatatacactttgcaaaacactctgttccttctaacaaaaaaggccagtaaagacagtaaggcaa

SEQ ID NO: 543128 - DNA, 581 bp, Homo sapiens
tactcaccagcagttacctcagttgcagggaactgcctcatccaggatgacggcccctcctaggggacagcctatggccaatgactggcttatgaagggatacagacgtctgaccacgtgcttcaaacaggattagctccaagaggctgtcccagctccaaacttctgtgtagagccacctgagaccttttttgccacaggaatacaggtcagttgcttcatcagcttacaggtgtatctcctgaaaacacctgcaataactttctgtgtcaagtctatttcaagtctgtttccaagtctgtttcccagtacacaatctcaggcagcctcactcacacccattaccacatgccccaagcagaacagcactggaacagagagcaggagagtttcttgtcttggccccatctcctttaagttctctrtttattcaaacctacctaccctctcaaaacctaggtgggtaatcctccctccatgcctcattttgaatctatgagggtacagagattattaaatatacactttgcaaaacactctgttccttctaacaaaaaaggccagtaaagacagtaaggcaa

SEQ ID NO: 543129 - DNA, 479 bp, Homo sapiens
tttgggctttgaaattcttatgaaacatctagctttttaagtaagcaaatgtcttccctttattttccttttctgaatgttagggaaacatctgcatcagatcatttgtcagaaatgaactagattgtatttcaaaagctgaaatgtagttattaattaatataaatgttgatgctttcataataaaaatattrtctacctatttttcccattaatcatttattactgatttaaaaaatcattacaagtatgacaaatgctgccaagatataagcagcataaaaaaataggaaacatgtattcattgtcattttcatatttcagcggaaattaagatgtaatctgtaaaaggggctgtgaaaagtgtagtgtttactgctctattcaaagtttatgatttgttactacttttatatcagtaaggttactatggaacaatggaagaacactggacactaactaaaaagatacagatcaat

SEQ ID NO: 543130 - DNA, 600 bp, Homo sapiens
gcagttaacaaccacttgtgaattggatcatctgacactgataacaccytgtgttcctagaaagtggggactctgataggtacatggtaataacaaacaacttggaagtgttccccatttccttgaaaatggatagtattgaatgattttgaagtcgcaaaaagaggttggccagccaagtgaggtgctaaatctgtattacctgcaagtacagagatacgtttttctaattatagtttagctctccatcacctggtggcccctcttgtgatctcaataagcagggataatgtgagagcatattacaggagggtattatagatgttggaaagagaatatagaaatgactcataaactccttgaaggtaaaatgtttttttgagttaaatggacctaatgcaaattgcaccattgagtcaactggtcctttgatcctttttaggcatagaaacccagcaatttgcctctgggcaaagttaaagctagaaccttaatcacttttgtagatctgtatttttctacaattcaatctatttagtcagtttaccagctagggtaccctgactactactacttctctttggtacctagacttcatat

SEQ ID NO: 543131 - DNA, 633 bp, Homo sapiens
accagcagttaacaaccacttgtgaattggatcatctgacactgataacaccttgtgttcctagaaagtggggactctgataggtacatggtaataacaaacaacttggaagtgttccccatttccttgaaaatggatagtattgaatgattttgaagtcrcaaaaagaggttggccagccaagtgaggtgctaaatctgtattacctgcaagtacagagatacgtttttctaattatagtttagctctccatcacctggtggcccctcttgtgatctcaataagcagggataatgtgagagcatattacaggagggtattatagatgttggaaagagaatatagaaatgactcataaactccttgaaggtaaaatgtttttttgagttaaatggacctaatgcaaattgcaccattgagtcaactggtcctttgatcctttttaggcatagaaacccagcaatttgcctctgggcaaagttaaagctagaaccttaatcacttttgtagatctgtatttttctacaattcaatctatttagtcagtttaccagctagggtaccctgactactactacttctctttggtacctagacttcatatttgacagtgatctgcaatagtgaattact

SEQ ID NO: 543132 - DNA, 632 bp, Homo sapiens
agaaaactatagttcagggaggttaaagtacttaacaccactattaagtgatgggcagaaacaccttccatgtcttcttactccattaagtgggagttgcagctctttaaaccaaagtctccacaaaggatacaaggaaaaaggccctacggatgtcatccagatatagctgtcgaaactgagttatatcagtattataagagaactggatactggtgagctgtgagataataagaaaaatattaatgcacaataacagttggcttatttctatatttgaaggcaaacttacaatggctaagttacaatggctagaaacatgccctgtgctgacaaaaaaataaacaataaacaataaacaataaatctttccctagggtttaattacaccttaataaaatgtgccaaaaggtaaaatatgttgctaataatatatagaacacagttgtastgttgctatatgtgtaataaaagtgagaattgagttttttcttatcttatataaatgcttcattttaaaatccctatataattcttccctcttcaaagactaatttctcagagtgtcctgatcatcttaaacctagatatggtatcatattaaaagacatggtaaaattaaatgtttgttt

SEQ ID NO: 543133 - DNA, 320 bp, Homo sapiens
tattcaccaactcctgtcagtcactggttgcagaatgctcctaggaggcattaatttcccagcacttctgggctgcctccaacgctggagagtgggaacagtctgagagggtccttaggcaggracacagttcctgacagttggaactgtgtgtttaaggaattgagaggtactgaagggatgtggatggggcattgacagcatctgaccccacatggttcagatgcatccataccccactttttactccatcctatcactacttcttcaagtcccaacttccaaaaacagacacacacacatacaaaggaaacagttag

SEQ ID NO: 543134 - DNA, 595 bp, Homo sapiens
gctgggtggcgtccttctgactcaatagcacagcagaggaaataactggcacaggaggcttcgtcgggtgcagarcaaggggaggctggggagcctcatgcttccgcaagttacttaaaaccctttctttagctgaaagaaaattaagtcatatatactgagcaatcaggtgaattagcaggagaacagaagcatgtggtacaattcagtagaattcctatcctcaaaaaatttatagtcttacgatagttgaagagttaaagctcatgatcttaaattattaccctagacaggccttgcatgacatgctaacaagtttggacttgatattagtgtaaagctactatctagtgccttacgctaatatcacgtggatctagtgaacacctctatgcaagcttgaatcagatggtagctatcatctgaataatggtttaggtaaatggagtaggtctggaggcaggtcacccagttaaggttttaatgccatcatccagaattcagaggaatagaagaaaaaggaataagcgttatggaatatagccgagtcaaaaatctgaaatcaggtcaaggtttgaacaggaggactggatgc

SEQ ID NO: 543135 - DNA, 595 bp, Homo sapiens
gctgggtggcgtccttctgactcaatagcacagcagaggaaataactggcacaggaggcttcgtcgggtgcagagcaaggggaggctggggagcctcatgcttccgcaagttacttaaaaccctttctttagctgaaagaaaattaagtcatatatactgagcaatcaggtgaattagcaggagaacagaagcatgtggtacaattcagtagaattcctatcctcaaaaaatttatagtcttacgatagttgaagagttaaagctcatgatcttaaattattaccctagacaggccttgcatgacatgctaacaagtttggacttgatattagtgtaaagctactatctagtgccttacgctaatatcaygtggatctagtgaacacctctatgcaagcttgaatcagatggtagctatcatctgaataatggtttaggtaaatggagtaggtctggaggcaggtcacccagttaaggttttaatgccatcatccagaattcagaggaatagaagaaaaaggaataagcgttatggaatatagccgagtcaaaaatctgaaatcaggtcaaggtttgaacaggaggactggatgc

SEQ ID NO: 543136 - DNA, 629 bp, Homo sapiens
ctgtagctttaaggttagtagaacacatatgtcccccaccagataccattcccttccatcacccaagagycaggaccctaatacaacagagctaaaatttctgagacagaaaacacgatttccccccaaatgatcagcagaagtaatggtaaagggactactccaacttccactccttggtttctggacccatatgttcctgctattgaggccatggcacatacaatgaccatttggttctaagtatctagaagaacagcactctaatgttgcagactatttgcccctcactggtacattagctgctcctttaagattctgacaggcagatttcaaaatggtgcaggatactgaaagaccactggatctggtggttttgtgctcactattaaactttgtttgccataaagtgattccctttgtctgaaaccagtggttctcaactgggaacattccatcccctcatgaatatctggcattgtctggagacattgttgtttttcaaactagagggacagggtacatgatgctacaggcatcaaatgggcagaagccagcaacgctactaaacatcctacggtgcccaagtcagcacccccataacaaagaattatccaaatgtcaatagt

SEQ ID NO: 543137 - DNA, 586 bp, Homo sapiens
tgtagctttaaggttagtagaacacatatgtcccccaccagataccattcccttccatcacccaagagtcaggaccctaatacaacagagctaaaatttctgagacagaaaacacgatttccccccaaatgatcagcagaagtaatggtaaagggactactccaacttccactccttggtttctggacccatatgttcctgctattgaggccatggcacatacaatgaccatttggttctaagtatctagaagaacagcactctaatgttgcagactatttgcccctcactggtacattagctgctcctttaagattctgacaggcagatttcaaaatggtgcaggatactgaaagaccactggatctggtggttttgtgctcactattaaactttgtttgccataaagtgattccctttgtctgaaaccagtggttctcaactgggaacattccatcccctcatgaatatctggcattgtctggagacattgttgtttttcaaactagagggacagggtacatgatgctacaggcatcaaatgggcagaagccagcaaygctactaaacatcctacggtgcccaa

SEQ ID NO: 543138 - DNA, 627 bp, Homo sapiens
tatcaactcattcctcagactgggctccctattgctgtttctttggactaaacatttcatgataaaacttgtgtgttcttacctcctaatcagttgttgtgataatactttattttctttttgtgccatccctataaattaataaacctatagttataaaagtagtcccttttataacgctgccaagcacagttttactttgtaccacttgagaaatttacacaaataaagctgagatagagaataagtcttgtgtctgagaccaatagaaatgttaacttgcatctattcttcaaactcaagggaaatgtgtgtgtgtgtgtgtgtgtgtgtgwgagagagagagagagagaaagagagagagaaaagacagagagagaaaagacagagagagagagaaagaaagaaccacagagacagacataatgactgactttcatatttgcctttatgaggcaaggattctacccaagttgatttactgcatggaaagaggaatggatgtggtggatacaagctaacctgagggactaagctacagtgtttagtcatctattttgttcctgtctcactaaacaacacatcattactcctctttcacgaggactggatgaggggcgtagatac

SEQ ID NO: 543139 - DNA, 265 bp, Homo sapiens
gcaaagtcacttattcttttcttaggttggaataaattaagtgcagaaaaagtggaatgactgtgcacacttatttatctcctcatctaacatattagtttgcatttagtaacaaaagtaaaggatcagtgatggaattctcccagctatttcagtataacattgtatcctttgtgatgctgaatcagacactggaattgytatatggtttctctgtcttagaaaatgaactatacagaaccattacaactaagtttatctataa

SEQ ID NO: 543140 - DNA, 542 bp, Homo sapiens
aggctggtgtgcttgggaattgcaggatggatcataaagcctgagtaaaagctaatttaagtgggtagtggtgccaggtggtgaacttggaggggtggatagtggtgataaagaaatttgatgtgtgatcagcaggagctccagatttttgcttagaagagggggcattcagaacacttgatttggaactgcatgttcacagcaaacccacatgcttacttagatgcattttctttgcagtgggctgggagtaggagctttacttccctctagttacattgtcgtgtcatgtcacaaatgtacactattctaagatattttgactttagrttttaggcaagggatttcgattagtctgcagttagaaagagcactcagacagggtttagaagagagattggaagtaagagagaatagaggaaagacaagtcaggagaattgtgtccccaagtttatttggtgaagttgcaactcctgatatctcagaaggtgactatttggaaatgaggcttttaaagaggtaattaagttaaaatgaggtt

SEQ ID NO: 543141 - DNA, 675 bp, Homo sapiens
ggtgcctgttactgtgggggaaaaccacccacacctttggtcacagaagtctgttgacgattgctgtggtagtgtgagagcagagaaaaaacacaattggagagttttttttctacacaggtgtcaaacttgtttttacctaccactttgtctgtagtaccaggcatacagtacaccttgaaatactttgtgtttaaagactgagtgaataaatggatctgatccaagaggccaaacattactaaaaacrggttacaaataggtaacatatttcctatgaaacaatgcatctgaaatttggatttataattgaacagtgtgtcacaagtggtcgtactttcaagcaggttatactgttaaattcatataaattagaccttcataaagaaagccatcttaattgttaagtattctatttctaaagaaaagatttctacatcctgtactttaaccactaagatttgataaaatattcttttttaagcctgcagatctttatttttttggtactgtatttgcctgatcacaaaatgaacacatcgtctagaaaatttggaaaatataaaaaagcccaaagaaaacaattgctttaaatttttttttaaataattaactgtcaaataaagattgaatatattcagggcatacagtgtgattatttgatgtatataaaca

SEQ ID NO: 543142 - DNA, 619 bp, Homo sapiens
aaagaataatggtcttagtcactgtaagtacttttggatacctggcataaaggatgtaatgaatacatgattgaataaggatatatcttaagaatgcattttcataaaaacataaaatcagttgagattatgtaaattttgaagaatgaagaaagtaagttatcatagcttcttctcaagttttatttttatgtcttacaaatatggctgggcaatacaacacaaggcttccttttcaggaatttggagaacttatgcttggtattttaaactcatgagaacttagtctagaaagggcctccacttatttgaccacaggtagaagattggctctgctttcttcctgtaataatattggtttctataggtcaaatgatacacagtataattttgtggcattttgattacaagttttccatttaaaaatggacaaaaatcaacttcttacttgaaattttggaggtagtatgttaccaaaaaaaatggtagttcttgtaaaggtatacctgtgtctagacataagttgcaggtttaaaaatcaatagatttgaataaagttaaagtctagaaaaatatgcaatgtatacakgcggatgattagtaaaccctaatatccaaa

SEQ ID NO: 543143 - DNA, 494 bp, Homo sapiens
cccaaagcttaatctcccctggatcattctgttatatgatacagtaagttttcttttgtatataaaccagttagagtcaggttttctgaaacagttctatgaaaaatgattttaggtaatgaagtatttttcctatcaaagtaactcaattcagacaactagtatctaaggtagaccttgggtagtggaaaaaaattgcataaagatccatgcatgagtacataagagtcattactaatgcactcatgtcaagaataagcttaaactctagtctttggtctgcgagagaaggttggatagttgacataaatatcctctcttgtatcatccatggattgattggtaggttgacyggtagagatgggacttctatagttattgggtgcctagaaagacaaacagcagagagtgtcaataattcactgcatttcaacaactaatgaagacattcaaaacatacctctcataaatgcaggcatgatatgggacaagtt

SEQ ID NO: 543144 - DNA, 539 bp, Homo sapiens
tcatttatagcaacaacagaacctatctgctacagagcaggaattggatttgaaaaacacaatgctgctaaaaattacatctttaagacttacttgaatgtaaaatgagaattactgtattcaataattctattatatgactgtrgaaacttgtctacttatgaaaagtaagaacagtctagacaggtagaagttgtaatgtgagcttcataatattaaagctggaatgaaaaacagtttttcgaatttatttcatcaattactgaaatattgctagaaataaaaggcagaaagctcacaacaacatcagaaagcttaaagtatttatctttaaattgaaaatatgctaactgctaatgtataaaaagtagttgttattgtagtaatagtagaaaaaaataatagccacatgtgagtgcttagcatgtgacatgtactgtgcaaagtattttgcgtgtacacatggcctcgtttaatcctggcctcaacccagaggggcaggtttccctgttattcccaacttgcttgctgaagattac

SEQ ID NO: 543145 - DNA, 539 bp, Homo sapiens
tcatttatagcaacaacagaacctatctgctacagagcaggaattggatttgaaaaacacaatgctgctaaaaattacatctttaagacttacttgaatgtaaaatgagaattactgtattcaataattctattatatgactgtggaaacttgtctacttatgaaaagtaagaacagtctagacaggtagaagttgtaatgtgagcttcataatattaaagctggaatgaaaaacagtttttcgaatttatttcatcaattactgaaatattgctagaaataaaaggcagaaagctcacaacaacatcagaaagcttaaagtatttatctttaaattgaaaatatgctaactgctaatgtataaaaagtagttgttattgtagtaatagtagaaaaaaataatagccacatgtgagtgcttagcatgtgacatgtactgtgcaaagtattttgcgtgtacacatggcctcgtttaawcctggcctcaacccagaggggcaggtttccctgttattcccaacttgcttgctgaagattac

SEQ ID NO: 543146 - DNA, 709 bp, Homo sapiens
caaatcaggcaatcacaaaggtgagttgggcagagaaatacgagtcctgtgggtgggggaaacagcactgcacgtgcatcaagtgttgagtacacagcagagcacagcaatgaggctgggtagcagtgaggatggcttatcaactgcctcatgtctctctcagaccttggacttcatcctgaaagccagacgtgttctatgaaagcaggactacaatatgagaaagtgatcaacgcaaaactgctgtgtttggtattgaggtgtgaggtgggaggcagggctcagcagtaaggatggcagattactccttgtgcctctatgtcctaagcctcctccctatgccctgccatctatggtggccacagagtctctaccatggaacttcagrgctcctagaaccgaaggttgaaaaccactgacctgagcaatgtgggccaagtgtataaaattctacttgttttagaaagactcctctgctcctggagaaaaggatggacaggagatgacaagtgaacaagactagaaacagaacctttaggaaacgtccatattatccaaataaagagatgaggatgccttaaagcaaatgggagctatgtggaaggcagagacagcatggagcgggaaagaagggaatcagggctgactgaggtctctaacttgggaaacacagtggctagctgataaggtgactgacatgctaggaata

SEQ ID NO: 543147 - DNA, 709 bp, Homo sapiens
caaatcaggcaatcacaaaggtgagttgggcagagaaatacgagtcctgtgggtgggggaaacagcactgcacgtgcatcaagtgttgagtacacagcagagcacagcaatgaggctgggtagcagtgaggatggcttatcaactgcctcatgtctctctcagaccttggacttcatcctgaaagccagacgtgttctatgaaagcaggactacaatatgagaaagtgatcaacgcaaaactgctgtgtttggtattgaggtgtgaggtgggaggcagggctcagcagtaaggatggcagattactccttgtgcctctatgtcctaagcctcctccctatgccctgccatctatggtggccacagagtctctaccatggaacttcagggctcctagaaccgaaggttgaaaaccactgacctgagcaatgtgggccaagtgtataaaattctacttgttttagaaagactcctctgctcctggagaaaaggatggacaggagatgacaagtgaacaagactagaaacagaacctttaggaaacgtccatattatccaaataaagagatgaggakgccttaaagcaaatgggagctatgtggaaggcagagacagcatggagcgggaaagaagggaatcagggctgactgaggtctctaacttgggaaacacagtggctagctgataaggtgactgacatgctaggaata

SEQ ID NO: 543148 - DNA, 468 bp, Homo sapiens
tacactgcttctctttaataatayatttctattaaccagaactgaaatttgctcccaggtactgtgaagagaatccagcagaaatttttcttttactctttaaaatattctctcttctacctttctttttcattttaattcatattttcttgtgctcatatcctcttgtactttgttatttgctgctattaaaaaaggcaaatcagtgttactggccaaataaagacatacaatagcttttatctaaatgttttgcattgcttgttttctatttcatgtaaaatatctccaatcatacaagccattaaatattaagaccttatgttacattaggatcatgtaatacagtgactatacagtgaccggtattttctaccatatgtcacgagaattttagcatcctaaaaattgggattgctttaaactatcgtcttaattgtactgtatgcaaaaaagatagaatagcag

SEQ ID NO: 543149 - DNA, 596 bp, Homo sapiens
tgtttatatatggcattaaataaaatatatttttaaattttttcacctattttattttactttttcatgtgtctatgaagacattttcatttgcatatgcaggttatattatattttcagtggacagttctggtctagcattaagtggcttttaaataactgttaagttgattgtcaagcaaatggatgtatttattttgacttttaatttcatgtacagattgtttatataatacaattttaaaagtttaataactacatgtctgcatgtgatataaataagtgtgtgtctgtgtttaaatgaatgtacacacagtaaagtctagaaattaggtaatttattatcatattattgccctgtaatagttgcttctggcaatgactttcmactacatttaatggtttttttggtgaataaatagtaatgttcttatcgtgtatattagaacagggcactagagttagttttaaatatagatgaagtgtgtttccaaaatgaggtgatttcaggatcagcagaattatgcctctgcctcccctaacatctcttcaaactgaaggttaatactacaatttatataatgtgctgtttcctt

SEQ ID NO: 543150 - DNA, 683 bp, Homo sapiens
ggatttatccctaagaagtataaacactaagttgttataaatcatttcaagagtttatttttaaacagaatgttgcaattataggggaggtttgatttggcacaatttcatttatattaatgtgatcatttcatccacttctagcaataattgtatgctyactaatgcacatgtcatatttcttttaagatgatggagaatgaaaaaaatgcaaagaacactaacagcaaagcaaattatgtatacagataaactaacacaatttgatcagagtttacagaaatgttaacaggatatataaaaatatcgagcacccctttatgccagcccgtgccttccacatgtaatcatatttgatcttcataacagtcttaatttatttttagtttatattttatttgaaaaaaatgtcatgtgcataaaatttggttaatcataatgacgcaggatttttctcaatcactttgccagcaggagaccactgactggtgacgcctcaaccccgggccttgttggggcctgggtttaccgcagcagacgcccatctcggcctgcacatggcgcaaatcccgcgacccccgcaactatgcgctcagcccccagcaggagtgggtgtgtgtgcgagtgagtgcaaggtcctgccacctgttccaagagccaaagcgggctccatgcagggcttg

SEQ ID NO: 543151 - DNA, 683 bp, Homo sapiens
ggatttatccctaagaagtataaacactaagttgttataaatcatttcaagagtttatttttaaacagaatgttgcaattataggggaggtttgatttggcacaatttcatttatattaatgtgatcatttcatccacttctagcaataattgtatgcttactaatgcacatgtcatatttcttttaagatgatggagaatgaaaaaaatgcaaagaacactaacagcaaagcaaattatgtatacagataaactaacacaatttgatcagagtttacagaaatgttaacaggatatataaaaatatcgagcacccctttatgccagcccgtgccttccacatgtaatcatatttgatcttcataacagtcttaatttatttttagtttatattttatttgaaaaaaatgtcatgtgcataaaatttggttaatcataatgacgcaggatttttctcaatcactttgccagcaggagaccactgactggtgacgcctcaaccccgggccttgttggggcctgggtttaccgcagcagacgcccatctcggcctgcacatggcgcaaatcccgcgacccccgcaactatgcgctcagcccccagcaggagtgggtgtgtgtgcgagtgagtgcaaggtcctgccamctgttccaagagccaaagcgggctccatgcagggcttg

SEQ ID NO: 543152 - DNA, 395 bp, Homo sapiens
gctgtaaaccaataaaaataaaaaaaawttaaaaattagttcataagtgtctttgcctatctgtgtgttatatctcattttattctaagcttatgactcctacatgcaaatctctacttaatatgtgttcttatatatctcatgttccaaattcaaagttgaattctaaattttttttattggtctcattaatttcagtgaaaattttttcactggtttatctgttagtctaggttttaaaaactgtcaatacctttaccacttccttaatacttcaagcaaattcatcatgaggacttaatgatcctttctcctgcatttctatctctctatttacttgcaagacacatggtaaatatctctcttgttctgctgtaagcttctacctaatctca

SEQ ID NO: 543153 - DNA, 579 bp, Homo sapiens
ttctaatttacagaacacattaaactcaggaagacgaaggagctagaaaaaacaaataatgggggagttttaccagctctttgctgccttaatagagctttagatctaggtagcacaggagcctacacattctgtcaaatggttgcttggacatagatgcctgtgaccgtgtgyttcagagcaacatctaactaaaaacataatttttttgtaggaaggatagaaatatctcatggaagagaatgtgccataatgagagaaagccaaagtggataatgtaaacccaggacccagtctttcccatcatgatgtctgtcacgtgaccgggtccaggtcctgatgagatcagacgtgttttgggtgagaggaaaagaaaggcatctaacacataagctgtcattgggaacataaatattactgttctaccacctctttacaatatttggccagagctagtaaaagagctccctgtcctttacttcacaccatgatgtagcacctgagggcttcagagtcagaggcactcagaagacgtcctaattgcagaagtcctggtgctcaacagtgatgtggattttc

SEQ ID NO: 543154 - DNA, 579 bp, Homo sapiens
ttctaatttacagaacacattaaactcaggaagacgaaggagctagaaaaaacaaataatgggggagttttaccagctctttgctgccttaatagagctttagatctaggtagcacaggagcctacacattctgtcaaatggttgcttggacatagatgcctgtgaccgtgtgcttcagagcaacatctaactaaaaacataatttttttgtaggaaggatagaaatrtctcatggaagagaatgtgccataatgagagaaagccaaagtggataatgtaaacccaggacccagtctttcccatcatgatgtctgtcacgtgaccgggtccaggtcctgatgagatcagacgtgttttgggtgagaggaaaagaaaggcatctaacacataagctgtcattgggaacataaatattactgttctaccacctctttacaatatttggccagagctagtaaaagagctccctgtcctttacttcacaccatgatgtagcacctgagggcttcagagtcagaggcactcagaagacgtcctaattgcagaagtcctggtgctcaacagtgatgtggattttc

SEQ ID NO: 543155 - DNA, 397 bp, Homo sapiens
aactgtagtacaattaacattgttgtcccaaaaaacagtggctactatataatcaattattttctctgaaaataaaataagaattttatcaaattcttctagtaatggaaatggttatatagtattaggcacgtatattgaaatgaaacttttgcctttttaggtaaagatgaagaagagagtgaaatattatacaacttaagaattcattcatttacacacatacatacgctttctttcactttggaaatttaaactgttatacagaaacattttcactattggagatacttcttaatgtatacaactctagacttaawgagttaagtttgggaatgggccctaaaactaagactttttacaagggagtttgagagcacttattggccagagacgc

SEQ ID NO: 543156 - DNA, 646 bp, Homo sapiens
agttaagtttgggaatgggccctaaaactaagactttttacaagggagtttgagagcacwtattggccagagacgccacgaatttgctggtctctgaagcttccactgatttcaaccgtcttctgcataccagaataaacttcagaaatattagatacagctgtcgaatttgttttctttaaaattctgagcgttagttccacccagcacatcctttcggctctgaagttatggaaccctatccttttcttttctttctttagccaagttttagctatttctcaccgtctgtcacagtgatcacttccttcccttttagcagttaattcttatatatttaattccctttattaacgctcttctatttgaaaagccaagcaaagattctctttgcctcactgaactataagtaccacataagaattatgaatggaggagtttctatcgagaataataaattttttaaaagttacaaaaggatttcaaggtagagttacaggagataatctgaaataatcatcagctaaatcgatatagatcataaagtaatatggaaatgtgatgaaaataacgtaaaatacaattataagattgccttcttttgggccagctactttttaaaaatcaaatttaatctagtttaatt

SEQ ID NO: 543157 - DNA, 610 bp, Homo sapiens
gctgcatggggatgatgggacttcaagcaacagaagccacatggtggcatttaccttccagatagaaggacgccacaattaaattagtattgtcaagctaagaggatcagcccaacatacttaacctgccatgggttgcagggatgattaataggacatagtatctctagggccaaaattaaaaagcactgctaaatctctgtaattgaaaatattagaatatatagattagtacagtcactgtggaaactggatggaggtacctcaaaaaactgcaaatgaaattaccatatgattcagcaatctcacttctgagtatttaccgcaaagatttgaaatcagtcagtatgttgatgagatatctgcagcatgattcacaacagccaagttatggaattagcctgtgtccatcaacaaatgaataaagamagggtggtggagatacaccatgaaatactatttcagccttaaaaagaaaaaaaaaagtcatttgcgacaacagggatataattggaaagcattatgctgagctaaataagccagacacagaaagacagataccacatgttgtcatttacatgtgaaatctaaaacatttggactgaaggag

SEQ ID NO: 543158 - DNA, 610 bp, Homo sapiens
gctgcatggggatgatgggacttcaagcaacagaagccacatggtggcatttaccttccagatagaaggacgccacaattaaattagtattgtcaagctaagaggatcagcccaacatacttaacctgccatgggttgcagggatgattaataggacatagtatctctagggccaaaattaaaaagcactgctaaatctctgtaattgaaaatattagaatatatagattagtacagtcactgtggaaactggatggaggtacctcaaaaaactgcaaatgaaattaccatatgattcagcaatctcacttctgagtatttaccgcaaagatttgaaatcagtcagtatgttgatgagatatctgcagcatgattcacaacagccaagttatggaattagcctgtgtccatcaacaaatgaataaagacagggtggtggagatacaccatgaaatactatttcagccttaaaaagaaaaaaaaaagtcatttgcgacaacagggatataattggaragcattatgctgagctaaataagccagacacagaaagacagataccacatgttgtcatttacatgtgaaatctaaaacatttggactgaaggag

SEQ ID NO: 543159 - DNA, 478 bp, Homo sapiens
cactttgttgagtgggacactttgccacctagcagaggagagtagaagttttttccctattatctcttaggtgaagaggaactagaaactccaatttgatattgcatcctgtgcaccaagcagtgtgaacttagcaggaaggtacctttctcaaacatttccaatctatcattactatctagatcctagtgaaggggagatttctggagggggttgaccacagctattctrcttctgaaatagttctttcttcctccatggtctaatgcatcatacagcaagcttttccttttcctccactctatctggtttttttttttttcacctctatagtaccttgatttcttcattactgtccttgcattgaagtctgccaaggaaagcatgccaagttccccaccattttcatgggttgatgggtgggcagcctcaggaggctcatggcacccctcctcttcactgtcgttttctttctcac

SEQ ID NO: 543160 - DNA, 564 bp, Homo sapiens
acttgttattttgacaaaaatataattatagcataagtgtattttaagtgaacttactcgtatcagaaatttctttcttttccttttttaaaatgccaaaacaatgtataaaagcttcctgcatcagtgaaggaagggctttgaaataggcaggaatgctaggtgtagtttatagagcaggacttaaagagcacagggtattttcatggataaagtctccagattgctacgtattgtcagagaaaactgttgctgtagtgaaaacaaattagactctctgagctcatctaggtccttaatgctgctgtttaggaattatttatttattgmcaattaattagtaccatgtgtcctcccactacatacatttttatcaggaaattaattcctttttgacttttatatccagaaataataaatgccaagtctctaaaatgtatttcaagatctgaaattgctgctttttttcttactagctcagaagaatgtttccctactttctctctctcatacatattactttataaatatctctttttaaaaatcttttttattaaacattga

SEQ ID NO: 543161 - DNA, 394 bp, Homo sapiens
gagatctggtgattttaaaaaggggagtttccctgcacaagctttatttgcctgctgccrttcacataaaatgtgacttgctcctccttgccttctgccacgattgtgaggcttccctagccacgtggaactgtgtgttctccattaaacctctttcctttgtaaattgcccagtctcaggtatgtctttatcagcagcgtgaaaatggactaatacattttccttttaaaacatccttgtttgtgtgtctttaattactttcaccaatttttataaggtaatatctatgagaagtgtgctgtatttttagtgtgcttagcagcctctagtcccttgtattttgaaaagaggaaaatattgtagtcagtttagtcttcttctatttccatattt

SEQ ID NO: 543162 - DNA, 433 bp, Homo sapiens
gattcataagactggtaaagggtatctgtaaaggacattaacagtctgtaccatagggagaaacaaaaattatgtgtatcttcctgaaatactgtggcttaggaactctygacagatttcagtgttttaccatattataaaaattaactcttttgtctaaagagggaggtggatatattaatcattgagtaagttggtgaggaaaaatgtcaaaaagaaaaatggtcctaatatagctgtttacacgtaactttgttaaagaggatggacgtagcaaaagacaattactgaatggattccatactagaaggaaaacaatattgaatgttgggaaatttgccagtatcttatttaacaaggtattaacatttttcttttcactcacttttatttcactccagaaatcattctttataatttaaggtaatattcc

SEQ ID NO: 543163 - DNA, 565 bp, Homo sapiens
actaatcttatcctaaccactttctctggaaatccctcaactccatacaaattattgataacagtagcatcccacctctccaattttggaagctcatttgtctctttctcctaaaggacaccatgagtaagggggagggaagacctctggttagctaaatcattgtgtgtgcatgtaattgaatgatatatgtacataggagataagagtgcaatctgtaagaggtgtttggtagagatcctagaacttagttttaaaattttcttcaaactataaggtaattctcagatggaataatatctcttgggaaccaagaggcacaataagcaaaatgtgtctgtttccctttgggtatgtagtattcaaattagcttctctttacacaagtctcccgaaaatgagattaaaaactcacgtacaaaggaaatattattaactgtataaggaaagaaaagggagtattttctaaagrcagaaaaatctaggtaataattacacagcaggtaaacaatcataaaggtttatctctgttacggttttcttactgagaattcaaaagcaacaa

SEQ ID NO: 543164 - DNA, 565 bp, Homo sapiens
actaatcttatcctaaccactttctctggaaatccctcaactccatacaaattattgataacagtagcatcccacctctccaattttggaagctcatttgtctctttctcctaaaggacaccatgagtaagggggagggaagacctctggttagctaaatcattgtgtgtgcatgtaattgaatgatatatgtacataggagataagagtgcaatctgtaagaggtgtttggtagagatcctagaacttagttttaaaattttcttcaaactataaggtaattctcagatggaataatatctcttgggaaccaagaggcacaataagcaaaatgtgtctgtttccctttgggtatgtagtattcaaattagcttctctttacacaagtctcccgaaaatgagattaaaaactcacgtacaaaggaaatattattaactgtataaggaaagaaaagggagtattttctaaagacagaaaaatctaggtaayaattacacagcaggtaaacaatcataaaggtttatctctgttacggttttcttactgagaattcaaaagcaacaa

SEQ ID NO: 543165 - DNA, 607 bp, Homo sapiens
tggagtggtatgttggctactttcttcatgttctcctcttccttttacatacaagactggactgcatctggctcttccacattggaatggaaagataaggggagccagaagttttgatttggtgtcactgttgttagatagccttgaactctctgggcctggcaggtgcctgtaacatttttccttctggatgtttctgtggatttttcagaaactacccaccccctaacatcccccaaccccctctgctttctgcccttaccctttgccaccctgatcatggggtgttttcatctctagcttctgcgatgcagataatgtgccctctgtcttcactgattccttcttcaccccaaggagtctggttggtagtcacctctagctttcattagttgggggtctcatgaaatgtccaggagacccgacaagacataacctgatgtgacctcacaccagctctcttgtgagtggctcacttctggtctgtgggacacatccaggcatcctctgcactcagaaacttggattccaacacagctacctctccttgagctcatgtcagmagccgcagtgtatcacctgctttaggatctgcatccacaaagtc

SEQ ID NO: 543166 - DNA, 632 bp, Homo sapiens
tgctttaggatctgcatccacaaagtcttccaaactgtaggagccccaygtgaagctctctgagtggtcccgctgaattccccttcacctggcttgaagtgagaatagacgctccctaaacctttcccaagggttaaagtacagctctctccaaagaaatccttctcacatattcttttgttagtagattttctcttgtctctgactttgatattcttgttgtggctgagaggtctctgtcttctaactggttcttgttcattaactttgaaattctgccttggagtctattaatctctaaactgagatataaaaatttcccattttggcatcctgttatacaaataacaagtacaccaaactctttgaggactgtgtgtactgttaggcctagaccaagctttgctagggcaacatttgctctcaagggattttagcagggaattcttccttggggaaaagcctgttttaaaaaccttctacccaataggtaatgctctgatgggtggagcttgctgccaaatggtttaaaacccactctataatagtaggtgatttcgcttttttggttaaagagagaaaacatttttcttcgatcaaaatatccaagatcattaattgagtgctagcag

SEQ ID NO: 543167 - DNA, 579 bp, Homo sapiens
aatcaccattaggagctccagggtcaatttggtatagtaaggcaaaggccgtcaggaaatcccaatgagtcatgtggcataaaaccctgtaataagcagcattcttcttcccagactggaattttgtgtgtgaagcttacattcctgcaaactgataaactgagatgacttatgagtgaaaggggggaaataaagacaccttatttggatacatggtgggctttttgaaacctctggtattgaaataataaaaatcttttattgatgtaaaatgcttttatttataaagtgctatcagttcagatccaggattgtttactcttttgttttcttcatgaaagcaaaccctacatctcatggtaataaaggaggtatgccaaaatgtgtgcttcagtgtgttcctagatgggcatgctaagaactgggtcctctcaagttctaggctgaaggcagtgrcctatcaggaatacttaagaattggtaccaagagcatttgtgtatttgttattgtaagtgtaatatatgttaatcaaaaaaaaaattggaaaattagaagaaaggagaaaataaaaaatgccc

SEQ ID NO: 543168 - DNA, 667 bp, Homo sapiens
actcagagagagaaaattagcagaagaggctggttttgctccaaaactctagtactctaagccatgattcttacatagggcttactctaggcttgtacacaatccccttttgtacatggggaaatgaactacacctccagggatcacagggagatcagaggccacggagttctatgattaatgaacatctttcctttcatgttttcatactcaaatcctatttattcctagctaacttttttctaatattgatcatagcaatttattgaatatatttttgctcaccttccttcaataggaattattattgccttatttacctgttatacttctgaaaacgatcagatttttcacgttttcaaggagcytgatggagatatttttctttactctttttaaatcaaactacatcattataaaataaaacacagatataacctccactgcacatcaaatatgtagcatcatgaattagcataaggcaaactcatttgtaactaccgttcaggccaggaaagagaacttcaccagcctccctagaagtctcttctgtgtgacctatctccatcataacccccttcacttcataaataaccattacctggacttttatatcagttgcccagctatgcatctctaggtactatagcttagttctgctcattta

SEQ ID NO: 543169 - DNA, 610 bp, Homo sapiens
aggaatgaaacatttaccatgtagtagaggtaggagagaatgttctaggtaaaggggaatacatacggaamtatatttgctataataaactaccacaaacttgtagattaaacaatacaaatttataactgtagatcagaagtctgacatgggtctcactgggctaaaatcaagatgttggcagagtgcatttctttctggagactttaggggaaaatccctttttgtgcctttttcagccaagaaaggccgtctgcattcctttccttgtagccccctcctccatcttcaaagacagtgacggtggacagagtgcttctcacactgacttttgtttggttttctggactcatgtgattaggttggaccaccctgaaaaacctatgataatctacccatctcaaagtcatttatcttaattataactgcaaagtccttttttgccatgtggagaaatatactcacaatgttctgagaattaggccatggggcatcttcaggggccattattctgcagccaccatggatgcctgagagtgtagactgtcttagaaagaaaaagaaagcccagtgtaactgtgccaaggccaagagcgagggagagagtaca

SEQ ID NO: 543170 - DNA, 477 bp, Homo sapiens
ccaaattgtgcatctcctgcacctgtgtctcttagctaaggcgcttaattacaaagcaaatccccctccctgcaaatgctgtctgtggtctccacgtgagaagggcctcatctctgtcatgcgcttgtagtctcagcacctgggaaagtactagcatttagttgactcccaaatatattgaactgataarggaataacaacacaatctaacaccttcactgatagctaaaacagtggtaatccggtaaagataatctacatggaaatatatttgccaaccagtgtgtgtgtggactatgcattccagttgtcttagtgcataatcaggctctactcacgaccctctgtgactgtgggacaggaacctccctgtgcacagccttcctcatctacaaaatggggatagtatgatctacttcttaggaatctccagaattaaatagaaagttcttagccccgtgcctgacacacactcaa

SEQ ID NO: 543171 - DNA, 508 bp, Homo sapiens
ctgcttttttgttgttgttcattacaattataatcacattgaattttggttttcttmgcagttggcagtagacaaaaatcacatttcataaatttgactttgactggtatatctgaatagacattagtcctcagattttaatggtcagcaccactgattcctttattcagcaagtttttgttgatctcagagggagtccagagccgagcctttacaaacaaaaccaattttagacacagattctgctttataaaagtttatgttttatctggggaggcaagacatgtatgtaaattaattaatagcaaagtatgtcatgaggtaaaggaaaacctaatgcagattgaaatgattgcttatgtaccaaaaggacaggccttgaattggatcttgaaggatgtatagtatttttaatactataaaagtgcttttatagtgcttttttaagttgagagaaatagaaaataggagtaaaagatgtgcgatagatataagcatatgatgttga

SEQ ID NO: 543172 - DNA, 495 bp, Homo sapiens
taatttcctcacaaacaaatacatgcttttccagtagactttctgtctctagtccttgaagccaagtcaaggggacaggaacacacctacctcctctaaacagaagttttaagagaaaacccacaagcaaagaaggactggaattccttcccttcctcctttcttgagygtggcactttctcaggcagggggaagcacatcattcttaggatttcgaattgaacatcctggtctcaaaaacggattttagtgatatagcattctaattatattttcctagttgttttcttttatgatacttagaaatcattgctaccgggacattttttgcctttttaatgattttcatttttgccctgtattcactgtttttctctctcttttttagtatgtttcctgttaccaatttgtttataggattccaagaaaataccatttgctgagtaccatgttccaggcactttctgtagtcagagctcgtttacttttcagagc

SEQ ID NO: 543173 - DNA, 489 bp, Homo sapiens
tggctaaatcatgacatttatggtgaagttttacttaaaatatagtttttcatttgattgatcacttcctatattttagagaaaaatcatgtcaccattttgtattatgtttaatattttaaaattaacttttttttatgttgctgtagccaccacatccctaacccagacagtgcttaaaaggcttgaaaggagtcctatctgtttaataatttgtgcgctctcccttcagaatggacrttcgctataaacaggcttgcttaccctctattgcatgcaaagcagaggttcctgtgtttataatattgaatgcacacgttaatgatgggcgaagagagacacacgcagactgaccttcacacttgacatccactgagagggaaaaacagggaaggcaaattatggcaggggagggtctgctggccaaaaatactcagctctgtttgagaaatgttgagtttgattcttggaagttgtccatatatctgg

SEQ ID NO: 543174 - DNA, 633 bp, Homo sapiens
aggttataaaattgtgtccttaggatccagctttgtaaaggcaagctagacaccacgtatgcccaaatatgaggtgaccctaaatataaagatcaactggggcggttttgccaccagtggacattgatgatatctgaagaaatttggggctgttacattgaggggtgctactggcatccagtgggcagaagtctggtaagctgctgagcattctacaagtcataggactacctcaatgacaaagaactgtctgacccaaaatgtcagtagtactgagggtgagaaatctcgacataaggtaatgctaaatatctgagtattatttttaaaagtatgtggcccacattatgcatatgaaattttagggataaagatgcaaaagtcaactatctacttataacaattaatttattagtgaatgaaaatcaactatacaaaaaagatagcaatttagaaatattatttttatcattatcatgaaataattttattcacacttttcacatatgtcagcaccagcactgccyaaagttgcttgagttagagcactctctaaatccacttacgtaacctgagaagcctgcttttttccttcttcccatgggcatatattgaggatcttgtcagtgtgag

SEQ ID NO: 543175 - DNA, 536 bp, Homo sapiens
caattactggattccaaatggtagcagttcttagaagtttcttttgttatataggaaaattccacagtaacatatagattagggcattcccatttgtaacagtcacactctacacacaaaaagtccacagattaggccaggcatggtggctcacacctgtaatcttagcactttgggaggccaaggtgggaggtttgcctgaggtcggcagttcgagaccaacctgggcaacatggtgaaacacaccgtcrctactaaaatacaaaaaaattagccgggcatggtagcgcagacctgtagtcccagctactcaggaggctgaggcaggagatggagatgggggttgcagagccgagatagtgccactgccctccagaggacagagcaagaccgtctccaaacaaaagcaaacaaataaacaaatacacaggttgaccactcaaaacctttttttgctaaatactaattagcgagttccttttcggccattgttaaataacattacatttctacttcatttgacttaacatttcaac

SEQ ID NO: 543176 - DNA, 511 bp, Homo sapiens
gtaagtcattttgttgtttttttttttaggttttattttttttccatctttgatttaccatagagtctagaagtcatgttgtgggtgttttgctgaaaagtacataaattatcttcagagtcctttttgtgctttttttgaatttttttgtttttttttttgcatcacctgaaatccagagttgaattaatgtccttcattttggtaacctgatttttcaattaagctatttccttttatactggtgagagagaatatctatcaaagaaagaaaatatatgtgtatcaagttttcattcatataaaaaataaaaatcatggcttcctattaagaaagagtacatgagttcataaagaaaatattatgaattgttttgattatttttactacctgatkctcttttactttctgatgcttaaataacaaattatctaccttgtatttcatataacaattattttagactgtctaaatttaatggtagtgactagtaccaaggcaaatgcagtt

SEQ ID NO: 543177 - DNA, 684 bp, Homo sapiens
tagtcctgggtactgggctgagagtagcccaaatcctctaggagccctgtactttcaaaggagtcctgaaataattttctcagtgtttcaaggaacataaattaacaatcagaaaaatcacaacatatatgtggaaacaagccatggtgaataagagtgagcagaattcaaaacagtaaagaacatagaaattgaaatcatcaaggatagagtataaggatgcttaatatgtttaaaaaataaaagattaaaaaaacaaaacaaaacrattggaaatatccagtcaaattaaacaagcacacacacacctgaaattctagaattatatataaattataataattgacacaaagtttactaaatgggctgaacagcagataagacataggtaaaaagagaaaatagaacttagatctgaaatttgacctgaaaaaaattatcctaaatgcagccagaacataatagatttaaaaaataaaagagaacttaaaaaacatggaggatagagtttgataatacagtcattcctgtctacggccataccaccctgaacgtgcccgatctcatctaataacacagtcattcctggtatctttgggggatttgttctagggcaacttctgcccactttggataccacagtccacaaataaggggactcataggctgtttgaagccatcaca

SEQ ID NO: 543178 - DNA, 678 bp, Homo sapiens
gagtttgttcctgctggtgccgaaggagcaggcttgttcctgcactcacttgcacgctccctcctgtgaggggtttagcatggtgggctgagtaaacgggacagctctgtcacaggtcctgtgaaggggtcaagaaaatatcctgcatcaatactattttctagccttgaacacttgtgatcatattaacrttttaaaagccctggtaattcaggcatttaaaatatctgtttaatttggtttaatctactatttttgaacatcatcgactttggagcccttttctgcaggtcacattggtggaactgcttttttgtggaacacattttgagacaaattaaagcagtgcattttaaacctctctgaccttgtcccagagtaagaaatagatttcacatcatgatccagcacacacatatatgtagctgaaacaaagatttcagcaaacaatttactctttctatgagatacaatctgatatttcctagttgagtctatatcatttttaaaatgctgctttctattcatttgtagaccacactctccttgacaatattgggaaattggtcttgtgtgtcctcaccgtcaccttgttattcttctggggctgataccactcatattcctggcagataccaagtcttccttcctcccaagaggatcacttgttatcatgaa

SEQ ID NO: 543179 - DNA, 640 bp, Homo sapiens
ttcagcaaacaatttactctttctatgagatacaatctgatatttcctagttgagtctatatcatttttaaaatgctgctttctattcatttgtagaccacactctccttgacaatattgggaaattggtcttgtgtgtcctcaccgtcaccttgttattcttctggggctgataccactcatattcctggcagataccaagtcttccttcctcccaagaggatcacttgttatcatgaaatttatattgtgttcctgcagtatgcatgtggaagaactgtaaactactgttcctgatgccttggtcatttcaatcattttcacttaatttcaatgaccttgattgaggagatagggcttacctatagagaaatgatagcgggccagttagatggaagttatgatgtggctgagtgggcctggtgagcttgaggtaggctattcaggaagggtgtcatggagaacagtagttccactggttctagaagcttgaggtgactttggaygaaaattaggaaggatttggaaaatttgggagacacacattgtgaaatactaggaaacgatgtgagccaatcacaataagaccttacttaatcaatgaaaagctcccccagggttgcttgcatttggcaggata

SEQ ID NO: 543180 - DNA, 542 bp, Homo sapiens
ctgcattgtttattttccattatcaaaatgtcaagttggccaacatcaaagtgttacttatgtaatgtcaacttcttcctctctcaccactcagtcttatcttagaggaggaaatgcgctatagtttctttttaatttctttgttctctcattcttccttccccatttactcctttcgtggctcctccagaattagggtggaggggctggagtgagctgaggagaggtaatgatsaggaacagtattcatagactgcactcttgaagaatctgctcttgatagagatgtttcgttaattctccaggagggtgtccatcacctgtacatccacaaattccagtacctagagctctctctctgcggtcctcttaaagcaccttgctcccttgtcttcagggtgtgagcccagggtctcaggtctctcatttcattctctgtaactgcctaggaacaatgattctcagactcagagcctctgcccaaattctgagacagcagaaaaagttgcacttagaacagggagtgtgcagggaagggtttt

SEQ ID NO: 543181 - DNA, 498 bp, Homo sapiens
cattctctgtaactgcctaggaacaatgattctcagactcagagcctctgcccaaattctgagacagcagaaaaagttgcacttagaacagggagtgtgcagggaagggttttggcaagtgctggaaaggccttaaaccatgaaggttggaggaaggcttgtaactgtacaagggtaaaaagaaggcttgattccaggaaaggaaggggcttcctgcaaaggtgcaaagatgcaaatcactgtgacatgttacagtgacattaagaagaccagccagatgagagcatgaggcagccatgactaatgacagtttctgagatctttccagtaactggggccgttttacattcagagtacmtctaattcccagcagtgatttcatcagtggagatgggcagataacggggagctgcagtaacatgggaggcaacatcatttgtcaaggagtgggaagaaagtggcattattagttgtagggatgtattaaaagtttcagcc

SEQ ID NO: 543182 - DNA, 610 bp, Homo sapiens
ctggtattccacacttgagcaaatgcctcctctgtctctagaggggcaggcttcctcaacctcacaaaacctattcatctttaaatgtcctttcacataaatcatctccgccctcattttcatcttagtttcacatgtgtgtattcttaaatgttagtgagtcaccgagcagggctattcttctagagcagtggggttggtttaattagaggataaggcctgtagctgcagagcaggtgaacgtggagcctaattcctggttgtgggtgcaggaggagacgtgcgctgggcaccatgagagatgtggggatcattgcagcatggatataaatgtgcaaggcgctccctccctttcactcatgttcccctctgacagccctgttggacggaactttgctttatagaggcatcacactgctttatgggactgctcagggcrgtgcaatgtgttgtgatccttttctagatcattgttctgcttaaaactattttttagaagaatgatttctggctgttctcatacagtcactggaattgttgtgcttctttttcatcactcatcgctggaaagcattacctgtttttcccctgtttctgttctcctcgggct

SEQ ID NO: 543183 - DNA, 652 bp, Homo sapiens
tattgcaaatgttatttttaaaattaaattgccaagtgtgtgttgctaatatatagaaaagcttactaaaaaagaaaaatatggccaggtctataagaaacattaagttctgttgcatcctagaaaagcaatgctcacgtatgagtatctgtgtgattctcatagataattagtcaatagaaaacagtatttacgataagaagatcrgcagaatttaatagatagagataggcaaggcaaaggcctaaaggtaagcaaatcacctggtgtttttgacacagagcctggtccagaggggctctaagggtgagtgtgggaggacaataggaggtacaaacacaagtaaatgggctctgactaggcttagggttagcgttatgtggatggccctgaatgccaaggtggagatgggatttaatatggtagttagtggaaggctaatgagcattcatgaacaggggagtaatgtgaacactatagagctttaacatgggcgcactagctacaggggtggaatatggactagagactgctcatacgagactcgtttgaagcctataatagtcccaagtaacatggaccacaaaccgtgttggatgaaggcgggaggaggaaagaaaggaataggaagaaggcagaagaggaacaagca

SEQ ID NO: 543184 - DNA, 652 bp, Homo sapiens
tattgcaaatgttatttttaaaattaaattgccaagtgtgtgttgctaatatatagaaaagcttactaaaaaagaaaaatatggccaggtctataagaaacattaagttctgttgcatcctagaaaagcaatgctcacgtatgagtatctgtgtgattctcatagataattagtcaatagaaaacagtatttacgataagaagatcggcagaatttaatagatagagataggcaaggcaaaggcctaaaggtaagcaaatcacctggtgtttttgacacagagcctggtycagaggggctctaagggtgagtgtgggaggacaataggaggtacaaacacaagtaaatgggctctgactaggcttagggttagcgttatgtggatggccctgaatgccaaggtggagatgggatttaatatggtagttagtggaaggctaatgagcattcatgaacaggggagtaatgtgaacactatagagctttaacatgggcgcactagctacaggggtggaatatggactagagactgctcatacgagactcgtttgaagcctataatagtcccaagtaacatggaccacaaaccgtgttggatgaaggcgggaggaggaaagaaaggaataggaagaaggcagaagaggaacaagca

SEQ ID NO: 543185 - DNA, 652 bp, Homo sapiens
tattgcaaatgttatttttaaaattaaattgccaagtgtgtgttgctaatatatagaaaagcttactaaaaaagaaaaatatggccaggtctataagaaacattaagttctgttgcatcctagaaaagcaatgctcacgtatgagtatctgtgtgattctcatagataattagtcaatagaaaacagtatttacgataagaagatcggcagaatttaatagatagagataggcaaggcaaaggcctaaaggtaagcaaatcacctggtgtttttgacacagagcctggtccagaggggctctaagggtgagtgtgggaggacaataggaggtacaaacacaagtaaatgggctctgactaggcttagggttagcgttatgtggatggccctgaatgccaaggtggagatgggatttaatatggtagttagtggaaggctaatgagcattcatgaacaggggagtaatgtgaacactatagagctttaacatgggcgcactagctacaggggtggaatatggactagagactgctcatacgagactcgtttgaagmctataatagtcccaagtaacatggaccacaaaccgtgttggatgaaggcgggaggaggaaagaaaggaataggaagaaggcagaagaggaacaagca

SEQ ID NO: 543186 - DNA, 668 bp, Homo sapiens
ctgggggaccttagaaaatgaggtccctaaatgaagtgagtccagtgaagtatgcaattgggaacctctgtggcatattatttgctttctaaagttcatatttccttgtattttcatatttgtattaatggctcaatttacgcttgaatttccttcatgtataattaattcttcagcaatttcattccacaaatacgaactgtgagcctgcatggcagtagactagtcactggaattcagacaraaaaggtctgttctctcaaggaacttacattctaaccagagagaaaaatgtcctataattaatgcatcagtgatgtagttaagatggagataaatgctactaaggagaagtatttgaagagctgctagcattctcccagatgtgtctgtgaaggtgtccttttcaacctgctcaaccacatttttctctaatgttgtacagcctctccttgagatgctaatctttgtccagggatttagttttaatctccagtacctgatttgggctggctgtgggtttatctgttgataaatacagaaaaacatcttaacacatttttaaatgttgtattttgtagtgctgacactgctagtatggtaacagcgagtcgttttgctcctccatctcttcctctcttttctctccattggtgaaaaaggtgtta

SEQ ID NO: 543187 - DNA, 668 bp, Homo sapiens
ctgggggaccttagaaaatgaggtccctaaatgaagtgagtccagtgaagtatgcaattgggaacctctgtggcatattatttgctttctaaagttcatatttccttgtattttcatatttgtattaatggctcaatttacgcttgaatttccttcatgtataattaattcttcagcaatttcattccacaaatacgaactgtgagcctgcatggcagtagactagtcactggaattcagacaaaaaaggtctgttctctcaaggaacttacattctaaccagagagaaaaatgtcctataattaatgcatcagtgatgtagttaagatggagataaatgctactaaggagaagtatttgaagagctgctagcattctcccagatgtgtctgtgaaggtgtccttttcaacctgctcaaccacattttyctctaatgttgtacagcctctccttgagatgctaatctttgtccagggatttagttttaatctccagtacctgatttgggctggctgtgggtttatctgttgataaatacagaaaaacatcttaacacatttttaaatgttgtattttgtagtgctgacactgctagtatggtaacagcgagtcgttttgctcctccatctcttcctctcttttctctccattggtgaaaaaggtgtta

SEQ ID NO: 543188 - DNA, 547 bp, Homo sapiens
catgagaggggtttaaacaggggatgggcagggttttgtttttctttggaaatattcctccggcaggtatgtgaatacatttgagagaactgagaaggacagcacaaaattagttgacaagttactgcagtcatccaaaagggagtatgatgtatcaaaataagatgctggctttgggtatagaaaagaggacaccgatttacaaattacaagaacaacagctagctagaggtcaggatttggagaatatgaattcccttttgagttgggcaacggagtatctgcctattctgtctgtagtgttgctaatggttcccaactatcgtccttgcttttccaaatagattgcttcatttccttgagatctcagactacaaattcgtgttccgctacaccttccacttgaccttgttctcatagaatgatgctgtcaggkgctgtggagctgtgaacagcgatttccatccagcttctgaaaaggctcgagtgctgagctttgggaatttcatgttaacttttctacctccttcatgactgtgaggctatc

SEQ ID NO: 543189 - DNA, 536 bp, Homo sapiens
caattactggattccaaatggtagcagttcttagaagtttcttttgttatataggaaaattccacagtaacatatagattagggcattcccatttgtaacagtcacactctacacacaaaaagtccacagattaggccaggcatggtggctcacrcctgtaatcttagcactttgggaggccaaggtgggaggtttgcctgaggtcggcagttcgagaccaacctgggcaacatggtgaaacacaccgtcactactaaaatacaaaaaaattagccgggcatggtagcgcagacctgtagtcccagctactcaggaggctgaggcaggagatggagatgggggttgcagagccgagatagtgccactgccctccagaggacagagcaagaccgtctccaaacaaaagcaaacaaataaacaaatacacaggttgaccactcaaaacctttttttgctaaatactaattagcgagttccttttcggccattgttaaataacattacatttctacttcatttgacttaacatttcaac

SEQ ID NO: 543190 - DNA, 536 bp, Homo sapiens
caattactggattccaaatggtagcagttcttagaagtttcttttgttatataggaaaattccacagtaacatatagattagggcattcccatttgtaacagtcacactctacacacaaaaagtccacagattaggccaggcatggtggctcacacctgtaatcttagcactttgggaggccaaggtgrgaggtttgcctgaggtcggcagttcgagaccaacctgggcaacatggtgaaacacaccgtcactactaaaatacaaaaaaattagccgggcatggtagcgcagacctgtagtcccagctactcaggaggctgaggcaggagatggagatgggggttgcagagccgagatagtgccactgccctccagaggacagagcaagaccgtctccaaacaaaagcaaacaaataaacaaatacacaggttgaccactcaaaacctttttttgctaaatactaattagcgagttccttttcggccattgttaaataacattacatttctacttcatttgacttaacatttcaac

SEQ ID NO: 543191 - DNA, 611 bp, Homo sapiens
cctgttgacaggacatacataactgacagaaaaaataattttgacagtgtttggagctactcaatgagaaactttatataataatttgaatttgtcaagaagttctataatccttttatatatttttaaacacaattttgtgaacttgggtttccaaactatcttagacccatttctaaagctttttttttccctgtcaaattagttccaggtgaggaaagagcatattgtgtatctccatctctgtactttaatacagaataagattgaatgtgcccagccctagaccacaacctggcttcttactcatcacctccctgggaattccatcaaaatgcaatcagtgatccattcaaaatggcctcttgmatttaaggtacactgatgttgtagaatgttaatattcgtaaccacttagctgctgaaccagacaaaacagaatgacaaatctagcaatgcagttactgttgtttacattctgcttgttaggttgcattacaaaattggatgccaagtatataccaagtgtttctaaagagcaactgtttttcctcagtgtttctatggtttacaataattggtccaaagggagctatctggttttatgtgtt

SEQ ID NO: 543192 - DNA, 607 bp, Homo sapiens
ctggtattccacacttcagcaaatgcctcctctgtctctagaggggcaggcttcctcaacctcacaaaacctattcatctttaaatgtcctttcacataaatcatctccgccctcattttcatcttagtttcacatgtgtgtattcttaaatgttagtgagtcaccgagcagggctattcttctagagcagtggggttggtttaattagaggataaggcctgtagctgcagagcaggtgaacgtggagcctaattcctggttgtgggtgcaggaggagacgtgctgggcaccatgagagatgtggggatcattgcagcatggatataaatgtgcaaggcgctccctccctttcactcatgttcccctctgacagccctgttggayggaactttgctttatagaggcatcacactgctttatgggactgctcagggcagtgcaatgtgttgtgatccttttctagataattgttctgcttaaaactattttttagaagaatgatttctggctgttctcatacagtcactggaattgttgtgcttctttttcatcactcatcgctggaaagcattacctgtttttcccctgtttctgttctcctcgggc

SEQ ID NO: 543193 - DNA, 642 bp, Homo sapiens
atttcagcaaacaatttactctttctatgagatacaatctgatatttcctagttgagtctatatcatttttaaaatgctgctttctattcatttgtagaccacactctccttgacaatattgggaaattggtcttgtgtgtcctcaccgtcaccttgttattcttctggggctgataccactcatattcctggcagataccaagtcttccttcctcccaagaggatcacttgttatcatgaaatttatattgtgttcctgcagtatgcatgtggaagaactgtaaactactgttcctgatgccttggtcatttcaatcattttcacttaatttcaatgaccttgattgaggagatagggcttacctatagagaaatgatagcgggccagttagatggaagttatgatgtggctgagtgggcctggtgarcttgaggtaggctattcaggaagggtgtcatggagaacagtagttccactggttctagaagcttgaggtgactttggacgaaaattaggaaggatttggaaaatttgggagacacacattgtgaaatactaggaaacgatgtgagccaatcacaataagaccttacttaatcaatgaaaagctcccccagggttgcttgcatttggcaggata

SEQ ID NO: 543194 - DNA, 226 bp, Homo sapiens
ctgggattacaggtgtgagccagtgtgccctgcctaaaattatttctaaaatcgtaatagagygatggaaaacctgaaacgatatatctgggcatcaacactgtgtcttctcttgatgtgtttgtaagtgaaggacccctggggtctgtattgcagtcactcacctgcctcccacccactcagtggctttaggtgggctgttgaatgcctccacaacacgagttcc

SEQ ID NO: 543195 - DNA, 582 bp, Homo sapiens
gacagctgccctctccagggcggtgatctcccactcacccactccctctccgctgggtctccttttatgtctgtgaactggctgagtggtccgagaactcagcaagtttccacctcctccatgaatggagtacatggatttagaattccaaatctgtgttttctatattttggtggctttgtttacattttaaccctcattcttttaatcttataaattaaaacttgggcccctttgagaaatactctttcccattcgggttctttccctcttcttatcctttcatccttttcctggggatgatcagsccatagggcctcaccactgttctgcctgaagaagggaagtctaatttcctgttggcttctgtcttattggcctctactgaagtgaaactggggatgttgtggaatcaattttcttttccttccctttacatctgatgttgaagcttgttaatatcttacccaggatgctaaacatctggcttacatattttcattttttgagccagcaccctttggaaatactgttattctcagaaagtctctttgacctcctccttgcccttcatgaggtatt

SEQ ID NO: 543196 - DNA, 376 bp, Homo sapiens
ctggcttacatattttcattttttgagccagcaccctttggaaatactgttattctcagaaagtctctttgacctcctccttgcccttcatgaggtatttactgcaccccttgggtccccagcgaccacaggactctgtgcatagacactctgtggggccatacctacagtattgctgctacccagtgttggaaatcaggtttttttgtgtgctgtaggagatcccagaaagaattagggcattccattggttgctttactttcacctaatcaaagagatctgggggtttttatwtccccctccccatctccatcactaccgaaagaactgatcctggtgggtctaaggaaggcagtggtgctgcttctcacccag

SEQ ID NO: 543197 - DNA, 531 bp, Homo sapiens
tctgtcacttcatgtctctgaacttgagaccccgtttcatggagctcacttgyacacttctttttagtagttcaggcccgccggggataatctcccttttgctgaacaagccagccgattacagacttgacgtatatctgaaaacccccctctccttggccctatagtgtaacctaatcacacgggtggcattcttcatagtcacagatgctgctcatagaaggcagatacacagatcagggagtgagacactcaagagctaccttagaccgctgcctactaccagcagccaaaaccagaatggatgtttttcctcttgttggctacatttaagatgaggatgaggataggatgtgggcagaagagtggctctggaccacctggcttggtatagagcccacttccaggcagggagggaaactgtaagagttaggcatattcagtgcttccgtcagtggggcttaagttcagaagaagattttagctcttgagcatgattctaatcatgaacaggattccggaataagacag

SEQ ID NO: 543198 - DNA, 531 bp, Homo sapiens
tctgtcacttcatgtctctgaacttgagaccccgtttcatggagctcacttgcacacttctttttagtagttcaggcccgccggggataatctcccttttgctgaacaagccagccgattacagacttgacrtatatctgaaaacccccctctccttggccctatagtgtaacctaatcacacgggtggcattcttcatagtcacagatgctgctcatagaaggcagatacacagatcagggagtgagacactcaagagctaccttagaccgctgcctactaccagcagccaaaaccagaatggatgtttttcctcttgttggctacatttaagatgaggatgaggataggatgtgggcagaagagtggctctggaccacctggcttggtatagagcccacttccaggcagggagggaaactgtaagagttaggcatattcagtgcttccgtcagtggggcttaagttcagaagaagattttagctcttgagcatgattctaatcatgaacaggattccggaataagacag

SEQ ID NO: 543199 - DNA, 625 bp, Homo sapiens
cgtgatcagtgcctctgcctctgtgtcttctgggcgcccccttagtgtcccccacccgacaggactggagtacagcgcttcaccaccacagggcccttgggacatgctgtggcaggagatggctgtttcttcaggaagtaaaattaacctcggttttttggtgtggcttcctaagaagaagaacagatgaatctcaaagtcagcaatcttgtaatagtaccttgtaatataacaaaggtgacagcacctaatggaagtctgtgtctgggagtggggaacccctgaccctgggccctctgtgcaccgtgctgccaggtgcttgtgtccagggctggggatgccacaccctcgatgctttcctggactgacgggcrgtctcaggacagccaatctgtgcggccccctctgccctcacctcaagaggtcacagcattggcctgtttttgtttcctcagttaagctttggaaattgagatgtcactaagacaggtaatagggagtaaaacaaaggcacaggcaaaaactaaaggacatttttaccaaataccctcaatttagaattaccaccacttttcccatggacactcatcactaattatttaagttgggaaaaatattgagaagt

SEQ ID NO: 543200 - DNA, 625 bp, Homo sapiens
cgtgatcagtgcctctgcctctgtgtcttctgggcgcccccttagtgtcccccacccgacaggactggagtacagcgcttcaccaccacagggcccttgggacatgctgtggcaggagatggctgtttcttcaggaagtaaaattaacctcggttttttggtgtggcttcctaagaagaagaacagatgaatctcaaagtcagcaatcttgtaatagtaccttgtaatataacaaaggtgacagcacctaatggaagtctgtgtctgggagtggggaacccctgaccctgggccctctgtgcaccgtgctgccaggtgcttgtgtccagggctggggatgccacaccctcgatgctttcctggactgacgggcggtctcaggacagccaatctgtgcggccccctctgccctcacctcaagaggtcacagcattggcctgtttttgtttcctcagttaagctttggaaattgagatgtcactaagacaggyaatagggagtaaaacaaaggcacaggcaaaaactaaaggacatttttaccaaataccctcaatttagaattaccaccacttttcccatggacactcatcactaattatttaagttgggaaaaatattgagaagt

SEQ ID NO: 543201 - DNA, 557 bp, Homo sapiens
aaacaccctcacggaaatacccaaagtgatgtttgaccaaatatctaggcaccctctggccctgtccaggtgayacatgaaagtaaccatcacaacaccgagccacctacaggactcctccacctcgctggctaacaggcacccccaacgtagtcagaaacagacatccgctctccctcccaagctcatcagaggacaggacagacctgctggccatcacacaggcgggtccttggaccatctctgggcctttctcccatgcccccacgccagtctagcatcacgttttgctggttctatctgcgtgaacacgctgtgcgctgaaaaattcaaggtgaggatcagtgggtatcaacttgctaccactttccaaaaacagaagattgctcacagctgcagttttgcacataggtttacatgagaaagtaaccaggcaggaggagcttgggggagggacactggacactgtatgtttctttatactttttgatgtttgagccaactataacctattcagaatttctaaacagataagcccacaatccaaatgtttggag

SEQ ID NO: 543202 - DNA, 557 bp, Homo sapiens
aaacaccctcacggaaatacccaaagtgatgtttgaccaaatatctaggcaccctctggccctgtccaggtgatacatgaaagtaaccatcacaacaccgagccacctacaggactcctccacctcgctggctaacaggcacccccaacgtagtcagaaacagacatccgctctccctcccaagctcatcagaggacaggacagacctgctggccatcacacaggcrggtccttggaccatctctgggcctttctcccatgcccccacgccagtctagcatcacgttttgctggttctatctgcgtgaacacgctgtgcgctgaaaaattcaaggtgaggatcagtgggtatcaacttgctaccactttccaaaaacagaagattgctcacagctgcagttttgcacataggtttacatgagaaagtaaccaggcaggaggagcttgggggagggacactggacactgtatgtttctttatactttttgatgtttgagccaactataacctattcagaatttctaaacagataagcccacaatccaaatgtttggag

SEQ ID NO: 543203 - DNA, 557 bp, Homo sapiens
aaacaccctcacggaaatacccaaagtgatgtttgaccaaatatctaggcaccctctggccctgtccaggtgatacatgaaagtaaccatcacaacaccgagccacctacaggactcctccacctcgctggctaacaggcacccccaacgtagtcagaaacagacatccgctctccctcccaagctcatcagaggacaggacagacctgctggccatcacacaggcgggtccttggaccatctctgggcctttctcccatgcccccacgccagtctagcatcacgttttgctggttctatctgcrtgaacacgctgtgcgctgaaaaattcaaggtgaggatcagtgggtatcaacttgctaccactttccaaaaacagaagattgctcacagctgcagttttgcacataggtttacatgagaaagtaaccaggcaggaggagcttgggggagggacactggacactgtatgtttctttatactttttgatgtttgagccaactataacctattcagaatttctaaacagataagcccacaatccaaatgtttggag

SEQ ID NO: 543204 - DNA, 552 bp, Homo sapiens
gttcccctccttcctcagcagcaccatttaggtacgagaygggtggggttggccctttccattctttaaggagagtattttccactgtgagatggtcacataccttctctttggtaacaggacaaaagagcaaatgctggaaaaactaagcttatgagctttggggaagcctgatgtgcaaatgagggaggctaacatgattttcgggctactggattggtgctcactcccaatttgaaaactagtcaggagataccgaggccctgtgtgatgtggtacaaagtataaggcgttggccatggtagagaatcatgatttttttttttttttctggaggtgggaagccattgtggttgggggcatgaactcagagttgtgccgtggaagggtccctgtggcaggagaacaggtggagagcagacgccgaggggccgctgtccaggcaggagtgatggagcatggctggtggggacttcagacacatgtgcaaggttctgaggatgcctgggtgctggccatgtggcaaggtggaaggcagtgcctatgactgga

SEQ ID NO: 543205 - DNA, 538 bp, Homo sapiens
ctcctgactggtcctcatctgttccttctcagatcacaattaactgaatatattttaaaagagaaaactcgtaagtgccctaaggaaataaggaattattttgaacactaaagctaaaagcattctaacattgtgttgcttttatgttctttactaaatttgcttcatgcacacacacacatatatgagtgtatttctcagtatgcagatgatttcaaggactggcttccttcgtgaaaacgtattgttggttgcaagaagataggggactggaaacatgattcgtctgtctgtagaggtgaagttccaagaagctcaccactgtccagtctttatgcttatgaacttgttgagtgagttctttttttatagtgtacccatgtctaggaattttggctgaaatcagcttctttgcttttttaggctttttgctagtgatagtgttgtctttgttctgtaaaacaactgtaaaggaataccaacaatctagtgcagaaattcttytgtaagaacaagctaccctgatgtcatgtcgtgt

SEQ ID NO: 543206 - DNA, 580 bp, Homo sapiens
ggtgtccacaggggccagggacactggtaggtaggtgtggaacaagggagtttgtgacttgggattgttttctacttaaaaaataatctgagtaaagcttggtttaagcagcatcaagttaaaaaaattcctaagaagtggttggattcccagtttatatgtggctttaaggttctgaagaagtacacaattaaccacagaagtatgacttgaatagataagaatttaacaaaatacacactgttgggtgtaaaatcataaatatctgaagttcttagaaattggtaattttcttttagctttgctgtgctctgagcatgactaaactaaaagtaatgaatccagaccttgaagactggtgtgtgtgtaaaaggcaagaagtgagaagattcacgtgtagatccaggacaatctgaatttacttctgttcagtagttcccaaaggctttttctacatggagggactcggagtgacacagcagctccctcttgtgggcagattccccygtgtaaggtgctggaggctgaggttccagcctgcagccgcttgtgatcctgatatgtggagagttctggaaga

SEQ ID NO: 543207 - DNA, 590 bp, Homo sapiens
cagcaaactaacacaggaacagaaaagcaaacaccgccatgttctcactcacaagtgggagttgaacaataagaacacatgggcacagggaggggaacaccacacactggggcctgtttggggggtggggagcaaggggagggataactttggragagatacctaatgcatgtggggcttaaaacctagatgacggattgaggggtgcagcaaaccaccatggcacatgtatacctatgtaacaaacctacacattctgcatatgtatctcagaacttaaagtataatttttaaaaaaagaaagtcaacattttgcttgcacatactgaattttaaggagactagttcttcccatttctgaaatttgacactcagtatacaggtgcaaaccatgaaagaagcagaatatgcagctaatttggtacgcatttctattgagaactgaaacaactggattataacatagacctaaggttggctctagaaaatacttctcaagagtagtccaaagtagttgctgtaatttatacttctatcagcaatatatgagagttccagttcctctacatcctcagcaacacttgtattac

SEQ ID NO: 543208 - DNA, 520 bp, Homo sapiens
tgcttccatgggatcaggctctgtcgccagtaaaatatttttaaaaagaaaaatgtacttaagttggtgcaaaagtaatcttggtttttgactttagcaaaaacatacgtacatacacacacatgaatatatttaaggaaataatgactgaatgctctataaatctgatgaaaaatattaaccaataatgccaagaaattcaaaaaacctcaagccagaggaagagatcctgccaaaaagagaagggaacttaatcattacggttgtggggaatgttactggggccagcagctcaccagcaggaagagagcagagaggccctctgtccagggaacccacaacagctcctgcaggcaaaatgtcaggtccagagcataacaccagcttgtaaatctgcaggactgtctcattcccttgtcaatttctcccttactgcttatccttaggagtcwgaaatagcaggtgggtgagggaacaaccacccctctcttctagatcccaggcttctccctgcacctgt

SEQ ID NO: 543209 - DNA, 582 bp, Homo sapiens
agcctcctgggaccaagcagtctgcctacctcagcctcctgagtagttgggaccacaggcgtgtgccaccacaccagctaattttttatattttactattttttttagagatgggggtctcactatgttgcccaggctaaggaaatagttagttgtttagtggayggggacgaggggagaacttaccagcattcaaagcgctttctttttttaaagagacagggcctcattgtgttgcccagggtgaagtgcaatggctattcacaggcgtcatcccactactgatcagaatgggagttttcacctgctctgtttctgcccctgctgatttcactcttctttagacaacctggtggtcctccacccccagaaggtcaccatattgatgccaaacttagtgtggacactcaattggcagagcacactatagccataacttctagactcaagtgatcctcctgcctcagcctcccaaacaggtggagctataggcacaccacatgacagccactgaagtgctgtaataaacatatgccatcatattattttctctcaagacatagtatttctagtgacctttat

SEQ ID NO: 543210 - DNA, 582 bp, Homo sapiens
agcctcctgggaccaagcagtctgcctacctcagcctcctgagtagttgggaccacaggcgtgtgccaccacaccagctaattttttatattttactattttttttagagatgggggtctcactatgttgcccaggctaaggaaatagttagttgtttagtggacggggacgaggggagaacttaccagcattcaaagcgctttctttttttaaagagacagggcctcattgtgttgcccagggtgaagtgcaatggctattcacaggcgtcatcccactactgatcagaatgggagttttcacctgctctgtttctgcccctgctgatttcactcttctttagacaacctggtggtcctccacccccagaaggtcaccatattgatgccaaacttagtgtggacactcaattggcagagcacactatagccataacttctagactcaagtgatcctcctrcctcagcctcccaaacaggtggagctataggcacaccacatgacagccactgaagtgctgtaataaacatatgccatcatattattttctctcaagacatagtatttctagtgacctttat

SEQ ID NO: 543211 - DNA, 631 bp, Homo sapiens
ctggagagaaaacagaacaaccaaaattatgtttaaaacatccacataaagtaacagagacatttatgaatctggttagatgctattagtttgtatttaagtcaaaaaaaaaaaaaaagagatagaaagagaaaaaaaaaattaaacttctcaaaacccagtgtggcaaatagcactcactgctttttctctaacaaaaaaagatgaaagcaaaatgtgactcttttttttcagaaaaaaacaaaaaggattcactatttttctttttagcacttactatatgctttccatgtgatgcatataacacaaacatgtccctgtyccttgtgagacttatgcttagatgcggaaagaagacatatgagaagggaaggtgagtaactacatgagatagaatatttttagtcatctgacacttcataaactcaatagttacagaagttaaagggtggagaatcaattcaaaactcttctcctctcttcccttcatatccatatccaatcattcaccaaatcccatcttctctccctcctccctctctctccacaacttattcctaccatcaccactgctcctcccttgttctggtcaccagcatctctagccttgaccatttcagcagcctttgca

SEQ ID NO: 543212 - DNA, 621 bp, Homo sapiens
gcatctctctcccaatgtgaaggaagacccttccaaaaagcaaagcaaaacgacatagggaatatatacttagcttattgaactggaaagctactgagtttgtccttaaatgcaactatatgaacccttttaaaacccttgggagcaaggtaataagagaaacccctgtctgataggttaaccatgacaagttgggtctttatttcctgtgttgttgtcgttttcctggttagagaaagcacaatttgacccccagactacccataaaatctggttaaaaataaggtgagttgtacacaaggctgttataatctayaaaaatccaacattatttaatatttatcttttccaccatactgggaaaaaacatttggaagagccatttatattttactttactagactgcttacctagaatttcccagtcatcaataaagcagagtttaatttttgagagacataaagaaaaatgaagaattaaaattgtaattggaaaaattgcctcaatcaaaatcgcacttcaagatgcttgaatggatgggctaaataagttcaggcatccattagtttctaaattgaattaaaatatattgagtgctaattcaaaaatctaaaggcagc

SEQ ID NO: 543213 - DNA, 594 bp, Homo sapiens
catatacatcttttctgtgaatgcactaatcttaattcaatggtgtgtaatgtacattccctactattacttctccaaagttagcattcaaactaaccacctgagggcttgtgaatacagagatttggctccagtatcaaagattcaaattcaataagatgtggcaggccccaagaattcctaccgatgtccagataatgttgctgctgctggtgtgtggaccacattctgagcagccctgcactagaggaatcctctggccatccctcatctaggatgatgcatgaaaacaggacagggatttctgcagtttgtaaaaatattttatttggtttcttctgtctccacccctgtagtatattactktgtcgtctttgcacagcaagaacttagcatcatcctcttgtattttggattttgtttcctatttcctcagtttaatcttctcaggtgagtttgaaagacaaaagttctttacctgttaatggatgaggagttttaagaatctttagaactattttcctggactcttgtttcttgaatgggggtaggaaaagtgtatgttaatactgcttaagcttttttttgataagt

SEQ ID NO: 543214 - DNA, 557 bp, Homo sapiens
acagaatttaagagacagataacacatgcttttataaaggatgtcaaaatattgacaatttagctttatctctgtaaataagttataccagttctattccacattctactctcaggaagtgctgggaatattccctagtagccccagttgagaattccagaaaaggtcagttccaaytaagcaatgaaaacaggtagatcagaatgtaactacaaagacttggttcatccatgttaaacaacaccatgggccagtcgcgatggctcaagcctataatcccagcactttgggaggccaagtcgggtggatcacctgaggtcgggagttcaagaccagcttgaccaacgtggagaaaccccatctttactaaaaatacaaaattagccgggcatggtggcacatgcctgtagtcccgccattgcactccagcctgggcaacaagagcaaaactctgtctcaaaaacaaaacaaaacaaaaaaaatatgcagatacaatcagtgtaatctaattgtggagaaaccacaggatgaactattgctttaataaactacaggaa

SEQ ID NO: 543215 - DNA, 550 bp, Homo sapiens
tgccagattaagaaaagctccttaagaagcaatttattccttagccaggggcttggcctgtttggtgtagcagagtgaccagattcattctggtcttwcaggtgctatcttgaccgctttcatttttataaataagggattcatcttccctggcctcaggatcgtcataacagctgctttgcaagaaattcgatggaattggttctttccttctgccttggaaactgctatgtatttttcatttttatttttttgagagtctcactctgtcaccccagctggagcgcagtggcacaacctcagcttactgcaacttccgtctcccgggttcaagtgattctcttgcctcagcctcctgagtagagtagctgggattacaggtgtgcactaccacacccagctaattattgtatttttagtagagatgggattttaccatgttggccaggttggtcgtgaactcttgaccttaggtgatccacctgcctcagcctcccaaagtgctggggtttacaggcgtgagccaccacgcccacccagaaattgctgt

SEQ ID NO: 543216 - DNA, 550 bp, Homo sapiens
tgccagattaagaaaagctccttaagaagcaatttattccttagccaggggcttggcctgtttggtgtagcagagtgaccagattcattctggtcttacaggtgctatcttgaccgctttcatttttataaataagggattcatcttccctggcctcaggatcgtcataacagctgctttgcaagaaattcgatggaattggttctttccttctgccttggaaactgctatgtatttttcatttttatttttttgagagtctcactctgtcaccccagctggagcgcagtggcacaayctcagcttactgcaacttccgtctcccgggttcaagtgattctcttgcctcagcctcctgagtagagtagctgggattacaggtgtgcactaccacacccagctaattattgtatttttagtagagatgggattttaccatgttggccaggttggtcgtgaactcttgaccttaggtgatccacctgcctcagcctcccaaagtgctggggtttacaggcgtgagccaccacgcccacccagaaattgctgt

SEQ ID NO: 543217 - DNA, 570 bp, Homo sapiens
tttaatgacttcaaaatcataygttacagggactgaaagagatgactgtgatgatactttgtcttatgtgttttcaaatgagtaggattaaattttgaagtattcatttcacaggagaagctcaagataatagtatggtttatctggtgcaagcaacagaaaacaacatcatttaatagaaaaaaatcattgaaattatatgaagaagtcgaaagtcaaagggaatttataactaatgtgatagattgtaagaaggccaactctgagatgactcaggtccaaatgtttttatcccctacttagagacaaagtccaggtagaaaatgagatgggacttgtatgtgtgtcacaagccaactcttagagtaggaaaacaaagagcatcttactaattttcaggtatgacattaaagattcttatgagtatttcctgaaataatactgcatgtgttaataaaaatgaagaaattatgatttctaggtaatattgcgtgtgtctgttacactcaggatgacagagtgatttgtgtattcgttttctattgctctgtaacacgtggccacaaacct

SEQ ID NO: 543218 - DNA, 408 bp, Homo sapiens
cagttcattccactccattccaattcattccatttgattccaatccattccatttcatttctgacaataactcagtcctaagctgtgtgctttatactgccttacactagatatgtgagactatgccccctttacctccccagtcttgccacagaggaatgagaggggcaatacaatagactgtcaagggaggaagttcccagagcccacaggggagggaaggaagatggagacttagggttagggagaggcagaggggaggggtgctggagaaagaaatcagctctagtttagaaaacctttctgctccagggccaggttgtcgagggggttgttgtcaccgcctccccyaccctcctcgctctgtggcagcacataggactcatccactggcaacagctccctgga

SEQ ID NO: 543219 - DNA, 636 bp, Homo sapiens
acacagagtttctggcctaattagtctagagctgtacctggacactggtgatttttaaagcctttatcaaccccagtgtcggtaattttaatgcwcagccagatatgaaaatctccgatctaactcagtagttctttgagtgtgcaacaggatcacctggggggttattaactcacagatttcttggctccacccccagagcctttgattcaattgcttcattcctatcattgggtaagattataaagcttttgtaaacacaggctcttcctggcatccctgagttctgtttgaagccccttcttcaaggaaggacagcatccttgcttcctctcagtgccctcccacctcagcctccccctactctcctgtcatctcctattgatgctcttttactcttactaatttcactgacagcagcctggagtgtgatccagcttcaacatctgggtgcacattttaatgggagtcactttagcaatgctgcaagcaaaagggatgtcatgttaatgatatcagccagccacctaaggaaggaagtcaggagtccctgaagttacccacaggaaatcatctctgctcaggtccttgatgggttttgtgtctcctctctctctaggcaaggccccaggctgg

SEQ ID NO: 543220 - DNA, 648 bp, Homo sapiens
gtaattatacatgaacattttaccagggagagagctcatasctgtcattaatttataattgagatctctgacccaaaatagaactttttggagctcaccaagatgaaggatgacttctatcacttcctgacaccagtatttacttagtccatgcccattatccttccagaatcagttcaggtgtcagctcctccaagaagccttccctgatgtcccctgatcacctgctaggcctgcatcaggtgttctccatgctcctatagccccctgcatctgccgtggccacacactgtccaccttgtgttgtcagtatttacatgtgtctcatcctccaggccatgagctcttgaaggcagggagtaggtcttacttgttttcgtttcttgcatgcctagcataatgactggcaagtagcagttgctcaatgaatgctgaatgaattaatgtgtcatgacttggctaagctgttcaacaatcatagaagaaatccaaagctgctatttcttttgggtatgttgctaatattgaacacatagctgcccttgttataattggcagggcttccctcggaagtgtgcccaccatagcacagctatcaaatatgaattgatgtgcacttgcctgcatggtgtaaatagcatgcatgtg

SEQ ID NO: 543221 - DNA, 433 bp, Homo sapiens
acattttaccagggagagagctcatacctgtcattaatttataattgagatctctgacccaaaatagaactttytggagctcaccaagatgaaggatgacttctatcacttcctgacaccagtatttacttagtccatgcccattatccttccagaatcagttcaggtgtcagctcctccaagaagccttccctgatgtcccctgatcacctgctaggcctgcatcaggtgttctccatgctcctatagccccctgcatctgccgtggccacacactgtccaccttgtgttgtcagtatttacatgtgtctcatcctccaggccatgagctcttgaaggcagggagtaggtcttacttgttttcgtttcttgcatgcctagcataatgactggcaagtagcagttgctcaatgaatgctgaatgaattaatgt

SEQ ID NO: 543222 - DNA, 608 bp, Homo sapiens
caagaagagaagatcctaaaagaactcagaggggcttcactttgggaagagggaagaaaggaggaatgataaatatgaagatatttggaactagagatgtacctgcctgtttgcaatcactttgcagtgagtctgcttcaaacaatgctagcacttatttagctattgctatttgcctagcactatgctaagtrcttatgcatattatctcgtttaatcctcagaacaaccctccaaggaagatgctattatgagcctaactttttagatgggggaactatagcctagaacgctagagtaatttatgtaaggtctcacagcaatggcatgctggatctagggcatgaatccagtttacttgattgcaaagttcatattcaaaactactaggctgccagtgcctccttctggacacaaacacacctggtagtagagccccttgctactgcctgaggctccctttcaccccactctctgcttagactgtacctgtctccatgatctcaggttgctttatgtcctgctcagttttgcatccaggaagacgatttcagggcgaggaccacatgtagtcaagtagattgagatgggaaaatgcccctgtctga

SEQ ID NO: 543223 - DNA, 625 bp, Homo sapiens
aaagtcgtatgagaactgatgtcatgacccatcattctttctctacaccattatcccattctatcaaactcccaaggtcatcctgagaggtagaataaacaattggacattcaaccctaaaactcagagaagagtcagggctggagataaatacttaggagtcatcaacatgccaagggtactttagatccctagggctgttgaattctaggatgcaaaagagagagtatgcagaactgagcctggagctcagtgcttactttattgagtgcttaytatatgccaggcactgtgctaccttaaagatattagtccttataacaaatcataaggcagatactgttattgatcccactttacatatggagaaactgaggcacagagtggtttgtttgtttgtatcttgtccaaggtagtaaatagtgaagcataatatagattcaggcagtctggctctaaaatcccgaccactataatatttactctcaagagctctgcttctgtatcttaggcctagcttatagagatgtgcttttataatttggagaatgagtatattaatactctcattaatatcatagatgtcaacaaggtcaaccctaagattatgaccctccagcctggc

SEQ ID NO: 543224 - DNA, 669 bp, Homo sapiens
ggcaatagagtgagactctgtcttaaaaaaaaaaaaaagaaaaaatgtagttgtgtgtaaacttcttgaagctgaatctttctttaattttttcatrtactttcgctgaatattgaaatgatagaattaaaaacaacatttgagatgaactagaattctcactctgcacactgaactatatccccagataccttctagtttccaagtgtacctcaattagtgttgtttaaccggggagagcagtaggaatattgtttccatgccaatgtaataccttataaacttttagcttcaattcatgctgttggccctatgattttttaaaatgttcactcttctatgatattagctctcagcttcgggttatccgcctataaatatcctttcacatttaaaaatatcaaagcaaggaagtattgttgatccaccataatgtgcctgtaacttaaaaaggtatttttttttaagttttcaaaaaaaattgggcacttacatattttaacctgacactgattctggagaattacccacagtttggggttttctgatatttcctcatgataagatccaggttatatatattttcagaaatactaccaaagtgatgttgtgcctttctctgtacatcttttcaggacgcacatggtgtctgtttcaatattggtgata

SEQ ID NO: 543225 - DNA, 669 bp, Homo sapiens
ggcaatagagtgagactctgtcttaaaaaaaaaaaaaagaaaaaatgtagttgtgtgtaaacttcttgaagctgaatctttctttaattttttcatatactttcgctgaatattgaaatgatagaattaaaamcaacatttgagatgaactagaattctcactctgcacactgaactatatccccagataccttctagtttccaagtgtacctcaattagtgttgtttaaccggggagagcagtaggaatattgtttccatgccaatgtaataccttataaacttttagcttcaattcatgctgttggccctatgattttttaaaatgttcactcttctatgatattagctctcagcttcgggttatccgcctataaatatcctttcacatttaaaaatatcaaagcaaggaagtattgttgatccaccataatgtgcctgtaacttaaaaaggtatttttttttaagttttcaaaaaaaattgggcacttacatattttaacctgacactgattctggagaattacccacagtttggggttttctgatatttcctcatgataagatccaggttatatatattttcagaaatactaccaaagtgatgttgtgcctttctctgtacatcttttcaggacgcacatggtgtctgtttcaatattggtgata

SEQ ID NO: 543226 - DNA, 669 bp, Homo sapiens
ggcaatagagtgagactctgtcttaaaaaaaaaaaaaagaaaaaatgtagttgtgtgtaaacttcttgaagctgaatctttctttaattttttcatatactttcgctgaatattgaaatgatagaattaaaaacaacatttgagatgaactagaattctcactctgcacactgaactatatccccagataccttctagtttccaagtgtacctcaattagtgttgtttaaccggggagagcagtaggaatattgtttccatgccaatgtaataccttataaacttttagcttcaattcatgctgttggccctatgattttttaaaatgttcactcttctatgatattagctctcagcttcgggttatcygcctataaatatcctttcacatttaaaaatatcaaagcaaggaagtattgttgatccaccataatgtgcctgtaacttaaaaaggtatttttttttaagttttcaaaaaaaattgggcacttacatattttaacctgacactgattctggagaattacccacagtttggggttttctgatatttcctcatgataagatccaggttatatatattttcagaaatactaccaaagtgatgttgtgcctttctctgtacatcttttcaggacgcacatggtgtctgtttcaatattggtgata

SEQ ID NO: 543227 - DNA, 477 bp, Homo sapiens
tcaaaaaacactataccgcttcttacatagcatataatcctaatttcttcttcctatgccttgtatcatttttgccatttatttcacttacacataagtataaataagcgtgcatctgtataaacatacgtaaaataacatatattattggcattattatttttaacaaactttgttagatcaactaagaatatgaaaaatgaaagtttttatgttaccttcacttatttcttctccaatgctctttatttagacctatatcaatttctttttctctggagaactyatttttaacaacacttcttgcaaggcaggtctactggcaacaaattccctcagtttttgtctgtctgagaaagtctgtgagcttcctggatctatggtttggtgtctggcattaatatgggggaactctcagttattattgcttcagatactgcttctgtttgttttcctctttcttccctttgtggaatt

SEQ ID NO: 543228 - DNA, 624 bp, Homo sapiens
atgtagaaaatcctgtaattcattgtctatgatcaatttcactgctaagtacaatttagctagggacatatccttattgtgtaatataattaaagtccaatttcagaagtgtaactggttattttgtggagaggaaatgctaagaactgggcaatagccaataatcatagctaccattggttaacttcttttttttttttttttttttkgagaaggaatctcgctctgtcacccaggctacagtggcagtggcgcaatcttggctcactgcaacctctgcctcccgggttcaagcgattctcctgcctcagcctctggagtagctgggattacaggtacgtaccatcatgcccggctaatttttgtatatttagtagagacggggtttcaccgtgttggccaggctggtctcaaactcctgacctcataatttgcctcccaaagtgctgggattacaggtgtgaaccactgtgcccggccggttaactttctgtgtgccatgccctattctaagtgcctcgtgcatattaactgaaaaaatcctcatcataagtgtatgaggcaggaacatttattaccctcattccacagttgatcaaaccagggacatttgcctaaagtcac

SEQ ID NO: 543229 - DNA, 557 bp, Homo sapiens
tatttcttctatccttttattattttgtatgatttattttatagcatcttttagtttttttataatctgcatttttttgtggtaacaatctatcaaaaatagataatctatcaaaaaatagatttagaaatctatccaaaaatgtattcaatacttgtaacctgtaattattaataatattgatctgtgaatggtgtaagttggaaatttgtacttggatatgagagagaagcctaaagtggggaaattatcctcataaagcagaataaaaaatagcttttaataattccatattttcaaaagataattttcaagggtggttaagacacaggttggtattaggatacaagagacaggaaaagaagtgaggaaatatttcaaaactctaggaatcagcagttgatgacctaaactggggcacggacaatgaaaatggagacacrgaaacacatcagagacagaaagatcaggacttggtggccataggcatttaggataaagaaggatgtaaatttaaagataactcacctgagtgacagatgaggaggtgatatact

SEQ ID NO: 543230 - DNA, 557 bp, Homo sapiens
tatttcttctatccttttattattttgtatgatttattttatagcatcttttagtttttttataatctgcatttttttgtggtaacaatctatcaaaaatagataatctatcaaaaaatagatttagaaatctatccaaaaatgtattcaatacttgtaacctgtaattattaataatattgatctgtgaatggtgtaagttggaaatttgtacttggatatgagagagaagcctaaagtggggaaattatcctcataaagcagaataaaaaatagcttttaataattccatattttcaaaagataattttcaagggtggttaagacacaggttggtattaggatacaagagacaggaaaagaagtgaggaaatatttcaaaactctaggaatcagcagttgatgacctaaactggggcacggacaatgaaaatggagacacggaaacacatcagagacagaaagawcaggacttggtggccataggcatttaggataaagaaggatgtaaatttaaagataactcacctgagtgacagatgaggaggtgatatact

SEQ ID NO: 543231 - DNA, 655 bp, Homo sapiens
tttactgacttcattagcaaactgagctttgtaatttggcttcctctccctctttaatccctccaacacggttactctcataaaacaagtcaaattcactttctgtgaactccaagggattgttcaaaatcaagaccttrttgatggattgatgtttgaagtaagtaaataacaggattaaaaatatttttgccatatagtgatattattttatatttatatttttgtagtaagactaaagtaggtcacacgctgaattttgatggctctttagagagccgtacaatttcattgcttcctataatcaggaccaatagtacccataaacacatgcttatgttaattgagggaacttaacgatttttaaaaactctatgatacagcatttactaaatatttgaaattctatgttgtatgctaagaagttatttctaaagaaaggcccggtgtgggggcctgttgtgcggtggggagagggaggagggatagcattaggagatatacctaatgttaaatgaagagttaatgggtgcagcacaccaacatgacacatgtatacatatgtaacaaacctgcacgttgtgcacatgtaccctaaaacttaaagtataataaaaatataaaataaaaataaaatgcataggacattgtgcac

SEQ ID NO: 543232 - DNA, 537 bp, Homo sapiens
tctgttgcccaggctagggtgcagtggtgctatcttggctcactgcaacctctgtgtcctgggttcaagtgattatcctgcctcagcctcccaagtagctgggattacaggcacctgtcaccatgcctggctaatttttgtattttagtagagacrgggtttcgctatgttggccaggttggtcttggactcctgacctcaggtgatctgcctgcttcagcctcccaaagtgctgggattacaggagtgaaccacaatgcctggccatgtctaatatttttaatcttccactgctcttgctgagatgaagggttctgtcatctttaaaactatagcagttcaaaagactaaccttctagtttttcttccttcccctctcaatgtacaagcattagagaaattctctaatttttttttgaaattaatgatttttaagtataattacacaaaagatactagctatgaatacagatttaaagccatcaagatgtttgccataacttcccaccaataaatcctgccagcatccagtgacat

SEQ ID NO: 543233 - DNA, 598 bp, Homo sapiens
cagggaaggtggagaataggctgttcactaacaaaaagattttggaagggaggttccaggctcttcgttttccagtgttctaccctgaattcctaacttctaattgctagtgtctctgaggttagacttgaacaatgatagtaagttgatttctgtgtgcctgagctaagatgttcacaatcaactctgggatgtatcacctctcttctctatctggtgaccctcctaatgtggttactgatcctatttgaacttaatgctgcatctggaggtcagaatttctggtcggccscttgttggatgcatcatactgctgcccttttcatcctgttcaattctgtagcctatctgaatgggctaaattaaacagtataattcagtataattttggatggacccacgagctctagaaattgagaaaaaaaacatgaatgtatggctaggttacaaaaacattaaaaacattttatatttcacatttggagtcttcttttttaaataaaaaaatccatgtgtaaattttctaaaaatgtattgttaggaacgtgtttgggggtgcttttataaatgcatgcatgtacatacacattaggcaaag

SEQ ID NO: 543234 - DNA, 551 bp, Homo sapiens
gtaagtaatatttttaagtcacaataaaacacttatctggatattatttattcagataatcataacagctcaagtataggatgcaaaggggaaaaatacctttgaaaaatttgaattgtacaaatccatacaaaagagagatgggacaaaaaataaaatctgcattttcttcatggaagacgctgtcgagtcctcctattaattatttattcagattttaaaaactattcaaaaaggctttacgtatattttgaactctattatgtattatcgttctctgtggcccaaaggaattttgaagcagaaattcaataaatggcataaggatactggaatagtggatgagaggagacatgatgcagccaaaagaattccatctcaacttgaggcattctggagagggttcaagaatccagcatatcttaacagtgtccaagtatctcacratatgatggcagaatttgtcaccagtaacagacaccaagtacaaattattattattttattttactctttgtgatgtatttatttatttatttatttatttttga

SEQ ID NO: 543235 - DNA, 596 bp, Homo sapiens
agtaatggcctgtgagccagattgttacttggaactttaggacccttgacgggtttgagaatagtgccaattcttctaggatgtgtttgggtttcaaagcattttgaaaatatttggtagacatgtgcaaacataccaaatgtgtaattgtccctgaaagcaggcatctaattgactatttagtgacaacataacatgggcctcatttcttaagaaacagtaggtggtcaaaattttaggagaatatactccacagaaactcatgtagcgtagctcagtgatatgcctatgaatcttgaatattaatttttctttcctcatgaaaaatgcatctatccatatacgtataaatattttttcttttttaagcaaaatacttagtcaacttgtaaargaataaagaattctatataaaagttttaaaaattgctttagaacaacgtcagttggaaaaaaattcataatttttcataaatacattttctttgtatttaaagcaaaatatttaacaaagtatgccacatatgaaaaatgtgtatgaagaggtcgggttagtctcaaagtaatctgatggtaaatcatgcctatcagaggta

SEQ ID NO: 543236 - DNA, 482 bp, Homo sapiens
gcatctgcttggcttctggggaggcctcagggagcttttagtcatggtggaaggcaaaatgggagcttgcacagcacatagcaaaagcaggagcaagaaagagtgtggtggagggaggtgccacagacttttaaatgaccagatctcatgagaacttattcactatgrcaaggacagcaacaaggggatggtactaagccattcatgagaaatctgcctccatgatcccatcacctcccactaggccccacctccaacaatggggattacaaatcggcatgagatttagaggggacatatatccaaactatattaatacaatcttttgccatgtatatttagaaagaaaaatgtcttcaatttctgttttgaaaaaatgcattagtttccctaaaagtgcagcctgatacatagatttttaagtacatctctaaggacatgaggcaagcaggatgacacaggggaagaaactaaggaaaggt

SEQ ID NO: 543237 - DNA, 482 bp, Homo sapiens
gcatctgcttggcttctggggaggcctcagggagcttttagtcatggtggaaggcaaaatgggagcttgcacagcacatagcaaaagcaggagcaagaaagagtgtggtggagggaggtgccacagacttttaaatgaccagatctcatgagaacttattcactatggcaaggacagcaacaaggggatggtactaagccattcatgagaaatctgcctccatgatcccatcacctcccactaggccccacctccaacaatggggattamaaatcggcatgagatttagaggggacatatatccaaactatattaatacaatcttttgccatgtatatttagaaagaaaaatgtcttcaatttctgttttgaaaaaatgcattagtttccctaaaagtgcagcctgatacatagatttttaagtacatctctaaggacatgaggcaagcaggatgacacaggggaagaaactaaggaaaggt

SEQ ID NO: 543238 - DNA, 482 bp, Homo sapiens
gcatctgcttggcttctggggaggcctcagggagcttttagtcatggtggaaggcaaaatgggagcttgcacagcacatagcaaaagcaggagcaagaaagagtgtggtggagggaggtgccacagacttttaaatgaccagatctcatgagaacttattcactatggcaaggacagcaacaaggggatggtactaagccattcatgagaaatctgcctccatgatcccatcacctcccactaggccccacctccaacaatggggattacaaatcggcatgagatttagaggggacatatatccaaactatattaatacaatcttttgccatgtatatttagaaagaaaaatgtcttcaatttctgttttgaaaaaatgcattagkttccctaaaagtgcagcctgatacatagatttttaagtacatctctaaggacatgaggcaagcaggatgacacaggggaagaaactaaggaaaggt

SEQ ID NO: 543239 - DNA, 567 bp, Homo sapiens
gttttctggaatgaggatctcaaatgaagagggctttaataaagagatataggcacagttttaaattgatactgaaaagaactcataaaaggaaggacatttttatgtgtgtatgaacattttagggaattcttgatttcttaccagtggcattgtctaagacgaaatgacctagatgctgggaaatgactttgttgagaactgttgtgttcagatacgwttgtcctggtggggccagaggaagagccacatctctgtgaaggtgaggtctgtccttaagggagaagatatttcttcagctaatcaactaggaaaaatgaacatcctgtaacaagaagtcaaatcttatggtatagtgaaaggaagacatttttccccatttaaggtcttggggcagtgaagattaaactcaagggtatgatatagtcagggcactctgtagaggtatgagctggcactctgtagaggtatgacctggtagtgtcatgtttcttactgaagataggctagtctttacatatatgatatgagacatggattttatgatcaagaggctataagtccgtg

SEQ ID NO: 543240 - DNA, 567 bp, Homo sapiens
gttttctggaatgaggatctcaaatgaagagggctttaataaagagatataggcacagttttaaattgatactgaaaagaactcataaaaggaaggacatttttatgtgtgtatgaacattttagggaattcttgatttcttaccagtggcattgtctaagacgaaatgacctagatgctgggaaatgactttgttgagaactgttgtgttcagatacgtttgtcctggtggggccagaggaagagccacatctctgtgaaggtgaggtctgtccttaagggagaagatatttcttcagctaatcaactaggaaaaatgaacatcctgtaacaagaagtcaaakcttatggtatagtgaaaggaagacatttttccccatttaaggtcttggggcagtgaagattaaactcaagggtatgatatagtcagggcactctgtagaggtatgagctggcactctgtagaggtatgacctggtagtgtcatgtttcttactgaagataggctagtctttacatatatgatatgagacatggattttatgatcaagaggctataagtccgtg

SEQ ID NO: 543241 - DNA, 567 bp, Homo sapiens
gttttctggaatgaggatctcaaatgaagagggctttaataaagagatataggcacagttttaaattgatactgaaaagaactcataaaaggaaggacatttttatgtgtgtatgaacattttagggaattcttgatttcttaccagtggcattgtctaagacgaaatgacctagatgctgggaaatgactttgttgagaactgttgtgttcagatacgtttgtcctggtggggccagaggaagagccacatctctgtgaaggtgaggtctgtccttaagggagaagatatttcttcagctaatcaactaggaaaaatgaacatcctgtaacaagaagtcaaatcttatggtatagtgaaaggaagacwtttttccccatttaaggtcttggggcagtgaagattaaactcaagggtatgatatagtcagggcactctgtagaggtatgagctggcactctgtagaggtatgacctggtagtgtcatgtttcttactgaagataggctagtctttacatatatgatatgagacatggattttatgatcaagaggctataagtccgtg

SEQ ID NO: 543242 - DNA, 567 bp, Homo sapiens
gttttctggaatgaggatctcaaatgaagagggctttaataaagagatataggcacagttttaaattgatactgaaaagaactcataaaaggaaggacatttttatgtgtgtatgaacattttagggaattcttgatttcttaccagtggcattgtctaagacgaaatgacctagatgctgggaaatgactttgttgagaactgttgtgttcagatacgtttgtcctggtggggccagaggaagagccacatctctgtgaaggtgaggtctgtccttaagggagaagatatttcttcagctaatcaactaggaaaaatgaacatcctgtaacaagaagtcaaatcttatggtatagtgaaaggaagacatttttycccatttaaggtcttggggcagtgaagattaaactcaagggtatgatatagtcagggcactctgtagaggtatgagctggcactctgtagaggtatgacctggtagtgtcatgtttcttactgaagataggctagtctttacatatatgatatgagacatggattttatgatcaagaggctataagtccgtg

SEQ ID NO: 543243 - DNA, 534 bp, Homo sapiens
gcatgccagtcttggcagcacagcgagaccctgtcaaaacaaacaaacaaacaaaacaaaaaactctatatagagagataatgagtaaacattttttaaaaaatgaattaatacaaacatactgggatcttgttcagtgtaaggttagtcccatgtgtttctgaactttaccttgggtttgtagtcaatgtatatgtgttaggtaagtgtttttgactttatgtttatgtgtgacttggaaacaatattacctcatttgaattactggcatattaatgatrtcaaaaccttatcttttgagcattttttctacttaaattcagagctgtttcatttgaacactgtgtttaccaagctgaaaagtctcatgttctcttggataatctccagtcagagttatctataaatgatacttcagggactttctttacaaactgaatttggttttctttgtacagtgcaaataagtaaaaccaaaaattaaagtacatgaaaaaacatttgagctagttatttcttcagctagctcacatg

SEQ ID NO: 543244 - DNA, 531 bp, Homo sapiens
tgccctgggtctccttccctcctccctcagttccctcttccccaatctaggagatgagctagggctacactttctagaaaaatacctcaccccacttctccaccttcccagcctgccaggagctccttagccgccgcctgctctctcttcgccccagcttttctagggaaagcttggccctgcgcttcccccagaaagcatgcctgggtgaggggccaggtgacacttcytacgatctggattttaaaatatgtttgcttatgccttcaccctccaccaacccccaccccgcacgccacctcttcaccagagacgactttgtgagggcccggtttcacatttctggaatgggtgatctgggacgcggctcaattccctagagcataaggagggaattgcgctttttcttcttcattcgagaaatgatcggctcccgccagtctgcgtgctttcactcaacagcagctgcaagccctaggccagcgtcgcagaaacggccaggaaccccactttcctacccgggggccagca

SEQ ID NO: 543245 - DNA, 472 bp, Homo sapiens
ctaatcccattcaagagggcttcaccctcatgacataatcacctccaaaaagccctacctcctagctaccatcaaaacaaaggttaggatttcaacatctgaattttgggaggacaacaaatgtgcagtccattgcacctacctaccaacaacacaattcttacaagatggtagaagtaagaaatgagaggaaccacatgggctatgagtaatgttctggtaattgtttattttcaggatggattgaggctttycctgcagtctctgatataataggcacactttgtcctaaaggatggcaaaaagagtgacttctgagctggggcttctgttgcccttctggaaggccattccagtattgcacaaggccagttgcttctgaatgggcaaagaaatgtcatgggccacttctggactccttcactatgaaaagtgtttcctgattggtgtctgtgctgtatggaatttcaca

SEQ ID NO: 543246 - DNA, 539 bp, Homo sapiens
cacctgcaaatttatgctcatttgagtctatatttatgtgacagctgtcagtctgaaatcaaagctttgtgaatcatacattgagataagctcaattaactacatcaagaaagtttgatagcaaaagtggtccagaaacatttcatcatgaagattgcagaagtcattgagtccctagacacaatccttgcatctaaagtaacagttatcagttttaacrcaaaaagtaatagatgtagaagttacttgaaataaaaggctaaaatacaacctttgtcctaaatgcttttgtaaactgatcaaggactcaaagcccacatgccacatccatttgtcacacagttattgaaaaggagtcagtgttgactggtgcacttggagaagtctttttgcaagagtagagtgaatagtgagtactgactgatcaagaggaggcaaatacatggaggaaaaagagaaagatcattttagactgtaaattccctgaaggtagaaaatatatctcttcatattatctgtcaagcatctaccacacaggt

SEQ ID NO: 543247 - DNA, 646 bp, Homo sapiens
gcaaacacagtaatgttttagaatatttttgtctaaaaatggctttaattcatacttatacttaatggtttgatcggatatcaaatttagtttgaaatattttttctctgagttgtgaagatatcatgctcttcacttcttgatttcagcgttgctgttgaaagttctatgtcataatttttcatcctttttatatgaccttattccagggttctgatatttcacaatatgccttagtgagattactcttttctatattgtactttgctttttgatggactctttaagtctgaagtttcatgtttttttagttccaaagcttttacttatattgttttctagtgtattttttttctgtcttctccctatcttgaactggacatttgactccctggactggtcatctaattattgttaacttttctttacaattttgcatctttttttatttatgttttatcttaaggaaaatttatctgattttattattcattcctttcattgactttttttattcttgccatcatattttttgaatttccaggaatcttttcttaagtattgcttttttgttcaytattccatatattaaaattatgctgcttcaattttccttatccataaatttctattttatattatcatt

SEQ ID NO: 543248 - DNA, 474 bp, Homo sapiens
ctggtgcacatccaaattcaaggcaactgcacaagctatatatactttacattagaaattagagaccaaataaacagaagcaggtgaaccaaaagaacattacaagagattttcagacacccattaaacacaacagctctgttctgaacaactcctgtgcgataagggaagagcaagaactcacgtggtatgagaaatactgcaataagaaggctcaagtaaatccctttttgggtctatttttgcaaaattaagaattaaaaaaaagaaaatttgagacagcacatagaaaaaatcaaaagcataaaggaaaaaagcctataagtttttaagagaatagaaaataactttaatgaattaagcttatacccaaatgccatttctgagtgtctgtaggacatgccttttgagrgaaaattgagtctgtcagtcacctcttccctgtgttaagcctaggtgccaatacttgcctga

SEQ ID NO: 543249 - DNA, 578 bp, Homo sapiens
gtttaaatacataatgtaagaaaagctcccttcacaactataaaaaattattaaaatcttaaaaaggagcatgaaaaaatatattaaagatttgctgaaaaataataaagttaaaataaacaactcgtgtgggatgcagaatgatttgatcaaatgatgtcataccttactgtggaaggctgagtccatggaaaactcaacattataaaaatattagttctccataacttatacacttaacatgatcacaataaaaatattaacagaatattttttagagggaactcagaatagcaagtttaaaatttatgtggaagaactaattcaaaggagtttagcttttgcttaggatgtataaaactgtcagagaacactgttagaagaatctggatgatcaacaaaatcataacttttcttgaactgttcataaagctgcagtcataaggaactaactacactaaattccaaagtataacaaacccttccraggcgagaactcacaatttttttttcaccattagtagggcactaagaagagttacctactgcaaaggtgagtaagaaaaaaaaaaaagcga

SEQ ID NO: 543250 - DNA, 561 bp, Homo sapiens
ctgcaagcactgcagcttttatctatgcaaactttttgaaatgctacatcagtgagtattctcagggcaaatgggaaaagggttacaacctcagccagaagtatagacagctatgttcagtcagatgataattattctgagaaatgatttctccacagcatcagtgaaagcttgaggaaagtggaatgatatatttaatatcctgagagaaagtaactgtcagtgcagarttgtatactagaaaaatcacaagaattagggcaaaataatgacattttcagataaaacctaacagagtttgtccacaatagactaaggaaaacctaaaatatgtatttcagtgtagggtccagccctacagggcctgtgggtttttctcttcatgtgcggagaggagagatcatagaaataaacacacaagacaaagagatagaagaaaagacagttgggaccaggggaccactaccaccaaggcgtggagaccggtagtggctccgaatgcctggctgcgctgttatttattgcatacaaggcaagaaggcagggtaaggagtgtgagtc

SEQ ID NO: 543251 - DNA, 596 bp, Homo sapiens
agaaaatttaaagtaccgccattctacaatactgtttgatagggaaattcagcatttgaaatgtacgctaaaaagtaatgattccaggtttaaaaagaattaatgctcctaggaagcttaatgttataaatgttataaaatagacttttgctagtcaatttcaggttgtttttttttttttaatttctatgcttgcattattatctcaactctttaactttgtatctggactaagtttagacataaaaattaaaaatgaagcagtagattatgttgcttgctgtttctaatttaacaccagaattttaatagtatgcaatcttcaagggttggtagtctggtaaaaacttgaagcaatagtttcatagaactttaactaagataaagtattaattgtctatgccaaagagggtgagcaatgatagagattataaagagcctagggcttccctgagacccascttggtgctaccactgttaagagaaaattaaaaataaatgaacaatagtttccaactctaaaacatattatatgcagtacatactttaacctagtttacaatttatatttattatgcccactgaacccacaaaag

SEQ ID NO: 543252 - DNA, 573 bp, Homo sapiens
gtctcctccacatactccgcacttgtcatactgcagctttgagccaatgatgccgtcacagccagttctcacacacttcccccggacgcagacggaattactgtacrgcctacattcagtgccatcggtcacctgaatcatggcaaatgcattaggagtgggaaatgtttgcatcagtatttgctcctttggtcaactagtaagttctcatttgtgattttttgagtttgattggtatggacagtccattgaaaaaaaaaaaagccaaaaaaacatagtttccagaagtagctaactgaaaaatccttgtcatattgccagaaagcagattttggataagcctaggttacacattttctctcttaaccttacctctgaatgtgttaagagacacaaggtactcatcttcgtttttgtatgcataatacattctcactagaagtaatcttttcacttagtgtttcagactatcatttgtgtgcagaactgaatatgagcaggcttgagaatgcaaagatccttctttgttgcatagttgttattataatgacaaatttgaaaatctaaacttga

SEQ ID NO: 543253 - DNA, 578 bp, Homo sapiens
cccttttacttgctgggagatgcgttctgaatgcagacacggatgtatgacttaaatacagaatcccaggattctctcttgtggttctgagaccagagcttgtcacaawtgcaaaagaagaaaaataatttttcttcaaccctcataaattcttagttaaaaaggaccactgtaacaaagaacagattaacaagaggaaaacaaacagaagttcattaacatgtatatttcatacagatgtgtgagacacccagggaatgagtaattttcaaaaagttggctttgaatttctatttgcatacctagcatcttaaaaaaaaacagtaaatttttagataagtactaagacacaggaaaaggactttgagactctagaagcagcaacttgtgggaaggcaaataaacagcagataaaagctaattaccacatctcatttctgttggtccgtatctccatgcacagcagagacagtgaaaacccaagcatgcatcttctcagtgagtcagcccaccttccttcgagtgttggtgaagatgacttgcctgggtgatggtcagagtttcatacaagtcacgca

SEQ ID NO: 543254 - DNA, 578 bp, Homo sapiens
cccttttacttgctgggagatgcgttctgaatgcagacacggatgtatgacttaaatacagaatcccaggattctctcttgtggttctgagaccagagcttgtcacaaatgcaaaagaagaaaaataatttttcttcaaccctcataaattcttagttaaaaaggaccactgtaacaaagaacagattaacaagaggaaaacaaacagaagttcattaacatgtatatttcatacagatgtgtgagacacccagggaatgagtaattttcaaaaagktggctttgaatttctatttgcatacctagcatcttaaaaaaaaacagtaaatttttagataagtactaagacacaggaaaaggactttgagactctagaagcagcaacttgtgggaaggcaaataaacagcagataaaagctaattaccacatctcatttctgttggtccgtatctccatgcacagcagagacagtgaaaacccaagcatgcatcttctcagtgagtcagcccaccttccttcgagtgttggtgaagatgacttgcctgggtgatggtcagagtttcatacaagtcacgca

SEQ ID NO: 543255 - DNA, 578 bp, Homo sapiens
cccttttacttgctgggagatgcgttctgaatgcagacacggatgtatgacttaaatacagaatcccaggattctctcttgtggttctgagaccagagcttgtcacaaatgcaaaagaagaaaaataatttttcttcaaccctcataaattcttagttaaaaaggaccactgtaacaaagaacagattaacaagaggaaaacaaacagaagttcattaacatgtatatttcatacagatgtgtgagacacccagggaatgagtaattttcaaaaagttggctttgaatttctatttgcatayctagcatcttaaaaaaaaacagtaaatttttagataagtactaagacacaggaaaaggactttgagactctagaagcagcaacttgtgggaaggcaaataaacagcagataaaagctaattaccacatctcatttctgttggtccgtatctccatgcacagcagagacagtgaaaacccaagcatgcatcttctcagtgagtcagcccaccttccttcgagtgttggtgaagatgacttgcctgggtgatggtcagagtttcatacaagtcacgca

SEQ ID NO: 543256 - DNA, 351 bp, Homo sapiens
tctttactggttctcatagaatcgaaaaattaataatatagatttttccaaaaaataaatagtagtaagaataatacttatctattattcattataacaaccaaagggttatattagccttgatactaacaacctttcaagttagatcttattacgtgatttcatagttaataaaattgagatctggaccgtttaagtaatttgcccaactcacctagctstacgtaccagaaacaggcttccagaccagatatacaaagtcccatagcactcctcattcccactgttccacactgcctcctgcaaaagttcgtatttacttctctgctcgttaagatagagataaaagat

SEQ ID NO: 543257 - DNA, 351 bp, Homo sapiens
tctttactggttctcatagaatcgaaaaattaataatatagatttttccaaaaaataaatagtagtaagaataatacttatctattattcattataacaaccaaagggttatattagccttgatactaacaacctttcaagttagatcttattacgtgatttcatagttaataaaattgagatctggaccgtttaagtaatttgcccaactcacctagctgtacgtaccagaaacaggcttccagaccagatatacaaagtcccatagcactcctcattcccactgttccacactgcctcctgcaaaagttcrtatttacttctctgctcgttaagatagagataaaagat

SEQ ID NO: 543258 - DNA, 509 bp, Homo sapiens
cgcatttggttaaacttatgataatccactgtcattctccaagatccatttgtcttctgcacaggccaaatagaagatttgaacagggagtggaatcacctctcccgwgtctttcaagtccttgagggtggcactaatctctggcttccctccagggatgtgatattgtttttgattcactcttttttctttgtcatgtgacgtaagatttattgacttcatatggctgctgttggtttcccatgtaattaaaatgccctctgggtcaatagaatcaaatatttaaaccaattaatgaaataaataattatacacatctatcactgtatacagtaaaataaatattatttgcattgttctttagtcagtgaacaacgacctcctcttttcttgagttgatatgaaagttgcaaggtcgacagttaactcattaaagaaaaaaaatcatagagattaagataagggataattatatagttttatgtgtatttacctgaaatgttgttaaa

SEQ ID NO: 543259 - DNA, 509 bp, Homo sapiens
cgcatttggttaaacttatgataatccactgtcattctccaagatccatttgtcttctgcacaggccaaatagaagatttgaacagggagtggaatcacctctcccgagtctttcaagtccttgagggtggcactaatctctggcttccctccagggatgtgatattgtttttgattcactcttttttctttgtcatgtgacrtaagatttattgacttcatatggctgctgttggtttcccatgtaattaaaatgccctctgggtcaatagaatcaaatatttaaaccaattaatgaaataaataattatacacatctatcactgtatacagtaaaataaatattatttgcattgttctttagtcagtgaacaacgacctcctcttttcttgagttgatatgaaagttgcaaggtcgacagttaactcattaaagaaaaaaaatcatagagattaagataagggataattatatagttttatgtgtatttacctgaaatgttgttaaa

SEQ ID NO: 543260 - DNA, 509 bp, Homo sapiens
cgcatttggttaaacttatgataatccactgtcattctccaagatccatttgtcttctgcacaggccaaatagaagatttgaacagggagtggaatcacctctcccgagtctttcaagtccttgagggtggcactaatctctggcttccctccagggatgtgatattgtttttgattcactcttttttctttgtcatgtgacgtaagatttattgacttcatatggctgctgttggtttcccatgtaattaaaatgccctctgggtcaatagaatcaaatatttaaaccaattaatgaaataaataattatacacatctatcactgtatacagtaaaataaatattatttgcattgttctttagtcagtgaacaacgacctcctcttttcttgagttgatatgaaagttgcaaggtcgacagttaactcattaaagaaaaaaaatcatagagattaagataagggataattayatagttttatgtgtatttacctgaaatgttgttaaa

SEQ ID NO: 543261 - DNA, 610 bp, Homo sapiens
ccttccctgattttctctttcacttaaaaatggactaaggaattccactctgtttatattttatagcatatatttaaacatttctttcacattattgttggctaagttttatagttcttcaatgctgattgctacagtgtctttcaaatccaggaaaaatatgcaactttgatagtcccaatgtgcctgcagatttgtaggtggaaggaccgattgctttatgattaagagtctgcaataatttgtttaaaaactttaacttgcaggctgttaatgattggactaagtgactgaggaaagatcaactttaattgtatgacttaactctactaagagtttcataaacacattttaacagttttgttagaatagttatcataacataaatgtatatatttttttaaaatgtgtaatattgggagtggaatttatatgaaaaccaactaaaacatattyaccctgtgatgtagccccttagcactttcataaaaagtagtatgaatgttcactttatttcaaaaggatattattagatcacatataaaagttaaatatacctaaaagatagcaataatctaattatgtaatcagttttagtttgggaattatt

SEQ ID NO: 543262 - DNA, 292 bp, Homo sapiens
gtagttaaaaattgaatgtatttgyctggaacttctgacgctatcctggatggatgatgaaattttgaatgatgagagaggaaaagacaaatgtgtagaggaagaagagcagacatgagagccttgagtgagactcttagaacttcctacaaatgtctttgtaattggactcatgtgtcatctcctctatgaaactgcaggtcgcttaatgtccaggtctgtaacttactctcccttcaatcaacagacgagcccactagcatgctgtcatgtgtaaaacaaggactccata

SEQ ID NO: 543263 - DNA, 617 bp, Homo sapiens
cagggagcctcagagcatgtgttgttaacaagtcctccaggtgattcttataataatgactacattgtgagaaacttgaaacgtaaattctgccccaacctcctgactgtcattgcatctcccagattactaaccagattttgacagattttcaggtttcatacttgcctgacggacatgtttttttgttgttgttgttgtttttgasagagagtctcgctctgtcgcccaggctggagtgcagtggcgcgatcttgactcactgcaagctccgcctcagcctcccgagtagctgggactacaggcacccgccaccacgcccacctaattttttgtacttttagtagagatggggtttcaccattctagccaggatggtctcgatctcctgacctcgtgatccacccgcctcggcctcccaaagtgctgggattacaggcgtgagccaccgcgctcggccttttttttttttttttttttttgagactgagtctcgctctgttgcccaggccagagtgcagtggcacgatctcggctcactgcaagctctgcctcccaggttcatgccattctcctgcctcagcctcccgagtatctgggaccacaagtgcccacca

SEQ ID NO: 543264 - DNA, 617 bp, Homo sapiens
cagggagcctcagagcatgtgttgttaacaagtcctccaggtgattcttataataatgactacattgtgagaaacttgaaacgtaaattctgccccaacctcctgactgtcattgcatctcccagattactaaccagattttgacagattttcaggtttcatacttgcctgacggacatgtttttttgttgttgttgttgtttttgacagagagtctcgctctgtcgcccaggctggagtgcagtggcgcgatcttgactcactgcaagctccgcctcagcctcccgagtagctgggactacaggcacccgccaccacgcccacctaattttttgtacttttagtagagayggggtttcaccattctagccaggatggtctcgatctcctgacctcgtgatccacccgcctcggcctcccaaagtgctgggattacaggcgtgagccaccgcgctcggccttttttttttttttttttttttgagactgagtctcgctctgttgcccaggccagagtgcagtggcacgatctcggctcactgcaagctctgcctcccaggttcatgccattctcctgcctcagcctcccgagtatctgggaccacaagtgcccacca

SEQ ID NO: 543265 - DNA, 490 bp, Homo sapiens
ttttctttttaaaaatagctttcttcaacttaatccttttattcattttgatttgagtccactgcacttctgttacctgttggtttatagttttaccaagttttaaaaatatctcaaccactacctttataaatagtttttgccctccccccatttcctgggatttcaattatgtgtgttgttaagctgcttaatattttctaattccataatttctgtcttttcttggtctgtttctattaactttttgtcttgttttggatctttttttgtttatatgcatttctgtttttttttttttaatgtctaagggaaattctgaattgtacgttgttaggatctggattttgttttatttctttaaagagagatgaactctgttttcaartgcagttaagttatctgagatcaatggtgatattttttgcttttaaatgtgattataatggcttcagagccttgactctagagctgattcacccccctacta

SEQ ID NO: 543266 - DNA, 406 bp, Homo sapiens
aaaaaattagccggccatggtggcagacgcctgtagtcccagctactcgggaggctgaggcaggagaatggcrtgaacccgggaggtggagcttgcagtgagccaagattgtgctagtgcactccagcctgggggacagagtgacactctgtctcaaaaaaaaaaaaaaaaaaaaagtgagctgttgttattgaactttttattattacttaattacaagaaaaaaacaaagtaaacaaccaaaaaaattatagtgttgagaaaatgccaaggctgctcacccacttctttaaccattcttcaaacttaccatatatattttttttgactaagtgagataaatcacattgaaatgcatgaaataatgtctggcatccggtagatgctcagtgactttgtccccttt

SEQ ID NO: 543267 - DNA, 406 bp, Homo sapiens
aaaaaattagccggccatggtggcagacgcctgtagtcccagctactcgggaggctgaggcaggagaatggcatgaacccgggaggtggagcttgcagtgagccaagattgtgctagtgcactccagcctgggggacagagtgacactctgtctcaaaaaaaaaaaaaaaaaaaaagtgagctgttgttattgaactttttattattacttaattacaagaaaaaaacaaagtaaacaaccaaaaaaattatagtgttgagaaaatsccaaggctgctcacccacttctttaaccattcttcaaacttaccatatatattttttttgactaagtgagataaatcacattgaaatgcatgaaataatgtctggcatccggtagatgctcagtgactttgtccccttt

SEQ ID NO: 543268 - DNA, 582 bp, Homo sapiens
aaatgccaaaggcaactgcaagaaaacaaaaaattgacaaatgggacctaactaaactgaagaactctgcacagcaaaagaaactgtctgcagagtaaacagaccacctacagaatgggagaaaatgtttgcactgatttactttcacaaagtcagtttgtgaaagaaaaagagaacaagtggaatttgaaaggcaatggctaatttcttatgcatcagtgaagacrttggaatccaatagagttgagtgcaaaggtgagcacactgctttcttgctgtgtaactttgaataattaacataaacgtttaagtagattttcttataccagtactcatcacttaggattgtgatcaggatggaagtattatggtctaaaagttccacatacaacaatacctggcatataatatttaacaagtgataatatacttatcttctcatttgaatgaataacttttaaccttgaaatataaaggaatttgctaggtcacactgactaattacaaaggttaaattgattaaagtttctgtacttaggtttgcctgataaaatatttaaaaactatgtattttggtttaat

SEQ ID NO: 543269 - DNA, 569 bp, Homo sapiens
agaactcactatatcaagaacaccaaggggaatatccaccctggtaatccaattacctcccaccaggcccctccaccgacattggagattacaatttaacataatatttggcagggacagaaatccaaaccataacagtggctcatcactaactgttcatattctatgtttatttttactctttctcctagtcactgaaatgcaacacacacacacacacacacacacacacacacacaaacacaatctttaaaatcagcttcaaatcagaactctaactgtccagtgagaaaaatgaaatacacaaattagtatcatctcagcatcactctaccacgttgattacactgagattgttttcttttcctcttgtcttcttctcttctcgtctttctttttttctgtgggaccactgtcttcccttagcttctgttacarttcttttaggactctgtgagtgcttctttggcaccgttaaatcttgggatctatgttcaaaagggtccagaatctaataatattacaccatttttcctgctaacattctggtacaaaccactatcatctgt

SEQ ID NO: 543270 - DNA, 513 bp, Homo sapiens
cattaccttaagcatttttccttctgcaatctacgcaaactacagtctatctcaacagaacaggcaatgtaaacttttataaatataagtcagctcaggtaactgtttggctcagaatggcttccctgttcactcaaattaagagcccaaatccttgctacgacctgtgtacttggcctaagtcactgtttattctcagatctcatctgcttttctcctacttgctctgtccactataaacacacatttccaggtattcttcagtctaaggcttctgaacctactgtttttttctccccccaatmttcacattgttagatgtcacacctgcttcagaacttttctcaagtattaccttctcagccagggtttccctaacccttattttaaaaattataacctctcctctcctcctgacactaagtactctattcccttttcctgctttatttttctttctcacatataccaccttctaacatttactgtatcttacctttttataagaggtaa

SEQ ID NO: 543271 - DNA, 574 bp, Homo sapiens
ttccaggaaaaagtagatagtaactaaaactctctttgatttcagacttgatacatattttcagcttgagaatccttatttctctgtttagtaaaaggtggctgggttcagtggctcatgcctataatcccagcactttgggaggccgaggagggcagactgcctgagctcaggagtttgagaccggcctggccaatgtcatgaaacctaatctctattraaaatacaaaaattagccgggcatcgtgccaggcgcctgtaatcccagctacttgggaggctgaggcaggagaatcacttgaacccaggaggtggaggttttggtgagctgagatggtaccactgcaccccagcctgggcaacagagtgagactctgtctcaaaaaaataaaataacataaaataaaagtaataaagaaaacatgtaaaaatgtgcgcttgggtgtacctgggaatggttcacgtttgccctttcgaaggcagcaaggcagagagaaaggcacgtggagtttgcagtcagatggaccagactgggtttgaactaggggtctggtcgttacccacaggtgacccc

SEQ ID NO: 543272 - DNA, 525 bp, Homo sapiens
acagaccttgcctatgtctgctttgtgaagagagaggatcctcaggcttgacaacacaataaatcccgcattcttgtctcataagcaggacagaactcagtaccatcctaagattgctttcaaagagtcctgcctaaccaaacacatcctcatgcctctggtttctcggctstcctatctccccagttacaggtttggttgaagtttcaggaagtgaaaattcgatcccattggcagctctcccagctcagaagccctctgaaaggagtgaagaatcaatactcaaaacccacacttgctattcattcacgatccctaacaaggaagccagggaaggaaggaacaccgggagccaccaccattaattgtcaaataaaagccatgggacccagaggcagtcacaggataatcctatctcttccagcaatcagaacatgataaacaaaaatattccgtgtgcccaagtcagttaccatggactttggaatggaagaccagagtgatgctgccagtaacattctccag

SEQ ID NO: 543273 - DNA, 647 bp, Homo sapiens
gagccgccactgacggagatggggaaagcggatgtgcaagatgacatcaagaacttggccttggacacgttcaacttgaggtgctaattaaactgggaagagcaggtggtggcaggcagttggagttgaggggatggagatgtgaacttggggggcgccagcagggaagtgctacttggrgccggggcccagaggagctccccagggagggagggtcagccggtggacagagctctggggctgcctgtgagaggcagaatggggggattccaggaaagatatgaatgagcaagaagctgtgaaaacaatttctgtccacctgaaaaatgtacacggcacagacgtggaaggaaaggaatgaggatgatattaaagtattaaaatcccacgtacttgagacagtaacgataaataaaaataaacccagtgttgccagggatgtgagaaataaaagcattattttgttgccagaggggcactgaaaatagatttaatgtagtcgagagcaggcaccaactatgcggcaggagttacgaaactctgtccccagaaatattctctaagtggggaggtggcaagttcaaaaagaaacaaatgataacagccttctcaaagctctgaaagcagcgctctcacactgggcaaag

SEQ ID NO: 543274 - DNA, 321 bp, Homo sapiens
agagaacaaaagtgaaactccccaccgctctgtttccctcctttcccttccgcctcctcgccctgagctggaacgagggggacgtggaaccctggctccatgctaagaccccgctgtgggcaaccggccctgaccccccaaaataagcaaatcgcaaggtcaaatttagactcccaggccccrgggctccaatggctccaatcccctggactcacagaacccgaagagccagttcctctgggcacagaacaacacgcgttgggcactgacaggaagggaaagaaaacagcctgcggaggtatttccagcgtgcccagggca

SEQ ID NO: 543275 - DNA, 562 bp, Homo sapiens
tgctgtgggaagcgagatttctggagaccagagaggctgtggagacatttgacccaatctccttggctccatctcactggcttagtcatttccaccacctggaggctggaatgtgcttcgagtctatttcctgtactgctcacagggtcaataccggagccggcggacccaaccaaaggtcacccgtggccagagcctggcccggcgccagacagggctttccccccgaagaggggccgtgagttcttctagtaatcatttgcatgacttatggagatgctgttcatgatgccttccccaggaggaaagcagcaatgctgagtaactgcactaactccccaggtgagcctcagatgccgcgtgaacagtctctgagagtgaagaccagactgcacgtctgccgtccctcccaggaccgactgatggaaatggtagtgccatcggctgagcccctgccaccctcttgctccctcccgggtccccacagatgcaccaggcaccctwagtcaccttacgggcgttcagaaagtcatggctgtgtgtaccgagcatttcccaccat

SEQ ID NO: 543276 - DNA, 376 bp, Homo sapiens
tggtgttgaaggggctgttcatttggggcagcagaacgagcacaacgcttccccccttccacacacactacacaacagagggtgcraccggggcctgcacaggggaagccagagagggctggtagagcccagatccggctggaccacctgacccgcatcttgattcctggggagacgccacaacacctccactccctggggagaccctactcactcccttctcagtacaaacagggaaaggtctagaacaaggaatccgaactttctgttgttaccagatgggtggatgggttcaaccacaacctgctcgcctagcagggtgacctccccagacagggctaagggagcagggactcctttctgtgctgagctctga

SEQ ID NO: 543277 - DNA, 376 bp, Homo sapiens
tggtgttgaaggggctgttcatttggggcagcagaacgagcacaacgcttccccccttccacacacactacacaacagagggtgcgaccggggcctgcacaggggaagccagagagggctggtagagcccagatccggctggaccacctgacccgcatcttgattcctggggagacgccamaacacctccactccctggggagaccctactcactcccttctcagtacaaacagggaaaggtctagaacaaggaatccgaactttctgttgttaccagatgggtggatgggttcaaccacaacctgctcgcctagcagggtgacctccccagacagggctaagggagcagggactcctttctgtgctgagctctga

SEQ ID NO: 543278 - DNA, 376 bp, Homo sapiens
tggtgttgaaggggctgttcatttggggcagcagaacgagcacaacgcttccccccttccacacacactacacaacagagggtgcgaccggggcctgcacaggggaagccagagagggctggtagagcccagatccggctggaccacctgacccgcatcttgattcctggggagacgccacaacacctccactccctggggagaccctactcactcccttctcagtacaaacrgggaaaggtctagaacaaggaatccgaactttctgttgttaccagatgggtggatgggttcaaccacaacctgctcgcctagcagggtgacctccccagacagggctaagggagcagggactcctttctgtgctgagctctga

SEQ ID NO: 543279 - DNA, 595 bp, Homo sapiens
ctgggcatgttggcacacatctgtaatcccaactactggggaggctgaggcacaagaatcacttggacctgggaggtggaggttggagtgagctgagatagtgccacttcactccarcctgggcaacagagtgagactctgtctcaatacaataaaataaaaccatcagatcttgtgagactcattcactatcaggagaacagcacaggaaagacctgcccccatgattcaatcatctcccactgggttgcttccacaacatgtgggaattatgggagctacaagatgagatttgggtggggacacagagccaaaccatatcacatagtcacggggctgtggaggcccagggtggctgccttcaaccccaccggggctgctagacaccctcctccaggatttgaactgatgcccagcacgatcgggggcaggacctgggtgcagcttcccccactcttgtgcacgtccttagatagtatgtgaagcaaggcgctagccacaggctccaagagttgagagtgctggggtgcctcatcaggaactgtggtgcccctgcagctcctttctaggaaggcagagaaggcactcatgtcag

SEQ ID NO: 543280 - DNA, 595 bp, Homo sapiens
ctgggcatgttggcacacatctgtaatcccaactactggggaggctgaggcacaagaatcacttggacctgggaggtggaggttggagtgagctgagatagtgccacttcactccaacctgggcracagagtgagactctgtctcaatacaataaaataaaaccatcagatcttgtgagactcattcactatcaggagaacagcacaggaaagacctgcccccatgattcaatcatctcccactgggttgcttccacaacatgtgggaattatgggagctacaagatgagatttgggtggggacacagagccaaaccatatcacatagtcacggggctgtggaggcccagggtggctgccttcaaccccaccggggctgctagacaccctcctccaggatttgaactgatgcccagcacgatcgggggcaggacctgggtgcagcttcccccactcttgtgcacgtccttagatagtatgtgaagcaaggcgctagccacaggctccaagagttgagagtgctggggtgcctcatcaggaactgtggtgcccctgcagctcctttctaggaaggcagagaaggcactcatgtcag

SEQ ID NO: 543281 - DNA, 595 bp, Homo sapiens
ctgggcatgttggcacacatctgtaatcccaactactggggaggctgaggcacaagaatcacttggacctgggaggtggaggttggagtgagctgagatagtgccacttcactccaacctgggcaacagagtgagactctgtctcaatacaataaaataaaaccatcagatcttgtgagactcattcactatcaggagaacagcacaggaaagacmtgcccccatgattcaatcatctcccactgggttgcttccacaacatgtgggaattatgggagctacaagatgagatttgggtggggacacagagccaaaccatatcacatagtcacggggctgtggaggcccagggtggctgccttcaaccccaccggggctgctagacaccctcctccaggatttgaactgatgcccagcacgatcgggggcaggacctgggtgcagcttcccccactcttgtgcacgtccttagatagtatgtgaagcaaggcgctagccacaggctccaagagttgagagtgctggggtgcctcatcaggaactgtggtgcccctgcagctcctttctaggaaggcagagaaggcactcatgtcag

SEQ ID NO: 543282 - DNA, 302 bp, Homo sapiens
acctgcccctccccatcctgagacgctggatgcccacgttttctttttgccgccatttcggagtctgctggggaggagggcgratgccgtggccccccttgtcaggcggccctgcttatctctgcaagttgtctctggatgtctcacaggagccttcacaactccaggccctggaggttggccgagcccttgaaacttccccagcagccctggggcctcattgctgggtttcagcctgccgcactgttccctggggctctggcgctgagaggcccctccctctgaggggctcagttgcttgg

SEQ ID NO: 543283 - DNA, 639 bp, Homo sapiens
agtccatgtttgcgggaacctaaggaaagacccacttactcatcatctatgaaggtgtgggtaggagacaagagagccgtgcagagaaacgagagtcaggaagagaatgaggagctctgggcatggagatggacaccagggaccagtggggaagctgaacggggcctgggcctctgcaaagagacctggcggggagggggcagaagtrgggtgctcacctgttggcatgtccagggcggggtggtggcagattcaggctgaagttcaggctgagccctggagacccaggcagagttgaccctgcctcctggggaccaaggagccttcagtgaactgtcaccccctactgcagagcccaggacgtgcagacaacatgttttgaatgaatggagtggaagtcaggtacaaatatgagacaagggcctgatgctgtgtgtaatgctgggtcagacccgtgggcaggtgagcagtgcttgcttagaggggaccttgggcctggtttcccttgctctgtggtcctgcttctgagctgagtagctgtggacctatcgtggggaggaggaactcagaatatgcccagctcagagtctgggtcttagaagagagaaactgggggcgtggtgcaagccctgagggcat

SEQ ID NO: 543284 - DNA, 530 bp, Homo sapiens
ggcatcagctagggtgaagcaaaggaacaaaataataataataaagcagaaggcggcagctcctggcaggcagatccggaccctgcccgcttacccagcagcactgaggccgtctaagttccctccccgagaggggagcatcgctgacgttttcacgccttgcttcmctcatgatgcatgtaaagcgaatgccatgcccaccacattggtgctgggacaaaacgttttttctttttgagacagggtctcgctctgtcacccaggctggagtgtagtggtatgatcacagctcgctgcggcctcgaccccctggactcaagtgatcctgccacctcagcctccctagtagctgggaccacaggcacacaccaccacaccaggctaaattttttatttttcataaggatggagtcttgccatgttgctcaggctggtgtcaaactcctgggctcaagtgatctcaggaggcaacttttgtctccaaaacacacacgacacacacatgaacttggggcttgtgtcaggaaggc

SEQ ID NO: 543285 - DNA, 530 bp, Homo sapiens
ggcatcagctagggtgaagcaaaggaacaaaataataataataaagcagaaggcggcagctcctggcaggcagatccggaccctgcccgcttacccagcagcactgaggccgtctaagttccctccccgagaggggagcatcgctgacgttttcacgccttgcttcactcatgatgcatgtaaagcgaatgccatgcccaccacattggtgctgggacaaaacrttttttctttttgagacagggtctcgctctgtcacccaggctggagtgtagtggtatgatcacagctcgctgcggcctcgaccccctggactcaagtgatcctgccacctcagcctccctagtagctgggaccacaggcacacaccaccacaccaggctaaattttttatttttcataaggatggagtcttgccatgttgctcaggctggtgtcaaactcctgggctcaagtgatctcaggaggcaacttttgtctccaaaacacacacgacacacacatgaacttggggcttgtgtcaggaaggc

SEQ ID NO: 543286 - DNA, 530 bp, Homo sapiens
ggcatcagctagggtgaagcaaaggaacaaaataataataataaagcagaaggcggcagctcctggcaggcagatccggaccctgcccgcttacccagcagcactgaggccgtctaagttccctccccgagaggggagcatcgctgacgttttcacgccttgcttcactcatgatgcatgtaaagcgaatgccatgcccaccacattggtgctgggacaaaacgttttttctttttgagacagggtctcgctctgtcacccaggctggagtgtagtggtatgatcacagctcgctgcggcctcgaccccctggactcaagtgatcctgccacctcagcctccctagtagctgggaccacaggcacacaccaccacaccaggctaaattttttatttttcataaggatggagtcttgccatgttgctcaggctgstgtcaaactcctgggctcaagtgatctcaggaggcaacttttgtctccaaaacacacacgacacacacatgaacttggggcttgtgtcaggaaggc

SEQ ID NO: 543287 - DNA, 508 bp, Homo sapiens
gctcctgtggaggaagtgtctatgtggtccccagctcctctgtctgcctgtccactgaggggcacccatggytcagcagaagggctattcttggggttcccggtcctcctccagccccgctaatctgtgtaggcctcaagtgctgtgtgtttgtaagcattgtcatccacagtcctattgtacgagctggttcacccgcagctctgagctgctctccagccccagccctttcttcctgtgcccctacccccgctgggatgactctcctcaccctccctggggcgacaaccgccctgtctgtaatgagtggcagtcccaagcttcctgactggcttccgcagctctctgactcccctaaacaaggcctcagggactccacatccaaattaaggcggcacctggtggcaggttggcattttccggtgtcctatctatgaaagacaggaagacagctgggagcaaactcccctgggccagactcttggaaacataaaggcttgggtgccca

SEQ ID NO: 543288 - DNA, 508 bp, Homo sapiens
gctcctgtggaggaagtgtctatgtggtccccagctcctctgtctgcctgtccactgaggggcacccatggctcagcagaagggctattcttggggttcccggtcctcctccagccccgctaatctgtgtaggcctcaagtgctgtgtgtttgtaagcattgtcatccacagtcctattgtacgagctggttcacccgcagctctgagctgctctccagccccagccctttcttcctgtgcccctacccccgctgggatgactctcctcaccctccctggggcgacaaccgccctgtctgtaatgagtggcagtcccaagcttcctgactggcttccgcagctctctgactcccctaaacaaggcctcagggactccacatccaaattaaggcggcacctggtggcaggttggcattttccggtgtcctatctatgaaagacaggaagacrgctgggagcaaactcccctgggccagactcttggaaacataaaggcttgggtgccca

SEQ ID NO: 543289 - DNA, 164 bp, Homo sapiens
tgacccgctgaattagtggccagggctgccagcatccagggggtgttgggacccggaacctctctgagcttgaaggctaaggctaggatcccgcgagtaagcctgttctcggtccatttgggccctggccrgtgtggagacgtgccaggtgtgatggcacggga

SEQ ID NO: 543290 - DNA, 625 bp, Homo sapiens
gaggggacctctcgtttagaggttgcccagggaatggcagtgagcccaggagatcctccaaggggaatcgggacaggactttttccgcagaaaacaccccatgtggctcatcaaagaggagaggcaacccatctgttccagaacattccagatcatcatttaagacccccaatgactctatcacagaagatagggtcagtatctcctttgcctttaaagaggtcatcacccctagagcttagagttttctagaagtgttcagcctgattcaaccaattcaaaaactactctaagaaagcaaaccaggtattgttttagaagttccatgaactcttccaaaatgatcaggtaccatttagttaatgactactctggagtatttaatgacattccagcacctgagaacgttggtttcatctcataacactcgctaaaatgtgtgtkggtgggagagagaaggagagagacacagagagctagtttggagaaataatgtataaatgcaaaggtttctctacacctctaaaatgctgctcattcctctctcggtggcctgaattaacagccagttctgtttctattttggggaattattagctgtagtttctttaaaatgccgtttatc

SEQ ID NO: 543291 - DNA, 680 bp, Homo sapiens
ctgcttctctgtagaaaacacacaataaacatcccactgccaacagcagcgtacatcccagaactcatcggccaccggagcctgagacatttgttaacatgacaaggccaacggcagtgcagaaagtgaaaatctttgaggaagcaggtgcggccagtctgcattcgtctcaagccctcccaagtttacaaatgaaatcatgaaggagcccagttctctccaagtataagctcccaggagaggggttcccactaggggctatatctaaaatgggtcattgttcttgcagacaaattcgcctgcactgtccagtaaaacagaggggcatacattccaggcgtgccttcacacatcactgtggctcgtagccacgtgtcaatgtggttcatagccactcccgctcactaaatcacactgcctgggcaggttctccaaagatcagaatatggaagggcagcacagccggcctcagggcaaagcagtgaagcactgggccctgtgttcgctgtctttggacctggctgtccccttcttccctcacgcaccttctccccacacctattgtacagaaaccaccatgtgtgacaatttgtgacctgttttccctgttcccacaccaccccctctgcctgcctayggtcaaatccaattcccctggcttccttcttcgtgttcctatt

SEQ ID NO: 543292 - DNA, 572 bp, Homo sapiens
gcttcaccagctcactttcccccactttgctgcaataatcattggctagaggtattgtgatatgatgtcattaaagttaatctagacgaaaatttgatttacctaaaactattacactgtagacctggaggaatttcagtttttgccgtaattgttttcaatgtgtgttataaaaaataaattccactatgttcacgaatgtacaacttataatctgaccaaaagtgagagmtgggtagattttcctacttgggtccttctgtggacaggtactaggtgctgctttacgcccagtgacttgtgagggaacagaactgccctttagtaaccctgctcacttcctgttttctgcagtaacaattacattaggcaatattattacacatggaattgcatcatgctgattttaaaacaatcctccctgtagcattacacagacactgaatcatcatttgtagtttggggggctttacatgcctgcagtggtgaaaactgaaattttgtcccacttaagggagtttcttcttccctttattaattgcaaaataaatatatgtcacttcagagggcag

SEQ ID NO: 543293 - DNA, 572 bp, Homo sapiens
gcttcaccagctcactttcccccactttgctgcaataatcattggctagaggtattgtgatatgatgtcattaaagttaatctagacgaaaatttgatttacctaaaactattacactgtagacctggaggaatttcagtttttgccgtaattgttttcaatgtgtgttataaaaaataaattccactatgttcacgaatgtacaacttataatctgaccaaaagtgagagatgggtagattttcctacttgggtccttctgtggacaggtactaggtgctgctttacgcccagtgacttgkgagggaacagaactgccctttagtaaccctgctcacttcctgttttctgcagtaacaattacattaggcaatattattacacatggaattgcatcatgctgattttaaaacaatcctccctgtagcattacacagacactgaatcatcatttgtagtttggggggctttacatgcctgcagtggtgaaaactgaaattttgtcccacttaagggagtttcttcttccctttattaattgcaaaataaatatatgtcacttcagagggcag

SEQ ID NO: 543294 - DNA, 591 bp, Homo sapiens
ctgctggggggccatgcagagacagcctgccagaggggagaccacctggggaggccagagccgtggagacagcaagagaccaggggctgaggacagagtagtacaggtctttggtcccagtagtcctgaaaccactgcactccgaacctttctgtacttagcttaagccagttggagtttctgtcctttacaaccaagagccttgataggaatggggtcctgtgctacgctactgttggcttctttcccgatcgggcgctggaggggaacacagcagtgactacagtgggatgcttactcggtgctgggcatgctagaaagtgcttgccatgccttatttcccacgtggtggggwttttgaccccactgtacagacagataagtgaggaccctttcacttatcctgcaacagaaaatccagcagccaaagccaacaagggcccagcatagcatcttccctctctgacttcatcctcacgctccacacaccatccccctggccattcccagcagcccagtaagcactgcctcacacttccagttccggaccagccaggatggccaggctggatgggggccatccaccggctg

SEQ ID NO: 543295 - DNA, 545 bp, Homo sapiens
tctttgccaccctcagattggcaggttctttatttggacatgttaatactttgtcattttcccagagagtgctcctgttcttgaaccatctggccccttcagtgcaactctgtaggactgtgctctgctccgtgggggttggtgtcactgtttaactgctggaggatgttcttaccacaatcgttttcacctgcatggtgggtgcccccctgccttcctctactgccttgaataggcttgtatcttgaaaagttcacgttctcaaatggaggccctccctataaaccagaacctaatccaccagtccaagaaatcaccaaaggtgacattttgctgaacatgacaccgtttcttttgtttataaattggcaggaagaaaaatgtttagtaaccatacacctgctctttctgagttcagttctagaatcaacagattagctatgaacaaagaaaaccatgtgggtcagattaaatatatyctgaaggactaaaccgtaaaactagggatttgtcatggaggtgcattcatcaaactcagttgatga

SEQ ID NO: 543296 - DNA, 556 bp, Homo sapiens
agcactttcttctcaaattgaagccacgttgcagagaatgttcagaaacaacacagttgacaataatttcaataataacattgctgttagagtgggtcttggtcttgggagttttgtggaacaaatctgtactaacttgatgaaactgaacgtctgatgcttatttatacttcagggaaatactacaggccagacctgaatttcccctgcagtctgccaagacggagtcgtgggatcaaagactttgaaaacgatcccccattatcatcgtgtggcattttccagtccagaattgcaggtmtgtttgaggactgtctagtaggaaaggtaacaataacagcaacactgattatggctagcaggcatccagcctgagccctagctacacaccctttgatacagtgttagctttgtctccagtctgctgaggaggctggggcacagagaggttaagcaacttgcccaaggtcacacagcaagaaagtggcaatgtagaggtttgatctaggaatggatgattcaggaagttggcaggaatgaaagaaaggcatggaaa

SEQ ID NO: 543297 - DNA, 593 bp, Homo sapiens
tgcccataggagagcagcttgttccagaggcctgggctctgccttcagcctgaaccctgtcctgctcctctttgtctgggaagagggataagatctcggtccccaggcagggactggccgtggccaggagcatgggtgacatgcgagagagcatgtcgcctccatggtgacaagggagagggcagagcacacagacacagatgcagcaggagggcaaatgtgggggacagggcttgcctcgactttctcagagacctaggaagtaaggccaccagcggaaagtgggggcagggactgtgggaagtttggggtgcrccgaaggaatgaatggctgtcaggcagaggggcccaggacatgggctgggagatgcagagtgaccgctgggcagcactcagagcccacccacagttcatgagcatgagtttaaatggagatgcatcagccgggctagggggtctcttccagcttagaccgggagtaggtggagagtgggatgcaggtaagggcagggttgagctgtgagtacggtggagccagaggggacaggaagacttgagggcatagtgagggggtgaccgtgcccatggacttt

SEQ ID NO: 543298 - DNA, 461 bp, Homo sapiens
aggtactgatagcacttattatctagaaaatataaccagactttgaggagaggcaaggggccctataaattatttatttttttgcttctcaaactctggaccgaggaccaggattacaggcattgcctggaagcttgttacaaatgcagggcctcaggcacccccgtctccgtgtcagcagctgtgtcttagcaggatccccagggcattgcctcacagtcagggtggtgcaaaagtcccgcctggcrtcctggtgagtggaccaggagggggcaggtgaaggcgatattattggtccttcgactccagacaagaacttgcagcttagcctgaggaaagaaattagcccatatgatgaaacacaatctgatgacgtaaggatttttgtacttatgcccacatgtttagacatggcagcccgcatcctcttaaacctgaactttaacataccgtgacttaga

SEQ ID NO: 543299 - DNA, 461 bp, Homo sapiens
aggtactgatagcacttattatctagaaaatataaccagactttgaggagaggcaaggggccctataaattatttatttttttgcttctcaaactctggaccgaggaccaggattacaggcattgcctggaagcttgttacaaatgcagggcctcaggcacccccgtctccgtgtcagcagctgtgtcttagcaggatccccagggcattgcctcacagtcagggtggtgcaaaagtcccgcctggcatcctggtgagtggaccaggagggggcaggtgaaggcgatattattggtccttcgactccagacaagaacttgcagcttascctgaggaaagaaattagcccatatgatgaaacacaatctgatgacgtaaggatttttgtacttatgcccacatgtttagacatggcagcccgcatcctcttaaacctgaactttaacataccgtgacttaga

SEQ ID NO: 543300 - DNA, 616 bp, Homo sapiens
atgcacgtcaggagacaggagcagcaatgcctggggctttccacggtgagctcccagcacacagcaagcatgtcgccagaaagaacagaaagttcacaaagggagggccagcctgtgcacagcctagcaccgtcctgggaggccatcatcacctgtgctcctctgagaggacaggaagatgctgttttccacttttttctccccaagaccgtttattagcaattgaaggaacaacgcatgtatcaaagactggatttgagaaattccaacaaatctgccccctcgcagttgggagctggcatcgtgcaatcttcggaatgcagcctctggctctcccatcaaaaggcaaygcagccccctgtgatttcagctttgaccttgtgggtaataaaagaaggaaagaggaatgtctgctactggaatcctggatggggtccccgcggccgaatcccccctcccgtcccctcctgtgtcacctgtcatgtctcagactttgaccgcctcccgcagcttccttttattcgtaatgtctaaagccaacccaagcgtctttgccggctgacgtcttagccaaatcatgtgggaaacccgtgaagcagaactgaccgctgtgagg

SEQ ID NO: 543301 - DNA, 409 bp, Homo sapiens
tttcctgctctgccatcctttgtgaagtaccttatgggccaaaatggtgctgaagcaccagccattatgactgcatgacaggaaggaggataaggcacaatatttcccctcacacttggaaamacaattttctaaaattaggattccatcaccaaggagaaacattcattttactacacactgctgtgaatttatctcactaaataatgctattgtctttgtccattttctgttgcttataacagaattcctgaggccgggtcatttgtaaagaaagggaatttatttcttccattatggaggctgagaaatctaaggttaaggcaccacatctgatgagggccttcctgctggtggggactctctgcagcacagggtatcacgtgaggggctgagtgtgctagcccag

SEQ ID NO: 543302 - DNA, 409 bp, Homo sapiens
tttcctgctctgccatcctttgtgaagtaccttatgggccaaaatggtgctgaagcaccagccattatgactgcatgacaggaaggaggataaggcacaatatttcccctcacacttggaaaaacaattttctaaaattaggattccatcaccaaggagaaacattcattttactacacactgctgtraatttatctcactaaataatgctattgtctttgtccattttctgttgcttataacagaattcctgaggccgggtcatttgtaaagaaagggaatttatttcttccattatggaggctgagaaatctaaggttaaggcaccacatctgatgagggccttcctgctggtggggactctctgcagcacagggtatcacgtgaggggctgagtgtgctagcccag

SEQ ID NO: 543303 - DNA, 409 bp, Homo sapiens
tttcctgctctgccatcctttgtgaagtaccttatgggccaaaatggtgctgaagcaccagccattatgactgcatgacaggaaggaggataaggcacaatatttcccctcacacttggaaaaacaattttctaaaattaggattccatcaccaaggagaaacattcattttactacacactgctgtgaatttatctcactaaataatgctattgtctttgtccattttctgttgcttataacagaattcctgaggcygggtcatttgtaaagaaagggaatttatttcttccattatggaggctgagaaatctaaggttaaggcaccacatctgatgagggccttcctgctggtggggactctctgcagcacagggtatcacgtgaggggctgagtgtgctagcccag

SEQ ID NO: 543304 - DNA, 283 bp, Homo sapiens
atggcgatgtgccggataacagacgtagaaggcagaggcaggggagctgtctggggagaggcaaagatggggattcatcagagaaggctttgaaggacatgatgcctaacctggatgtcgaaagggattttgccaggakcacagggcactggtggagggagccctgcggggcagtcctcaaggcctccggatgggtgtgagaggcaccggggctgaagcagcatctgggtttgaggaagccacagccccttggctctccactgcagtctcagagcagcctcag

SEQ ID NO: 543305 - DNA, 283 bp, Homo sapiens
atggcgatgtgccggataacagacgtagaaggcagaggcaggggagctgtctggggagaggcaaagatggggattcatcagagaaggctttgaaggacatgatgcctaacctggatgtcgaaagggattttgccaggagcacagggcactggtggagggagccctgcrgggcagtcctcaaggcctccggatgggtgtgagaggcaccggggctgaagcagcatctgggtttgaggaagccacagccccttggctctccactgcagtctcagagcagcctcag

SEQ ID NO: 543306 - DNA, 540 bp, Homo sapiens
ttccctcatattatgaacattttgaaagacaatctgagagtagaatcttgattatctgctacctagattcaacagttattgttatctggacccaatttatttatgtttatatttttattgatccatttgaaagtaagttttggatatcatggtcatacaactaaacattgagcacgtacttctcaaaatggtgatatttatgctgtgagcttatagctttatcacaccatcaaaataacactcaatctctaatagtatataatactatatattcacatctcctcaaatttccttaagttgtcttttacagtgtttgtttttgaaaccaagatcacataccacatttggttgttgtttcttttcttttctttttctttcttctttttttttttttttttttttaagacrgagtcttgctctgtcgcccaggctggagtgcagtggcgcaatcttgacttactgcagcctccgcctcctgggttcaagcgatttttctgcttcagcctccccagtagctgggattacaggtgcctgccacca

SEQ ID NO: 543307 - DNA, 540 bp, Homo sapiens
ttccctcatattatgaacattttgaaagacaatctgagagtagaatcttgattatctgctacctagattcaacagttattgttatctggacccaatttatttatgtttatatttttattgatccatttgaaagtaagttttggatatcatggtcatacaactaaacattgagcacgtacttctcaaaatggtgatatttatgctgtgagcttatagctttatcacaccatcaaaataacactcaatctctaatagtatataatactatatattcacatctcctcaaatttccttaagttgtcttttacagtgtttgtttttgaaaccaagatcacataccacatttggttgttgtttcttttcttttctttttctttcttctttttttttttttttttttttaagacagagtcttgctctgtcgcccaggctggagtgcagtggcrcaatcttgacttactgcagcctccgcctcctgggttcaagcgatttttctgcttcagcctccccagtagctgggattacaggtgcctgccacca

SEQ ID NO: 543308 - DNA, 587 bp, Homo sapiens
tgcttgggcttgggcaagtcaccctagctctcagatgtcatctgtaaatgatgacaatgccaatgtggcactgttctgagagtcagacagaacgtatgtgtgcttcacatatggtgctcatgaagtgctatcattatctaaggaaaacagaaaacgaagttcagagtctctctaaacgcatgacaccagaccaacagggagtttcaaaaaataggtctgaagtaaatcaattctcctggtctcaatacactgaaaacaaactattaggggactgaccgaacccaccttaggaaccaccttacgtcaccttctgtctctactgcaaaaccctcccttaatactgttcaaatacgctgacaatccagatccatatccaatggaaccagcaatcatgcctgtgtgccagcaatgtcagggagggaagccgatctctgatgaattaggacatcttaccagacagactttgttcaaaattcaatttttttttaaccaagtgccattatgttttaaacagtcaatccagagttaagattgaagggcctcaacctcagtgaaatctratggaccatgaagactgactagccact

SEQ ID NO: 543309 - DNA, 494 bp, Homo sapiens
gttggagaggggcggcttgggggctgcagagctgacaccgagaaagttctgtcagcccgtcatggcaggaggctttcctggagcattcctcagggtgctcgctgcccagtgcagccgagcgggaatctgaaggtctctgggaccacctcccgtgcccacacacgagtgcccacaggatttggagtaaatttctccccgagcacaagcctgctcagagaacctcttagcaccggcggccaagcactggcacccactcccgtcccagcccaacagcagctatagacagagacagattacagcccctcccccacccagagggagctccttaaatgaggtacctgggaaaggaaaagggggcccaaagcccaggggggctgcccagagggcaggggccaggtgtcagagggcaggactgcagccctgaggggggytggcagaggtgtcctgtgctcccgacgagggagatgtggggggggtcgtcatccctccaccca

SEQ ID NO: 543310 - DNA, 550 bp, Homo sapiens
tccacgagaacaggcacaatgtggctaaagacccagtgaccatgcaggacgataaggacaattctgaccctcccagaccgggcgtcccaaagaggacacacccatctcttttmtggattcatgtcctagggctgccattagaaaacaccacaaatggggtggcttgaaaccatagacatgggttctctcatagttcaacggcccgaagtctgaaatccaggtgtcgtggggccgcgctccctctgaggcctgtaggggagaatccttcttgcctcccggcttctggcatttgcagtcaatccttggcattccttagcttgcaggtcactccaatttctgccttgtcatttggaatgctctgtatgtctctgtcttcttataagggcaccagtcatattggatgaggggcccaccctaccctagtataacctcaacttatgaatttcaccagcggcgaccctagttccaagtaaggtcacattgccaggtactaggggttaggacttcaatgtagacataattccacccatatcatccccctttcataagc

SEQ ID NO: 543311 - DNA, 602 bp, Homo sapiens
atgggtgtccttaaaataagactagaaaacagtcatgcagagagggctgaccatgtraggccacagtaagaagacggctttggtttaataacataacaaaatttatggtacagtagagaagtgtaaattgatctttgctccaaggatgtagccatcttaactgacaattctatgagttttacaattcttagggcaagtatgtgtgacttttttgctgccttcaagtataacaaggtcttgctaccttaaaatccttttcttgactctcccaaacactcctggggcctgtcccttctggttcctcctgttggttgcctaacttgtggagaaggtgatcttccggctggtgtggacttccgcccaccatcgctcatgtctctgcttcctctgctccatgaacgtgccccttacggtctccaggaacgccccctttgttcttcaattccggatgcctctgaagcagaagccactgctttcctgtcactgcccaatgccactcgtgttttggttcctgtgttagttgactgtggttgctgtaacatttgatcgggagctgggcggcttaacatggtagacatttattctcccacagttctggaggc

SEQ ID NO: 543312 - DNA, 602 bp, Homo sapiens
atgggtgtccttaaaataagactagaaaacagtcatgcagagagggctgaccatgtgaggccacagtaagaagacggctttggtttaataacataacaaaatttatggtacagtagagaagtgtaaattgatctttgctccaaggatgtagccatcttaactgacaattctatgagttttacaattcttagggcaagtatgtgtgacttttttgctgccttcaagtataacaaggtcttgctaccttaaaatccttttcttgactctcccaaacactcctggggcctgtcccttctggttcctcctgttggttgcctaacttgtkgagaaggtgatcttccggctggtgtggacttccgcccaccatcgctcatgtctctgcttcctctgctccatgaacgtgccccttacggtctccaggaacgccccctttgttcttcaattccggatgcctctgaagcagaagccactgctttcctgtcactgcccaatgccactcgtgttttggttcctgtgttagttgactgtggttgctgtaacatttgatcgggagctgggcggcttaacatggtagacatttattctcccacagttctggaggc

SEQ ID NO: 543313 - DNA, 602 bp, Homo sapiens
atgggtgtccttaaaataagactagaaaacagtcatgcagagagggctgaccatgtgaggccacagtaagaagacggctttggtttaataacataacaaaatttatggtacagtagagaagtgtaaattgatctttgctccaaggatgtagccatcttaactgacaattctatgagttttacaattcttagggcaagtatgtgtgacttttttgctgccttcaagtataacaaggtcttgctaccttaaaatccttttcttgactctcccaaacactcctggggcctgtcccttctggttcctcctgttggttgcctaacttgtggagaaggtgatcttccggctggtgtggacttccgcccaccatcgctcatgtctctgcttcctctgctccatgaacgtgccccttacggtctccaggaacgccccctttgttcttcaattcyggatgcctctgaagcagaagccactgctttcctgtcactgcccaatgccactcgtgttttggttcctgtgttagttgactgtggttgctgtaacatttgatcgggagctgggcggcttaacatggtagacatttattctcccacagttctggaggc

SEQ ID NO: 543314 - DNA, 602 bp, Homo sapiens
atgggtgtccttaaaataagactagaaaacagtcatgcagagagggctgaccatgtgaggccacagtaagaagacggctttggtttaataacataacaaaatttatggtacagtagagaagtgtaaattgatctttgctccaaggatgtagccatcttaactgacaattctatgagttttacaattcttagggcaagtatgtgtgacttttttgctgccttcaagtataacaaggtcttgctaccttaaaatccttttcttgactctcccaaacactcctggggcctgtcccttctggttcctcctgttggttgcctaacttgtggagaaggtgatcttccggctggtgtggacttccgcccaccatcgctcatgtctctgcttcctctgctccatgaacgtgccccttacggtctccaggaacgccccctttgttcttcaattccggrtgcctctgaagcagaagccactgctttcctgtcactgcccaatgccactcgtgttttggttcctgtgttagttgactgtggttgctgtaacatttgatcgggagctgggcggcttaacatggtagacatttattctcccacagttctggaggc

SEQ ID NO: 543315 - DNA, 602 bp, Homo sapiens
cagctgtaacagactgacgaaccccttcggttcctcctaaccaaggctcctaatgtctcatcagatatcacagagcaccatactcatgaatatcatcatctctgcctttatggttttcaggaggaaaaaaagaaatggctctgccaatggcaaggttatttgtagtactttgttagttatagcccactctattctcagcacttaactcgcaatggcttttccacactcagagcacagtagaggctgagctagagacagctaaaccttgctgtcaccttcactggccactgtcctcgggcacacacggagcccagcagaagctgcattaaggacatctttcttcgctctcaccgggtagagtcaaataatttacctctgcagcaggttaaatgtcttcccaaagcggagccgcyttctgtgtgcccacgtttattaaattaccacagatgtcgtgtgaacagatgggcgcacccctgagaggcgaggctgcgagggagagcggccgtgcagcgggggctctggagaaggagctgctcgccggcagtcctgcgaggcatctttcccattctcaccgctgcatgtttactgaatccttacaaagg

SEQ ID NO: 543316 - DNA, 635 bp, Homo sapiens
gcagtaggtgatctgaaattattactggtctgctgctggtagagaagtctgaagaaacttggaagaaagtgaatgcttctccctctcctccatattaccaagaaaagctccatatctgttagcttccaccgattacctygtctttcttttctacccattgccaagtactctgctctttcctctaaatatgccattgcccttgataaattcttgtttctaaatcctatggaactgttacgttctttgtagaagtccttttaaaattactctttgacttatctttaatgaagtgaggatactacaaccatggcttaaattgttcattaatatctggttacatacaagtaaagcaatccctttctgacaagtaaagcaaccacaaatggcacatggcttccagagcctgtggaatgctctttgaatatgctaagatatgctaaggatgaatttcacttttggaaacattaaataattacatatgaccaaaccttgtatgcagtgtatggaatcttgctaataatataattctaagtcaaaaccaatatttacttttaaaagcatgactaggatttgtaaattgtcatgaatgacttgtgtatcatccttccagagaccctgcatcttagtccacatga

SEQ ID NO: 543317 - DNA, 635 bp, Homo sapiens
gcagtaggtgatctgaaattattactggtctgctgctggtagagaagtctgaagaaacttggaagaaagtgaatgcttctccctctcctccatattaccaagaaaagctccatatctgttagcttccaccgattaccttgtctttcttttctacccattgccaagtactctgctctttcctctaaatatgccattgcccttgataaattcttgtttctaaatcctatggaactgttacgttctttgtagaagtccttttaaaattactctttgacttatctttaatgaagtgaggatactacaaccatgscttaaattgttcattaatatctggttacatacaagtaaagcaatccctttctgacaagtaaagcaaccacaaatggcacatggcttccagagcctgtggaatgctctttgaatatgctaagatatgctaaggatgaatttcacttttggaaacattaaataattacatatgaccaaaccttgtatgcagtgtatggaatcttgctaataatataattctaagtcaaaaccaatatttacttttaaaagcatgactaggatttgtaaattgtcatgaatgacttgtgtatcatccttccagagaccctgcatcttagtccacatga

SEQ ID NO: 543318 - DNA, 618 bp, Homo sapiens
agaagacttggaaacaatccaaggcgcaatattgaagctcaccatccatggctttcttgatgcgcttcctttttccgaggacggtttccaacctctgctctgattatctacatcctcgttattcatactttaaggcccatctcctcagggttgtcttccttaactgctctactgtcaaaaatctctccattttctgaatgtcactagttctgatgcttgaktagagaagattttagattaatctaggagcgaggcattgcatgaagtgaagaaggcaatgcatattgacaaggaggccgtttagaaggtcatttctgtatccacatttgaggtaatgaaaagataaacatggacaggattggaaagggaaaaaatgtgtaaaataatcaaaatgaattaactattgaataagagaaggcaagagagaaataaattcaaaattagtgtgaagtttcaagtttggggaattgctttgataccattaaacgatccctaacagaacagaaatccgagggaatgtgtttgaagtacaggctgaaggcaaaagcctgcaatattaaaagaggatgcactggaggggacatggagtcctgaagctgtgggggtcggttgagatga

SEQ ID NO: 543319 - DNA, 594 bp, Homo sapiens
ggactggtactgtggtgcttataaaaacaattgctagactttaaggygtggtcatcagagcaatcaaccagtcacccagtgatatacattaatcaattgatagctatggctagtgctatggctaataatactttcttctttcaatgtaggggaaagtaaaccttgagacctcttcttgggtagattaaactccacactgcaacatttttggcaatagcatttcctttttctttctttctatttaaagattatgggagtcttgattccagacaatttttttttctccccaacaaagaaagtccaatatctaattttgatattttcaaggattgaatctatgctcttaaacaaacaatctctcttctccattattttcacctgatgtgaaggcttacggtgaggcctaacaagaaagcctgagtgggtcacattgttatgagtttttttaagccatttctttctatcaatctatatacttttctattgtctgttctaaatattaatatacttttcacacacacaaaatacctacatacacataataaataagaagttccaaacttgaatcttttggggatttcaatttgattattt

SEQ ID NO: 543320 - DNA, 594 bp, Homo sapiens
ggactggtactgtggtgcttataaaaacaattgctagactttaaggcgtggtcatcagagcaatcaaccagtcacccagtgatatacattaatcaattgatagctatggctagtgctatggctaataatactttcttctttcaatgtaggggaaagtaaaccttgagacctcttcttgggtagattaaactccacactgcaacatttttggcaatagcatttcctttttctttctttctatttaaagattatgggagtcttgattccagacaatttttttttctccccaacaaagaaagtccaatatctaattttgatattttcaaggattgaatctatgctcttaaacaaacaatctctcttctccattattttcacctgatgtgaaggcttacggtgaggcctaacaagaaagcctgagtgggtcacattgttatgrgtttttttaagccatttctttctatcaatctatatacttttctattgtctgttctaaatattaatatacttttcacacacacaaaatacctacatacacataataaataagaagttccaaacttgaatcttttggggatttcaatttgattattt

SEQ ID NO: 543321 - DNA, 623 bp, Homo sapiens
gtcctgatctcaaatgatctgcccacgtcggcctcccaaaatgctgggattacaggtgtgagccactgctccagcctggataaccggcttttgattttatttcctctmttgatttcttttttaaaatttcattgatatctcccctaatacttatttttctcctctgcttgatttaggcttaagttgattttcttctctaatttccttagataaaaccttatattgttgagtttagatctctctttcttcaagtgtgcatccagtactataaaatttcctctaagtactacttttgctgcatcccacaaattttgataagttgtattttaatttttctaaaactatgtttttagatttttttcttcagacttctttttttgacctttggggtcaaaaaaagaagtaggtatttgtaggtaattgtaagtgtggttttatttttattttatttcattttattgttattatttttatttagagagtgagttttgttgttttgcccagactgatctcaaactcctagcctcaagtgatccttctgccttagcttccaaaagtgctgggattacaggtatgagccactgaacacagacaataagtgcatttttcaatttacaaatatt

SEQ ID NO: 543322 - DNA, 577 bp, Homo sapiens
ttactgtctatgacacttaatgtttttctttagaaaaatggtgagtatgtgtgtgcaggtgagaatatacgtgtttgtgtgtgcacaagcgtgcattccaggggctacttagtagactaagactttaaaagtttaatcagtgaaaaatctttaaaaagattctacttaaaatgttaatattcaacttagactgttcagctacatataataactgccaaagtacttggatggatttcccacaaggtaaaaagagaatctggactstaaaagagagacttcctaaagccaaagagacagaaactggggagaaaggaggagggctatattggaaaccagggaacgtcatgagtaaaacttataaggtgattttagcttattctagcttttctcttagatattaagaaaagtcataatcagtatgctaaattataattttcaaacagttaaaatattattctcaggcaaatacaaaatgaacatgttgcaaacattttattcatctcactaattaatgagaagccagtaagatattaaagtcagttgaaataaatagtagaaaaacagccatatatagata

SEQ ID NO: 543323 - DNA, 577 bp, Homo sapiens
ttactgtctatgacacttaatgtttttctttagaaaaatggtgagtatgtgtgtgcaggtgagaatatacgtgtttgtgtgtgcacaagcgtgcattccaggggctacttagtagactaagactttaaaagtttaatcagtgaaaaatctttaaaaagattctacttaaaatgttaatattcaacttagactgttcagctacatataataactgccaaagtacttggatggatttcccacaaggtaaaaagagaatctggactctaaaagagagacttcctaaagccaaagagacagaaactggggagaaaggaggagggctatattggaaaccagggaacrtcatgagtaaaacttataaggtgattttagcttattctagcttttctcttagatattaagaaaagtcataatcagtatgctaaattataattttcaaacagttaaaatattattctcaggcaaatacaaaatgaacatgttgcaaacattttattcatctcactaattaatgagaagccagtaagatattaaagtcagttgaaataaatagtagaaaaacagccatatatagata

SEQ ID NO: 543324 - DNA, 649 bp, Homo sapiens
ctgccagtcactagagacaatgtctatagaataactgacactgtgcatggtgttctggtacttgggccataatagtcagggtatcactgatgttagttataccaaggacagttttggtctatggaaatagcagaattttaaaaattcaacactatttgactccaggaatttgtgagactaaagacttgctagacaaamaaacaaacaaacaaacaaacaaaaaaacatggctgacagaatttctaaaaatactaatttgtggaggtaaacattccttaatactggaatcaaaacctcacatttagtgcctagtatgtaccggggtctgcctgatatacagtggagctacgacaacatgtaaggcacatttcttgatttgaaaatctaacattctagtaactgcatgaaagggagagaaagaggataaagagcaatgcttctagaaagctctgaatttatactataagcaaaaagttaagtgtcaaggagtttctaaaagtagtctactttttctttgaaataagagagacccagcaaacaatgagctcagggaaattctagttgaattaaatacttctaaagtattttttgtttgtttatttttgagaagtttgagtgcaacatttttagaaggcattgacaactaaat

SEQ ID NO: 543325 - DNA, 346 bp, Homo sapiens
gggatttttaaaaaatggggattgtgggaaaatggctccagcagtcacagtttttcagtttctcacaatcccataaaaacagagcaaccaggtaacaaaactaaagcatgggcaacatttacagaccrctggatggtgaagaattcccatgaacccctggttcacaccgtaaggacacactactcagcatgggcaacatttacagactactggatggtgaagaattcccatgaacccctggttcacactgtaaggacagactactcagcatgggcaacatttacagaccactggatgatgaagaattcccatgaactcctggttccaactgtaaggacacactact

SEQ ID NO: 543326 - DNA, 478 bp, Homo sapiens
cgatctaactgagggatgtcctactaaaccaggcaatgatacagaaagaaagaaagacgaaggagctgactcttgagggttcaaccagcgatgccacgtggggtccagggcttgcttttgttacaaaggactttattaggactattagcgctatgtaagagcacgtctttgttttcaggaaactcaagtatttaggggtgaagtgacatcacacctgcaactaactctccaactccagaaaaatgtgcgtgtgcatggggaaagataagcaaactcagcaaagcattaacatttgcggaatctggggtgaagctggtgtgagaattctgtgcactgttcttgcaactttaaggtcaaaaattatgtcccaaaagagccagagtggctgggtgyggtggctcacgcccgtaatcccagcacttagcgaggctgaggcaggatcacctgaggtcagaagttccagaccagcctggccaac

SEQ ID NO: 543327 - DNA, 636 bp, Homo sapiens
aaaagcatttggcaccactcatcatccattcacattaaagtgttagcatagtaaacataraaataaatatatttaatttattaaagaacatctacaaaactcttattatacactttctgattaatggtaaaatatttgatatttacaccataagatcaggtgaaatacagggtgctcactgtcataactcttctatttaacattgtactgaagattctagccagcaagaaatggcccaagttttggaaaggaagaaataactcattatttgtcctggataacatgattatagatgtgaaaaatccaaaagaatctattgataaactgtaagaattagcaaatgaattcagaaattttagcattcaaataacaatttgcattaaatttagcatatacatatcaatttgcattttgcacaccagcaaaaagcaactggaaaaaaggtaaaactctatctaaggactgatatacaacatttttgaacatagagcactacacaacatttttgagagactgtaaacatattcagaaagaatccagatcaaaagcaaacatattcaggcatactgataattgttagcagtaattgtacagaagccacaacccattaactgctcatcataggataactgtcag

SEQ ID NO: 543328 - DNA, 636 bp, Homo sapiens
aaaagcatttggcaccactcatcatccattcacattaaagtgttagcatagtaaacatagaaataaatatatttaatttattaaagaacatctacaaaactcttattatacactttctgattaatggtaaaatatttgatatttacaccataagatcaggtgaaatacagggtgctcactgtcataactcttctatttaacattgtactgaagattctagccagcaagaaatggcccaagttttggaaaggaagaaataactcattatttgtcctggataacatgattatagatgtgaaaaatccaaaagaatctattgataaactgtaagaattwgcaaatgaattcagaaattttagcattcaaataacaatttgcattaaatttagcatatacatatcaatttgcattttgcacaccagcaaaaagcaactggaaaaaaggtaaaactctatctaaggactgatatacaacatttttgaacatagagcactacacaacatttttgagagactgtaaacatattcagaaagaatccagatcaaaagcaaacatattcaggcatactgataattgttagcagtaattgtacagaagccacaacccattaactgctcatcataggataactgtcag

SEQ ID NO: 543329 - DNA, 636 bp, Homo sapiens
aaaagcatttggcaccactcatcatccattcacattaaagtgttagcatagtaaacatagaaataaatatatttaatttattaaagaacatctacaaaactcttattatacactttctgattaatggtaaaatatttgatatttacaccataagatcaggtgaaatacagggtgctcactgtcataactcttctatttaacattgtactgaagattctagccagcaagaaatggcccaagttttggaaaggaagaaataactcattatttgtcctggataacatgattatagatgtgaaaaatccaaaagaatctattgataaactgtaagaattagcaaatgaattcagaaattttagcattcaaataacaatttgcattaaatttagcatatacatatcaatttgcattttgcacaccagcaaaaagcaactggaaaaaaggtaaaackctatctaaggactgatatacaacatttttgaacatagagcactacacaacatttttgagagactgtaaacatattcagaaagaatccagatcaaaagcaaacatattcaggcatactgataattgttagcagtaattgtacagaagccacaacccattaactgctcatcataggataactgtcag

SEQ ID NO: 543330 - DNA, 574 bp, Homo sapiens
atcacattctccccatgtccatgtccataagaaagcaaagggactatttcttccttgttactttaagagctaagcagcttccccagaagcaatatctgcagactcacccttacatctcattgatyagaattaagttacatgacattggtttggggaatgttattacaatgattaatttagacaagtagagatttgtctacttgttcagacttttgtaaaaagcatagagccctgtggaagagactagttagttgacagaatcaaagttatcttagcaaggagatgttgggggagaaaagtgtggagtatgtctctggagtaggccacagacacaagctgcaacaccttctatatgccaggcatatgcctggtacaccccatgagaaggtaaagacacaaatcatcatttgaacttcagagaattgcatctcaaatgcaaaactttcccagttgactttgtgcatgagtgttaaggcaagcatcttgggaatatcatctagggtgtttttgaattttatttttttctttttaatttttttttttttactgacacattgtaattgtacatatttat

SEQ ID NO: 543331 - DNA, 606 bp, Homo sapiens
acaaatcaaaactacaatgagttattatctcaccccagttaaaatggcttatatcttaaaaggcaataatttgaacttttgataccaagaaagtaagatgttaattattttgcaaagagaaagatgtatatgatagtactgatatatctaattacatagtagatatgttcttgaaaattggcatgcataaatttatatyttaaaactttcagaatgaaaaatgtccttcaaagtattgtgtgtgtgtaaagtgttcatttatctgtataaattatgtatagttaacgtaatgtatctacaatttaatgtctttcctttttcagtcaattctttataaatatgattcttaatgactacagaatagtctatcatatgtaagtactatatattacttgatcattcatctaattttggacatttaatttgtttctgggttttcaatattagtaataccacaggaatgacatatgtatacatgatttttgtctacctttcaaattatttcctccagattttaggacaaattattaaaagtgtcaaattattttccaggaaggttatagtaatttatactccccaaaaggtgctacgaataatgatatattt

SEQ ID NO: 543332 - DNA, 503 bp, Homo sapiens
atcatgcaaggtacaaagagatataaaatgcctctggcgggtcaaaaccagagggcaggtgggtgatgccaaggtctcctgtggggacccgcaaagcacaggctctgcttgatccctggtatgggattatgcccaaggaaactggcatgctctcggttctgagctagagctgattgaagagaaagctgcacattgaaaaggactatgataacaaactagaggacaccaaactgcttcctgttggagagagcacatcgtctaggaatcatgtttccatccaacagaatccacacctgttgcctctgctggattggccccagatacctgcacctctgggtctctgtgtacccaggtctctgctcccccaggtctgtgtaccccgggtctctgcacccccaggtctctgctcccccaggtctctgcccccccagctctctctgcatccaggtctctgyactcccaggtctctgtacccccaggtctctgtgtccccaggtctctgt

SEQ ID NO: 543333 - DNA, 615 bp, Homo sapiens
tatataacagaaacaaaatactggggatgacctgctgagataaagatagaggggaggttccaacatgaccccctcctgaatgtgaacccagaaggcctgtgaggctttgggaatgcagaagcagtagctggagatcccataggcttagcagtttccaatcacttattcccatcctatattccattcagggcaaatcattttaacagagagaaacacctatccacatttcctattcccagttcagtatcttgtctttttgatgaaattacagtatgtctatttttgtcttaaccaattttacctatagagaaggatatatatatgtaaagtgcctcatcatttatattgatgagsaaacattttcaagagttgtatttttagatttctgcttgtcatttttatattatctatctatctatctatctatctatctatctatctatctatctatctgtctatctatctgtctacctatctatcatctccattgcctttcaatgtgatccctgggcaaatggagaggaaaatataataattcgattgtatcttctataattagcaatagctataaatttcctgttactattcatatcaaaatcacatttaaattattta

SEQ ID NO: 543334 - DNA, 599 bp, Homo sapiens
gaaactccatccctaaggatagatggtgaagacaggagggaagaaaggaggagccagaaaagctaaggtatcatctggagctgcaggagtcggggggaaaccccctgcttttgttccacagttttgaagtgggtgatccctccagcttttgctatggttcttttattgcttaaactgctccattccatgcaccccaggagtctggctgtgctgcaggagccattttcccctgggagaaagcagtcccttccgaccgcctgaacagggtgggaatagaagatgcattctccacgagggctgaacctgaaaactgacatccccgagataagaaaaagggagagccgaagcatttataaccatagatgtgctcttggcatgtactggtgaatagggctgatttgcatttagattcttgggtgagttaaatkgcagcatctcagggcattctagccattcggccctatgttcagcagcattatcaataacccgtgacgcctggcgaggtcgaaacactatcagcttcccagaatcccgtctcacctgggggagaagctcaagggtccctgtcttagagcacatggttcctgcctttccttcag

SEQ ID NO: 543335 - DNA, 486 bp, Homo sapiens
gactccagctggagcacgaatcaaggccgtttctgtgggagatgacggggcatctgagggaagcccaaccttatcccaaaatgcccccgtttcgtcttctagggagcccaatgtcctgggctctacctgctcactggggctgggtgtagtggctcacgyctgtaatcccagcactttgggaagctgaggcaggaggatcccttgagcccaggagtttgagaccagtctgggcaacatagcgaggccccgcctctacaaaaaaaatttaaaaactagccgggatggtggcactttcctgtagttccagctacttgagaggttgaggcaggaggattacttgagcccaggagttcaaggctgcagtgagccatgatcatgccactgcactccagagactgggggatggagtgagagcttttctaaaaagaagacagagaaagagacagagagagagagagagagagagagagagagagagagggagaa

SEQ ID NO: 543336 - DNA, 528 bp, Homo sapiens
aggaagcggcgcactccctggagatgagcgattgttaccatggtctcataacatattggcagccggtgtggcatccactacacctgtcactcaagcggcactacctgcagatgtggtggcaggctgggggtccctcctgcccctgcccccacctggcactggacacccagtgatgcgtcctggctgcccctccccyagcacagggagggctccggaggccacagcatgggagaccttgggtatcggtactgggacccaggaccagcagacccacagagcaccaaacagaagctgtgggctgcggagagacagagctgctgtgctggctttccaaggcagatgagtgccagagcaaacgctattccaccaggcacaggattgagtggtggatttctaagtttggggaacacgtccctagacctcagcatgtaatatcatcaaagttatcaaagagatcaaggaaaacctgaaagccttctggttagtagggaaagaagttaggtggtggatacaaaagcatcaaacagg

SEQ ID NO: 543337 - DNA, 528 bp, Homo sapiens
aggaagcggcgcactccctggagatgagcgattgttaccatggtctcataacatattggcagccggtgtggcatccactacacctgtcactcaagcggcactacctgcagatgtggtggcaggctgggggtccctcctgcccctgcccccacctggcactggacacccagtgatgcgtcctggctgcccctcccccrgcacagggagggctccggaggccacagcatgggagaccttgggtatcggtactgggacccaggaccagcagacccacagagcaccaaacagaagctgtgggctgcggagagacagagctgctgtgctggctttccaaggcagatgagtgccagagcaaacgctattccaccaggcacaggattgagtggtggatttctaagtttggggaacacgtccctagacctcagcatgtaatatcatcaaagttatcaaagagatcaaggaaaacctgaaagccttctggttagtagggaaagaagttaggtggtggatacaaaagcatcaaacagg

SEQ ID NO: 543338 - DNA, 601 bp, Homo sapiens
gtgaacattgcacagcggagaagtgcagacccaggtccaagcctatgtctccccctgtgctttctcacttttgcaccatagctatggccacatgtgggggatgaggaggaaactgagaaggtaagttgtcacacctgcaagagrcagggttacccagattcagtcctgtagtgtaacttcatgtttgttctttctacacatcagacactgggcttttcccctgtgaacctgtggtgaatgtagatttgaattcactccaggtaggtgtaggcattcaccctgtgatctaaggggttactcatggttttccaccaggcagattaaaaaaaaacaccgagacaggagtagccagtgccctcggcaattctgtcctgttgtcagacatcacagtgattttgtgcgttctcggtggaagcctgcagcctggggagtgggtttgcatgtataacgatggagctgtgcttgcagatacagatgctgagaaggttgaagggaaggagatttccaggcactgtaagatgcaaattgaggccacgatagaattcagggccacagtgatggaagagcatgaaaaatatgaagaagcaaatcatcgagttta

SEQ ID NO: 543339 - DNA, 628 bp, Homo sapiens
atattattaacccttccttccctacttagtgaacattgcacagcggagaagtgcagacccaggtccaagcctatgtctccccctgtgctttctcacttttgcaccatagctatggccacatgtgggggatgaggaggaaactgagaaggtaagttgtcacacctgcaagagacagggttacccagattcagtcctgtagtgtaacttcatgtttgttctttctacacatcagacactgggcttttcccctgtgaacctgtggtgaatgtagatttgaattcactccaggtaggtgtargcattcaccctgtgatctaaggggttactcatggttttccaccaggcagattaaaaaaaaacaccgagacaggagtagccagtgccctcggcaattctgtcctgttgtcagacatcacagtgattttgtgcgttctcggtggaagcctgcagcctggggagtgggtttgcatgtataacgatggagctgtgcttgcagatacagatgctgagaaggttgaagggaaggagatttccaggcactgtaagatgcaaattgaggccacgatagaattcagggccacagtgatggaagagcatgaaaaatatgaagaagcaaatcatcgagttt

SEQ ID NO: 543340 - DNA, 601 bp, Homo sapiens
gtgaacattgcacagcggagaagtgcagacccaggtccaagcctatgtctccccctgtgctttctcacttttgcaccatagctatggccacatgtgggggatgaggaggaaactgagaaggtaagttgtcacacctgcaagagacagggttacccagattcagtcctgtagtgtaacttcatgtttgttctttctacacatcagacactgggcttttcccctgtgaacctgtggtgaatgtagatttgaattcactccaggtaggtgtaggcattcaccctgtgatctaaggggttactcatggttttccaccaggcagattaaaaaaaaacaccgagacaggagtagccagtgccctcggcaattctgtcctgttgtcagacatcacagtgattttgtgcgttctcggtggaagcctgcagcctggggagtgggtttgcatgtataacgatggagctgtgcttgcagatrcagatgctgagaaggttgaagggaaggagatttccaggcactgtaagatgcaaattgaggccacgatagaattcagggccacagtgatggaagagcatgaaaaatatgaagaagcaaatcatcgagttta

SEQ ID NO: 543341 - DNA, 624 bp, Homo sapiens
tggaagtgctctgcagaaattggcctggatcatcaaaactggtttgtattgtgcttggaagacaaatactactatttctcatcagtgtgagacaggctgccctgtcaagcttgtgcttatttccttactgactggagcagcttgaagaagttacaagaggaaccacaaaacccaaaaactctatatccaccatattcagcaaaatagttcattcctaatacaacactcagtatcttgctgaaagctgtaacctgcaaaacaatttttttcccctagttaatggtcaatgatcaaatatttgcaccaatatttgattgaacaaattcgctgaagctcattgaagtggaatatggtttgcatgtgaacaattgaaaagaaaaagaggtcattagttttgagcagcaagtcaaagaacaggaagagcaagaggagtaaactcaagcataaaaggaaataagttaaatttttaaaaacttgcatggaaagagaaaagtaaggaggaagtatacaaaatcatccagagtcggagttagagatataytactctcatttagaccaagctgcacccgatgcggagatctccacagtttctgcagaaatagtccccatccttccctctgcaca

SEQ ID NO: 543342 - DNA, 615 bp, Homo sapiens
gaatttaggattgtggtttgcttgcacttttctgtacacacacacacaaacacacttgttctatttctctagtagagctctaacaaatgcacattttggtactgacagtrgagtggtgctgtcacaaacacatagcaataccgaaatggccatggagttggacaatgggtagaggttggaagaaattttttgaggagcatatagcaaaagtccagattgccttgaaaaggcagttggtagaaatttgctgttagaagcacttctggtgaggacttcagaagaaacgagggccatataattggaaactgcccccatctttgcttcctgcatcctgttccatgcacagttctgaaggtggaccaggtcacgtgactcctctatgactcctctgctcctcaccctccagtggcccctgtgtcactaagaggaaaagccaagctcccttaccgcttgccaagcctccaagaactgaccacagaaggcagcaacctttcttccttcacttccttctgctcctccctcacccctcagctccagcctcactggtccctggctctttgttgatcatgctagggatggcagcagtggcccatctggagtggctgctaccatgat

SEQ ID NO: 543343 - DNA, 680 bp, Homo sapiens
ctggggaggccttagtgactggggctgcaatcactagcaccaggctgctaggcacctgagctcgcctgcagggatcagccacccactagccactgcagagccttctcacctacttctatctacaaagaacatgatgtgtgaggtgatgcagatcaggtgtcaggtgaagcagaaggtcccccaggaggaagtaggagtcaatataatatagcatatgaatagaatgaaaagaaagaaacatgtgatctcaatttacacagaaaaagcatttgacaaaatccaaccatttttatgacaaaatcacttgaaaaactagaaatagaagacaaattcctgaactggataaaaggcatctataaaatgaacagctaacgttacacttaatggtgaaagactgaaagctttttccctaagatcaggaataaagaaagatgctggttctcatcacttttatttaacattgcacttcaaagttatacctaaagcaaacttagtagaagaattaaagggcagctaaactggaaaggaagaagtaaaactatttctactcacagacracatgatcttacataggaaaatatgccctcaaaatgcttaaaacatttgagttaataaatttagcaaagttttgggatataaaatcaacatgcaaaaatcagttatatttatgtacacttgca

SEQ ID NO: 543344 - DNA, 377 bp, Homo sapiens
catttctccaactccagtaagtttcatattccctggcaaagcagattaaatcaaggtgataatgaagaagaagaagaagaagctaatagtgggaagcagaagcattgcataatcagttataccatactgtggtcgtcattcttcaggtgcactttttgaaactgactagtaggctccagagaacttttgaacttcaaataatcatttgtgattgtgtgtcamaaacctgtatcaactacaagcacaaacatgcacatcaatagcagtgcatattaagtaaaaattttaaattcagaaaatagtactgggaagaaaacaagaaagttaaccttgggcctatagcaagaagtggcctgtgcaagtgtgtctattgataa

SEQ ID NO: 543345 - DNA, 377 bp, Homo sapiens
catttctccaactccagtaagtttcatattccctggcaaagcagattaaatcaaggtgataatgaagaagaagaagaagaagctaatagtgggaagcagaagcattgcataatcagttataccatactgtggtcgtcattcttcaggtgcactttttgaaactgactagtaggctccagagaacttttgaacttcaaataatcatttgtgattgtgtgtcacaaacctgtatcaactacaagcacaaacatgcacatcaatagcagtgcatattaagtaaaaattttaaattcagaaaatagtactgggaagaaaacaagaaagttaaccttggrcctatagcaagaagtggcctgtgcaagtgtgtctattgataa

SEQ ID NO: 543346 - DNA, 517 bp, Homo sapiens
gctgggaacaaatctaggccctattatttaccaactgagtgaccttgaagatgacttaacctaagaatcaggttttttttttcatgtaaaataatggacaatcatctatctgatagggttctttgaagattacatggtgtattggttggaaacccaaggcttaataattactagctgttgttgttgttagtattattcagctatgattccattgcctgttatttttctccaacattttattatgaaaagtttgaaacatatggaaaagttaaaataattggacaatgaacactcatgaacctaacatctaaattcaataaataatattttattatatttgatttgtcacatatmtattcacctatccatcacttcatctatcttttaatttatcctattttaaaatgaattttaaagtaaattgcagacatcttcctcttaaatacttcagctttattatcattaacaagagttcaatatttgtgtatggttcttcttctggtggtggaggggtgaa

SEQ ID NO: 543347 - DNA, 331 bp, Homo sapiens
ccaggctgcactgcttactgcaaaaaattttgactaacctctttgagtgtgttctttttctcatatgcaatataggggtattcatcgtattyacacgttgtggttattatgagagttaaacatggtcatctatgtatgatgtgatgcatttgagtcaaagagcccataatatcatcgttctcctctcactgttacaaaaccaggtcttctcctcaaccactaccctatggttaaaggtgactctatcattgagtcgtagccaatgggatgtcggggaaaacatgtgctatttccaagcctggcccatgagtttccattgtgctatgttcct

SEQ ID NO: 543348 - DNA, 555 bp, Homo sapiens
aagttatgtttgagcctcaggctcagggctcgatggaaacccctgcagacctgaccacagtttcaattcatgcacaccattaccgggtgtctgaggccagggtatgaaggcttttggtgggccaagaatcagaatctcaattataagatgaggaaagtgggcagacacaagtaagatcaataactccaaactcccatattttcaaaattttccttactagacaaagacacctaccaccctcccctaccagtgttcccaccctctaccgcccctgtcccattgggtacatttggacagtaatttcatgaaaggattgaaacrggactgaacctctctccataccccctattttccatggattccagaattgtcctgatctacatagtctggtgaggaaggatagaggttttacacccaaattgcaggaccttgtcaattagcaggggtcttgggaatatttatgagaatagatcctaatagtattatatgaagtaaaataaaatctaagactaaaacatcaggattcaggatttcaaattgttttaagaacctgcc

SEQ ID NO: 543349 - DNA, 621 bp, Homo sapiens
gctggtatgaccaacgaatttttcccttccctttgtttgaatgcacaaagacacgaataaggtaatacccagtttctctttaattggcagaatatatacaataataaactgaaacaaaacttccaggaacttttaaaaaaaactccagagttcatattaaacctcaatgcctgtagtccaattcagggaacattctctgaaaaaaaaaggcaaccgttgagtaaatatttgctgcaccttagatcttataagataatatactaaatgagacagcgaaaaacatcagagctacacatttgaatggaaacccccgtggctctcacactgtattttgcagaagtagctgcagttaacgcatacctatgtgggaaagacattgtcttgaagtaaaatgcagagaagaattaagctctccccaagcagtcattaggtaatgactctcattctccttttagcgcaactcttcattttctgcaagttaatatttaaaccatatctctctatgtttaattaatgtttcatctttaatattttaagtgatgttgaaataaagttagaagctccaawggtcttttgtaatcacatcctttacttccaggagcaacatttattatctaataa

SEQ ID NO: 543350 - DNA, 523 bp, Homo sapiens
tagctttgttttccaaggacttggagttgctctccatcaaaataggagttaaattctaaatatgctaaaaggacaaacatctcctgggaagttctatagcatgaaaatgacggatccagaaaagcttgtccatactttagaaagtatctgtgtatatcacttctattttctgtaaggctataatttttcaggaagtttatatacataaacattcattttcaaagtatttaacaagtaactactrtgtgttagccaagacttttaacggaacaaggggaaaggggttcagacacagaaataaatctcatttataaacaaaagtccaggcatcaaggcattcaattttattctcatgcactattattctttcatctttgatacccaagaaacccagtagaacaatacagaaggaagtcaatttttttttgcaaacatgctttctaaaaaggcaaaagatgaagtaatttgagaataatattatattgcaaaattattgtaaatgataaatctacctgattgtttc

SEQ ID NO: 543351 - DNA, 493 bp, Homo sapiens
gaataatacgacgggtttatcacttgctatttttttcaaccatctaaagaattcatttgtgcaaaactaaatgatagtgattatattctgaagagcattatatctattgtgtagccaacttatcrtagatatatggataaaattcatggaaaggaagaaatataaaatttatttttatatatcctgtaaacaactggcccactacactataccctgcacactctacatataattattatattgaattgagattgtgtaaattctaacacactcagatttatttatagatataccatacgcacatgagtttctgtgtgtgtgtgtgtgtgtgtgtgtgtgtgtgtgtgtgtgtgtctgtgtgtgagagagagagagagagaaagagagaattggcaaagtagtctcctcttagaaaaattaagagtaaatactcaagcctaactttctgaaagtcctgtgttttaaacttttttcactgcatatcacaaacaca

SEQ ID NO: 543352 - DNA, 493 bp, Homo sapiens
gaataatacgacgggtttatcacttgctatttttttcaaccatctaaagaattcatttgtgcaaaactaaatgatagtgattatattctgaagagcattatatctattgtgtagccaacttatcatagatatatggataaaattcatggaaaggaagaaatataaaatttatttttatatatcctgtaaacaactggcccactacactataccctgcacactctacatataattattatattgaattgagattgtgwaaattctaacacactcagatttatttatagatataccatacgcacatgagtttctgtgtgtgtgtgtgtgtgtgtgtgtgtgtgtgtgtgtgtgtgtctgtgtgtgagagagagagagagagaaagagagaattggcaaagtagtctcctcttagaaaaattaagagtaaatactcaagcctaactttctgaaagtcctgtgttttaaacttttttcactgcatatcacaaacaca

SEQ ID NO: 543353 - DNA, 493 bp, Homo sapiens
gaataatacgacgggtttatcacttgctatttttttcaaccatctaaagaattcatttgtgcaaaactaaatgatagtgattatattctgaagagcattatatctattgtgtagccaacttatcatagatatatggataaaattcatggaaaggaagaaatataaaatttatttttatatatcctgtaaacaactggcccactacactataccctgcacactctacatataattattatattgaattgagattgtgtaaattctaacamactcagatttatttatagatataccatacgcacatgagtttctgtgtgtgtgtgtgtgtgtgtgtgtgtgtgtgtgtgtgtgtgtctgtgtgtgagagagagagagagagaaagagagaattggcaaagtagtctcctcttagaaaaattaagagtaaatactcaagcctaactttctgaaagtcctgtgttttaaacttttttcactgcatatcacaaacaca

SEQ ID NO: 543354 - DNA, 654 bp, Homo sapiens
tgcttctgtgaagttacttccacgttatggcggaatttctatgaacatttgcctgcatgttgggatgctttattgacattactcatgacataagaggtagttcaggagttcatataattttatgtcctccaattattggggctgtattaataaatgcccagtgactatctagtaactgtctttaaaagaaatataccagagaatggtactaggtaattttctattccaaaaacacagaagtcactattgaccatggttatgggctttagccagagactggagtcagtatgaatgcaggtgactgacattctgaatattatctcagcattagcacaatatggtccaaacaggamagcttcaactacaggctctgcagttccaaggcttgttgttttgttcaagcttcccttcaaatggactttttccaggtgatttaatgggatggagccaattgtatcccaaagtagatgataacgatttttccaaaacccaaataggtctatttggcattagttctctcatttagtctgaggggagaggagcaagaaccttttcttccttgtagtcttttgtgtgtcatttggtactccaatccatggactcttcccaaattttacagtctttacagggtcctagatttgtttagggttcatg

SEQ ID NO: 543355 - DNA, 519 bp, Homo sapiens
ctgccttggtttacccagagctccagagcctaagacagcgagtgccctttccaagaaagaagacctcctgaaaggcagccctccaagctccgcaggaaacagcagaaaccaccatcactggggggccaaaggcacgggcttctccccggcccgtgataatcgtgcctgcagcagcttttcactggctacaggattcagcccttaggctgaagccacgcttggctccgaagtttccactgcacaggaccagggctaccatctgacaaactgcaaggcaagagaaaacacgtgtcctccctgggattgggtctgggggaaccttcatgcctcagaggagaagaacgtcacaagtagtttaggacacaggtggcagtgacgaagctcttggggacatggatggtgctggcagaactcaagggggatagaggtggtgctggcagaggtcacagggacaaagatggcactggcagarttcataggggacagaggtggagttggcagagttcatgagggacagag

SEQ ID NO: 543356 - DNA, 452 bp, Homo sapiens
aaaaaaaaaaattgctttcccaggaaaaaacagtttggtcttaaaagataagtatagggtcatgtatttaggttatcatctactttttggccccaattaamcagacatgagatgcccctcagatgacttggagttctggactccaatttgggaaaaactcatttagagccaggcctctatttttcagagaaggaaatctgggcttctggttactggggatcgaatgcctggctcatggcagagctggcctggagccctggggttaaactctgacccagggcctctcccttcccctgtaccaactcaagggcttctctggtcattattgctttttaaattggaggcaacaaaaccccagggctccctccaacccctgtccctacgaaaggaatttattagtgtacacaatggagaagcctaaaattgtctggcatcaggcatagttggatcca

SEQ ID NO: 543357 - DNA, 453 bp, Homo sapiens
agggtccctcgctgcccatcactgcacaagcccctcccaggtragccagagcctgtggcagggctgtccctctgagacagagagaggaacacgccccacacttgtccctgcccccatcctcccccacagtctctcctgcctacctgtccacctgtcccttggcctgtgttcttccttcctccctgtgcctcctccttctcattttcgtgtgtgtgtgtgtgtgtgtgtgtgtgtgtgtgtgtgtttcttctcccatcctcctaaaggtgctggtccgggagggtaggagccagtgcacctgcacacctctgctccctcaggtgtgaggctcagccagctccgcccctgggggcgccctctggtggcgtccactggcactgctggaccactgtcctgagaacattcctgagacacctgagtccctgctctgggagtgtgtggggtgggggcatc

SEQ ID NO: 543358 - DNA, 620 bp, Homo sapiens
tccacacgggctggcgacacacttaccgcatcaatctgtgttcaggtccagggttacataattgcagaagcacaagccatacatcgcaggtaggaaaccacagaaccgtctgcaaggagcaagcaacggtggccctgtccaccccagcaaataagaagcatatctgtagcttaaggccacgaatccgtaaaaaccccatgactttctcttcrtgcataaacagatgtatttttgatttcagggaattctttagtatcgtcaatggtgccacataaaacatgtcccaaaccaaatcccacccgtgctgggcagagtgcgtgcacgccattcctacagcattccaaagatggaaggttctttacttcatgttaatttttcctttgaaattatttatatgttctatatataaatacatatgtacatagatatatgggcctctgtgtggctgaacagtatattttgtaaatataagtactagtcctaattgcagaaagagcgtcagtttcacctccccacgagcacttcagatcagtattgtattcattttattcataaatggatatctttttcattgtcatataaagctgggttttatttttttttcctgaaaaataattgcc

SEQ ID NO: 543359 - DNA, 544 bp, Homo sapiens
aatttttaaaaaactattttgttgagatggggtctgctatgttgcccaggctggtcttgaactcctagcctcaagtcatcctcctgcactgacccctccaagtgctggaattataagcatgagccacgatgcctggccagttattattttaaatatataattttttacaatactttggataagattcacaatttttataaatagggcaattttatgaaaaccagaggaatttttaaatgaactttaaactttttaaatcccgaggctgagaaaaacaagttaaaaccctgtctttaatgatctgtaataactatyatcagcttataaagaattatatgatacttatttcactaaacaagaagactataaaaatttgacctgggttctgtccccgtagtgaactcctgtccagggacagtggccacggcattgcacctgctgggcgtgcagccagtgtgccctcaggaagtgagtgcgtctgctgaccaggatgcccacgcagctgggtggaggtgctcacattcctgctgcagctttgctgaat

SEQ ID NO: 543360 - DNA, 547 bp, Homo sapiens
cctggccaggagactgcattatggctttgtcaagacactactcctgcggtgggaggggatctccctgcaagatttcttacaacttcatgtgaatcttcaatgatctcaaaataaaaagttaaaacatttatttattgcactgtttacatttatactcactacacagcttttcattaactttataaagatgtaagaaaaaataagcaggccgggtgcggtggctcacgcctgtaatcccagcactttgggaggccgaggcaggcggatcacgaggtcaggagatcgagaccacggtgaaaccccrtctctactaaaaatacaaaataagttagccaggcgtggtggcgggtgcctgtagtaccagctactcaggagactgaggcaggagaatggcgtgaacccgggaggcggagcttgcagtgagccgagatcacgccactgcactccagcctgggctacagagcaagactccgtctcaaaaaaaaaataataattaataataataataataataatagcaaaaccctgaataccagcttttggctca

SEQ ID NO: 543361 - DNA, 547 bp, Homo sapiens
cctggccaggagactgcattatggctttgtcaagacactactcctgcggtgggaggggatctccctgcaagatttcttacaacttcatgtgaatcttcaatgatctcaaaataaaaagttaaaacatttatttattgcactgtttacatttatactcactacacagcttttcattaactttataaagatgtaagaaaaaataagcaggccgggtgcggtggctcacgcctgtaatcccagcactttgggaggccgaggcaggcggatcacgaggtcaggagatcgagaccacggtgaaaccccgtctctactaaaaatacaaaawaagttagccaggcgtggtggcgggtgcctgtagtaccagctactcaggagactgaggcaggagaatggcgtgaacccgggaggcggagcttgcagtgagccgagatcacgccactgcactccagcctgggctacagagcaagactccgtctcaaaaaaaaaataataattaataataataataataataatagcaaaaccctgaataccagcttttggctca

SEQ ID NO: 543362 - DNA, 547 bp, Homo sapiens
cctggccaggagactgcattatggctttgtcaagacactactcctgcggtgggaggggatctccctgcaagatttcttacaacttcatgtgaatcttcaatgatctcaaaataaaaagttaaaacatttatttattgcactgtttacatttatactcactacacagcttttcattaactttataaagatgtaagaaaaaataagcaggccgggtgcggtggctcacgcctgtaatcccagcactttgggaggccgaggcaggcggatcacgaggtcaggagatcgagaccacggtgaaaccccgtctctactaaaaatacaaaataagttagccaggcgtggtggcgggtgcctgtagtaccagctactcaggagrctgaggcaggagaatggcgtgaacccgggaggcggagcttgcagtgagccgagatcacgccactgcactccagcctgggctacagagcaagactccgtctcaaaaaaaaaataataattaataataataataataataatagcaaaaccctgaataccagcttttggctca

SEQ ID NO: 543363 - DNA, 547 bp, Homo sapiens
cctggccaggagactgcattatggctttgtcaagacactactcctgcggtgggaggggatctccctgcaagatttcttacaacttcatgtgaatcttcaatgatctcaaaataaaaagttaaaacatttatttattgcactgtttacatttatactcactacacagcttttcattaactttataaagatgtaagaaaaaataagcaggccgggtgcggtggctcacgcctgtaatcccagcactttgggaggccgaggcaggcggatcacgaggtcaggagatcgagaccacggtgaaaccccgtctctactaaaaatacaaaataagttagccaggcgtggtggcgggtgcctgtagtaccagctactcaggagactgaggcaggagaatggcgtgaacccgggaggcrgagcttgcagtgagccgagatcacgccactgcactccagcctgggctacagagcaagactccgtctcaaaaaaaaaataataattaataataataataataataatagcaaaaccctgaataccagcttttggctca

SEQ ID NO: 543364 - DNA, 529 bp, Homo sapiens
gctatctatcagaacttctttttctccatgcatgctgcgggctagatctttagatgtcccccaaggttttctgtgccatgacacacacacgtgccatcagttcyaggggctggggattcaaacagattttactcctatgatcaggttatatcttaaggcaccattgagcatacaacgcagagagtatctgtgtggactggacctattcccatgatccctttaaaagataagttttctctgactggttgcagaaggagagctgggcgtgcaatttctgattctctaattggatttaattgtagacatgacctataagaaataagagcagaagttcatgctgggaagaggctgagatggaaattgagtaggcaagatgagaaaatgtttcatgggactaaatagctgagcaaacagcaatggatgatgtagagcttacagattaaccttggctaaattctataatcattacaagtgtacactattgatgcaagttcaatggatccaattagataatcaggaattaacttta

SEQ ID NO: 543365 - DNA, 529 bp, Homo sapiens
gctatctatcagaacttctttttctccatgcatgctgcgggctagatctttagatgtcccccaaggttttctgtgccatgacacacacacgtgccatcagttctaggggctggggattcaaacagatyttactcctatgatcaggttatatcttaaggcaccattgagcatacaacgcagagagtatctgtgtggactggacctattcccatgatccctttaaaagataagttttctctgactggttgcagaaggagagctgggcgtgcaatttctgattctctaattggatttaattgtagacatgacctataagaaataagagcagaagttcatgctgggaagaggctgagatggaaattgagtaggcaagatgagaaaatgtttcatgggactaaatagctgagcaaacagcaatggatgatgtagagcttacagattaaccttggctaaattctataatcattacaagtgtacactattgatgcaagttcaatggatccaattagataatcaggaattaacttta

SEQ ID NO: 543366 - DNA, 529 bp, Homo sapiens
gctatctatcagaacttctttttctccatgcatgctgcgggctagatctttagatgtcccccaaggttttctgtgccatgacacacacacgtgccatcagttctaggggctggggattcaaacagattttactcctatgatcaggttatatcttaaggcaccattgagcatacaacgcagagagtatctgtgtggactggacctattcccatgatccctttaaaagataagttttctctgactggttgcagaaggagagctgggcgtgcaatttctgattctctaattggatttaattgtagacatgacctataagaaataagagcagaagttcatgctgggaagaggctgagatggaaattgagyaggcaagatgagaaaatgtttcatgggactaaatagctgagcaaacagcaatggatgatgtagagcttacagattaaccttggctaaattctataatcattacaagtgtacactattgatgcaagttcaatggatccaattagataatcaggaattaacttta

SEQ ID NO: 543367 - DNA, 529 bp, Homo sapiens
gctatctatcagaacttctttttctccatgcatgctgcgggctagatctttagatgtcccccaaggttttctgtgccatgacacacacacgtgccatcagttctaggggctggggattcaaacagattttactcctatgatcaggttatatcttaaggcaccattgagcatacaacgcagagagtatctgtgtggactggacctattcccatgatccctttaaaagataagttttctctgactggttgcagaaggagagctgggcgtgcaatttctgattctctaattggatttaattgtagacatgacctataagaaataagagcagaagttcatgctgggaagaggctgagatggaaattgagtaggcaagatgagaaaatgtttcatgggactaaatagctgagcaaacagcaatggatgatgtagagcttacagattaaccttgrctaaattctataatcattacaagtgtacactattgatgcaagttcaatggatccaattagataatcaggaattaacttta

SEQ ID NO: 543368 - DNA, 580 bp, Homo sapiens
tgcccccaggactcaactatctctacctggccctgcccttcacatgtgaagattattacaattcatggtgagatttgggtggggatacagccaaattatatcagtattgttttaaataagtgtcatgtccttgctaatgttacaattaaaaaacaaggcttcttggtgctccacacttggggctcaccagctggaacaccatgaggtttaacaatagggagtactcaataaaagtcacttgttcttattttttaatgagatattactacgagggatagagaaagcagtttgmgaagtatactgagtaactggctaaaggatgctactgcagagatcatgtttgagtttaatgtcagtattttcatgtctttttgacagtaaagaataggaagaggagaggaaatttttcttattaattagtttatgagaaattctagcaggacaaattaacatgaatgggtggaatgaatgaaggcatagattaaacagttaggctatgagtggataattgttttagcctggtaataggtatgtgaaagttgagtctacttttgtctgtgttagaaattttccacaataa

SEQ ID NO: 543369 - DNA, 634 bp, Homo sapiens
caaatcttatcttgatctgtagctcctataatccccgtgtgtcatgggagggacctggtgggaggtaattgaatcacgagggcaggtctttccattggtgttcttgtgatagtgaatatgtctcaagagatctgatggttttataaagggcagttcccctgcacatgccctcttgcctgccgccatgtaaggcatgactttgctcctcctttgcctcccaccatgattgtgaggcctccccagccatgcggaactgtgagtcaattaaacctcctttctttatacattacscagtcttgggtatgtcttcattagcagtatgagaacagactaatacaacatctcaggtttgaccatagtgggacatatttttgaaagacgtgaaagtacaaagaaactaaaggcaggcagatagcctctaaattcttgggcataccatttacactccattgacatcttggtttctttctaaggactgcactataatatccctacaatcattaaagcaaaaagcaggcttcctcgatctttcacaaaacgatcttgcctttgtcaatcttagcttttgtttctaggacactagatcagtcacccatttttaaagaatcaattggttattttctaaaaataagca

SEQ ID NO: 543370 - DNA, 634 bp, Homo sapiens
caaatcttatcttgatctgtagctcctataatccccgtgtgtcatgggagggacctggtgggaggtaattgaatcacgagggcaggtctttccattggtgttcttgtgatagtgaatatgtctcaagagatctgatggttttataaagggcagttcccctgcacatgccctcttgcctgccgccatgtaaggcatgactttgctcctcctttgcctcccaccatgattgtgaggcctccccagccatgcggaactgtgagtcaattaaacctcctttctttatacattacccagtcttgggtatgtcttyattagcagtatgagaacagactaatacaacatctcaggtttgaccatagtgggacatatttttgaaagacgtgaaagtacaaagaaactaaaggcaggcagatagcctctaaattcttgggcataccatttacactccattgacatcttggtttctttctaaggactgcactataatatccctacaatcattaaagcaaaaagcaggcttcctcgatctttcacaaaacgatcttgcctttgtcaatcttagcttttgtttctaggacactagatcagtcacccatttttaaagaatcaattggttattttctaaaaataagca

SEQ ID NO: 543371 - DNA, 493 bp, Homo sapiens
tgattggttgtgggaggggaccaatcagaggctgaagtgaagttacaaagttatactcctatgcaaatgaagacttggcctgggaccagcctgattgattgcaggaggggaccaatcagaggtactttcatttttacatctgccacacagaaaaggggaggggggcattgtaaagggagtagcctctggtcctttccacttggggatggaaagttggggttttcgttttgatttagttctaggaagtcagtgtgaatcgtaaatcagcctcaggttcgccgcctccagaccctattctcctgcctcacagagagggcaactcccaggctgagcagctgccagagctcagcagtgggtggctgatcatgctcagcctcckggagaagaaagagtacacctagaagaggggaggagaaagcttttctcctccctgagatggggaagagtggggctgggcggggtctcagctcccgacaaggctgtgaggccatcc

SEQ ID NO: 543372 - DNA, 615 bp, Homo sapiens
ggtgaaaataacatccagtcgtgttttctcccaggttctactctgagtgggtaagcgccctgtgcacaccccgcaggctgggaaggcgtccgcgccagcaccgagccctcggctcctgggctgctcttctgccaccttcagctctgggccgaaaataattaaaaatcaatacttcagatcaaggaaaccgtgttttctcattttatcactgcaatttctttaacaccggcacggatacatccatatgtgcatttgagattttcagatgttttctaatcattgggttgggaagatgatatttctctgcaaagcttagtcatgtaacccaaagtattagccaataaatagctgtaaatccagcttcattcttaatctagttcaaggtaggacatcagtgtgactgccaacgccaaggagctgaagttaattcaaaataaaaccatcttgtgctgagaaccagctttcctaataaaacatcaagagttagcatggccatttatggggacctttatgtatgttgttgactgttttacaggcgaggaaaccgaatgttacagcgggtgggtggattaactagcctaagtgctmtttcactagaggaaactcagcactttg

SEQ ID NO: 543373 - DNA, 626 bp, Homo sapiens
tttacactattactaatctattttcctaattcttttcatttattttgtggttgagagagtagtagcttttaataagcatgayttttaaaaattagtctgccttatgttatatgtaggttttacctaaaaataattcatctctatttctattgctacttgatttctagatgctactatacttttacataatttccataactttattaatcagagtcaaagataaataaaattgtttcatgaatcattcactctgtctcaaagttatataattttggggacagattttttttctcttttttttgagagggagtcttgctctgtcgcccaggctggagtgcagtggtgcaatttcggctcactgcaacctctgcctcccaggttcaagcaattctccctgcctcagcctctcaagtacctgagactacaggtgcccaccaccatgcccaactaatttttgtattttttagtagagacagggttttgccctcttggtcaggctggtcttgaactcctgacctcaggtgatctgcctgcctcgggctcccaaagtgctgggattacaggcgtgagccactgcgcctggccagattttttttttaaagccctctgacaggaaataaacaata

SEQ ID NO: 543374 - DNA, 522 bp, Homo sapiens
caggccatgggcccaggcttgaaggtatggccctcaccagggactgccctcttctacccagtatttacctgcctcctgtccatatcaacatgtctgatgaaatgttatcacaaaacctgaactatatttcagagagtctagctctgtttcacaaatatttctttctgatgaaaccacaataatgttttaattatttttagaatatctgtattgtctccttgaaaatcatataccaagcttcccagcttttgctttgtaattaaatttgagttctgaaaaatcattttatcagatwtagaattcacatttatcagtgtaataaacacataatagtgagttcattgtgtttttttgtcactgtgtcaacaaattcttaacaattttctaacacctaaatttgccacacagcccttcttgtgtttcagatgaatgtaaagtgaacttgcagctacctaaaagcacagggatatggttctatatataaaactatatacacttgtgtattgatatacaagaaagcag

SEQ ID NO: 543375 - DNA, 671 bp, Homo sapiens
ctgctgttcctatttgttattacacccagcagttaattataaatgatgttaaaacattcaggcattctgattgctaatttggctaaatattacctgtcttataaatctaagtaataggtgtcgtgtggactcaaatgggttctaaaacagatggttacacgaaaacatacatggatgtgctataggggaagcacaaaagagaaaatgagcaagcagtgtgctaaaatgcttacctttctcattaacactggcaaataaatcagattttttaaaagattttctcttttagtaggccatcaattgcatagatctaaattagtatcattcacttcttgtaaaacctgccsaagttatagttaaaaatatcataccacagaaagataatagttaagtcatttataaaattcacccttaattaaaatagaatatagatcccaaagcacatatcatctgccaaatatattgtagtgaaatttggattcatttgagagagaattctgaatgtggataagtatctctccgtatctcaggcaacatgcactgtctgaagagagtgacagaaaggtttctgaagaacccaactggttatgaatctttacttcatctgagaagaaaactaaacagacagggaggccaaaggaaaaaatagtaaatatctctaagatttcatt

SEQ ID NO: 543376 - DNA, 442 bp, Homo sapiens
tcatggggtcatggtggagtaaacacctatgagagccatttgggcattgacccactttcacaaagtgtcccaaatttgagattctaatgttatcacccaatggtacagaaactcagacagaatggagagaacatattcaccataaattacacgctgccaagagtccaccctgaattaatgctttataattcctgtactgatcttgtgagtaraacaattgtattgcatggtatttttgttgttgtaagcatacatttataaaatatacacattttaaatctattatattatctatgtgttggcctatctttatgtgttggcatacttcatactacaaagagtggcaatgagctggccatctttgaatccctatgaggccctaaaactcttgctcatggcagggaatgggaaccgcatggctgagtgtctgtgggaggctggt

SEQ ID NO: 543377 - DNA, 569 bp, Homo sapiens
tgcatttgatggtatataaggagaattcaataatgtagtaggcaaataatgctttctagactggtaaggtagtgtggtgccaagatctcagaaggctttctatcaataagagctctccatattgctggtaaaaatattttctaataatgaaacaataaaatggattcatttgttcacatgagtgkatattccagaattcagcagagctcttaattcagttttatacaatttcttcaacggcttgtttgtgtgttcggtctctatgttctgcttttcatattattccctggctggcttcctgcatagtggcaaacagagctgcagtaatatcagatgttttattctcccaataatgagtctatcctggttttctaaggaaacttctcttgccatctaattgtcccaacttaagtagctcacccattcctgcacaaaaccctgtgactgagagggcacttacagatattcttaaactggcatgaatttatttccatacattatggctcctaaaaagtgggagaggggtagaatagctttctggaaaatagctgcagtatcttttccttctt

SEQ ID NO: 543378 - DNA, 572 bp, Homo sapiens
agctgcatttgatggtatataaggagaattcaataatgtagtaggcaaataatgctttctagactggtaaggtagtgtggtgccaagatctcagaaggctttctatcaataagagctctccatattgctggtaaaaatattttctaataatgaaacaataaaatggattcatttgttcacatgagtggatattccagaattcagcagagctcttaattcagttttatacaatttcttcaasggcttgtttgtgtgttcggtctctatgttctgcttttcatattattccctggctggcttcctgcatagtggcaaacagagctgcagtaatatcagatgttttattctcccaataatgagtctatcctggttttctaaggaaacttctcttgccatctaattgtcccaacttaagtagctcacccattcctgcacaaaaccctgtgactgagagggcacttacagatattcttaaactggcatgaatttatttccatacattatggctcctaaaaagtgggagaggggtagaatagctttctggaaaatagctgcagtatcttttccttctt

SEQ ID NO: 543379 - DNA, 569 bp, Homo sapiens
tgcatttgatggtatataaggagaattcaataatgtagtaggcaaataatgctttctagactggtaaggtagtgtggtgccaagatctcagaaggctttctatcaataagagctctccatattgctggtaaaaatattttctaataatgaaacaataaaatggattcatttgttcacatgagtggatattccagaattcagcagagctcttaattcagttttatacaatttcttcaacggcttgtttgtgtgttcggtctctatgttctgcttttcatattattccctggctggcttcctgcatagtggcaaacagagctgcagtaatatcagatgttttaytctcccaataatgagtctatcctggttttctaaggaaacttctcttgccatctaattgtcccaacttaagtagctcacccattcctgcacaaaaccctgtgactgagagggcacttacagatattcttaaactggcatgaatttatttccatacattatggctcctaaaaagtgggagaggggtagaatagctttctggaaaatagctgcagtatcttttccttctt

SEQ ID NO: 543380 - DNA, 572 bp, Homo sapiens
agctgcatttgatggtatataaggagaattcaataatgtagtaggcaaataatgctttctagactggtaaggtagtgtggtgccaagatctcagaaggctttctatcaataagagctctccatattgctggtaaaaatattttctaataatgaaacaataaaatggattcatttgttcacatgagtggatattccagaattcagcagagctcttaattcagttttatacaatttcttcaacggcttgtttgtgtgttcggtctctatgttctgcttttcatattattccctggctggcttcctgcatagtggcaaacagagctgcagtaatatcagatgttttattctcccaataatgagtctatcctggttttctaaggaaacttctcttgccatctaattgtcccaacttaagtagctcacccattcctgcacaaaaccctgtgactgagagggcacttacagatattcttaaactggcatgaattyatttccatacattatggctcctaaaaagtgggagaggggtagaatagctttctggaaaatagctgcagtatcttttccttctt

SEQ ID NO: 543381 - DNA, 576 bp, Homo sapiens
gggcttatgcttgaatacatgggagtcagcagtagagtcagaggtctccggatggctccccaaagacaggtctttttggtgttttaagaaagttaacatgagaagcataaggtaagctaatatcattacatgggttgggaggagtgtagagtgtgcaggcccggtgagatatcatgttagtacttacatcgcatgatcaaaaaatggtagacaaatccctccctgggtggggatttccatatgataatgaggcaaagggtaaagattggtcattgttctggtcctgtgtgcatggaggtgataggattaactcccttgaatgagaattatgatagaatgcttcttatcttagtttctttatggtattccagccagtgaggatggcaccagtggaagttcaaggtctggtagtcagtgggtggagaaaaatgcattatgggrgtggaggcaagtcctgtccctactctgtctcactaggatatgtaccttctggtgcattatttgcctttctggctattttgctagggattgagagtaatctcactgtgggagtgcagtggatgtggtcaattccag

SEQ ID NO: 543382 - DNA, 658 bp, Homo sapiens
tgcaaccgccctcccaggctcaggacctgggcggctctgcagtctgcgcctctgaaacaatgagaatggttatataatattgtggatatatttaataccgctgyattgtacttaccgtggttagaataataaatattatgttatatatattttaccactctgtgtgtgtgtgtgtgtgtgtgtgtgtgtgtgtgtgtgtgtgtgtactttttaagcctgtctgtccagagaaaacaagcatggagaaaaagtggtcccagagcccctggtagttttccatttccagggtctatcctttttcctgggggtcaatctatattcttgtatttgagaatccatatctttatatttttaatttatattcaaataaataaaacactttgttcatgctcagagtaactcaagttgatcattgctacttgaacccaatcttaactaaccaactttggtaaatttttagcaacaagttacttttttggcaactgtcatcttctcttaataaagctagagtccagaggctggccaagtgcagcacaaagcaacgttcacacttcacttaccttgtgttgcctagaggagcaaagtttgaatcatcttctaggcttagctttaggtaggattgtggacattagaatgatcccacaatagcagaaatatt

SEQ ID NO: 543383 - DNA, 658 bp, Homo sapiens
tgcaaccgccctcccaggctcaggacctgggcggctctgcagtctgcgcctctgaaacaatgagaatggttatataatattgtggatatatttaataccgctgcattgtacttaccgtggttagaataataaatattatgttatatatattttaccactctgtgtgtgtgtgtgtgtgtgtgtgtgtgtgtgtgtgtgtgtgtgtactttttaagcctgtctgtccagagaaaacaagcatggagaaaaartggtcccagagcccctggtagttttccatttccagggtctatcctttttcctgggggtcaatctatattcttgtatttgagaatccatatctttatatttttaatttatattcaaataaataaaacactttgttcatgctcagagtaactcaagttgatcattgctacttgaacccaatcttaactaaccaactttggtaaatttttagcaacaagttacttttttggcaactgtcatcttctcttaataaagctagagtccagaggctggccaagtgcagcacaaagcaacgttcacacttcacttaccttgtgttgcctagaggagcaaagtttgaatcatcttctaggcttagctttaggtaggattgtggacattagaatgatcccacaatagcagaaatatt

SEQ ID NO: 543384 - DNA, 658 bp, Homo sapiens
tgcaaccgccctcccaggctcaggacctgggcggctctgcagtctgcgcctctgaaacaatgagaatggttatataatattgtggatatatttaataccgctgcattgtacttaccgtggttagaataataaatattatgttatatatattttaccactctgtgtgtgtgtgtgtgtgtgtgtgtgtgtgtgtgtgtgtgtgtgtactttttaagcctgtctgtccagagaaaacaagcatggagaaaaagtggtcccagagcccctggtagttttccatttccagggtctatcctttttcctgggggtcaatctatattcttgtatttgagaatccatatctttatatttttaatttatattcaaataaataaaacactttgttcatgctcagagtaactcaagttgatcattgctacttgaacccaatcttaactaaccaactttggtaaatttttagcaacaagttacttttttggcaactgtcatcttctcttaataaagctagagtccagaggctggccaagtgcagcacaaagcaackttcacacttcacttaccttgtgttgcctagaggagcaaagtttgaatcatcttctaggcttagctttaggtaggattgtggacattagaatgatcccacaatagcagaaatatt

SEQ ID NO: 543385 - DNA, 637 bp, Homo sapiens
gataacttataattcaaggaaagcatttggacattttacaaattcaaaaggatacgcactggctttttctgaagtatttccagtttcaggtacctaaaaggttttgaagaattcattctcaacattgagaccctggggagtgctctttccaagggtttgcaggggaaaagaaataaattaacaaatacaaatgatttagaacaagaatccaaattaattgaactgccaagataaaaaggctgttctaaataattctgcttacctgaagtttctttgtagacctgtaggcacactgcctgctgcagtttctcagtatggcaatggaaaggtttctgtagctaatactctacggactgaaacacaataaaattcaactgactcacgttgtcactgttaagcataaagcttcaggaagttatgggttcctgtagattaaaccagacgttctgtccatagacaagaaatcacaggctttgtagaccagaggaggactgagaatatgttccrtattgagcagcttctacaattctaagaagttttactcaagaagcttttgatttatatataacctcttgtagctgaaaggctattctagaacaatattaagtcaattttccattgttggcaaaaatagcac

SEQ ID NO: 543386 - DNA, 467 bp, Homo sapiens
taaagcagaggaggtttttttaaatgatttacacagaattccggtgctccgcatggtttcgatctccccccaccccccaaaatactactgatacctattttgttccacacaattcgatggactctgaaaatacagagaggggtgaawtctatccttgcctttcaggagcttattgccgtacgcaagagtaatctctgagctttaattttacataccaaatttttaacaaattgagcatcaactatatatgtatgtgtgtgtatatatatatattctgttgtaattaacatgttaaataaatattaggcacacttaatttcttattttttagatgaagatgaatctaaatgctggttcaagtatgtcctttgttcaccctagtggaccatcttgggtgattcctggagtgctttctcagactgcaaccctaacccgctggtatgtgcttggctctgttccttctttct

SEQ ID NO: 543387 - DNA, 562 bp, Homo sapiens
tcattagcaaattagttaatacagatgtttgaaattttttatctttgaaggttaaatagttaactaatatgtcttaagtaataggcaaggtgaaacattttgtcttgtctgaggtcaaagtcctcaaagttaaactacgttctgtagctaggtgaagcaatgtttaaacaaaggcatccttttgcaagagctcagaatttcagaatgtttgaatactcraggaaattttagtaaatagaactggatctctgacatgagtctatcccctgtttgactctgctgtttttgtagttgtaaaacaaacaaacaaacaaacaaaaaacctggtctttttttttcccacctccaacagagctttctttgctgtttctcacctgatttaactaaaattacccatacacttgtgttttactattgtcttctcctttaaagttttggtaaaaattttgtaagttttaattcaagatctaccatgctgtatcacaccccacaaaaaacttgtgttccatctgtcttgagaatattgtagccttggctgatacatgagaacaacccccacact

SEQ ID NO: 543388 - DNA, 514 bp, Homo sapiens
tttgataccactctttcataatagaggttcacctatttaacaatcttaagaaaaacacatttgtttgcattgatttactctgttgtttgtattaggatttcattaactttcattgttatcattattatttaytgttctcaaattactttgggtttggattcccatttttggggagagagcttcttaaaggggccacttacactgtgaattttcaaccttcacttttttcaatatgaacatttaaagctatacaatttttcccctaaatagagctttagttgcagccaataaatatggatatgttgtctattatcattcacttaaaaatactttctagtatgttgcacattaataacttgaaataattgcacatatctacacatatacacatactttacatagtttatatataaataataataaaactggactcatatacacgcatatcgtagtgttgtattttctatatatactataatttagaattattacctgaaggatatttgcctaatcc

SEQ ID NO: 543389 - DNA, 514 bp, Homo sapiens
tttgataccactctttcataatagaggttcacctatttaacaatcttaagaaaaacacatttgtttgcattgatttactctgttgtttgtattaggatttcattaactttcattgttatcattattatttattgttctcaaattactttgggtttggattcccatttttggggagagagcttcttaaaggggscacttacactgtgaattttcaaccttcacttttttcaatatgaacatttaaagctatacaatttttcccctaaatagagctttagttgcagccaataaatatggatatgttgtctattatcattcacttaaaaatactttctagtatgttgcacattaataacttgaaataattgcacatatctacacatatacacatactttacatagtttatatataaataataataaaactggactcatatacacgcatatcgtagtgttgtattttctatatatactataatttagaattattacctgaaggatatttgcctaatcc

SEQ ID NO: 543390 - DNA, 623 bp, Homo sapiens
aaatatgagaataataatcttctttaaaggagtattacagattatcacgacctaatactatagattaagttgaaaatatatatgtatttttaacttcctacatgtttycctttttatctatctattcaaagcagtttgtgcattttctttcctggcacttcattattctgtattgtaattatttacttgtctgttttttctccatattgtaagctctttgaagacatgggtaatatcttttatccatgtatctatgggcagtacttggcacatactaggtgctcagtaaatattaactgtcaatgtatttttaaacggtagaaaagtatttaacagtttaatgttattctttctgccttcaagcttttactttgatttaatcagtgtattcccatactgattttaatgtctgttcacacctgcaacaattagtgaacatattaagaggcagagataaagacaatacaaagtcaacaaaagtcaagaaagcagtgagttttcacaaatgctttttttgttcttgagcagacaacataatccttatgtgtcagaagtcttctagaactgtgagatcacttgtaatgtaaagttaaagcatcatttgcagaaatacttggaaatct

SEQ ID NO: 543391 - DNA, 585 bp, Homo sapiens
ggagtattggcaggctagcgtcttaaaatccgagctcatcaggtgctcaacttctgtcccttttaagggcccgyaactctaagggggtccacgtgagagagtcgtgattgattgagcaagccagggggtatgtgacaggggctgcgagcaccggtggtcagagtgaaacagaacggaatgggaggtatcacgatgtccttccatacaatgtctggaaactatagataacaacagttgctaggtcaggggtcaaattttaactaccaggcttaggtcaggcaggccaggcctagtttcgggtctggttccttggtttcaggtctggttcctaggcactgggctacctgcctttggtttctcttctctttcgttttctgagtataaaacaatatgagagggtctctctcttccctcaggtgagttttcactgacatgtgaaataaatgtataaaactgtggatttaattgtgaagtattctttcatgtttaagtttcactcattttcttttaccttatgtcaatgtacagaatgctaaacttttttagagaaagacaaactaaaagtaatgttaacttaaaaataaa

SEQ ID NO: 543392 - DNA, 585 bp, Homo sapiens
ggagtattggcaggctagcgtcttaaaatccgagctcatcaggtgctcaacttctgtcccttttaagggcccgcaactctaagggggtccacgtgagagagtcgtgattgattgagcaagccagggggtatgtgacaggggctgcgagcaccggtggtcagagtgaaacagaacggaatgggaggtwtcacgatgtccttccatacaatgtctggaaactatagataacaacagttgctaggtcaggggtcaaattttaactaccaggcttaggtcaggcaggccaggcctagtttcgggtctggttccttggtttcaggtctggttcctaggcactgggctacctgcctttggtttctcttctctttcgttttctgagtataaaacaatatgagagggtctctctcttccctcaggtgagttttcactgacatgtgaaataaatgtataaaactgtggatttaattgtgaagtattctttcatgtttaagtttcactcattttcttttaccttatgtcaatgtacagaatgctaaacttttttagagaaagacaaactaaaagtaatgttaacttaaaaataaa

SEQ ID NO: 543393 - DNA, 509 bp, Homo sapiens
ggctattattcactgtgatgctaatgtttcctcctagtcctagatattgataaatgggtgtggttgctttcagtcccctgcggctttgagtcacagcccacattcacttctagccagtgttttgatcagtgattctgtagtgaggatagttttggcagggaactgtcagctcctgcagcaagctctaccctgctggggttcccatactctaagttgaccagygcagtgaatcaaagcatccagaaaacagatgggaggggatattcctggacatagcctggtctttgctagcagtgacatgtgaagttttttagcttatctaccaatttttttaatggagacaaagggagggagtgttgtgtgatgggccgagaggacagtgggttggtggagaaatcagtgggaaggggtgagactaggtttggacaggaaaaataataagaattgtgcaatatgttaacttttttttttttaacaccttgctaaaccaccaaactctttttccctca

SEQ ID NO: 543394 - DNA, 628 bp, Homo sapiens
tagggcttggctcaactaatctcagatggatttgtgatccactctaatagggcttgactgaagttccttaggaagctctgctccaaatttctcatcatatatatacatatatatatwtttttttttttggagacagagtttcgctcttgttgcccaggctggagtccattggcgtgatctcagctcattgcaacctccgcctcccgggttcaagtgattctcctgtctcagcctcctgagtagctgagattacaggcatacaccactgcgtcccgccttctcattctcctctcagggccagagggttagctgagccttgtgcttctcatggtagtagcagaagcgcaagagacaataagtggaaatacacaagcactcttgaggactaggcgtagtatgtgcacactgatggggttcagaacatcttaccccaaaatatggcacattggcatttgagaaaacagcagaagcaggaaggtcactatcattcctccctcacccttctcccttgaagcaggtcataaaacctaggaaggtcactctctgaccttctcctacccttctcttctgaaacagatcataagaccctcattcaagaagtacccttcatatacccagagaaaaggaa

SEQ ID NO: 543395 - DNA, 530 bp, Homo sapiens
gttgcccagtctgaaccttgcaccatactcttgttggagaccagaatatgccactccaaaatatgcctctttggcataaggatcattttaagctaattattttaagaaactgcagacacaggagaagctctgacacgttaaagttacccattgtaaggaaatttacatctatgaaggaaatctccatttgtgttgactgttttgttgttgctgttgtcgtttttagaaacaagttattaccatgttgcccaggctggtcaccacctgctgggatcaagtcatcctctcatctcccaagtaactaggactacaagcacatrccaccatgctaggatggaaatctccatatttaaggttgtctcccactgtatattaggaagagaagaatgactctaaatcgctagaaactatgaacacagaaggcaaatctgcataacaaacttattgacaaatctgtacaacaaacttattcttatttaccatgtgaaatagtttggatctgtgtccccataaaatcacatgttaaattg

SEQ ID NO: 543396 - DNA, 529 bp, Homo sapiens
ttgcccagtctgaaccttgcaccatactcttgttggagaccagaatatgccactccaaaatatgcctctttggcataaggatcattttaagctaattattttaagaaactgcagacacaggagaagctctgacacgttaaagttacccattgtaaggaaatttacatctatgaaggaaatctccatttgtgttgactgttttgttgttgctgttgtcgtttttagaaacaagttattaccatgttgcccaggctggtcaccacctgctgggatcaagtcatcctctcatctcccaagtaactaggactacaagcacataccaccatgctaggatggaaatctccatatttaaggttgtctcccactgtatattaggaagagaagaatgactctaaatcgctagaaactmtgaacacagaaggcaaatctgcataacaaacttattgacaaatctgtacaacaaacttattcttatttaccatgtgaaatagtttggatctgtgtccccataaaatcacatgttaaattg

SEQ ID NO: 543397 - DNA, 556 bp, Homo sapiens
ctggtgcctcactgagtatatgacactaggcaagccattgacctgtttccacatctcagatctttcatcctgaaaataaagatgacaatagttgcaggctgcctcgaatggcgtggtgaagattaatgagatgatgcagagaagtgccctgagctyctgggacaaaaggcttggtagaagcacaaagtctaattataattttctaacattttcaaagagccctctggaaaggctagctcttgcttctaaatttggagaggatgcctgcctgggacagattgttttctctcaactggcagccccagcagcctcctgcttatgctggccttgatggttctgctctgatccagtggcactcagtctacctggatcccattaacagtagaaggtacagtccccaaaagtgccagcccctgatcttccatgccttttggatggagcaagggtaacccactttggacaggcatcagatggggttcagttattcttagggaatgtagatatagtccctggtctaaggatgggaatgtgacatagattagggagaatataagaa

SEQ ID NO: 543398 - DNA, 556 bp, Homo sapiens
ctggtgcctcactgagtatatgacactaggcaagccattgacctgtttccacatctcagatctttcatcctgaaaataaagatgacaatagttgcaggctgcctcgaatggcgtggtgaagattaatgagatgatgcagagaagtgccctgagcttctgggacaaaaggcttggtagaagcacaaagtctaattataattttctaacattttcaaagagccctctggaaaggctagctcttgcttctaaatttggagagsatgcctgcctgggacagattgttttctctcaactggcagccccagcagcctcctgcttatgctggccttgatggttctgctctgatccagtggcactcagtctacctggatcccattaacagtagaaggtacagtccccaaaagtgccagcccctgatcttccatgccttttggatggagcaagggtaacccactttggacaggcatcagatggggttcagttattcttagggaatgtagatatagtccctggtctaaggatgggaatgtgacatagattagggagaatataagaa

SEQ ID NO: 543399 - DNA, 556 bp, Homo sapiens
ctggtgcctcactgagtatatgacactaggcaagccattgacctgtttccacatctcagatctttcatcctgaaaataaagatgacaatagttgcaggctgcctcgaatggcgtggtgaagattaatgagatgatgcagagaagtgccctgagcttctgggacaaaaggcttggtagaagcacaaagtctaattataattttctaacattttcaaagagccctctggaaaggctagctcttgcttctaaatttggagaggatgcctgcctgggacagattgttttctctcaactggcagccccagcagcctcctgcttrtgctggccttgatggttctgctctgatccagtggcactcagtctacctggatcccattaacagtagaaggtacagtccccaaaagtgccagcccctgatcttccatgccttttggatggagcaagggtaacccactttggacaggcatcagatggggttcagttattcttagggaatgtagatatagtccctggtctaaggatgggaatgtgacatagattagggagaatataagaa

SEQ ID NO: 543400 - DNA, 629 bp, Homo sapiens
ctgctggtgcctcactgagtatatgacactaggcaagccattgacctgtttccacatctcagatctttcatcctgaaaataaagatgacaatagttgcaggctgcctcgaatggcgtggtgaagattaatgagatgatgcagagaagtgccctgagcttctgggacaaaaggcttggtagaagcacaaagtctaattataattttctaacattttcaaagagccctctggaaaggctagctcttgcttctaaatttggagaggatgcctgcctgggacagattgttttctctcaactggcagccccagcagcctcctgcttatgctggccttgatggttctgctctgatccagtggcactcagtctacctggatcccattaacagtagaaggtacagtccccaaaagtgccagcccctgatcttccatgccttttggatggagcaagggtaacccactttggacaggcatcagatggggttcagttattcttagggaatgtagatrtagtccctggtctaaggatgggaatgtgacatagattagggagaatataagaagtctgcttggaccttctaggaaaaatttttcctccctaataagaggaagtcacagaaaatcttctagccc

SEQ ID NO: 543401 - DNA, 471 bp, Homo sapiens
ttacctaactaaaatttctactgyaataaagcaagttaattgtagtgaaatctaattatctgtttactatgatttcattataaatcttgtgggtttttttttcttacattgtccttatgtattagcacctgtggtaagatatattgatcacagtttcatcagataggcatactgcttcaatattgtttgaaaaaaatctttatctttcagcttcatattctaggaggaaccaaatgtaacatttacttttcattttgattgcatattaacttgaggtcataatcttgctttaacaatccatctcttctaattatagatataggaggtatggaagtatgtgtttgccacagaacaaaccctggatatatttccatcttgcttataaaacttgtctttatgtaaatgtttaaataagatattttaggataaatggtttttatcattgcctattatgtcattttctattaaaag

SEQ ID NO: 543402 - DNA, 471 bp, Homo sapiens
ttacctaactaaaatttctactgtaataaagcaagttaattgtagtgaaatctaattatctgtttactatgatttcattataaatcttgtgggtttttttttcttacattgtccttatgtattagcacctgtggtaagatatattgatcacagtttcatcagataggcatactgcttcaayattgtttgaaaaaaatctttatctttcagcttcatattctaggaggaaccaaatgtaacatttacttttcattttgattgcatattaacttgaggtcataatcttgctttaacaatccatctcttctaattatagatataggaggtatggaagtatgtgtttgccacagaacaaaccctggatatatttccatcttgcttataaaacttgtctttatgtaaatgtttaaataagatattttaggataaatggtttttatcattgcctattatgtcattttctattaaaag

SEQ ID NO: 543403 - DNA, 604 bp, Homo sapiens
agaggccactaattcgttctgttttacaaattggtacaatctgagtatcttccccaattctctgtctctgttcttcagcatgagaggctgtgtatcagataatattttttactcagttaaagcatctgaatccccaccctgaatgactataagaaaaatccatttggaatcatgtttctctatcttagtattttcaagaatttccagaggatgcttacatatctcacaawtgtgctgtggttttgatttactgtcttatcatagacatctcctccaaactatgacttctttcaacataactctatctcaaacatggattcagtgcagtctcagtacttctgaaagtaaacactgagaatactgtttaacaaaactttactaaaggtttgtgagccattgagttttccaagcctcccaaagacattccaagggcatgttagcaccatatgttagtgttcttgacagtgtgttaaatgctgtatcctgaaaaagcatatccataaattttcccttttctggctttatttcccacccctcttaatcttccatcctgagaatgtaatcccaatatcctatcccatgtattttacattctctttccagt

SEQ ID NO: 543404 - DNA, 618 bp, Homo sapiens
tattgagtttggggatgagaattactcactcactgtcatggaaatcactaaaaattataaaactggtttgtgttttaggagcacagcagttgcattccagaacagaagaagcttggtctggctcaggttccagccagaaagcctgagctctcagaaggtagatctggacatgaccccaatctagtcttgtgacaagaaaaatcactctaggaccaacaaggattaagaaaatgtgtctgataactgcccttacccacaataatacaaataaacaaataaacattttgagcaaaattatgaaatgaatcagaactccagaatcttcctgtcatctgaggaaataaagccaaaatagcaaaatgtagtaaaatgtttataaaatcaaatrccaaaagggaaatacccctagaccatgaacacaagagtgattaccaaggaaaaggacagtagatctgacatgactggatccatcgttcacgtactatgctttcaacatcaaagatgctgaaatcagtaaatgaaaagtagttggtccagcttgcaatgccagaagctttttgctctaaacaaggcctccaaatacattaaaataacttggaagagaacaaactatggcct

SEQ ID NO: 543405 - DNA, 493 bp, Homo sapiens
ctccccaacgagcaccttgtgacccccacccctgcccgccagagaacaaccccctttgactgtaattttcctttacctccccaaacttataagacggccccacccytgtctccctttgctgactctctttttggactcagcccgcctgcacccaggtgaaataaacagccttgttgctcacacaaagcctgtttggtggtctcttcacacggacgccagtgaaagaagggaggagggcaaggagggaggaggaaggaggaaggacgaagaattgaagaattatcttactctcttccataagaaaacatcatctttcaggtaaacccagcctctaaattctagacattcagtaatttcccaaccatactctacatatatcaaataaagcaaagaaataacataccaagatggaggaggagcctgtcactcaccttcccccaagacttcactgttgtgtaatgatgggtggatgctccaatcagggccccacaca

SEQ ID NO: 543406 - DNA, 632 bp, Homo sapiens
taaggcccaacaagatccaagattggatcaaggatgccaatcagatagcagtccagatctttttcctataccattgctccaactgttgaaattccatgcaataagctagacctctagataagctttcattgggagaaaccattgtggggtttaaaggaaaacacagcaacaaatctctccccatcactttaccaaataacctgatctttataagacaaaaaataatgaaagataaagagaacataaagaattttctaggagttggccataagatggctgattagaagaatatgcagtccatggcactcacaaagaggaacaaaaggggtgagtgaatacagcaccttcaactgaaatatccagattcttgcattgggactgattaggcaaacaactcggcccatggagaatgaagaaaagcaaggtggggcaaaggcccaccagggagcaacacagtgccaagggaacccccacccccagcaaagggaagtgatgagtgattgtgtgacccaacttgggaaaccatgcttctcccacagatctttgcaaccttcagatcaggagatcccctcgtgagcccacacyaccaggaccttgggtctgacacatagaactgtgtagtctcagcagag

SEQ ID NO: 543407 - DNA, 657 bp, Homo sapiens
gggcaaatctaccaccaaaggaaattatgttgaggcaccagcagcattcactacattgttttaagcaactaagttaagcagggataactaatataataaccacaatagtttcatcattgtctagtcattgctgaagtgaaaaatgtacatatttaaccattttatgatcgcttaatataagaggaaggagtttagattgtttttactatagatatcaggaaactaagagaaacccattttgcagaggaatatgataagaccacattattttctggagggacccctttagtgactgacatttaaatagatccattggactggaaagatttaaataacagagagatcaatgagaaggatatagcaatagttgaattagtgattcagagaccttgaattagtctgcattaagtagatctctaagaaaaaataataaagacatggtatcttactattctcagattgctataacaaaaaatcatggctggtggcttaaacaaacttatttctcatcrttctacggggtgggaagtccaatatcaaggtgctggctgatttggctcttggtgagggctctcttcctggctagcagatggcctccttctcactgtgctttcacgtggtggagagagagcaatatgttgctcttcttcttacaag

SEQ ID NO: 543408 - DNA, 657 bp, Homo sapiens
gggcaaatctaccaccaaaggaaattatgttgaggcaccagcagcattcactacattgttttaagcaactaagttaagcagggataactaatataataaccacaatagtttcatcattgtctagtcattgctgaagtgaaaaatgtacatatttaaccattttatgatcgcttaatataagaggaaggagtttagattgtttttactatagatatcaggaaactaagagaaacccattttgcagaggaatatgataagaccacattattttctggagggacccctttagtgactgacatttaaatagatccattggactggaaagatttaaataacagagagatcaatgagaaggatatagcaatagttgaattagtgattcagagaccttgaattagtctgcattaagtagatctctaagaaaaaataataaagacatggtatcttactattctcagattgctataacaaaaaatcatggctggtggcttaaacaaacttatttctcatcgttctackgggtgggaagtccaatatcaaggtgctggctgatttggctcttggtgagggctctcttcctggctagcagatggcctccttctcactgtgctttcacgtggtggagagagagcaatatgttgctcttcttcttacaag

SEQ ID NO: 543409 - DNA, 646 bp, Homo sapiens
tagtatacttaacatatagcccacaagaattttgaaccatagaagaacttaatatgttttcagaagttttcatggataagacaaataatatgacagaaatgagaaaatgcagccacaggaaattttcttaaacattgtattccaaagcatgaagaacatttctaatgatgacataggttatccagagaacggccaaagaaaattcaaactacaagataacatccacttactagccttctattttggaaattatattattatataaaccagtgccaagtaaaatagaattatatatattttattaggtacagttgtgtgagttttatttagactttccaacataattttataagttgcagtcatttttcaacctaaggaataatacaataaatacaactaaagttcttgaagggatagagttatyttatgaatagaatttatatgtatcattgtagacaaataaattaagctaatgatctagcattggactgatgaggggaattaaacgcaataatcaagggtgtagaattaatatgcagagttgctgtctatctgaaatgtctaagaggtaggatttgtgtcttttttatattccccatagcagtcttatatgtataaaacaaagcaatgacttcctctgtcgcac

SEQ ID NO: 543410 - DNA, 544 bp, Homo sapiens
ctgggattcttaagactacatataagtgatgtatagaagtacagtgcctagcaaatatatgttcttgaaagtctttgctatactcacaaatttctcctcaagtttttagtttatcgtttatcactcaattgatacctcatatctaagaactagttcagacgtaggccataaatattaacctatgaattcaaggctagttattaatcagattttttaaccttttatgttacacgtggtttctgtttgaataacagattgtgttttactcttgaaatgaagtaacataaatcttgaaagctagttgtgaattgtttatgaggtgcaatgtaactaaaaaaatgaatttcagcttttccttgtgcttatagatatttaaatacaaaatgattagagatagataatgtaaatgtaatcatcacagatgattacattacaatacaaaatgtacctttcttacataaaaattttaagtagyagacatgctagaaaatgctgataaaaagtcaaaacttaaatatcacccatcagctcattttcatactcc

SEQ ID NO: 543411 - DNA, 393 bp, Homo sapiens
cttctatttcaaaataactagattaaagctcatggtatccttatattagcagcaccataaaactcttaagtttccacaattatgtttccaaatatttgggggaaatctgaattgtcaaattccttagagctctcttatggctaaaataagttaaatatattatatataacttacatataacttttagcaattccaaagttagtaaaaccaggttttggtagatttccacatgaacttgtacttttagaagtataattaagtaatatatttgctgcaggkaggttacctgaaatagagtagtggaggcaaaagctgggttaaagctttattgggggagtgtaatgccaatgaaaccaggggaaagaaagaaggaagaggcagccgatggaagag

SEQ ID NO: 543412 - DNA, 634 bp, Homo sapiens
taaagttaatattttagaaattaataattattctagtttattcatcaaaatttcagaaactgtaagaagactaggagttctctttatctaaagtagtcttaaaacgcctaatacctactaattgtaatttaaattcagtgattcttaaattactaatggagctggagacataattatacattaaattgtctcagccattctttttttgtgtgaaaaaaagcccttatatttttctatagtttgtttagattgacatttatttctcttttttcttttttttttttaatttttcttttaagtttagcagtacattcgtttgtttggtttgttacataggtaaacttctgtcaggggttcacagtacagattattttgcrtcccaggtattaaacctagtacccatttgttatttttcctgatcctctccctccttccaccctccaccctctgggaggcctcagtgtgtgttgttcccctctatgtgtccatgtgttctcatcacttagctctcacttataagtgaaaacatccagtatttggttttctgttcctgtggtagtttgctgaggagaatggcctccagctccatccatatgcctgccaaggatttctttcttttttatgtctgcatagc

SEQ ID NO: 543413 - DNA, 629 bp, Homo sapiens
tcccttgtatcatttatcatctcttaagaaacagaatctataattactttattcctgttatacttctcctacgtagtatagacctacatccactagaaattaatcccactgtacattgaataagtatctgaaatgtacagcaataaattataactatcttaaggcagcatttctcaacttcagtcatttgataaccagcttcatctcttttctgtattcatgtgctgcctgaactgttacatgtcctctttcttctttaaattgaattgtttttatttattcttatctgtacccaaatgatcagtgaaattaaaagtatgatacatatgccagttatatttttaaatgcacattaaaattaatacaaaatatacartacaattgtttttcaaaatattacctaacctcagcgtatccaccctcccccagtggttcacagatcacatttttagaaattctgcttttgtgtccaaacatattttgaattaatgtgatacaaaatttagctatgaaatattgagtgggacatgtttaaagatgttgtaattaggatagaacctgttttccatcctcctgtttgtgggtccatgcacttttctccagtaaataatatgcttcacttcactaat

SEQ ID NO: 543414 - DNA, 600 bp, Homo sapiens
atattctgtcttgtttaggatttagatctgtgagttagtattcagcgtagtgggactaactcacttttgtacgtaagaatcacataaggagctgtatacaagtaaacctgactgagcctcactccctaagatataactgcacctacctttcagatcttttgatacactaactttcagtggggattaaagagtttcattttgaaaatgtccagaaatggttcttgtgtatatgccctatagagatcctgtctttgaaattactttatttattctatcacagacacacacacatacactcaacatacaaaaatacacgcacatccactttcatgaaacatttgttacttagaaaaattattacggttttgatattaaatacaactacatatagaataagttacataaaacaaattagttcatatgactcatgtcttcctaatcatgatagttttggcattccaagtttatataaaatagagcttaatgaactagtattaygtggtagttttaacactgatttatctgctctgtgatagcaggtaaattgttataactttttctggtacaagtctaccatttataaataagtttccttcaatc

SEQ ID NO: 543415 - DNA, 628 bp, Homo sapiens
aaaatatttaaaagttaaatgacttaaattgataatttttgatgtgatattaagttctaagtagttaatattagtaacaataatcagcataaatatgagcaaaattttagctacagcttacttgagaattatgctttcatgtaaaaataattataaaatcttctcaaataattatgcaggcaggaaattgagaggttacaatatttggcatttgatttagatcgtagtcctggggtggaggaagagtgaaaacaacatttgtatgttttcacatttagatttttaaataaaattatacattgttttctcttaacttctgtgatagagatctagaatacagacctgaaaaaattgatagggaatcgtaagaataggaactggttacttttcaaattaattattgttgattaatttatgacatctgtggtttagtaaaaatgggaaatatggatactttagggaaaaaatgtttagttatgttgttgccattccarcttagatttcatacctgagtcttcaaaataatttatagaaaaagtgactatgacttaaacgaaataaaaagtgaggaaagaaccatttattagattttatcctaaactctcactttatagtttgttccagaaat

SEQ ID NO: 543416 - DNA, 637 bp, Homo sapiens
ctctttctcattttctttctcctcattttaaagagacatagtagatcaatcctctgtaaaagcagaagtccaaatttccaaattgcgatgcaaatatcatatctctcctctcatctcttgtgccaaacaattcagtgggttctgttcacctcttggacttaccttcacttactgggagggaagcatcactgcgctttcttctgggtggaagacttactagtttcatcagtggattttttcctccgcctagttttctgcttacattgcrgggagtgggaaggacagggggcatgggagttaattctcaaggcttgggttgcaaacccagtttaacatcttcttctttaactctgcaggaggtgcctgacctcttctcaaatcttaggtatttaatgtttttttcttctctctatgaattgtctcagttgaaaattacagcactacagaaacatgcccgctacatgtttccatacagtttcttatggctgtgctggtactattctttctacttgagattaagagtacctgtgtaatgggatttatttattgctgcatttacactttatatctcaaatggtgatgtgatctcactttatatataaaatcatgttttggggaaaaccaagtttttaaggat

SEQ ID NO: 543417 - DNA, 344 bp, Homo sapiens
caatcaagctgtgtgctcgctatcagggtgatatracttccaaacctcagcatcatgcatttccgcatgtaagaaatctgcacatataccccctacatcaaaaataaaagttgaaattctaaaaggtatacagttttacaattataaatgccattcctataatctacttgtttatagttcccccatttttaaccaaatattctcaattagctactttttcttgccctgaatcagatattaagaaaaagcaaataaaaggatatggttatcggtgctacctttttactgttccgaatccctgataagcttcctaggattttgaagtgatttgaaggaaaattttg

SEQ ID NO: 543418 - DNA, 639 bp, Homo sapiens
ataatatccaggtttataaggaataggtaatcttggtagactgcttgcctaacataacacaacaagaagcgttgtataaatctcagaaatgttaattggtttttaaaktagtgcaatgcatttttctttaaaactatgtattatctcagaatgtgtcttccataacgcaaaattttgccataatgttaactattaccagtatgcccttgttaatgtaaatatcatatccattagctcctttgtcgtgtcttttgtaattcaatggatgaaattatataagggaatttataatgctccctaagtaaatatggacttgaagtataatatttctaaagagttatgttaattttattaattctattttagtacattttaggcaacccttctggttctgcactattttattagacagtcaatcaatgtttatgaagcatacatggattaatgttcctttttttttttttgctatgtagctgcagaagtctttagactatccagatgtttgacttcttaagtagctgtcaattctgacctagatggagccctgctgcagaaagatgcctactccacctttctccacaccagaaatgcaatcaaaacaagactaattgactgtgttcttgtaatttttgagaaatt

SEQ ID NO: 543419 - DNA, 639 bp, Homo sapiens
ataatatccaggtttataaggaataggtaatcttggtagactgcttgcctaacataacacaacaagaagcgttgtataaatctcagaaatgttaattggtttttaaattagtgcaatgcatttttctttaaaactatgtattatctcagaatgtgtcttccataacgcaaaattttgccataatgttaactattaccagtatgcccttgttaatrtaaatatcatatccattagctcctttgtcgtgtcttttgtaattcaatggatgaaattatataagggaatttataatgctccctaagtaaatatggacttgaagtataatatttctaaagagttatgttaattttattaattctattttagtacattttaggcaacccttctggttctgcactattttattagacagtcaatcaatgtttatgaagcatacatggattaatgttcctttttttttttttgctatgtagctgcagaagtctttagactatccagatgtttgacttcttaagtagctgtcaattctgacctagatggagccctgctgcagaaagatgcctactccacctttctccacaccagaaatgcaatcaaaacaagactaattgactgtgttcttgtaatttttgagaaatt

SEQ ID NO: 543420 - DNA, 639 bp, Homo sapiens
ataatatccaggtttataaggaataggtaatcttggtagactgcttgcctaacataacacaacaagaagcgttgtataaatctcagaaatgttaattggtttttaaattagtgcaatgcatttttctttaaaactatgtattatctcagaatgtgtcttccataacgcaaaattttgccataatgttaactattaccagtatgcccttgttaatgtaaatatcatatccattagctcctttgtcgtgtcttttgtaattcaatggatgaaattatataagggaatttataatgctccctaagtaaatatggacttgaagtataatatttctaaagagttatgttaattttattaattctattttagtacattttaggcaacccttctggttctgcactattttattagacagtcaatcaatgtttrtgaagcatacatggattaatgttcctttttttttttttgctatgtagctgcagaagtctttagactatccagatgtttgacttcttaagtagctgtcaattctgacctagatggagccctgctgcagaaagatgcctactccacctttctccacaccagaaatgcaatcaaaacaagactaattgactgtgttcttgtaatttttgagaaatt

SEQ ID NO: 543421 - DNA, 672 bp, Homo sapiens
gctgcctgataacctaataataaaggatatcagagtcctctctccccaatgaacaaacaaaaacatatttacacattccaaaatcaatacaaaagaagtaattttgctaaagtctaacaaaatacatttcattataactatatatacacctaaaatacacatttgacctaaactttgctactctgaggtctagccatgggtaygcaagtctagaatttagattgtttttgttcgtttgggccttatttatataaatgaatacgttcatcctggaaacaacctatttcgatagaaaacagatggatactgacattttgacaaaggttaatgtaatggcattgcagaagaggtttatgtttttgtttttaaaatataatgtctattctttttgccttttagtttttgtcctaagtggattcatgcctcagtcatagtaaaaatttaagttaaaaagtttaaaactttttttagcatgaaaaaaaacaacttaaaacaatgtttcaacaaaaattgcaagtttcagggtacaattgacaagcactcttgtaaggggactttggtggaatgggggacactcaccatgtcagtatttttcgggcttctgaagaaagtgcctcagcacagacattatcctagtagtccagttatctgggatgctggcatagaaagtgg

SEQ ID NO: 543422 - DNA, 523 bp, Homo sapiens
agatttccctcttccgcttttcttcaatatcactcctgagctataatgttctaattgtccctttctcctctgtaattttgttactggagtctgatactgaaattgcagaatcagcttcttgataatctagagatgatctttgaatatatagagatctagagatactttaaataagcattggattcattgggttatccaggtcaagtgatagaactgttctactgctggctggacctgctttgagatcattgctttgctatgaatgccatatgctcaaatgtgaaatattttaatkttagaatatgatccattagctttcttatgggtaggaatttaaattacaggtttttgctttttatcttcgaagggggaattctaaaatttgccagactgtttcactccagaaaagtcattgaatgtcagatcctaaatttctataggattgattgatccaacagtctctgggacatattcatctaaatatagcacaggtagcttctacatctgctgtctacattcacag

SEQ ID NO: 543423 - DNA, 392 bp, Homo sapiens
gtgcctacccagattaagggtgggtctgccttgcccaacccactgactcaaatgttaatctcctttggcaacaccctcacagacacacccagaatccatagttttcacccttcaatccaattaagttgacactcagtatcaaccatcacaattattattactttgcatgtgatttttattataattttattatcataagacaagggattctcatatcataaragaatacacatgaaacagttttagttggagtttggtctttgccaaaatccaattaaatattttaagaagatagaacactcagttgaacaaatagccaagaaggaatttgaggagagtaggaatttgatagcacttttctcatctttgctctacattcttgtatttgatat

SEQ ID NO: 543424 - DNA, 506 bp, Homo sapiens
tgcctgtgtgtctgcctgctagagcctcagggtttttataggcacaggatgggggtgtggcaggccagggtggtctttggaaatgcaacatttggccaggaaaacaaaaaaatgcctgtcctcacctaggtccgtgggggtggaggcctagccagggaccatgcccttctctacccagcacttccctgcccccttccatatcatttaaaggaaccatgcccttcccagcacttcccttccacatcacaattagggttggattcatttataacctggcatccatatgccccaactctaaaagatgcygtgataacactcaggttcctcagtatcagtgactatttacactctacgtctaatagtcactgaaagatttgtgttcttcaatgggttaaatggcttaggatctttggagaagaagggacggactcattaccaaacagatttgacattctgctgcaggttcctttcttaggaagacttggccttcatccagtcgtgtggtt

SEQ ID NO: 543425 - DNA, 564 bp, Homo sapiens
ctggctgtcgtcctgcttctgcttattccacagaatgagyctggtgggggagaggaaattcctaacctgtttttttttacacatcttcatcagaaaagcgaaagcactaattactgtccataataaaactactgggaaggttacttagcttgtaagtaagttccacaaagccatttcagtaaaaacttcctggttctaaaattgggaaaagcaggataatcctctaaggctgacattctttctcttttgtgcatttacaactaaacggtcactgatacacatttccacagtgaccctgcaatatccacattggctttcttctaagacacttcaaaaatacatcacacctttatgtgttaaatatcactattggcatatatctttaaaaacatttattttcttaattctcaaaatacagaaaagaatgttatgctattgtgtgcacaaactgctattttcaataaggagctcttaatttagaaagttgctatttttcaataaagagctctcaattagaaaatatcaagaagtgatgttaagtttttatggaaataaataaagtat

SEQ ID NO: 543426 - DNA, 512 bp, Homo sapiens
aagtcaatgagaaggaattgggtgccagttcttgctttgcaaggagtgggttgactaatgagacagccacaaatgtcactgccatcccatctcaccctttcacctgtgctgcaaggcttcaacaatcatacccagtctccacttaggaaaattctgtcctttctcaaatgctggccactcagcaatgtgctcccttaatccaggccaagcacatagtaaaagaactccaaaaagggttacagccaaaagtgatctttctcctccatactcccaaagcagattatagctcctccataaacgtgcttcgcattgtgccccacgtttggtttgttacttgtgtatacattatcgtctcttctagattgagcttctgtaggaaaggagaatccttttcaattttttggtattacacccagctcaggaccttgctcagttgcttaaattgaatgagaaaatgtatcyaagtacccactgatgttggaaattcaacttgttccaatattgaggactgc

SEQ ID NO: 543427 - DNA, 600 bp, Homo sapiens
atgtttggggaagaggtatgtgggtgaggctagagtatggggttatttgtgaaacttacttctgaagagacagcttttaattaatcatcaggtggacaagatgaccatctctgtgactatcagtcagccgcatcttccaaaatccagcayttgtgcagtggttaaagtggcaaaggcagtaaaaacacatgagtttaacacttctttttaccaaggcttatctgaacattggaggccctatatgccatcagcagaaacaaaacctgagactctgtaggagattgtgttgattgtcccactcaataggtgtaccctaagagaagagagatatacatggaaataaagacctgccctttcttgctgcctttggatgttgttacaccacagcatgaagctcggggctgggcagtcattttgccacctagagagaagatccaagagattcttaaaaaaattggcttagagtcccagacttctcagagatcctgaacttaccaatccaaaattactgtgatgtgagaagataaaccttcattgtttaaaccacatcttatttggtgtattagctttatgtggctgctataacaaattactgcaaac

SEQ ID NO: 543428 - DNA, 658 bp, Homo sapiens
ctggtcacctccctacacttccactagcagggatttaatcagaggctgaaaatcaattgtcctttgaaagtgatttttgctaaagatcaagagcaatatttggttatatctcagcctctatcctacaatatttatcattttataatgctcttttgtgtaagatacaataaatcttattaataaccaaaaactgaattatgaattattgcaattcattggccatctacttgggcaattacaayggttagtagctcagaagcactgatatttgagcactgtatcttcagattccgaggcctgggttaggatgcttgctgctggaaacactggctggaaagctttcttgttccatgtggctctcaggtcaccctgagaactggacacactcgtaattggttgatggtaggcttgtatattcatgaaatgttgattggaaaggcctagacaatctctctaaatacataattggacaagattgttgaaaggattagagttggacactattctaaagtggcacaatgtctaagcatagaggctgggggtcttcctgttccctgcacttaataccctgggagctagtggtggagagccacgtaatccacatttgaattctggcattctgactgctgcatccttactttgtggcttcagggaagcc

SEQ ID NO: 543429 - DNA, 621 bp, Homo sapiens
ccacatattggagatgatttaaggcttgcagaccgaccatgactgccaattgacccacactgtagctgaaataatactaccagaaaaaaattctaccactgagtcccaatgacacttcaatccccctatttgatgttagactcgcttgcctctaaggcatgatctttttgatgtgtggggatatrgagtgttgcttgggttgctgagaataaagtttgcaatggccaaggagacctggttataccaagggaagatttctgcaaaaggaaaattcttcaagtttcgatgtccacgtttgcatttataaggggctgaacaagatggtagccactagctacataagctacataagggtatgtacattaaaatttcaattaattaaaaagccatttcctcagccatactaaacatatttccagtacttaatagtcccatgaagatgacacctacaaaattggatagcagatattttcatctcagaatgtcttattggacagcactagtccaaacaattgatggagaagatcatttgggtgtagagaggcaggttgtaatttataactcattatcagggagggtgagtatagggctgtcacgatatcagaaatgccttggcaattc

SEQ ID NO: 543430 - DNA, 482 bp, Homo sapiens
tttttctctattataaagatagactgagataaacaaatactttagaaaagaaactttgaagaaataacaaaaaagccctctgagtgtaaatctattttgtaaatgattttgaaacgtcttactttttatatcttattgacatatcaaaatattcaaaacaccatttacctcagttgytttaacacagttccacgaagtataataaaaagaaaactaacaatagaaaagaaaagcaaaattactgtcctggttggtactactttacttgaagatccagtgaagtttcacccaggatttttttcaagttttgtgagtttcaccaaccacataatcatagcttaaaacacataataaacataaactaatacaaggaactagttgggggattcttgggacctgcacacagaaaattcccatgttagaattaggccaactgactggagatctggctacaatggatggctatttactgctcattcagt

SEQ ID NO: 543431 - DNA, 482 bp, Homo sapiens
tttttctctattataaagatagactgagataaacaaatactttagaaaagaaactttgaagaaataacaaaaaagccctctgagtgtaaatctattttgtaaatgattttgaaacgtcttactttttatatcttattgacatatcaaaatattcaaaacaccatttacctcagttgctttaacacagttccacgaagtataataaaaagaaaactaacaatagaaaagaaaagcaaaattactgtcctggttggtactactttacttgaagatccagtgaagtttcacccaggatttttttcawgttttgtgagtttcaccaaccacataatcatagcttaaaacacataataaacataaactaatacaaggaactagttgggggattcttgggacctgcacacagaaaattcccatgttagaattaggccaactgactggagatctggctacaatggatggctatttactgctcattcagt

SEQ ID NO: 543432 - DNA, 319 bp, Homo sapiens
gttggctaccaccccttccctaaggagttcaaatggcttagacagcaggcagccttagctgtggtgctggctgcccctacccccaggtacttggcaagcttaagcagattctagctgagtggatgttgagaatctgtgcatctcygtggttgggaccctaggccctggtggcaggggcttacaagtgggatcttccgatccgtgggttgcacagtccacagagaaagcatggtttcctaggctgggtagcacgctcactcaccgcctcctttgactgggggatggaggctcccctgcccagtgtggctctcaggtgggc

SEQ ID NO: 543433 - DNA, 622 bp, Homo sapiens
ctattatggtattaccacaataccaaattaaagtttgagttcagaataaaaactttagtgatttatacacagcttaatwcaggttattttaaaatttctctgcctttttatttaatagaaggggatagctgagctttagaataaaacttgagttttagaataaaaactttagtggtttatacacagcttaatggaggttattttaaaatttctctgccatcttttttttttttttttgcataaggggatagctgtctttaaggtgcataggatgttctacacatcttaatagtttccatagttacgttgtatcattcccaacaagttagtagagtgagttgaagtaggctcattttacaggttggagaagtgagtcacagaaaggatgtaaaaacgtccctagattacataaggggtggggccaaaatgtgaaattatcagactccaaaacttggccaaaatgtgtgagaaagtactgaaagtcagagccctgtgcaatatatttctgggatgtagtaacatatgtttagtatcactaagtatttgataaatgaacaaaaatgtagcgtaatgtacaaaatgtactttattggataggaattaaattatttacaagtaaaag

SEQ ID NO: 543434 - DNA, 622 bp, Homo sapiens
ctattatggtattaccacaataccaaattaaagtttgagttcagaataaaaactttagtgatttatacacagcttaatacaggttattttaaaatttctctgcctttttatttaatagaaggggatagctgagctttagaataaaacttgagttttagaataaaaacttyagtggtttatacacagcttaatggaggttattttaaaatttctctgccatcttttttttttttttttgcataaggggatagctgtctttaaggtgcataggatgttctacacatcttaatagtttccatagttacgttgtatcattcccaacaagttagtagagtgagttgaagtaggctcattttacaggttggagaagtgagtcacagaaaggatgtaaaaacgtccctagattacataaggggtggggccaaaatgtgaaattatcagactccaaaacttggccaaaatgtgtgagaaagtactgaaagtcagagccctgtgcaatatatttctgggatgtagtaacatatgtttagtatcactaagtatttgataaatgaacaaaaatgtagcgtaatgtacaaaatgtactttattggataggaattaaattatttacaagtaaaag

SEQ ID NO: 543435 - DNA, 370 bp, Homo sapiens
cttttcatatcattagatgtaattctgaagcatcttttttaggcgcagagtatcttactctgaaaaactttgttgtagctgatgctcttcatccactggcccctcccatttctcatttctctactaggaatttgtaggtcaaagagcatgtaaaaatcttgatatgggccgggcacggtggctcaagcctgtaatcccagcactttgggaggctgagacagggggatcatgaggtcaggagaccgagaccgtcctarccaacacggtgaaaccctgtctctattaaaaaaaaatacaaaaaattagccaggtgcagtggcgggtgcttgtagtcccagctacttgggaggctgaggtgggagaatgactt

SEQ ID NO: 543436 - DNA, 507 bp, Homo sapiens
gctgtggcctggggtgagttatactacctcatggcttcagttttctcatctgtaaaatggtcataataattgtacttatctcatgattgttayaaggattaaagtaatgcacataaaactagacacagtacctagatggtgttaggacttaggttagtgtaagatttttttttttttttaaatttccattatttataactcacttatctttgataaacagtcttttacaagcagatagtgttgagcctcttgaattcttattgagttacacaaatgtttggttaagattacatagtaataggcattgctgctctgttatttcatatttccttttctttttgagacagtctcgctctgttgcccaggctggagtgcagaggtgtgatctcggctcactgcaacctccacctctctgggttcaagcgatcctcttgccacagcctcctgagtagctgggattacaggcgtgtgctaccacacctggctgatttttgtgtttttttagag

SEQ ID NO: 543437 - DNA, 358 bp, Homo sapiens
gggttcctgcatggtaacaagaccttaaaattgtgtcactggagaaggacgtgcagttcccgctgaggagagacttggccactccaggacaacacaggactacaagtcaggaatttgaagatgaaaagtgctcaacagtgataaatcctaaatgtttcactgaacaacctttcagatagccttcttgaagtttgctgaattatggctataaggaccactccccacccctgctaggtatggagaggtcatctcctctatctgaaggtgaccaacatctccagtttttccaaattccctaagggttttgagaccacaccttcccacaggtactstaactccacctggccaataggaattt

SEQ ID NO: 543438 - DNA, 482 bp, Homo sapiens
gtaacacacataactgataaaggattcatatctagaatatacaaagaactccaaatcaatgaggaaaagtcagaaaaccaaaaaaggaggacagctaaagctgaaaaagcacttcaaaaacagactgtacccagctgtctgataaayatgaaaaagtatgcagtctcaaagtaggtccaaattaagaccttcatgagaattggtatacacccatcggtttggcagaaatccccttctcaagccctggaattctgggctctacccccattgctcaaagatctgaccattttccatttccatcccttccatctttctgcagtacctggcattcctgaccatgctatttctaccaatcaacaaaaactactagatactcagaggggatttaatacagagagctggctacaacatgacaaaacaccagacaagggagggcactgtggctcatgcctgtaatcccggcacttcgggaggccaaggcg

SEQ ID NO: 543439 - DNA, 482 bp, Homo sapiens
gtaacacacataactgataaaggattcatatctagaatatacaaagaactccaaatcaatgaggaaaagtcagaaaaccaaaaaaggaggacagctaaagctgaaaaagcacttcaaaaacagactgtacccagctgtctgataaatatgaaaaagtatgcagtctcaaagtaggtccaaattaagaccttcatgagaattggtatacacccatcggtttggcagaaatccccttctcaagccctggaattctgggctctacccccattgctcaaagatctgaccattttccatttccatcccttccatctttctgcagtacctggcattcctgaccatgctatttctaccaatcaacaaaaactactagatactcagaggggatttaatacagagagctggctacaacatgacaaaacaccagacaagggagggcactgkggctcatgcctgtaatcccggcacttcgggaggccaaggcg

SEQ ID NO: 543440 - DNA, 664 bp, Homo sapiens
aaagtgacttttgtttttgactcrgtatttttcaggtcaaacacattttcctttcaattttagatttatactgattttcacaaactgtcttggagaattatgaggtcctcaaacacaaagcttcatattgtggttcttagtcaagaaaatctcctagaggcaatgatccagctaattacagatcccctattgtccacgtctaaatttacgcattgtagctgggattagacccatgaatcctaggacaatgccaggggtgtcattaacttaaaaactctggcaggccaagtgcagtggatcacgcctgtaatcctagcactttgggagaccgaggcaggtggatcacgaggtcaggagttgaagaccagcctggccaagatggtgaaaccccatctctactaaaaatacaaaaattagccagccatggtggcacgcacctgtaatcccagctactcgggaagctgaggcagagaattgcttaaacccagaaggcggaggcggaggttgcagtgagccgagattgtgccaatgcactacagcctgggcgacacagcgagactccgtctcaaaaaaaaaacaaaaacaaaaacaaaaaaactctggcgtaagcatggtgtggagagtgtctgcagtgatatgagaatcctgggcacaacagcataag

SEQ ID NO: 543441 - DNA, 548 bp, Homo sapiens
tttgtatttttagtggagatggggtttcgccatgttgaccaggctggtctcgaactcctaactcaggtgatccacccagctcggtctcccacagtgctgggattacaggcaggagccactgcacttggcccttcctggatttcttgtattacttttaataataataatttaaaaaaacacaggaaaagaaaygatgtattccagccctgtcctttgcttcatggctgttacactgacactgtgattgtaagcttgaatttcgggtcgtaggcaattttctgacaaagccccccacttctccctcagccactgcccctgcaccgccctcagcatgaagcttaaaagggagagaatatagatcccaccccaagggcaaagagtcaacgggtccacatccacaagtcctgagcactcttgcatttatttcacaagtcagtgaaagccaatgggatgtccctttccgatgctgcatgggagcaatgagaagcagccagagaggcatcacctgaccaggcggctggctggcataggggggtggctgtggccag

SEQ ID NO: 543442 - DNA, 436 bp, Homo sapiens
gctattgattctcactcatcagcacccactttgcttttggaggcggctttggaaatgcctttcccaggctcagcccttgcctgcagccatgaccttacctgaagaagaggatggatgagggactgtccctaggatgcaggaatggtgaaaaatgacgcttgtgtttacttagacctcctcmccaagtcggcctgcgttctcctctgagttccacatgggtcctatgacgtaggcactaatgccaggcccactttagggacagggaagtaagtacctagcaaaagtcagagacaggtaccactgggatataaacccagctccgaatccagcaccacgcttaagaaagctgctctgtaccttgttgccaagttgctgcttctttcaactcctaaatgcagcattttcttgttccttctccaaattgtttctctgctga

SEQ ID NO: 543443 - DNA, 515 bp, Homo sapiens
ccacccactaaggtcacaggaggcagccaggcttgcccacacatgggggcagctagaggaaacctggttagggcttcagagaggggtcaaggttgaagccatctgaggggtcagaggcaggaggcaaaggggcctctgcttccttcagcggcgaatccagagtctgggtgcatggaggcragcaagaggaacaggctcgttagagaagccccacccagttactcagcacctggtaaacatcgattattcccactccgggctaaaggaaagagaaggaaaattccctggtaatgccacctccccaagcagccaccatgagcctttgagggtttgtgtgcatggaaagagaaatctggtgtggatgattgtacgtcagtggatcagctctaaatcaatggagcgggttttatggtatccccttggtttcacatcaactaggaggtcacttgtgcacctgggacatcaccttttctcctccatgaaagctgtgaaattctcaacacctagtccagcag

SEQ ID NO: 543444 - DNA, 515 bp, Homo sapiens
ccacccactaaggtcacaggaggcagccaggcttgcccacacatgggggcagctagaggaaacctggttagggcttcagagaggggtcaaggttgaagccatctgaggggtcagaggcaggaggcaaaggggcctctgcttccttcagcggcgaatccagagtctgggtgcatggaggcgagcaagaggaacaggctcgttagagaagccccacccagttactcagcacctggtaaacatcgattattcccactccgggctaaaggaaagagaaggaaaattccctggtaatgccacctccccaagcagccaccatgagcctttgagggtttgtgtgcatggaaagagaaatctggtgtggatgattgtwcgtcagtggatcagctctaaatcaatggagcgggttttatggtatccccttggtttcacatcaactaggaggtcacttgtgcacctgggacatcaccttttctcctccatgaaagctgtgaaattctcaacacctagtccagcag

SEQ ID NO: 543445 - DNA, 515 bp, Homo sapiens
ccacccactaaggtcacaggaggcagccaggcttgcccacacatgggggcagctagaggaaacctggttagggcttcagagaggggtcaaggttgaagccatctgaggggtcagaggcaggaggcaaaggggcctctgcttccttcagcggcgaatccagagtctgggtgcatggaggcgagcaagaggaacaggctcgttagagaagccccacccagttactcagcacctggtaaacatcgattattcccactccgggctaaaggaaagagaaggaaaattccctggtaatgccacctccccaagcagccaccatgagcctttgagggtttgtgtgcatggaaagagaaatctggtgtggatgattgtacgtcagtggatcagctctaaatcaatggagcgggttttatggtatccccttggtttcacatcaactaggaggtcacttrtgcacctgggacatcaccttttctcctccatgaaagctgtgaaattctcaacacctagtccagcag

SEQ ID NO: 543446 - DNA, 512 bp, Homo sapiens
acctaacaaaaatgagagctgggaagggygcaggtgagcagtgcatctacctaggtaatactgtctatgtctaggtaatactatgtaattttatcttcatactgcgtgtggagataaaaaacacagcttctcctgcacctcttccccaagactggtgcactccagcgacctgagggggctcgcctcagtccccagcactgaggttacaaagggagaattttttaatgacttaggcctgtggctctagagttgccaaaacatcttaggcaacgagaaacgaacggcagctagtaccatgtgggcacgtgtgtgtggttgtccacaaggactcacccaagtaatagactggaatggttaagagctggccacacatacgccccgcaaagctggctgctaccattcgttccttgttgcataaaacattgttttcaaagccaaccccactacttagtcatcatttagagactagactatccaatgttatgaacatttttaacaggtttcaagcaaca

SEQ ID NO: 543447 - DNA, 535 bp, Homo sapiens
atcctggctgctaatttactcactctaagcagagactcagcgagaaccagaggccaccgtccactctgcacctctgctctgaggatgagggcagctcccgcaggtgaagcctctagcatgtcctttccggtattcagtgcacgttggacggcagagcttactagtcattagggccccagagcctgtgctacctagaaacaagcccgtaaatgttggcgggaatggggggtccgcatgtgaggcccagccctgcccatcacaggaaacggraatcccaggggtcccagaacataagcagatgcgggaaaccaccagagagcccgttcaagccaagtcatttgatttttgtctccattatctcaatttcctacttcacttcgcaggacggtgcttcatcttctagctgaaatcttattactgcgcaacacctacctaagagacaacttataattactgcccgaagtgaaaaattgacctcctcaccaccgccctggctgagcaaggcacgcgagatgcactcgtccgcagagtctgg

SEQ ID NO: 543448 - DNA, 663 bp, Homo sapiens
tgtcattctgcagcagagacccagagaatgtcaagaacacaagcactcaagaatggaaataactcaaacgtccttcagctcgagagcggttaaactggcacatctgattcctcctcagcagtgaaacagaagggactgttgacacacgcagtgctgtggttggatctcaagggcattatactaagagaaaaacgccagtcctataaggaggtgtactgtgtgattccatttctaaatgacatcctcaaaatgccagcctcagaaggagagcgggtcagtgttccacggagcagtgggaggcagcaggaggccgtcctctgtggtaatggagagttctgggccagggccgctgtggttgttacacgaatctacacatgtgacaaatgccatagaattagacccaaagaatgcctgcgaaagctgctgaaatccagtggggtctgcagcctggttcactctgtagtgaaatccagtggggtctgcagcctggttctatctgtattgaaatccagtggggtctgcagcctggtccactctgtaktgaaatccagtgtggtctgcagcctggttctatctgtattgaaatccagtggggtctgcagcctggtccactctgtagtgaaatccagtggggtctgcagcctggttctagctgtattgaaa

SEQ ID NO: 543449 - DNA, 663 bp, Homo sapiens
tgtcattctgcagcagagacccagagaatgtcaagaacacaagcactcaagaatggaaataactcaaacgtccttcagctcgagagcggttaaactggcacatctgattcctcctcagcagtgaaacagaagggactgttgacacacgcagtgctgtggttggatctcaagggcattatactaagagaaaaacgccagtcctataaggaggtgtactgtgtgattccatttctaaatgacatcctcaaaatgccagcctcagaaggagagcgggtcagtgttccacggagcagtgggaggcagcaggaggccgtcctctgtggtaatggagagttctgggccagggccgctgtggttgttacacgaatctacacatgtgacaaatgccatagaattagacccaaagaatgcctgcgaaagctgctgaaatccagtggggtctgcagcctggttcactctgtagtgaaatccagtggggtctgcagcctggttctatctgtattgaaatccagtggggtctgcagcctggtccactctgtagtgaaatccagtgtggtctgcagcctggttctatctgtaktgaaatccagtggggtctgcagcctggtccactctgtagtgaaatccagtggggtctgcagcctggttctagctgtattgaaa

SEQ ID NO: 543450 - DNA, 645 bp, Homo sapiens
ggtacacagcaatgcttgataaattgttactattattgggtgaattttaggttttttttgttgttgttgttgttttgagacagagtctctctgttgtcctggctggagcacagcagtgcgatcttggctcactgcaacctccatcttctgaggttcaagtgattctcgtgccccagcctcccaagtagctgggattacaggtgcctgccaccacatccagctaattttttttatttttaagtagagatgggcttttgccatgcttccccagctggtcttgaactcctggcctcaagtgatcctcctgtctcggcctcccaaagtgctgggattacaggcttgagccaccgcacccgtccagaattttagatttttttaaatccgtggttgaaaaataggctatggctggcttactcattgtgctttagggaagcatgtatttgagtgaaggaaatgataaaaggaatttcatrtcgggcccaggcgccgcccaccctgcaagacagtttacagatgcctgccctgacagctgtctgcagttagccagcgtcagccgaggggtcctgagatccgctgaaggctgcctttgcatgccgacagcaagggaaaagtgccacatgtccctgggcttgccacaggtgacct

SEQ ID NO: 543451 - DNA, 645 bp, Homo sapiens
ggtacacagcaatgcttgataaattgttactattattgggtgaattttaggttttttttgttgttgttgttgttttgagacagagtctctctgttgtcctggctggagcacagcagtgcgatcttggctcactgcaacctccatcttctgaggttcaagtgattctcgtgccccagcctcccaagtagctgggattacaggtgcctgccaccacatccagctaattttttttatttttaagtagagatgggcttttgccatgcttccccagctggtcttgaactcctggcctcaagtgatcctcctgtctcggcctcccaaagtgctgggattacaggcttgagccaccgcacccgtccagaattttagatttttttaaatccgtggttgaaaaataggctatggctggcttactcattgtgctttagggaagcatgtatttgagtgaaggaaatgataaaaggaatttcatatcgggcccaggcgccgcccaccctgcaagacagtttacagatgcctgccctgacagctgtctgcagttagccagcgtcagccgaggggtcctgagatccgctgaaggctgcctttgcatgccgacrgcaagggaaaagtgccacatgtccctgggcttgccacaggtgacct

SEQ ID NO: 543452 - DNA, 579 bp, Homo sapiens
tcccaaacaccgtcctggaaagtgataggcacccagtgtcttaaaattaagattcatacttccctcgggaccaaagctatacatatgcaaggtgagtggacactctgaggtgtaggcctgacctctagggatccttttctaagtgtcaccacttagaaaaagggctggagaggtattccaccctttggccttcagtttcctcattggtaaaatgaagggaatctattagatcaggggttggccaactatggctcataggccmaatccagcctatatctctacccccagcttagaataatttttacttttttttttttaagagacagggtctcactctattgcccaggcttcagtgcagtggcgtgatcatagctcactgcatccctgaactcctgggttcaagccatctccccaccttagtctcctgagtagctacaactacaggtgtgtaccaccatacccagctaatttatttttattttgtagagacaggggtctcactttgttgcccaagctggtctcgaactcctggcgtcaagtgaacctccccacttggcctgccaaagtgctgggattaca

SEQ ID NO: 543453 - DNA, 614 bp, Homo sapiens
ttcaaattattattttttttcmatacattttcaaattcaagatcaaagtataccaggcatgccaggcaacaagtaacaagaggtaaaactagcaaggcaaaagtaaacaaataacagaaagagacccaattagaagatacattttgtaaaactattatgatgttatgctcaaggagtaaaagacaaacataaacatttcagaaagtaactggaaattataacaaatgacagtaaacctgaaaagaataaaaatgaaaaatataataaccaaaataaagagctcaatgggtagatttaaaagcagatcgaatgcagtagaaaaaatatctgcgtctcttcacactgttttccttctatgtacgtctgtctgtgaaccaattttctttttataagaacatcgtgcttattggattaggacccacctgaattctcattatctcaaaaaattatatttgcaacccccgtttccaaataaggtcatattcttgggtacatcaatacatggattctgtggagacaaaattcaactaataacaatgaccctaactaattatctatatatatcctaaaaacctagaaaaacactgtttttaagtgtcttctatcttagacat

SEQ ID NO: 543454 - DNA, 614 bp, Homo sapiens
aagcagagcctacagcaaaatggacattggtagttctgtggctattcagcatccagttgtcttcctaaattccctgatttccttttggtgaatgatcttttatcagtttttataagtcagggtccaattaagagacagaaaccacacagttagagtggaagggctctctttagacaaggttaattcttctacctacttaccttcttagaggcctggtttgatctgttaatkcctttccctgtcatactttcaaaaatcaccattactattggtgactatccattagattaattattcttatagcttttctatttcaaaaacatttcttctgcctgatgtgtcccactttcttcacaatcaaaattcttcatttagtgccaggcagaaacagttcctgagaaaatgtgttagtgtaggaatgaaggtataattgatgaatgaatgaatgaatgaatgaatgaatacataatctacactccctgtctatagttttttacctctcactagccaatccactgtgctgtcttatgtcctttctactctagtaaaactgctcttgcaaaagtcgtcattgacatgtgttactaaatcccaggacacgtttcagttatcta

SEQ ID NO: 543455 - DNA, 614 bp, Homo sapiens
aagcagagcctacagcaaaatggacattggtagttctgtggctattcagcatccagttgtcttcctaaattccctgatttccttttggtgaatgatcttttatcagtttttataagtcagggtccaattaagagacagaaaccacacagttagagtggaagggctctctttagacaaggttaattcttctacctacttaccttcttagaggcctggtttgatctgttaattcctttccctgtcatactttcaaaaatcaccattactattggtgactatccattagattaattattcttatagcttttctatttcaaaaacatttcttctgcctgatgtgtcccactttcttcacaatcaaaattcttcatttagtgccaggcagaaacagttcctgagaaaatgtgttagtgtaggaatgaaggtataattgatgaatgaatgaatgaatgaatgaatgaatacataatctacactccctgtctatagttttttacctctcactagccaatccactgtgctgtcttatgtcctttctactctagtaaaactgctcttgcaaaagtygtcattgacatgtgttactaaatcccaggacacgtttcagttatcta

SEQ ID NO: 543456 - DNA, 648 bp, Homo sapiens
tgcttttcaatggcttggtcattattagtaaacttgtattaacaattgaaactaatatgtgggaaagtgctaaaaggtgctatattgtgaaaaattatctatctatctacctacctacctacctatcatggagtcttgctctgttgcccaggctggagtgcagtggtgccatctcagatcactgcaacctccaccacccagattccagagatcctcctgcctcagcctcccgagaggctgagactacaggcatgcaccaccacacccggctaatttttgtattttaagtagagacggggtttcaccatgttggccaggctggtctcaaactcctgacctcaagtgatccacccgccttggtctcccacagtgctgggaytacaagcatgagccactgtgcctggccaaaaaattattattatcaatttagaacatcaatgataacactcatcaaatatatcatcttaattggaatagtcatgggaggtggaaaaagcaatcagttcttcctggctgtaagaccttaggcaaatcatctcagcctgagtgagtgtcctcttaggaaaaattattagcttcgcagagataagtgagaaaacatatacaaaggtggtgagcatgagcactggctcacagatgcttaggaaa

SEQ ID NO: 543457 - DNA, 302 bp, Homo sapiens
ttgtttagctgctccctgtgactcttcctcaacatcaccagtttgccctgtcattgttctgtcctctctacccaagtctatctgccctctcctctcttcccttccctcctcatcagctttgatttcatttctctgcattccagttattttttgccattaccttcaacatccttgctgcactgttcttgtctggcagagcctcagtcctggatgaactcagccacctgctttcccagtacctactgctggaggggtcacacaacaggacagagggcactgckggaaattcaaatgggccctca

SEQ ID NO: 543458 - DNA, 573 bp, Homo sapiens
acagttccctacactgatatcaaacttgccctaaatgataagaagtattcactttgccttaactgtttgtgcaaacaatgtggtttatactgaatgcctgttttccttctggaggtcttgatttttggtaaatgctaggcagaagggatctatgtgaccagctcccggttgaaaccctgagcactaagtcttcaatgagtttccttggtagacaacacttgctgccacaactyggttgctggaggaattaagctcattctgtgggagaggtttctcagaagcttgcacctgctgtcttctatctttgctctattttccttttgtctttgctgattttgctatgtgtctttttgctgtaatcttaaccatgtatttgagtatacatgtatatgtaaccatgtatatgagtatatttatgagtaaactagatatatgagtcctatgtcttcctagcaagtcactacacctggggatgatcttgggaatgcctaacacactttagcacaattcttagctctcctttcttttcttcatcctctatatttaattgtcaccaattatcattaactctac

SEQ ID NO: 543459 - DNA, 457 bp, Homo sapiens
tgttatcagcaccctagattcttataatctcccaggatagaagtcaaaagagattgtcagatagcaaagaggaagtttgtttagcttgtgcataagagaaccaggttcccttatggaaaggaaaagggttgcctgctccccaagagaagtatgtgagtttgttttatagggtmtttttacagggaagggtttagtcagggcatgtacagcacttgcacagtagctcaatatgctttttaatcattgcatgtaagattagcattttaaatctccaccttcaggtgtgatttttagcattaagataaggaagaggtgactgtaagttgaagtttaagtctaactgtgcatgcagggccccaggaagtccctacccacctaaagtgagaacttctggatagtttcttgggtcttttgttgctgattggctgtcacaggatccttagggtgtcactttgcc

SEQ ID NO: 543460 - DNA, 548 bp, Homo sapiens
tccttctcatcagggaaatccattatttgtacttgattccttttgtttcaaagttaaggtrtgggggaatgagccatcttatttcaagtctttatatctcggcatgaataaatatcagatgtgttcctgagaggagggctttaggaggcagaccaccagggcctggaggggaaggtgggcagagtggaggggcagcaggccactaaagagggagagatgagagggagcaaaggactctcccatataccacacagttttttcagtctgggggccaggggtcacatatgttggccgtgctgtgactgcaactatctttcattaccaatcggagttgtggagcctagaggttcagaatggacttcagagctgaatggaaatgagtttgaggtctcagaacaacctaccagatgagagaccttgtatagcttattaaagtattgctgggcacctcagtttccacatcctctgtcttcttccttagtaacaaaagcaacaaacattggatggcattcatcatgtactgagagtgtcctgcactcactcagtcc

SEQ ID NO: 543461 - DNA, 548 bp, Homo sapiens
tccttctcatcagggaaatccattatttgtacttgattccttttgtttcaaagttaaggtatgggggaatgagccatcttatttcaagtctttatatctcggcatgaataaatatcagatgtgttcctgagaggagggctttaggaggcagaccaccagggcctggaggggaaggtgggcagagtggaggggcagcaggccactaaagagggagagatgagagggagcaaaggactctcccatataccacacagttttttcagtctgggggccaggggtcacatatgttggccgtgctgtgactgcaactatctttcattaccaatcggagttgtggagcctagaggttcagaatggacttcagagctgaatggaaatgagtttgaggtctcagaacaacctaccagatgagagaccttgtatagcttattaaagtattgctgggcacctcagtttccacatcctctgtcttcttccttagtaacaaaagcaacaaacattggatgrcattcatcatgtactgagagtgtcctgcactcactcagtcc

SEQ ID NO: 543462 - DNA, 548 bp, Homo sapiens
tccttctcatcagggaaatccattatttgtacttgattccttttgtttcaaagttaaggtatgggggaatgagccatcttatttcaagtctttatatctcggcatgaataaatatcagatgtgttcctgagaggagggctttaggaggcagaccaccagggcctggaggggaaggtgggcagagtggaggggcagcaggccactaaagagggagagatgagagggagcaaaggactctcccatataccacacagttttttcagtctgggggccaggggtcacatatgttggccgtgctgtgactgcaactatctttcattaccaatcggagttgtggagcctagaggttcagaatggacttcagagctgaatggaaatgagtttgaggtctcagaacaacctaccagatgagagaccttgtatagcttattaaagtattgctgggcacctcagtttccacatcctctgtcttcttccttagtaacaaaagcaacaaacattggatggcattcaycatgtactgagagtgtcctgcactcactcagtcc

SEQ ID NO: 543463 - DNA, 559 bp, Homo sapiens
tgtgtattaatcccccaatgtgagtgcaacaccataataggaggtgtcaggaagtacttatgtaagagccagtccctgctgacaaactagaggataaatgaatacaacagaaaaaatctgttgtgaagggttttgctgtggggccttttggggaagttcttcctaccgtacttgttcccactctctcaaatgtatattttcctctttttttttgctttttktttggttttgttttgttttgttttgaaatggagtctcgctctgttgcccaggctagagtgcagtggcatgatctcggctcactgcaagctatgcctcctgggttcatgccattctcctgcctcagcctcccaagtagctgggactactggcgcccaccaccacgcccggctaattttttgtatttttagtagagacggggtttcatcgtgttagccaggatggtctcgatctcctgacctcgtgatccacccgcctcggcctcccaaagtgctgggattacaggcgtgagccaccgcgcccggcctcaaatgtgtattttcagtacagagggcagcat

SEQ ID NO: 543464 - DNA, 559 bp, Homo sapiens
tgtgtattaatcccccaatgtgagtgcaacaccataataggaggtgtcaggaagtacttatgtaagagccagtccctgctgacaaactagaggataaatgaatacaacagaaaaaatctgttgtgaagggttttgctgtggggccttttggggaagttcttcctaccgtacttgttcccactctctcaaatgtatattttcctctttttttttgctttttttttggttttgttttgttttgttttgaratggagtctcgctctgttgcccaggctagagtgcagtggcatgatctcggctcactgcaagctatgcctcctgggttcatgccattctcctgcctcagcctcccaagtagctgggactactggcgcccaccaccacgcccggctaattttttgtatttttagtagagacggggtttcatcgtgttagccaggatggtctcgatctcctgacctcgtgatccacccgcctcggcctcccaaagtgctgggattacaggcgtgagccaccgcgcccggcctcaaatgtgtattttcagtacagagggcagcat

SEQ ID NO: 543465 - DNA, 459 bp, Homo sapiens
ccacccacagggaacaaaggaaaggagagaggaatacacgcccatggctttcagggcatggcctggaaggggcacacatcacttctgatcacacccttttggccagacacatggctggttgtcacatggcaacaattagcttccagggagagtgagaaatggtctcatgttaggtggccatatttccatctaaaactcaggaattttttaattgaagaaaatagatatcagtaaaaagcagcaggctttgcacaatccacataatacagagtttacagaaatcagtctagctattgaaggagaaagagatttaataaagrgaattgagtgtttttaaaatcacctagaggactgggctccaggattttatgctgagctcctaacaacttcagagacctacttgtcaagggactcctacctttgccatatccagaggggcagggagacaggaggttgtaa

SEQ ID NO: 543466 - DNA, 403 bp, Homo sapiens
tggatcttatttctggactgcaggtctggagaataattgaagctcaatttaggatgcatgrtaaaagatgtcaagaccaaagcaaaagcctaaccttatgaactgaaccaaaataaaacaatggcttacaaggggtgtgagagttagaatttgaagtccactgaggacaagcccctgacctgactggcaaggaagcagatttgaaaagagaactagaccagtagttataactaaagtgaggggtcttaactaagtcccattagaggatttcctgagacagtttagtttggatcagtgattcgaagtgtctcagttcacaggtggtaggtgttagttgtgagaagctggggaaggtatacatttggggatgaacttttccattcttctgtgagttttacaggag

SEQ ID NO: 543467 - DNA, 513 bp, Homo sapiens
ctgcaggtctggagaataattgaagctcaatttaggatgcatgataaaagatgtcaagaccaaagcaaaagcctaaccttatgaactgaacyaaaataaaacaatggcttacaaggggtgtgagagttagaatttgaagtccactgaggacaagcccctgacctgactggcaaggaagcagatttgaaaagagaactagaccagtagttataactaaagtgaggggtcttaactaagtcccattagaggatttcctgagacagtttagtttggatcagtgattcgaagtgtctcagttcacaggtggtaggtgttagttgtgagaagctggggaaggtatacatttggggatgaacttttccattcttctgtgagttttacaggagtcttagaaatatcaagaccttgtttttctaaccttaactatttgcagtattagattttaattctagagatgttatcatgagagtgattgtagcaactggcaatggtagattttaaggtctttaattt

SEQ ID NO: 543468 - DNA, 513 bp, Homo sapiens
ctgcaggtctggagaataattgaagctcaatttaggatgcatgataaaagatgtcaagaccaaagcaaaagcctaaccttatgaactgaaccaaaataaaacaatggcttacaaggggtgtgagagttagaatttgaagtccactgaggacaagcccctgacctgactggcaaggaagcagatytgaaaagagaactagaccagtagttataactaaagtgaggggtcttaactaagtcccattagaggatttcctgagacagtttagtttggatcagtgattcgaagtgtctcagttcacaggtggtaggtgttagttgtgagaagctggggaaggtatacatttggggatgaacttttccattcttctgtgagttttacaggagtcttagaaatatcaagaccttgtttttctaaccttaactatttgcagtattagattttaattctagagatgttatcatgagagtgattgtagcaactggcaatggtagattttaaggtctttaattt

SEQ ID NO: 543469 - DNA, 532 bp, Homo sapiens
cactcataattggtctgttggttgtagaatgactttgtttatttttttttacatgccacattatgatttgtccttagtcacaaattgatagtggaaatgtacttattaagtaaattcattagyttgtttactcaataatgagaagctactatacaaattgtttgttttaaaattctaaaaaatgatattttccagtctgcagacatcgtcctgtacacttttcatgctcattggagtcaatattgagcactcaaaagatctttaatgggtatttatataattgagatctctgattatataacatgcattcattcattcattcatttattcatttacctagcaaacattgagtgagtatttgctgcatgccccaagcactgtgttagattctgaggattaatgtctggctgggcacatgtcattatgtgagtataaaaactttccataatgaacatgctcttgaaaattggtggacaaattgagtcacatttaaatcaactcacagagcctggtatttagggggatctgtaag

SEQ ID NO: 543470 - DNA, 513 bp, Homo sapiens
aaactgatcagagagtaacttcttgagctgtttgaatataagttcagcattctgagctctatcaaaaggaacccttaattaccctggaaattgagtttcattttctcttcctatgtgccatctcctgtactcctaagcattggatttttctgtggatgtggaagacctcctggggtcctctcttgaggtctcggcaccaccttctttcctggaaatgtagctaggcttgctcagtacccctttgcctgtgttttctccttaggttccatctgtcctgcctgtcagacatcaaagcacatctttactgaagattcagagtgctctcagaagagcattacaccataggaaggacaaaggtggaaatataggtagttaacttggtctttttcttagtcctcctyagagaagttacttcaaggtttactcttggaaagtgggtgagtgctgtgtgctcccttcactcttgatctggtttccttcctctaatttatagaccagctcatatgaacaacc

SEQ ID NO: 543471 - DNA, 641 bp, Homo sapiens
gattagatggtccccacccagattgaaggtaggtctacctctcccagtccgctgactcaaatattcatctcctttggtaacgccttcacggaaacacctaggaacaatactttgcatccttcaatccaatcaaattgacactcaatataaatcattgtgaggaggaaagaggtggtttggagaagggttttataaagtttgacaaagataatgtgttttgttttaaaatttttgtccagaatcacttttctgaagaaaaaagaaaatacatacatacatacatatatattctacaagtaatgtttttaacaacagtataaagtaaataaaaagacattgataattccaacaatttcacagaggtctagctgtttgtatgttaactataatctttaagaaacttacccrtatatgaatatataaatgtagaaaaattctaacaaaaaacaatggcctgttatttatacaagttattctgctacttgcaattttattgaagaatatatcatagaaaattttcatatcactaattctttagttaagataaccattcttaattcatggtaagacaaccatttgttgaatgaactctttgcctatacacattcagcttttccttaactgttaactgtttgctaatg

SEQ ID NO: 543472 - DNA, 477 bp, Homo sapiens
atgtctaactggggagggaagattgctgttagaaactaagcaatctctgtgtgatcagggcttaaaagctctattgcagactcaggctgtggatataaagtgtgatgttaatggaggtgagtactaagttgctcctaggttgatgaacaggttttcaattgccagaggaggaggggaaatccacagaaaagatcacttatcttcctgcttgtctccataactacttctataaacaaatcatcatcatctgcaggttcacctcccttagttaatccataattcctggggatctctgtttactaccacaagaacagtatggggaaaccacccacatgattcaatcatctccaattgccacccccaccttgacacctggggattattacaattcaaagtaagatttgggtgggracacagcaaaaccatatcaggatcctcctctgtctcagtcacagtggcttgtttccatggattaac

SEQ ID NO: 543473 - DNA, 534 bp, Homo sapiens
catgacatccgggaagtactgtttttagaagcgtccctcatgatgctaatgagcagccaagatgaaaaaccattgtctcagcagaatcatagagtatgttttgagtgatttcagtcaaaatgagacagtctacaggggccctatgatcttttcatcawcttaatgactaactagtaacatttgccattaattattttcagattaaacttgtctctattttgatttatgacacagactcctaagcttttaacaaaatgcccatatgcctatgcatatttaacgcttgttctggagaaaaatgtagaccctgtcaagaaattcatcatcattagtgagttatatttttctgattccttcaatagaggtcacaccatataggcaatgattcccaactctgacaatggcaatgcctcccatttttaagtgattaactgttttctctctcgaggttacatataccatacttgaatgtagtacatacagcgtatgtgtgactttgcctagtaactccatggcactatcttactacattca

SEQ ID NO: 543474 - DNA, 656 bp, Homo sapiens
gcaggatttagattttaataccattaaaaccctgaatttcctcactgagagtggatacaaggtctattcaagacccagatttatttacaaaacattcagtatctggggttccttctgatcccaggagcccacattctggctggggattggaaaaaggtaatcacgtcattgctggtcccataaacaaaaaggcagctcaaaggtttcttgggaatggtgagcttctgtcgtatttgcattccaaattatgacctgacagctmaacccttatgtgagaccctaaaaggggaaaaaacagagcccttgtactgggataagaaatgccaacaagtttttgaagccttaaaaactgagttgggtcaagccctcacccttggactccccaacttagaaaaaccatttatcttgtatatttgtgggagactaggaatagctttgggagtcttaatccaaaggttaagacctgttcagtggctggtggctcatttttcaaaacagtgggacccagttgcacaggggtggccttgctgcttgatggcagtgacagccactgccctactggttagtgaagcctctaagctgattctggggtaacatatataagttatgacatcctaccaggttcagactgtgttagaagtcaagagacacaattg

SEQ ID NO: 543475 - DNA, 656 bp, Homo sapiens
gcaggatttagattttaataccattaaaaccctgaatttcctcactgagagtggatacaaggtctattcaagacccagatttatttacaaaacattcagtatctggggttccttctgatcccaggagcccacattctggctggggattggaaaaaggtaatcacgtcattgctggtcccataaacaaaaaggcagctcaaaggtttcttgggaatggtgagcttctgtcgtatttgcattccaaattatgacctgacagctaaacccttatgtgagaccctaaaaggggaaaaaacagagcccttgtactgggataagaaatgccaacaagtttttgaagccttaaaaactgagttgggtcaagmcctcacccttggactccccaacttagaaaaaccatttatcttgtatatttgtgggagactaggaatagctttgggagtcttaatccaaaggttaagacctgttcagtggctggtggctcatttttcaaaacagtgggacccagttgcacaggggtggccttgctgcttgatggcagtgacagccactgccctactggttagtgaagcctctaagctgattctggggtaacatatataagttatgacatcctaccaggttcagactgtgttagaagtcaagagacacaattg

SEQ ID NO: 543476 - DNA, 601 bp, Homo sapiens
acttccacaccctccaagattaggcatggaagacaaccctgttcagcaggaagtagcttcagaagatgagatctttggttctttctctttaagaataaggaggggaaaggtgaaatctctcagcggggaattgagatagaataggaatgggatgcaactcctccttcacatatgttttcttctctttttttctctcgtcccagtgatcacaaaattcacaccgttaccttgctggcaatctacttgctaaccccaaggctttagtcataccaagcaaatagccattcttctgtgctctcatgatgtttaaccatgccttttacttaaagaattccaggaactggcctttggaaatccaaatatcaaaccaaggttaagagtgtcccaccttgggaaggaatgctcagcaatcatttgcagccttgttgctgttggccagacccgccaggtggcccatgactcaagatgatcaatgtaatcagatacgctgaccgcayaccccacccctcaggtgctttgcctactccagcctgcacacattacccttgacacccattcccatgctttgcctaataaaaatatccctaccagcttttttggg

SEQ ID NO: 543477 - DNA, 485 bp, Homo sapiens
ctccttcctcatgtggcttttctccctgtgtgtgcctgtctctttgtctaaagaaccccttttaataaggataccaggcactttggattagggctcaccctaatgactcatctgaacaacatcatctacaaagaccctatttccaagtaaggtcaaattcacaggtgctgggggttaggccttcaccatcattcagatgggacacaactcaacccacaacatgggcctaaagttaatgtcatttaaaccagttgctgtttagatgccgcatctcccagcttcttcagtctccagaatcagctattgctttttggattttttttttagagaagggatcttgggccaggcacggtggctcaygcctgtaatcctaatacgttgtgaggccaaggcaggcggctcacctgaggtcaggagttcaagaccagcctggccaacgtggcgaaaccccatctctataacaaaatagaaaagtcgggcatggt

SEQ ID NO: 543478 - DNA, 485 bp, Homo sapiens
ctccttcctcatgtggcttttctccctgtgtgtgcctgtctctttgtctaaagaaccccttttaataaggataccaggcactttggattagggctcaccctaatgactcatctgaacaacatcatctacaaagaccctatttccaagtaaggtcaaattcacaggtgctgggggttaggccttcaccatcattcagatgggacacaactcaacccacaacatgggcctaaagttaatgtcatttaaaccagttgctgtttagatgccgcatctcccagcttcttcagtctccagaatcagctattgctttttggattttttttttagagaagggatcttgggccaggcacggtggctcacgcctgtaatcctaatacgttgtgaggccaaggcaggcggmtcacctgaggtcaggagttcaagaccagcctggccaacgtggcgaaaccccatctctataacaaaatagaaaagtcgggcatggt

SEQ ID NO: 543479 - DNA, 485 bp, Homo sapiens
ctccttcctcatgtggcttttctccctgtgtgtgcctgtctctttgtctaaagaaccccttttaataaggataccaggcactttggattagggctcaccctaatgactcatctgaacaacatcatctacaaagaccctatttccaagtaaggtcaaattcacaggtgctgggggttaggccttcaccatcattcagatgggacacaactcaacccacaacatgggcctaaagttaatgtcatttaaaccagttgctgtttagatgccgcatctcccagcttcttcagtctccagaatcagctattgctttttggattttttttttagagaagggatcttgggccaggcacggtggctcacgcctgtaatcctaatacgttgtgaggccaaggcaggcggctcacctgaggtcaggagttcaagaccagcctggccaacrtggcgaaaccccatctctataacaaaatagaaaagtcgggcatggt

SEQ ID NO: 543480 - DNA, 537 bp, Homo sapiens
taactttcatagaattaagattaacgttatgtccttaaattttggaggagaggaatamagcatcaatttgaagaatattttcatatcttttgctaaaatcatagttgtaaacattgtacaccatatattgcccatccttagagagtctgaaaaagacttttttctacagataaacttgtatgcttgattttataatgaaatgacaacttcataacccagtgccaagagtggatttagtgttcaacggcagtaatttaattcataccaaatgcttcaaaacagctctcttcttgtaaatatattaaaatttgtgtttatttaattatcttgtttcatatgtacaaatatatcatgtgctatcttagaacaggtgttttaaacaaataaaattgaatatattgttgaatcttggcataatgaagtatcaggaagtaaagcaaagtctgttacctgacagcggaaacaggtcctgggacatcaatataaaaatggcattcctcgaataaggcgctttaaaacattagatcatttgtttac

SEQ ID NO: 543481 - DNA, 602 bp, Homo sapiens
tgccttgctttgccttctgtttttgattttctggttctcttctattgacccagcttctgaaatcttcagaagctatagctggctttcctgagaaaaaaatgcaaatagcaggaggctgtctgggtgtgtagatgccctaagataaaagacttaacaaaaccacagagatagaaagaggtagcaagctaggcagaatactgaccccagccaggcaggagctgtgagagctggctcactgggtgggcagagtgctaagcagaagcatctgaagataagggctaatggtccagactgcagccagcgctaggatgagactctccacaggaaacaccctcacagacatacccaggcttgggattctgtcccctctccatgaatctgggtcagtgctcatggctcagtcaatagttgattattcacatcatgaacagcttgtgggtttctagacccttagattccagctctccctgaaactcttcactgctcagttacctcactagaccttcccagtctaagggagggaaaggaaatagaattaaaaatccatcagaggcttttcctattgkcacagtcctgccagaaggcggagtgggagaggaggt

SEQ ID NO: 543482 - DNA, 631 bp, Homo sapiens
agtgggagaggaggttagaagcgatggtttaatgaggtgctgtgattgttggaggtggcctggtccccgctgggaagttrctgtaatcagagtgaggtctgccagaggcgatggggagcagagagcccaggactgggtgggaaggagatgtctgtgcgctcagcactgaacatgcctctttgcaggcagcactgctttgtggggggctatggcctcacttttaaggatcaaagtagcagaaacctcttgtgagtataggaaaggaacagcgccctcccccattcttcatggccaacaagtccttgagcctgaatgtcatcccctgtccccgataaaacatcacgagaaagccttgacaaacaatgtgagcaatggtgatgatgttagtaagcccttcttccccatccctctcattcccatcaggagggctatcccggcagctccctaatacctcatataattcaatcaagagagtcggctatttctttatttgattttatttttgctttttgcggagagtgtttctgtatgcaaatgataaatttcagaaacaaatcagagaggaacagtggtcctcacagcagctcactgtggcagagttaaaccacagcactctaacctcaaaatgcat

SEQ ID NO: 543483 - DNA, 563 bp, Homo sapiens
tagtcccgatatctctagtatcccgatataaattaatttcgagaaagcaggttggaaggtgtctgagaagaagaggataactaatgaaagctgcagatgaaacagactgtgaagtttttgcttaataaggagaatagaatcctctattgaggtataacccacaattaatttaaaataatttagtcagtgattaatctgataataaaaaaatcaaaactaaagatattgagaaatctcaaaagttttattttattctgtaaaatttattgtgaatatgaccaattaacatgggtgcctaaacttagagatgaagactttaagmaaattagctggtattgtgtaatttcagctataggattttgtagatcctgtcaaggaagttatttctaatccttgttttctcatttcataaatgggtgctgtgtttttcaaatgattctttctcaaaaaaaagcaacagtttgaacaacagtatagtttttcacttttactaatatagttaatttaagttgctggtacttgaacactaaatcagatttgacttagatatgtattatttgcta

SEQ ID NO: 543484 - DNA, 633 bp, Homo sapiens
gctgctgttcacctcctctaagaccactggcaaagcttcacatccaggtatatacatactgaaaatctacttcctgacagtttcctagaatgggctcccaagataagagattagcatggaaaatgatatgagccccaaatctagcttcccattttcctaacaactcctccttttgcctgcgtagttttgatgcagacaatcatttggaaaaactatgcacaggggattttgaaatttctgagttcaaatgaattagacatacataattagaacattaggtagtattttccaggagtataaactgtacttgaatctcagtgacaagctcatgaagataaaacttaaacctacccagtcccatgaatattggtatcttgggctaaggaaagtgcatgctgatgaactgttaatgctaaatgatgataaagataataacacctctcactgatttagaactayatcccattcaacattctttcaggaccattaacacatagattctctgaaaagaaagagacatgaacagttggtgctccaagataagcttgtatttttttatgtactcctctaccatcttcctaaatattgcagactttatatagtcgtgtgttctgtaaaggaaaagtttattga

SEQ ID NO: 543485 - DNA, 536 bp, Homo sapiens
tctcccaacacaccataaaagcctcatttcataatgatatcacacatgaagttcagggccttatgatctccattaggtccagaggcagtttttattgtgcaacttttattagtttctatacttatgaacaaaaaagacaaattttccatccccccttcacccatcacagtcaatatacaattgtgacacagggacaggaaaacaaaayacatactcccatttttttttaaagagatcattaatccagagcattaccgaggtcccactgaatcaatattgcaggattccaaaatcaagaccagaggtatgccaggactattaggcctcagcttagacgagtacaatttcactttttctgactccgtgtatcaaagcaatatacaaaagcttgaaagcctggggaaatagactatacttcttgatggtgagagttgcagaatcacatcgatggctacgtggacaaaagcaagaagataagtgcagctttttttttctttgcaaaatctaccataaggagtttctgggtaacaaaagca

SEQ ID NO: 543486 - DNA, 649 bp, Homo sapiens
tgatgagctctccaatacattgaattgaaacaaacaaataaaaaatggtagaggtgycattcccatactaatcctgattaggttctctgaagtaaacaattgaaacgccatgcccttctcaacctggccttctttcaaatatgtgaaagcacatattacccttttctcagtaccaaactccttcaatttccttatttgacaactgtgctcttgtagttgtttttctctggatgcaatctactttgaccactcctctttttaaatgtatttgcttatatttaaacacagaagttctcccattttaaagttagaatgcagttagactattatttgtttgacctgtatataatacttctaattatgcctgccaatattacttttcttttttcttgtagtggttgtttcagactaggggtacttaagattacaaactgctggtttgttttattggttcttgaatacaaagaaaccaacagcataaaattttataatcaagaagccaccatctatgtttctgaaatatttggtgtttgcttaaacaccaaattttgaaaatcaatagttattaattgcaaaaaaagatgaagattaatagagtatatattctggagtgaaaacttcataaacactaactgcataactaaaattt

SEQ ID NO: 543487 - DNA, 531 bp, Homo sapiens
gtgataatgtgcctcactatatataaaattagaaagggcttagctgtagcaacagagcatcaaacaaataatcagctttttgcaattatttaattcctttgcactcaagaaggaacacagtatttgacttatttcaaaaatacatagttaccctaatgacccaaactggatgtttaccttgatcacatataaataattttagaaaactgagggtgtaaccacttacccgctgcctagacagaaccgatttatcaagacagggkaactgcaatggagaaagcataattcatgcagaaccagctgtgcaggagactggagttttattattactcaaatgagtctcccctagcatttggggatcagagtttttaaagacaatttggcgtgtaggggcttgggaagtgaggagtgctaattggtcaggttggagatagaatcatagggggtcgaagttaggttttcttaaagttaggtcttctgttcctgggtgcgatggcagaactggatgggccagattactggtctgggtgg

SEQ ID NO: 543488 - DNA, 286 bp, Homo sapiens
gttgccctgcaacagccactgtaactctgtaatagcctcccttgtaggctgtgtagcctgtctgctttgcatcccctgcggtgccttagcccctttttactgtttctgtgtttatcccmagggaaagtaaaagaggagacaaatatactacttttttttttttgagagcacttgtgcagtgtgaagcaacatatctacgctgcctagtgattcaattgggaactataagactatactacatgccatagcttggcctaacttttatggctcaataaatttggggttt

SEQ ID NO: 543489 - DNA, 286 bp, Homo sapiens
gttgccctgcaacagccactgtaactctgtaatagcctcccttgtaggctgtgtagcctgtctgctttgcatcccctgcggtgccttagcccctttttactgtttctgtgtttatccccaggraaagtaaaagaggagacaaatatactacttttttttttttgagagcacttgtgcagtgtgaagcaacatatctacgctgcctagtgattcaattgggaactataagactatactacatgccatagcttggcctaacttttatggctcaataaatttggggttt

SEQ ID NO: 543490 - DNA, 467 bp, Homo sapiens
aacagcgtttgctgtgtggtgtcaacacaggctgacagctgagcccggcgtgcctccatttagcttctggaatataaaaatctgggctgtggatgctgagatgcagaagccaggtaggtattcaggcagtggtggggaaaaacatttccagattttacaattttacaaccatccattcatcattttgagagatgaaaggttatatcttctgcttattatgcacctggcacaggggtcttacattcatagatactccctaaaaatgattttcaaacagtttttttttctcctttttttggtatgtaattttttaaagggtgctagaagtcttacttgatatctctttcaattmtcctttcttttgtgcaccttccctctttttctattttgaattgatttgtgaacccctttttacagctaaatgagtcagcagagatgggatgttgatagatctcattggactttgg

SEQ ID NO: 543491 - DNA, 592 bp, Homo sapiens
gttggaatattcttagtatacatcaaggaggaggaggagactaagaaaagaaagagacagactcatgagtcacaaaatagactgaaaagtctagttatatataatgcatttaagcaacccagcatcacaggaacatgcaattacctatgtacagtcaggtaatacttcagctcagtgataataatacgacagagctggaggtgacattagggattattttcttttccgatgagaaaactgaaacctgagcataagcccaaggtgacaccggattttggcaataggatgaggaygaatatccaggtcattagtttgagtatttttaatacaagatactcccttatagtgacagagggaggaaaaaggaacagaattcagacatagagatgagggctgtgggtgtgcttctgcaggctttaataccagcacaactgtatttctgcatggcaggactcaatattttaattgtgtggacttaaattctagcatccagaaaaaggcagccttctagggaggtgaggaggatgatgagagcacgtggaagcttttcttcagtgctaaacatgttactctaaactcacaccaggtgacc

SEQ ID NO: 543492 - DNA, 634 bp, Homo sapiens
cacaacgggtatgtcctggtgaattagtctcagcacaggaattgaggtgggtcaggtgaaggaagagtgtatgttcctatttttattccagccttttaaatttaaagcttattttcttgccctctccctaacggggagaaatcgagccacccaactggaatcagagggtctggctggggtggatgttgcttcctcctggttctgccccaccacaaagttttctgtggcaagtgctggaacatagttgtaggctgaggctcctgcccttcggtcgagtggagcaagctctcgagggcagcactgacaaatgtgttcctaagaagacattcagacccaggtcttatgcaggattacatccgtttrttatcaagggcaaccttggtgaaagcagaaagggtgtgtgctattgcatatatatgggggaaaaggcaatatatttttcactgaagctgagcaaccacatattgctacaaggcaaatcaagaagacatcaggaaatcagatgcacaggaaataaaggaaagctgtgctttgtcattgaatcctaagttcttagctgctgatgcaagttgtcccccaaggccatcacaaagcagtggggcatgagctgtgtttcaggggccactaaataaca

SEQ ID NO: 543493 - DNA, 610 bp, Homo sapiens
ccacgtttcaaggagtattgaggcttccaggaaactacgatggagaaaagtgctggcaggcgaggcagggaagcagagatgcacatttgggagcgcagtagrtgccagtttgggtgccattcctgaggctcccaataaccggtacagactttggggctgagaaatgacatgaccagaggctgcgatttaggaaggttcacctgggagctgtgtgtagggtgattcagagcaagaagggtgtcgtgttgtaaaatttgtgtgcaggctgtgattacagggatcagattcagcacagtaacactggaaatggggaggatgggtaagctttggaagggagatggcggaagctgtgataactgatttgggaactggggtgagggtaggaggcaagatgttcccaagccttttgttaatgtaagagggaatagaaattgggaaggcaggagaaggagcaaggttagtgccagctgttagtatctgaataatggcctttttcaatttgcatcctcgttgctggcatcctgtaacaaagccaaacacagcacttgtgacatcagatgagcatattgaagccatagggaagaaaaccacaaagaaataaggagtagag

SEQ ID NO: 543494 - DNA, 610 bp, Homo sapiens
ccacgtttcaaggagtattgaggcttccaggaaactacgatggagaaaagtgctggcaggcgaggcagggaagcagagatgcacatttgggagcgcagtaggtgccagtttgggtgccattcctgaggctcccaataaccggtacagactttggggctgagaaatgacatgaccagaggctgcgattyaggaaggttcacctgggagctgtgtgtagggtgattcagagcaagaagggtgtcgtgttgtaaaatttgtgtgcaggctgtgattacagggatcagattcagcacagtaacactggaaatggggaggatgggtaagctttggaagggagatggcggaagctgtgataactgatttgggaactggggtgagggtaggaggcaagatgttcccaagccttttgttaatgtaagagggaatagaaattgggaaggcaggagaaggagcaaggttagtgccagctgttagtatctgaataatggcctttttcaatttgcatcctcgttgctggcatcctgtaacaaagccaaacacagcacttgtgacatcagatgagcatattgaagccatagggaagaaaaccacaaagaaataaggagtagag

SEQ ID NO: 543495 - DNA, 494 bp, Homo sapiens
aagtggtcaggtaagtagtgaactgagaggctgccgggagcagaggcccagctctgagggagagctgtcttaagcggccatgctcgtttaaaatggggaaaggaactggaaaktgcaaggcagggcccaacccatataccagaactgggcattagataggcttcctaaactagagctaggaggaggtgtcaaagcagaggcttagtcatatcaacagagtgaattgtggggggaatctgggtaaggaaggtgaggcctggagctgcatttacaggacagaggagccacaccagggacaagtgggtgcaggcacaagggagctcagggcccgcagggactcactgaggccagtattacactaaggctgagcattctaggacttggcctccatggactggtatagctgagcctgctccagcacattcttactcagagttggtcaagatttttggagctgagcatataggaaatgaaactaatgcctcagctggggc

SEQ ID NO: 543496 - DNA, 627 bp, Homo sapiens
gttctgaaggggttgtggtagacgttaaaatgctttaaaacaactttaagtgttacattgaatcaggtgacttaggtagttaccagtacttaatgatagcccaccactatttgctgaacacccaycactgtgtgccaaacactacctatcacacaagtgttccatgtaagtgctacagcaacctgatcagttaagacagtttctagatgaagaatatgaggtttagtaaagttaagtgtccattgtcagaaatgcagtaaattatagagctaggaagactctatcttctacattgtgccatctcttatatttccttagcctgggaatcacatcaagctgcctctgtgcttgttaatgaaccagaatggactgttggttaggggcagatttaaagacatttccatgcacacttccatcgtcattctgctgcattaaactagctatcattgatgtactagacagtgtgctaaggacttaatatgaattattgcattttatccttataagtgctacttctacattcattatatggggaagaaaaacctccaactttatgctgagagggaagtaaaatttgatttttaattatagctaaaaagtgaacaaaaacctgttggaagacagttc

SEQ ID NO: 543497 - DNA, 618 bp, Homo sapiens
ggccacaaaaacacaagctaatgtgtcatcacatttactgctactagaaaaaaaaaaagtcatcttcgcaattaaatttactggacattaaatggttattgctttggcttgtaccaaagcagtcaagctgcatttcttgcttcattggattttttatttcctctaatggctaggcatgcttttcttggcatagaatctgtaactatcacattatgggtccagttggttactaaaaagctctaaaaagacaggagagtcaaacaaagctggggagcagtcttgcagtggtgctgcagctcccagcctgctggctaaggacttcaaggagctgcagaattattgcagggggcagcataatccatattctgtgcaccaaccattgtcatagcctgcttaaatatctcacacacatgcctgacatacacataataaacaaaacattaatttcaaagtggtattatattcatattgkcttcttgccactaattatagtaatctggtattttttatacacaaaaaagaggccctcattcttgaaaccacagtggttgtgacacaatttaacataatgtaaagctagcccaaggatagcattcaatgaaagtagctttgtaggag

SEQ ID NO: 543498 - DNA, 601 bp, Homo sapiens
gtgcagggggatatgagtgtgcackgggtgcatgcattcatggatgtagaatagtgtgcttgcttgtgcatagtgaggtaggatgtgcattgggtgcatgcattcatgcatgtagaacagtgtgcttgcttgtgcatagtgggctatgatgtgcattgggttcatgcattaacgtgtatagaagagtatgcatgtttgtgtgttgtaggcatgagcgtgcactgaatgcacacattcacccaaggaatgtacatcaggtgcgtagaagagtgtgcttgcttgtgtgtagtgggatcagagatctgaataaacacactgcttgcagtacagggacgggtgcttaattggatctctctaagagtttgggatgaagggggaaagctgaacccctctgctgggacctcacccagaccctacccaaagctgtgggctggggacatcaaagtggaagtactgcctttctgtgctcttcctgacttctcacctcctccctcctagctctctgctccagccccctcacttcacaggtctgctttgaactccacagcttgggaactcacccagggcaacagggcctttttctctccttcccgagaggcag

SEQ ID NO: 543499 - DNA, 494 bp, Homo sapiens
tctcatcccggaagccaactaaccaccatattggtgtatctattttcctaagggcaagggctgcatccattrtcttcattcctggcacgttgcagtgacagtcctcagactctgggtcactggctggccctgctaccaaagttttttttctgctaaagagaccagacccggtccacgtagagtaaagcctgggtccctctctctctttctatttttttgagactgagtctcactgtgtcgcacaagctggagtgcaatcgcacaatctcggttcactgcaatctctgcctccctgggtccctctcttatcatcagaggctgcttcatccctatcatacaggaagacctagtgaccttagggacatattccagacccagaagaaagactgccaaatcttcctcgatgcccttaaacatggcccagattttctcagggaacggaagagaagttttccttgagtatttttatacagggggaaatccaagatcttatt

SEQ ID NO: 543500 - DNA, 271 bp, Homo sapiens
tcaagggcttccaggtctcatcccggaagccaactaaccaccatattggtgtatctattttcctaagggcaagggctgcatccattatcttcattcctggcacgttgcagtgacagtcctcagactctgggtcactggctggccctgctaccaaasttttttttctgctaaagagaccagacccggtccacgtagagtaaagcctgggtccctctctctctttctatttttttgagactgagtctcactgtgtcgcacaagctggagtgca

SEQ ID NO: 543501 - DNA, 593 bp, Homo sapiens
ccattgtacctacagaagtacactttccttcttttcctgtccctattctcaaggtacactgcctaggcatctcacttctgatgatgtacaggcaacacttgcaaaacccaggaggtttagaatcctttcccttctttattaacctatgagaacagaggctgaacttataccagcaatggcctcatccagccccaacaccatgcatttagatgcctgatttacctgcatgcctgagttaatgtctttctgcccatgctgctggtgtgtgctatctccttatcacacacccttcagtgatgctaactaggcaggcacacccacttgccttggtatgttttatggacgacccaagttgcaaacatcaacatgtgtaagacatatgctctcttctttgtgtaatttcaggcaccaaaatatgcctacacagaggggtatgtgcatacagacacacgcgtattctttttttgcctggtagaaatatacttctgtgatgttccttcaactcccacacatgcccctccatggctggcacatctyctaattatttccatccactccctcccatagaccttttgtgcgtatattttggcaca

SEQ ID NO: 543502 - DNA, 516 bp, Homo sapiens
gggttaggatctccccacccactgggctcaatatcagatgggttgatgtcacatctgtgggttgatgtccacagggcacaggacgaatgatgatcatgacagtgtcatcttacctgtcctctacactttagtcttgggaacctttgcacagacagctacaggctgcccccaggagagatccgtctgcctccacgtggctggggaaggacaactgggctttcaagaactctggtgaaggccagcggctgctggagaaggtgcagggctgcagcctggtggctgagtgtctgctgtggtttatgggaggaagaggaggagacaggacttggggaggggtcttaggaacagactcctggcacgacagtggtgaggggtggggtgttcccaagggcacagtttgacttctggtcatccctatttcttgcagcctggggagaggagagtcaggcacaggggaccctaactaggastcacaggctgatttcggagcccacagtaaaccctgaagtggtttcc

SEQ ID NO: 543503 - DNA, 482 bp, Homo sapiens
gggtgtggtttttttttgtttttttttttttttgagacggagtctcactcttgtccaggctggagtgtggtggcaccatctcggctcattgcaacctctgcctcctgggttcaagcgattcttctgcctcagcctcctgagtagctgggactacaggcaccygctaccatgcctggttaatgttttgtctttttagtagagacggggtttcaccgtgttagccaggatggtctcgatctcctgatcatctcgtgatcccccgtgcctcggcctcccaaagtgcagagatcataggcgtgagccactgcacccagccgggagtgtgatttttaattgtcctgaaagcttcaagttcttctgacccaatgtcactgtccgtgagctcaggccggcagggaagcatgctgcgtgtatagcatgtgtccagaacaaggaagtgcgtccctgggaacagtctggcccaggtgtgtggatcaagtgtt

SEQ ID NO: 543504 - DNA, 611 bp, Homo sapiens
tgggccgccctgctcccacccctcagctcccagaccyatgtgtgctttctgctgagaacacagtgccatatgaaggcctctgactcaatgtccccatgccatccgggatgacggggcctgtagttacagggcattgcttcagctctccgtgtgggaggccactccaacacccagccagtccagcagcttccgaacaatgagacgcaatgagtagatcctagggacacagaccctttcccacatctccttcactgcaaagtggcttccctgatcagaagtgatgttgtgagcccttctacgccgatgaacaggacattccttaagcgcttggacagtgatgccgactgaggccctggagccaggaaagacaaactcctacctagaagagatgtctatttttgtgcaaaccactggcctttccagaatgaaagaggcccagtgggtccacttgctgtcaagtggctggttggtctcctgtgaacctgggccacactggcagtgggatgctggtctcctgttgctggcaggttggacattcagataagagaaggagccagatggttttgggaggttgcagtccacactgttggcctcatgcctgccctctgtct

SEQ ID NO: 543505 - DNA, 517 bp, Homo sapiens
ttttacagaaatgaatcactttagggtaaatagaattttagagccttatattaacaataatatatatactggctgggtgcagtggctcacgcctgtaatcccagcactttgggaggccaaggtgggtggatcacctgaggtcaggagttcgagaccagcctgaccaacatggagaaaccccatctctactaaaaatacaaaattagctgggcttgtggcacatgcctgtaatcccagctactckagaggctgagggaggagaattgcttgaacctgggaggcagactttgcggtgagccaagattgcaccgttgcactctagcctgggcaacaagagcgaaactgcgtctcaaaaaaaaaaataataatatatatatatatatatatatacacacacacacacacacacatatatacacgtatatatatacgtatacatacgtatacatacgtatatatatacgtatacatacgtatatatacgtatatatacatatatacgtgtatatatatgtac

SEQ ID NO: 543506 - DNA, 614 bp, Homo sapiens
gggaaaaatattttgccgttggttttctatacagaagggagttaccagatcaagctagagattttcaaaggatatttgcaaaagttaattacacaattctttaacatggattttaaaaaaagaggagggtggcaacggggaaagaattttgtgagaagggttttttgggkgaattttgttgtgagccttacatcctttttttttttttttttttttttttgagactgagtctcattgcccaggctagactgcagtggcgttaccgcagctcactgcaacttccgcctcctagaatcaagtgattcttctgcctcggcctcccgagtagctgggattacatgggctgccaccacgcccaactaatttttgtatttttagtagagatggggtttcacaatgttggccaggctggtctcaaactcctgacctcaagtgattcacccatcttagcctctcaaaatgctgggattacaggcatgagccacaacgtccggccaagccttacatctttacatagagtgatgggaccttcaatggaatcacttggaaaacaccatgtgattttcccctagttgtggggtcatggtagtctggtatgcaactcatactttgtg

SEQ ID NO: 543507 - DNA, 636 bp, Homo sapiens
gatcctcaggtgtttcttgtgtgcattaaagtctgagaagccctgatctagaaaataacgtctcaactcatctgtgatgccaatattcttgtcagattgttgctggggtaggatttcagcttttggtgaacagagaatgaatcaattatctatttggtttagtgccaactataataataatatcatagagtgagccgtcatctggcattgttgggagatggagtacaggtgaacaatttgtcagctcgggcaaggtcaatagcctgctttgagaaaccttggtgggcaccacggttactatttcagagccagagagaagaaggcagagggcaacatttttcttgggatataatttttcttcccttcttaaaataccrtgagtaatgtacggggtgagggaaagatgggaaggggtcaaagttgaaaaaaaagtaagataatttgactcaatttaatcaagtatttgcaagttatattagttgaaattttctgtgcttggatttttggattcatatctgctgtgctggaatcctgtttccactatgttctaatcacgtgagcttgggcatattaccaaagtgcctggagcctgaatttccatgtgtgtgaacgggggccagtaacacctactccagc

SEQ ID NO: 543508 - DNA, 400 bp, Homo sapiens
tgaaggagaaggagtgccaggtgtatttgaggaaggcatctgggaacttcccctaaatgtttctgcccagattttctgatggaaacttagtcacatgcacacatctcattgctaggagacagggaattttattctctattcttagcagccgtgtgcctattacagggttctattacagtgaaaaaggatggagctctgtcaaatgggtgttcttttttcttttmttttattttttattatacttcaagttctagggtacatgtgcacaacgtgtaggattgttacataggtatacatgtgccatgttggtttgctgcacccatcaactcgtcatttacattaggtatttcccctaatgctatccttccaccaggcccccacactccctgaaaggccctgg

SEQ ID NO: 543509 - DNA, 670 bp, Homo sapiens
aagcgtgctaaaaagattaatctacaaaataggtattttagacagtttaggaatgtttcagaatttatgatattggcaaatatagaagctgtcatcatacttcctcactgtctaggtatgattcaactattatgtttgtgaacgtttatactctcagcacctgtcataaatagacttcagtaatagatttttttttttgttctgaaagtgtttttccaatattatgttgtagagataaaaggaaaccwatggtaatgttcttaaactcaataatttgttagaaagttaaaatttatatatgaaactatattttgattgttctttagtaatctcatgctccagttggacaggaagggagagagattactactgaatatagtcaggaaagtttcatgcaggtggcaggaatttagatagctaacataatttcccaaagtgtccggcctatcttttcataatatttcatgaatcctagaataagagttggtatgtttctccttgtagagcaaatagattgtggaaatgtattgttaaactcccaaatgcattcaatggtcatctattttcagtctactgtgtattaagtattggttttggaatatatctctgactaaaccaagttcttgtcataaaaaatattgttatggttaaaatctgtaattttaggacc

SEQ ID NO: 543510 - DNA, 646 bp, Homo sapiens
tttctttggttgtcactacccaggccctttgttcctcaattccttccttttggccatttcacayattcttaggccatagagggtggacaaaaggggaaatgaaatcaacatacattttagaggagaatctttgattattctttaatccaggatgccacatttaatacattaaatgaattaaattattttattacttttaaaatctgtaaagacagtgattccagcatagatttttaaataaatgctttcccataagattgcctcgttaatataagtattttcatttctgtattgtttgtctgtttttgtctcctgatatacacgctttttgcatgattgtatttgtcatgtacctacatataaaacatctatttaagcttgtggcatatcttgtagatgtagtaaggagtagcctgtgggcctggagaccttttggtatgagaggcagagaccaaccagcagaaagctgagtctatcctcacggagggtgtcattgtgtttgaattacattgctctgcacacatggtcgggatacaggtctgccttccacaagtgtggcaatcagcaatggacttgttttctaattcatttagagcagaagggcaagctagttaataaagagcgttctaatacatgaaaaaagaag

SEQ ID NO: 543511 - DNA, 604 bp, Homo sapiens
tttctttggttgtcactacccaggccctttgttcctcaattccttccttttggccatttcacacattcttaggccatagagggtggacaaaaggggaaatgaaatcaacatacattttagaggagaatctttgattattctttaatccaggatgccacatttaatacattaaatgaattaaattattttattacttttaaaatctgtaaagacagtgattccagcatagatttttaaataaatgctttcccataagattgcctcgttaatataagtattttcatttctgtattgtttgtctgtttttgtctcctgatatacacgctttttgcatgattgtatttgtcatgtacctacatataaaacatctatttaagcttgtggcatatcttgtagatgtagtaaggagtagcctgtgggcctggagaccttttggtatgagaggcagagaccaaccagcagaaagctgagtctatcctcayggagggtgtcattgtgtttgaattacattgctctgcacacatggtcgggatacaggtctgccttccacaagtgtggcaatcagcaatggacttgttttctaattcatttagagcagaagggc

SEQ ID NO: 543512 - DNA, 603 bp, Homo sapiens
ttggttgctgattagtgcattccctccctatagtcatttgtgataagaatgttacatggtggacatgtaatcagaatcaggagagttagataagttgcctgtctagttagatcagaacatgatggactgaggcagccatctgttttcaggggtgcacacttggcacagagacctaatactcttcacaaaccaaggggccctctcttctagacaggggttgagtgagcacagccaaatttgcttctgtgtcatcttttttttaaaatattttcttttctgaacagtcccyttctgattggtgtatgtttctctgaatatgcttatactctaaatctgcttataactagtgcttgccagcctgtgtcttagtttttaaagcaaacttatataaaccagctttgagacagtgtgttcattttatttttctctcagaaggtaattgccttagttcatgtttgctgttataacagaatacctgggactgggtgatttataataagcagaattgtattgcttacaattctggaggctggaaagtccaagatcaagtggccagcatcttgtgaggaccttcttgctgtatcatcccatggtaaaaggcag

SEQ ID NO: 543513 - DNA, 257 bp, Homo sapiens
cttttctgactgctctccacatgaagttcaaaaacccccaaagtgagccagagaaaattcctttttgagagggctgctatgctgagcctgtgaataattactccttacttaatttttttctagactattttaacaatagaactacggatttttctttattgctacayggcataagaatcgaaggaaaaggctctgtgagatttctttccctagaaaggaggtttttggtcaagccattattagggtctaatggctga

SEQ ID NO: 543514 - DNA, 515 bp, Homo sapiens
aaaatatgcttctttccaaacccagatccaccatgaatagataagcttatgaactgaatatcttaactatttgtctcaacttttactttgctttctgtattttgaacaatactgggatgtctgtgttgtcatccttgttcactgttgctgcctaagccttaggagaagggatatcctttctgaggaataatcttgagctcctaaccctctcttcttttctgtaagacttgttagtactaactgattcttacccatttaaattcaggccattgcgatggttcaagaaattgctattcaagtgagtggaagatctccaggatctcaggcccaagaaaggaaatacaatataaaaaatgtagagaraggtcaacattgtttcccatataaagttacttctcagaggcggttcttagagattccacagctttggattttctaaagtcagcctttccctgggccatatttctctatcttgctaaaacacacttctgtgtgttaggacaatttccatgaga

SEQ ID NO: 543515 - DNA, 499 bp, Homo sapiens
tgcccagagcatgtgtcaactaagccctggctcgggataacgtttctgggcttagttacagtatggagttcattcttgattcatgagctgatgctaagcactgtgtcctccaggctggagttacctctggaaccacaagatcattgctccttctttcatcacttggactcagtggttactaactccttctaaatgaagcaattaattgaagtctattaaaagaaatttctaaaaccagtgatttcaaaatccatttactgcacaaaatttggagagagcrtttccttccattgcctaactggagctcaagtggtagagacaaaataatagtaatattaataataatcataaagaagaagaaagaaattacaataaccaaaacccattgagtgagctattttctttagtctacaacttacaataaccaaaaaggaatcagcagccccaacattcaaatccctagaagagcgccctgtaagaatctatacaaagcgcatgt

SEQ ID NO: 543516 - DNA, 565 bp, Homo sapiens
cttaggctgagctaatagactgtaaaaatagttggttgaaaagtgagaacatcaagctgaaaacgcttgtgattttctgatcttaactggaatgttttttaaaaccttaatttcagcaaacctgtttgtgtatatagggagtgagccataggcactgtggaacatttgactcttcctgctgctaaacatgctgggagaaagaagcttctggaaggtggttgaattattttaakccatgacaaattcctttacaagaggaaggagaaatagttttctagttggtccctttgcagcttaaaggatcggtcttacgtgggagatgccaccaggtaacggatcagagtccttgcttcatggtagagactggaaaattctgatctatgggatctaaaacatttggccaaaactaaagactatgataaagtggaaagaagagagttaaacaaatgcatgagagagaaaaaaaagcaggagtaagaaagattagattcctgctcagtatgtgagaaatgcagacatgctatataatcccagcgagcacagtattcattaggctcaccagcag

SEQ ID NO: 543517 - DNA, 565 bp, Homo sapiens
cttaggctgagctaatagactgtaaaaatagttggttgaaaagtgagaacatcaagctgaaaacgcttgtgattttctgatcttaactggaatgttttttaaaaccttaatttcagcaaacctgtttgtgtatatagggagtgagccataggcactgtggaacatttgactcttcctgctgctaaacatgctgggagaaagaagcttctggaaggtggttgaattattttaagccatgacaaattcctttacaagaggaaggagaaatagttttctagttggtccctttgcagcttaaaggatcggtcttacgtgggagatgccaccaggtaacggatcagagtccttgcttcatgrtagagactggaaaattctgatctatgggatctaaaacatttggccaaaactaaagactatgataaagtggaaagaagagagttaaacaaatgcatgagagagaaaaaaaagcaggagtaagaaagattagattcctgctcagtatgtgagaaatgcagacatgctatataatcccagcgagcacagtattcattaggctcaccagcag

SEQ ID NO: 543518 - DNA, 251 bp, Homo sapiens
gtaagccagcctgagaactacagtaatacatagtaataacatccaaaagttttaaaaaaatttctattattctatatcaggaaactagccatcatttatacatatcaaagcctagagatgccttttgataaaaagtaagtttatggtggtggtggttggttggtatacctgaatattttccttgccttcttaggaagtcattacccaaaaataaaagayaaggaattaaaataatgttacttagaaagcaa

SEQ ID NO: 543519 - DNA, 533 bp, Homo sapiens
aaacaggatgtggctggacacagtggctcatgcctgtaatcccagcacttcgggaggccgaggcgagtggatcacttgagatcaggaattcgagaccagcctgaccaacatggtgaaaccccgtctctacaaaaagtacaaaaattagctgggcgtggtggcgggcacctgtaatcccagctacttgggaggctgaggtaagataattgcttgaacccaggaggcagaggttgcagtgagctgagatcgcaccactgcactatagcctgggcaacagagtgagactytaactcaaaaaaaaaaaaaaagaaaaagaaaagaaaaacagtatatattttcactgcattcttatttttttcagtgctgataccagatcagcatactcataactctgttaaccagaatgggagactaagtggggaaatgccacgctctgaccatgtgaggagttcaagtatatttacttcattcacagcttcttgaatggctgctgctggtctgttgcatttgtccacctgtttgcatctgcatgc

SEQ ID NO: 543520 - DNA, 613 bp, Homo sapiens
cgtggaaattgggtgtgcagactcctgcttctgggatgtcttaacagattaataaggcttttgaggatttctagaaacatttatatgagtcagagccctaagaggggccaatgtggggttctttgaagcttctcttttagcagcttgaaacagcagatgtctctgcacccagcaaggaggggtgaggcctgggcaarccaggaaaagctattgtgtctctagaaaatgggagcccacaaggggactttataacagccattgaagtcggaaggcaggcacatttcttagtttgggaacaattatctggccaaacaatgggagggaggcagccactgctcaggcacaaaaaccacgtgatcttcagactggggttgagaacattctaggaagcctaagagtgagccctacaggtcagaagtaacgcttgcaagacaaagccagaattattattcccactgcagaggtaaggaaaccgaagcccagaaaaattaagtgacttgcccaaagtccctcaggagtgaatgacagagtgggcaatcaatgtgtatcagtttggcattcaactgggtgtagcagagatccaaagtaagtggcataagcaaattaggggttt

SEQ ID NO: 543521 - DNA, 612 bp, Homo sapiens
tttgcgaagtgtctgttcatatccttygcccactttttgatggggttgtttgtttacattatctttctgacatcatttaaaatattaaacgctttaatatatggcacctttaaaattgagtcagagccttttagtgaaagaatctgttttcctaaaatagaaataactttaatatttaatagcttcaggtttatacactccattttttttcaaaatgtagaattttgagggttttttacttatcaaagtaacttcagaagttttgtttaagatggtagagtgaagtagaagttttgtttaaggtggtagaaaattgacttaaatgacacttttcctaaggaaaaaaaaagataattaagtccacaacacaattatgcataggtggagatttcatttcagggaaggcctttttttaacaaaaataaaagcaaatcttagtctttcaagattgctgacataaacacatagttatagaatacacacaacactttagatgttaaaatctagataggtgataacaagaagaggttctgccatctagaaggattcatggagaaagtaagaccttatgtggatgaagaaagagcaggggaaagcatcataaatatcaga

SEQ ID NO: 543522 - DNA, 566 bp, Homo sapiens
caggctagccgtatgatttctgcaccaagttttttattaggcttctaatataggccatgctgatggaacaaagtttataagtattattttattatctttttatcaaggcattcggagcaggaatktattccttgatgaattcccatttctgtccatctcaaccactgtaaaatacttaatgttaaatgcccatgcaacaaatttttaattatataagtggattgcacttgtgactaaaacatctagtttcttactcaatgtttatttctccatatctctttacaaacagagctctgattttgttgaatatataaaagtgaccaccttgaaaaaaatacatttcccagcgtcccttgtaaacatgtgatatagttctacccattgagatctaagagaaagtatacaatgtgcctaactcgttacaaggaagccaactcaaccagaataatccttttacattttcttcttcccatctttcttcctggagtatggtttggatactggagctccaactgttacctgcaaccatacagtaagaagaacatgctaaggatagttgagcagag

SEQ ID NO: 543523 - DNA, 603 bp, Homo sapiens
tctggtgatcatcttgctttagggtatctctggagatgcttctaaatatctctctggtcaccactagcaagggaataktataaaattaccattgttcatgttcagcatgttctgtaagactagtaaactgaaaggtgatttctcaagtatccctgaggtttctagcaagactaaaatgtatgcttgagacccattccagatactgagcacttgctaggcactgtgccaagccctttaatgcattccttcatttaatccttaaagtaatttcagtgttggtttctgtttttatctgcattgtatagattaggatactgaggtttaagggatggactctttggtaccataattcaaacccttgtctgttttcataatctgttaaccattctgttgcattgtttcttctggacaagaaatatttttaatgaatatttctgtttctttctactttttccgctgccttctttgatgcaggtttccttcctccgcttgctttccacagaaattaccacagtgtctaatcagataaggttaatttgattgttgttttattgccttcatcatgtagactgactgttcattaaaggaaagagaatttttgtc

SEQ ID NO: 543524 - DNA, 603 bp, Homo sapiens
tctggtgatcatcttgctttagggtatctctggagatgcttctaaatatctctctggtcaccactagcaagggaatattataaaattaccattgttcatgttcagcatgttctgtaagactagtaaactgaaaggtgatttctcaagtatccctgaggtttctagcaagactaaaatgtatgcttgagacccattccagatactgagcacttgctaggcactgtgccaagccctttaatgcattccttcatttaatccttaaagtaatttcagtgttggtttctgtttttatctgcattgtatagattaggatactgaggtttaagggatggactctttggtaccataattcaaacccttgtctgttttcataatctgttaaccattctgttgcattrtttcttctggacaagaaatatttttaatgaatatttctgtttctttctactttttccgctgccttctttgatgcaggtttccttcctccgcttgctttccacagaaattaccacagtgtctaatcagataaggttaatttgattgttgttttattgccttcatcatgtagactgactgttcattaaaggaaagagaatttttgtc

SEQ ID NO: 543525 - DNA, 607 bp, Homo sapiens
acacactttccaccttcaaccacactcaccttctgcctatcctgcttagtgttgaaattgacagtttaaaaagtctaaaaacaacagatgctggcaaggttttagagaaaagcgtcgcttatacactgttggtaggaaagtaaattagttcagtcactatagaaagcagtttggagatttctcaaaacctgaaatagagctaccatttgactaactgatctcattactgggtatgtacccaaaggaaaataagtcattctaccaaaagacacatacatttatatgttcattgcagcactattcataatagcaaagacacggaatcartctaggtgcccatcaagggtggactggataaagaaaatatggtacatatacatcatgaaatactatgcagccataaaaacgaacaaggccatgttgtttggagaaacacagatacagctagaggccgttatcctaagtgaattaatgcatgaacagaaaaccaaatagtacacgttctcatttataagtgggagctaaacattggatacacagggacataaagatgggaacaatagatcctggggagtaatagagggaggaggggaggaggggatgagaa

SEQ ID NO: 543526 - DNA, 607 bp, Homo sapiens
acacactttccaccttcaaccacactcaccttctgcctatcctgcttagtgttgaaattgacagtttaaaaagtctaaaaacaacagatgctggcaaggttttagagaaaagcgtcgcttatacactgttggtaggaaagtaaattagttcagtcactatagaaagcagtttggagatttctcaaaacctgaaatagagctaccatttgactaactgatctcattactgggtatgtacccaaaggaaaataagtcattctaccaaaagacacatacatttatatgttcattgcagcactattcataatagcaaagacacggaatcagtctaggtgcccatcaagggtggactggataaagaaaatatggtacatatacatcatgaaatactatgcagccataaaaacgaacaaggccatgttgtttggagaaacacagatacagctagaggccgttatcctaagtgaattaatgcatgaacagaaaaccaaatagtacaygttctcatttataagtgggagctaaacattggatacacagggacataaagatgggaacaatagatcctggggagtaatagagggaggaggggaggaggggatgagaa

SEQ ID NO: 543527 - DNA, 541 bp, Homo sapiens
aggccaaaccattcagcttaaattcctattacccctcccttccttgaagtgcttgctttctgtatttagccagaggctgtgtttcctgcctaaaggttgtaatccttcttaagaaataaagccctccttttaaaatttttgagttgatacatttccagatttttaaattttgttttgttttgtgtgacagggtctcactctgtcacccaggctggagygtaaaggctgcatcatagctcaccacagccttgaggtcctgggctcaagcaatcctcctcctccctcagcgagtagctatgactacaggcacgccctaccatgccagcctgggttttttttttttttttttttttcatgacaaggtcttgctatgttggtcctggcctcagctttccaaagcactgacattacagttgtaagccaccttgcccagcctaaatttccagtctttagccacccaccccttccttcattactcataactgtgccttttatcttgttaacatccataaccaatgcattgcagaaatcttaaactcta

SEQ ID NO: 543528 - DNA, 541 bp, Homo sapiens
aggccaaaccattcagcttaaattcctattacccctcccttccttgaagtgcttgctttctgtatttagccagaggctgtgtttcctgcctaaaggttgtaatccttcttaagaaataaagccctccttttaaaatttttgagttgatacatttccagatttttaaattttgttttgttttgtgtgacagggtctcactctgtcacccaggctggagcgtaaaggctgcatcatagctcaccacagccttgaggtcctgggctcaagcaatcctcctcctccctcagcgagtagctatgactacaggcacgccctaccatgccagcctgggttttttttttttttttttttttcatgacaaggtcttgctatgttggtcctggcctcagctttccaaagcactgacattacagktgtaagccaccttgcccagcctaaatttccagtctttagccacccaccccttccttcattactcataactgtgccttttatcttgttaacatccataaccaatgcattgcagaaatcttaaactcta

SEQ ID NO: 543529 - DNA, 541 bp, Homo sapiens
aggccaaaccattcagcttaaattcctattacccctcccttccttgaagtgcttgctttctgtatttagccagaggctgtgtttcctgcctaaaggttgtaatccttcttaagaaataaagccctccttttaaaatttttgagttgatacatttccagatttttaaattttgttttgttttgtgtgacagggtctcactctgtcacccaggctggagcgtaaaggctgcatcatagctcaccacagccttgaggtcctgggctcaagcaatcctcctcctccctcagcgagtagctatgactacaggcacgccctaccatgccagcctgggttttttttttttttttttttttcatgacaaggtcttgctatgttggtcctggcctcagctttccaaagcactgacattacagttgtaagccaccttgcccagcctaaatttccagtcttyagccacccaccccttccttcattactcataactgtgccttttatcttgttaacatccataaccaatgcattgcagaaatcttaaactcta

SEQ ID NO: 543530 - DNA, 628 bp, Homo sapiens
gacaaaagcaaaacaaagctaattcttctaaccttaatgatattaaataatctgtctgaaaatgactcctgagttcagaaattgattctactcactaaatcatttaggatcctgcctcatccaaaaacctggaaaattgwctttggtaggttccttgaaacttggtgtttccaattttaattaatatcagaataagctaactcaacattaacacgtgaaaataattcatatgaattacacacatgcacatacacacataggcacatacacaaacagccacagaaaaatgcacaatattcccccaccaactcttaaatatacagatataactttatggaatttattttgttttgtttcttaggtgtgattaaatatagtggtgaacgttaaaactacacacttagaagtacaaatcctttgtctttgagcaagcttaaataaattccatcattgtttcatatcaattagattttgcatgtaaatactcttgcagtataacatatggtcaattcaaaatacttcctaaatatgctattaaatgggatcataatttggaatgatttgaaaatcaaaataactaatgcacagaaaatctcaaagagaatagttatttctcaaagggtcatta

SEQ ID NO: 543531 - DNA, 655 bp, Homo sapiens
caaagtcactatgtatcccattttaagaatatgttatactatgcaaaactgtagaaggaccacatattgataatgagtgggatcttttgaatttgcaataatctttacctttaagaaattaataatctcctactacttttttttttccaaccacatgctttcaccactttagtagtgtcttcattttgaaagcactkggaataaacagtttaaaaactgtaattttcttggtaggtacagtattaaattgcagtatcaactcaagcaccgaagaactacagtgctaccctgaggacaaaaggcattttagatgtcgtaaatatattatgaagaagtcttttctttaaatggtcagcaagataacctcattctttcctttttagtagtgatttagtgttgtttcacacaaaaatcaaatgcaatggtatttatggtaccatacattatatgataagaaacaaaaaggtttcaaaggatatcctaaagcttcagttttaagggacataagtaggtgagcagatggttctcagagaatgcagtcacagactttccccttcagaatattcctaaacgatgcattttgatttgaagggtcctgttcgtaggtccatcatatgcttctagtaaatcaacactgaaatgagatcatgcataa

SEQ ID NO: 543532 - DNA, 655 bp, Homo sapiens
caaagtcactatgtatcccattttaagaatatgttatactatgcaaaactgtagaaggaccacatattgataatgagtgggatcttttgaatttgcaataatctttacctttaagaaattaataatctcctactacttttttttttccaaccacatgctttcaccactttagtagtgtcttcattttgaaagcactgggaataaacagtttaaaaactgtaattttcttkgtaggtacagtattaaattgcagtatcaactcaagcaccgaagaactacagtgctaccctgaggacaaaaggcattttagatgtcgtaaatatattatgaagaagtcttttctttaaatggtcagcaagataacctcattctttcctttttagtagtgatttagtgttgtttcacacaaaaatcaaatgcaatggtatttatggtaccatacattatatgataagaaacaaaaaggtttcaaaggatatcctaaagcttcagttttaagggacataagtaggtgagcagatggttctcagagaatgcagtcacagactttccccttcagaatattcctaaacgatgcattttgatttgaagggtcctgttcgtaggtccatcatatgcttctagtaaatcaacactgaaatgagatcatgcataa

SEQ ID NO: 543533 - DNA, 655 bp, Homo sapiens
caaagtcactatgtatcccattttaagaatatgttatactatgcaaaactgtagaaggaccacatattgataatgagtgggatcttttgaatttgcaataatctttacctttaagaaattaataatctcctactacttttttttttccaaccacatgctttcaccactttagtagtgtcttcattttgaaagcactgggaataaacagtttaaaaactgtaattttcttggtaggtacagtattaaattgcagtatcaactcaagcaccgaagaactacagtgctaccctgaggacaaaaggcattttagatgtcgtaaatatattatgaagaagtcttttctttaaatkgtcagcaagataacctcattctttcctttttagtagtgatttagtgttgtttcacacaaaaatcaaatgcaatggtatttatggtaccatacattatatgataagaaacaaaaaggtttcaaaggatatcctaaagcttcagttttaagggacataagtaggtgagcagatggttctcagagaatgcagtcacagactttccccttcagaatattcctaaacgatgcattttgatttgaagggtcctgttcgtaggtccatcatatgcttctagtaaatcaacactgaaatgagatcatgcataa

SEQ ID NO: 543534 - DNA, 587 bp, Homo sapiens
aacatgaatgagggaggaggagacaaaggaggcccagaggctagagaaagcctcagacagggcacatcaatcgccatagaatcccagacctgaccttgttgccaagcctcgaagtccaagtctggttatctgtgttttytcactgagaatgaagttctgtttgtggcctcttctgtggtttacccatgattgcatcagaacggtgcccataattttcctttataattggcttatgtgggccacatgcaataaaggttattggactctaaccagtcacttcataaactttcagatgcactaattaggtttatatgtgccacaatcctagaaggagagaaaaccaataactttcagccaaaacttatctgaattctcagggcctagagaattctgctttgttagagtaaaaattagctttcatctttcaagtgcagctatgaactaataataaagaccctgagggttttcagtacttcatatttttcacccctgtagctaagaaagtagacagaataggcactattatctccaatttcatgcacgaggccgctgatggcagtttaaatgtcttcccagaagccattcag

SEQ ID NO: 543535 - DNA, 615 bp, Homo sapiens
gctatacagtaattcatgcagtgtagagaagcctcatgtaggtgcttcagccaaccatcccagttgaggtcctggccaattggcagaaycagttccatacatgtgagataataataaaatgatgactattgtactaaactgctgaattttggggtaactttttatattaatacataactgaaacattcatgtacatggcaatcttctatttcattaattttagatatactctattatgtatttttaatagtacttgatcagaaaactctcttataccattaactcttttgcttcctctccctatacttctgatatagtattattatacatttttgttaatcattgcatttgcatccttatgtctatagtgcactttgattgttccttttcatattcttgtataccttaagtgattaattagtaactttttgatttttaatctggttagttttctttgtactaaattgcttttctctcatttcaatagtcttcagtataatttttcattaagttaattatagaaggtaatctaacaatttcatttttttttctggagtcatcccacctggaaacttccattttccttttattttggcctgctgttttcttggaaat

SEQ ID NO: 543536 - DNA, 615 bp, Homo sapiens
gctatacagtaattcatgcagtgtagagaagcctcatgtaggtgcttcagccaaccatcccagttgaggtcctggccaattggcagaaccagttccatacatgtgagataataataaaatgatgactattgtactaaactgctgaattttggggtaactttttatattaatacataactgaaacattcatrtacatggcaatcttctatttcattaattttagatatactctattatgtatttttaatagtacttgatcagaaaactctcttataccattaactcttttgcttcctctccctatacttctgatatagtattattatacatttttgttaatcattgcatttgcatccttatgtctatagtgcactttgattgttccttttcatattcttgtataccttaagtgattaattagtaactttttgatttttaatctggttagttttctttgtactaaattgcttttctctcatttcaatagtcttcagtataatttttcattaagttaattatagaaggtaatctaacaatttcatttttttttctggagtcatcccacctggaaacttccattttccttttattttggcctgctgttttcttggaaat

SEQ ID NO: 543537 - DNA, 657 bp, Homo sapiens
aatgttttaaaaatgatgtcttaagatttgacaaaattggaaggttgggcacttggaaatgcattatagtgggaagagcactgtactgcgagtcagagttttggccattctgctaacttggggaaaataatttttgagtttgcaaaatcaggtgtttagaatggatgatttttatggtctcatgtagctctttaattgattctaaaagtactgatrtaggaaataattgggattatctacctgggtttcatagttattatcttactagggaataaaattgtgattattaatttgcaactttgaatgtattgtttgcaggtcattcctttttttctgcaatgtgtatgcctagggtaaagtgttacatagggcttgcctaatgtgaataatggggctttgctcttaattttgttgtttgattagtgcttgcttcttaaatttttagagaggcttcctgaaaaacaactctttcctcacctaaaacatggtcttgccttatacttgagaaaatatattttgatacttgtatggtcttaatttactctcttactctttagttaattaattaattaagttagttaatttactaacttaccggagagagtatacttcggtacttacattcttaaaattatattcttaacttaaaattatttt

SEQ ID NO: 543538 - DNA, 482 bp, Homo sapiens
tcgtttgaattgttaatatggaaatttcctgttatttcccagagttaattctattaatcatgtgatttcgatcagtgtgactaatttcctcagagcccagtgaacatagattgatctgatggtaactcttttccgaacctacaaaacaaattctggtctggagttttcttcttargctctacctccattgtcaaagatcctcggcaacccccaacctcatcagcaccaggccacagctaagctccatataaggtggctaatcagtgggttattcttttttttattttaaataataaccatagtaagcttccttttttgttttcatttttgtttttatttatttattttttaaacaaggtatcacactctgtctcccaggctggagttcagtggctcactgcagcctcaaactgtcgagctgaagccatccttccaccccagcctcctgagtagctgggactataggcacgcaccatcacacc

SEQ ID NO: 543539 - DNA, 552 bp, Homo sapiens
tgactttatcttctgactttgttcagggccttgtggtaagcttgctatcagagcaaaaaatacatatgatgagtgggtcttctttaactcactccagcatcactaaaatgttcattgctgataaaatgtaggttataaccctctagsaatgtaaaatctaattagtatttctaatgataaatcagtaattcaaaataattactctctaaagacagacttttagccattgtgactaaagattttagaaatgtctcttcagatttatcagtatttctcagattatgtattattggagggattccttatttgtgaataatgttggccctaccttcaggacttatgctatgattaagaaaaatatcctgttttgaatttgaaattggaaaggtatctcaaagccttggcttattgtgcttctttagtgccttcttctctctattgatagagaagctgtcaggtaatcttagagatatgagtaacccctgattgctttagaaacaatgtacaaatgattttacttcatatagtaacaaaaatgcactcttaccagga

SEQ ID NO: 543540 - DNA, 552 bp, Homo sapiens
tgactttatcttctgactttgttcagggccttgtggtaagcttgctatcagagcaaaaaatacatatgatgagtgggtcttctttaactcactccagcatcactaaaatgttcattgctgataaaatgtaggttataaccctctagcaatgtaaaatctaattagtatttctaatgataaatcagtaattcaaaataattactctctaaagacagacttttagccattgtgactaaagattttagaaatgtctcttcagatttatcagtatttctcagattatgtattattggagggattccttatttgtgaataatgttggccctaccttcaggacttatgctatgattaagaaaaatatcctgttttgaatttgaaattggaaaggtatctcaaagccttggcttatygtgcttctttagtgccttcttctctctattgatagagaagctgtcaggtaatcttagagatatgagtaacccctgattgctttagaaacaatgtacaaatgattttacttcatatagtaacaaaaatgcactcttaccagga

SEQ ID NO: 543541 - DNA, 628 bp, Homo sapiens
ggaaaaacggagatgctgctggctgagattggaagatgctggggtagagggataagacagcttaatgttatatattttaggtttgaggtgttcattagaaaaacaagtggagagattgattgggcagacacacaggtctggagagggctgggctggagatagaaatatgggttgccatgatacaggcatgggactgaaagccccatcagtcccttggagagatcatcagagagtgagtagagacatagcagggcgaagccctgagccccggttcccccagcatgtacctgcagtctgtttcctcttctcaactacaattcccatggtcttgtcttgttcacagaacctgctcaaggagcatctattaaatgaaggaacccaactttcatcacatgtaaaataaacatcattataatcctacctcataaggttgttgtcagaaaaagttaaacktcataatgaaagtgaaactgcgttatgattggtagatgcctgctatattttaaaatgtaggcttcattatctcattctgtacagcttgtattacttgattgtatcttcacagtttctgatgcatgcaaggcagacactctcgttctcactttattgacgaggaaagtaggactgg

SEQ ID NO: 543542 - DNA, 628 bp, Homo sapiens
ggaaaaacggagatgctgctggctgagattggaagatgctggggtagagggataagacagcttaatgttatatattttaggtttgaggtgttcattagaaaaacaagtggagagattgattgggcagacacacaggtctggagagggctgggctggagatagaaatatgggttgccatgatacaggcatgggactgaaagccccatcagtcccttggagagatcatcagagagtgagtagagacatagcagggcgaagccctgagccccggttcccccagcatgtacctgcagtctgtttcctcttctcaactacaattcccatggtcttgtcttgttcacagaacctgctcaaggagcatctattaaatgaaggaacccaactttcatcacatgtaaaataaacatcattataatcctacctcataaggttgttgtcagaaaaagttaaacttcrtaatgaaagtgaaactgcgttatgattggtagatgcctgctatattttaaaatgtaggcttcattatctcattctgtacagcttgtattacttgattgtatcttcacagtttctgatgcatgcaaggcagacactctcgttctcactttattgacgaggaaagtaggactgg

SEQ ID NO: 543543 - DNA, 423 bp, Homo sapiens
taggactctcttctgcaacatcctctaccagtgtttgttcagtctgtggagagaaaagacctgagcaaaaagagaaaacaaaatttgctgtaacctcatcacccaaaagtaaccatgcagatcagtcaacctgtctmtctacctatttatccatgctaagatattatatatcgttaaaagtagctttattgagatataattcacataccacacaattcatctgtagaatatactaaaaactatatgattcaatagtttttagtatattcacagagtcaggcagccatcaccacaatcaattttaaaaaattttcatcccttcctaggaaaaccccatacccattagtagtcagtccccttcccccaaccccatctcaacgttaggcaaccatcagtctttctgtctctatacatttgcccgtt

SEQ ID NO: 543544 - DNA, 423 bp, Homo sapiens
taggactctcttctgcaacatcctctaccagtgtttgttcagtctgtggagagaaaagacctgagcaaaaagagaaaacaaaatttgctgtaacctcatcacccaaaagtaaccatgcagatcagtcaacctgtctatctacctatttatccatgctaagatattatatatcgttaaaagtagctttattgagatataattcacataccacacaattcatctgtagaatatactaaaaactatatgattcaatagtttttagtatattcacagagtcaggcagccatcaccacaatcaattttaaaaaattttcatcccttcctagraaaaccccatacccattagtagtcagtccccttcccccaaccccatctcaacgttaggcaaccatcagtctttctgtctctatacatttgcccgtt

SEQ ID NO: 543545 - DNA, 617 bp, Homo sapiens
ctgttgacggtttgtctgtgtggatgtcgcccaatcagttctcagagaagtgaggtcaaacagggaccccttgcatgcacgggcacaccagggggttattggagttagttttgctttcgtgatccatgtagccaatgtctcaggctgtgattggaagcaaaacattccagttaggagaaaactgaatgcatatgactcaaagggcaggttctgaataggtgtttgatttgagtgagggaagctgtgagcagaggcttccttctctccttctggtaagcgagaaatgttttaacaaggttgtgacagtcacaatattaactaattattttgtcaccgctatgcacttaattaggctataattttatttcctttgctgcaagggtcaatcatgtgtttcttgattacacggagatctccattcatggtaattgccaagtgacttttgctttsattttctccccctccctgggggagggccactcttaaaaagtgacacctcagtaatcacagccaaactgctctaatccaaattcttaaatctcttatttcagaaagtcctcaatgtgcatgaattttatgaagcactctcactgggttttgaacaaatacaacctttg

SEQ ID NO: 543546 - DNA, 524 bp, Homo sapiens
tgtagctacttagtttttgctgttgctgcaatatttctgaataatgttaaaaagataagcttccttgggtacctttcaggagctgggagcctttttatgaaaagactgtacagcttcctgaatacctttttttctgtgtctgcctgggtaacacctccctccgctattctggttcagcctaggaagaaccaaatctcaggagaagggaagtttaggggcatttctgcaggctaatggggtcaaaccacagttcatctctctgttacccttgttccctgtgtcctctatgtacagcttacatgatgaagggtgtccttccagtggggaatctccccttccctagcatgcatggcagaagagttcctacattagctggttagtcttccccaaaygaggagatgcacactgcaagtaactacatgctaaagaacagagctgaccggaactagagatttaactctgcaacagctacctgtgggacatgcccatggctcggaaccaaagttcatgctacgttttgacta

SEQ ID NO: 543547 - DNA, 516 bp, Homo sapiens
tttactttagaaaaaactgaaaaaccacctggctatcaataagagaatggattaactatggtatatataatggtttaaatgaatcaactggaaccatgtgtatcaagaacacatctctaaagcatcttaagagaaaaaagtaggttgcaaatgaatgcacattttatacaactattttaaaaaattktttaaatattacatacacaaatattctggtagattgcaagaatggttacaaattcctttcttcccatcaagagtggagcctatttctctgccacttgaatctgggttggccatgtgtgttgctttggccaaaaggatgtttgcaaacatgacacaagcagaggcttgaaaagtgcatttgaattagggcttgcactcataccactcatgagaaagtaagacacacttacccgggttgcttgcatttctcaagccaacagccagcagactttctaaagcagagccacttagatgactgacagttgaccatggatatatgtgtgagtccag

SEQ ID NO: 543548 - DNA, 516 bp, Homo sapiens
tttactttagaaaaaactgaaaaaccacctggctatcaataagagaatggattaactatggtatatataatggtttaaatgaatcaactggaaccatgtgtatcaagaacacatctctaaagcatcttaagagaaaaaagtaggttgcaaatgaatgcacattttatacaactattttaaaaaattgtttaaatattacatacacaaatattctggtagattgcaagaatggttacaaattcctttcttcccatcaagagtggagcctatttctctgccacttgaatctgggttggccatgtgtgttgctttggccaaaaggatgtttgcaaacatgacacaagcagaggcttgaaaagtgcatttgaattagggcttgcactcataccactcatgagaaagtaagacacacttaccckggttgcttgcatttctcaagccaacagccagcagactttctaaagcagagccacttagatgactgacagttgaccatggatatatgtgtgagtccag

SEQ ID NO: 543549 - DNA, 534 bp, Homo sapiens
tattactttcggtatgcttgaaatattgtacaattaaaaatttataatttccttgaagactcagtgggaaatgaagaaattagaacaggaaaatgaattaagaagtttaattgtgaaggggaggagacagagcattaggagagatttaaagtacataatttagaaggaagctggtcgaatggaataggttgaaaatattgcgcaataggattattaattggtgatgcagsgttcctgattatgcaaaatatgacaatggaatcctgggcccaggatgagggactaaccttacagaagaatgggcaccttttcctggtagtaaggaaggatggatgtaggtataggcagttttgtagttttaatagcaggaagtcgatggcatctctttcctctctgaattgataaataagggcatctttttgagatggtcaggtttagattgcaaactgttaaaagtcattgggggagtgacaggatatcttgcccaggataacaaggattgctgggcatcactgaaggtccagttgagtttga

SEQ ID NO: 543550 - DNA, 665 bp, Homo sapiens
ccccatccctccctgggtctctggtcagaggaaatgcctgtgcttcmtttaccatgatctagcctggacccaggcaactgagctctgcttagagaatgccattaaagctactgtaaatggtgttcatctttaaaatatagccaaacatgtttaacaattccaggcatggaagcaaaatgaaacataattcgcgtaagctcagggaggtgggagagaatgtggatcattttagtacccacaagtagttcagcagggctggagcatatgtagaagttttaggagtgctagaactggggctggaggagtaagcaagacctgaccaagatgggttgtgttagtcttgataaaaagcttgcattctctcctgagggtctttagaagccattgaagatcttaatgggggcagccagagatgggatgagatgcccattctgcacaggtcattctgtccagagtgagggcagtggattggaggccatcaggtacaatctaatgcagcctcccttcatctagcttctaccatccaagctcagcttatatgagaccttcacctggagggatgcgtaggtgtcttgctttcactggtaatgttagcgtgactctccaccccaacactcagaggcaccctactctgtctgccccagtagcaccagggttaaatcaga

SEQ ID NO: 543551 - DNA, 665 bp, Homo sapiens
ccccatccctccctgggtctctggtcagaggaaatgcctgtgcttcctttaccatgatctagcctggacccaggcaactgagctctgcttagagaatgccattaaagctactgtaaatggtgttcatctttaaaatatagccaaacatgtttaacaattccaggcatggaagcaaaatgaaacataattcgcgtragctcagggaggtgggagagaatgtggatcattttagtacccacaagtagttcagcagggctggagcatatgtagaagttttaggagtgctagaactggggctggaggagtaagcaagacctgaccaagatgggttgtgttagtcttgataaaaagcttgcattctctcctgagggtctttagaagccattgaagatcttaatgggggcagccagagatgggatgagatgcccattctgcacaggtcattctgtccagagtgagggcagtggattggaggccatcaggtacaatctaatgcagcctcccttcatctagcttctaccatccaagctcagcttatatgagaccttcacctggagggatgcgtaggtgtcttgctttcactggtaatgttagcgtgactctccaccccaacactcagaggcaccctactctgtctgccccagtagcaccagggttaaatcaga

SEQ ID NO: 543552 - DNA, 595 bp, Homo sapiens
tgtacatatgtaaaaacacgcaaaattttaatgggttcacaaactcccaaaaatctattagtttgccggttattatttcagatttaaaaattctactaatggaagatgactaagtttggtcgggtgctaatatgctgtaataagagaggagtaataggtaattaaaactaatcatgtttaaagttgaattcctaatctgcagttccaaaaattgattttttcattccccatattggttaataagattytactcttccaggatctgaagtcaaaaatttggaatcagtctaccctgtttctttcctatctacttttccaaatttcagaaaattgcaattttcctaccttcaaaatgtatcctgaatctgaccacttctccccacctccactgctaccactctgttcaaaccactatgatctactgccaagaatattgccatcactttctaactcatctacacccttgttccctatggtatattttcaatacaacagccagtgtaggccattaaacaaataaataagttgcttctgtatttaaaaccctgtaaaggctcccaatttattccaagttaaaacccgtaatctgtctctc

SEQ ID NO: 543553 - DNA, 666 bp, Homo sapiens
tcaattgtctagcatgagttaatctcatgcagcatggattgactgcatgtttatccccagagcttcctgggacatgatattgagcattggccaatgctatgaagaaatatacatattaaagataaatgatgttctataaccctgagtccatgagctgttttggagcaggaagtactagcttaccaacattgtctagaaataatcatyggaatatattaataaaataataaaaataatttcacctggtttcatcagagcctaggaggtttcaatggttcaggttggtcacataggtggactgtctacaagatcatctcataaaagtagcagtctttggacttcttggtaccaagaggcttcccacatatgttggtggtggttcaagatctggtggcaatgtgcatcttgtgcaacacagtggtgagatggcacatgagcctgctccagagatctctggatcccttcaaatgcaaacccttctcctgttgttgctgtattgtacactttacccctaataaagctgttttgtgatcataaatgatttgagtcttttgtaagttttttcagcaattgaatacttaaggcaattaacttaaaattaacatatcagtaggtgatatttgagccataggaatgaatggaattactccaggaaattatatgaga

SEQ ID NO: 543554 - DNA, 666 bp, Homo sapiens
tcaattgtctagcatgagttaatctcatgcagcatggattgactgcatgtttatccccagagcttcctgggacatgatattgagcattggccaatgctatgaagaaatatacatattaaagataaatgatgttctataaccctgagtccatgagctgttttggagcaggaagtactagcttaccaacattgtctagaaataatcatcggaatatattaataaaataataaaaataatttcacctggtttcatcagagcctaggaggtttcaatggttcaggttggtcacataggtggactgtctacaagatcatctcataaaagtagcagyctttggacttcttggtaccaagaggcttcccacatatgttggtggtggttcaagatctggtggcaatgtgcatcttgtgcaacacagtggtgagatggcacatgagcctgctccagagatctctggatcccttcaaatgcaaacccttctcctgttgttgctgtattgtacactttacccctaataaagctgttttgtgatcataaatgatttgagtcttttgtaagttttttcagcaattgaatacttaaggcaattaacttaaaattaacatatcagtaggtgatatttgagccataggaatgaatggaattactccaggaaattatatgaga

SEQ ID NO: 543555 - DNA, 553 bp, Homo sapiens
aaatgatgttaagaagatagtatctagcttttgtgtgttttcaccagaacgatttgtattactaagttgtattacaaaattgtttgtacttatttcaatatataaagtaacatgataacgtcttttattttacacaatgtttctaaagagtgacacattyccagaatgaggttggcttcattgtgagagctattgttgaaaacaaatcatgattaaatgtttctttgttgcaaaccttattcatccagccctggggacaaactctttaaagatacctgcatgtgtccactttggcgtctaaatccacacagattatttctcacatatagggatttggaacaccatttctgtgatcactctttctttcatgttgattgccagtcatttctccagattgccattctctacttctctatttctctgtttcatactatttctttccactcgtttctggaatgcaatgtgtcttggtgcaaaaaaaaaaaaaaaaaaagcacagcagttggagccagataaagaagggtttaaaaatggaatctgccaccttctgggg

SEQ ID NO: 543556 - DNA, 553 bp, Homo sapiens
aaatgatgttaagaagatagtatctagcttttgtgtgttttcaccagaacgatttgtattactaagttgtattacaaaattgtttgtacttatttcaatatataaagtaacatgataacgtcttttattttacacaatgtttctaaagagtgacacattcccagaatgaggttggcttcattgtgagagctattgttgaaaacaaatcatgattaaatgtttctttgttgcaaaccttattcatccagccctggggacaaactctttaargatacctgcatgtgtccactttggcgtctaaatccacacagattatttctcacatatagggatttggaacaccatttctgtgatcactctttctttcatgttgattgccagtcatttctccagattgccattctctacttctctatttctctgtttcatactatttctttccactcgtttctggaatgcaatgtgtcttggtgcaaaaaaaaaaaaaaaaaaagcacagcagttggagccagataaagaagggtttaaaaatggaatctgccaccttctgggg

SEQ ID NO: 543557 - DNA, 566 bp, Homo sapiens
gctggggttctggtcaaaatgagagttcctagktttttttcctgaagttgtcaagaccacctgggaaaatccacaaacagaaaccatggtctattccttgagcaccttggagcctggggtctgtaaaagctctgattctcagcaccaagggagtcaaaagaggtaatacgcaaggctgtgtgctttctgcacaagcagcaccattttctctttctggctaatggaaaaagagatggcgtaaggcccagcactgagtggggcccgggagaaggaaggtgaaggtccgaatcctgtctttcctgatggtctctttgaaacccacaaccaagggctctgggaagtatggatcccgtctctgctctcaacactgaccctgaggtgagatggaatggagggtcttcgaggaggcgggtgggatgtaaagagccagcaggtaacactcttggctttctctccagatggaaatccactatctagttgggagacggaggcagagaatgggagggcatcctggtgaccttgagagctctggtctctcagctcttgaggcagcggcccaggttgta

SEQ ID NO: 543558 - DNA, 566 bp, Homo sapiens
gctggggttctggtcaaaatgagagttcctagttttttttcctgaagttgtcaagaccacctgggaaaatccacaaacagaaaccatggtctattccttgagcaccttggagcctggggtctgtaaaagctctgattctcagcaccaagggagtcaaaagaggtaatacgcaaggctgtgtgctttctgcacaagcagcaccattttctctttctggctaatggaaaaagagatggcgtaaggcccagcactgagtggggcccgggagaaggaaggtgaaggtccraatcctgtctttcctgatggtctctttgaaacccacaaccaagggctctgggaagtatggatcccgtctctgctctcaacactgaccctgaggtgagatggaatggagggtcttcgaggaggcgggtgggatgtaaagagccagcaggtaacactcttggctttctctccagatggaaatccactatctagttgggagacggaggcagagaatgggagggcatcctggtgaccttgagagctctggtctctcagctcttgaggcagcggcccaggttgta

SEQ ID NO: 543559 - DNA, 538 bp, Homo sapiens
gctggggttctggtcaaaatgagagttcctagttttttttcctgaagttgtcaagaccacctgggaaaatccacaaacagaaaccatggtctattccttgagcaccttggagcctggggtctgtaaaagctctgattctcagcaccaagggagtcaaaagaggtaatacgcaaggctgtgtgctttctgcacaagcagcaccattttctctttctggctaatggaaaaagagatggcgtaaggcccagcactgagtggggcccgggagaaggaaggtgaaggtccgaatcctgtctttcctgatggtctctttgaaacccacaaccaagggctctgggaagtatggatcccgtctctgctctcaacactgaccctgaggtgagatggaatggagggtcttcgaggaggcgggtgggatgtaaagagccagcaggkaacactcttggctttctctccagatggaaatccactatctagttgggagacggaggcagagaatgggagggcatcctggtgaccttgagagctctggtctctc

SEQ ID NO: 543560 - DNA, 553 bp, Homo sapiens
tattctcttacagcagctgatggagccttttggtggcatctaagctggttgcartgtggttactctaacaatgcatacactttctgcaaattagagcttctttgttattttgtaatatttgaaataaaaagtgaaattgattccaaactgattcaacattaaatacgccaatgaaaggaaaaaaactcttatatttttaaaatctgatttcaatagcaaagttttaaatggtggtacaaattattgaaaactcttaccacttttcatatataatttctcattgatgatgattgctgtgttttgattgtttgtcccctcccaaatgcatcttgaaatttaattgccattgtagcagtattaagagacgagacctgtaagaggtgattgtgattaggccatgagggttctcccctcgtgaattaatgcctttatagcaagagtgggtttcttacaaaaggatgagttcagctccagtctctctctctctctctctctctctctgtctctttgcatttcccctatgtgataatacagcaagaaggctcttgcaaga

SEQ ID NO: 543561 - DNA, 553 bp, Homo sapiens
tattctcttacagcagctgatggagccttttggtggcatctaagctggttgcagtgtggttactctaacaatgcatacactttctgcaaattagagcttctttgttattttgtaatatttgaaataaaaagtgaaattgattccaaactgattcaacattaaatacgccaatgaaaggaaaaaaactcttatatttttaaaatctgatttcaatagcaaagttttaaatggtggtacaaattattgaaaactcttaccacttttcatatataatttctcattgatgatgattgctgtgttttgattgtttgtcccctcccaaatgcatcttgaaatttaattgccattgtagcagtattaagagacgagacctgtaagaggtgattgtgattaggccatgagggttctcccctcgtgaattaatgcctttatagcaagagtrggtttcttacaaaaggatgagttcagctccagtctctctctctctctctctctctctctgtctctttgcatttcccctatgtgataatacagcaagaaggctcttgcaaga

SEQ ID NO: 543562 - DNA, 553 bp, Homo sapiens
tattctcttacagcagctgatggagccttttggtggcatctaagctggttgcagtgtggttactctaacaatgcatacactttctgcaaattagagcttctttgttattttgtaatatttgaaataaaaagtgaaattgattccaaactgattcaacattaaatacgccaatgaaaggaaaaaaactcttatatttttaaaatctgatttcaatagcaaagttttaaatggtggtacaaattattgaaaactcttaccacttttcatatataatttctcattgatgatgattgctgtgttttgattgtttgtcccctcccaaatgcatcttgaaatttaattgccattgtagcagtattaagagacgagacctgtaagaggtgattgtgattaggccatgagggttctcccctcgtgaattaatgcctttatagcaagagtgggttycttacaaaaggatgagttcagctccagtctctctctctctctctctctctctctgtctctttgcatttcccctatgtgataatacagcaagaaggctcttgcaaga

SEQ ID NO: 543563 - DNA, 621 bp, Homo sapiens
gatttctccaattagatagagcaggactagctctccggaatagcaaatacttacagaacacttactatgtgccaagcactattctaagccccttataagcagtatcacacttcatcttatgatcctcattttacagatgagaaagctgaggagcagagaggctaagtaacttccacagggacacctaaccgtgaagggagattcacacctgcctggctggctccagaatctgcgctcttaacccttgcaccctactaactcccctacctatacatgccagtctatgtggggtgatgtaaggggtgactcccacccctctgacttgctctgaaaaacccatcattaggcacccagacttatagatccttagctctagaaggaatmttgagaattatctagtgcaactcctcatttcacatgaagacacttactaaaagggtaagtgaaggtcccacagctaattgttgcagaacggggatgcaacgtgcattttatgtcacctgaagtctagtttggaaaacaaaagccaacacagtactgcccaaggagataataaaatacgcatccacaaactggaagggatgtgtttttattctcattgccacattggcagagatttat

SEQ ID NO: 543564 - DNA, 536 bp, Homo sapiens
gtttaatatacagaaaagccacattcacatggtctgacacacctgtgccctctgcccctttccctgtgctgtgattagtgccttcgctctaaggtaggtcatgtgtgaagatggcctgcctggacccttgcctctgtggactctgtaaagtcccccatgttcaaaataacaaataaatgttttgcagctaagctggtattaactggataggaaataatctagttccagagctcattaggatttgagattgtaccctcctcycctacagagtgtaaatacggcatcacttaaggtctgtgagagataccaactcaatactacattatctccctcccctgtatagcctggaccaggggcctcagaagttgcagactcttacccaaatacctcttccctttgtccaggcatcacagagatgactggctatggccatacaacatgagtgcccagtgacagcctctcacctgggtcctgggaatgaaatgctgtgataacggaaaacactggcttgcagagctgcggagttggtcagatgc

SEQ ID NO: 543565 - DNA, 591 bp, Homo sapiens
aaaagataaacgtttttagaaccagaatcacaaagtagccatttcagaaaattgttttgcttttgaaaaagatctgaaatggaattacaatgtgtaagagcacatgttcagtgtcagccagttcttccactttcttacgtgtgatgcctggactttaatcttcaatttcctttctgtaaaacagagaaaacatcacagggcaactgaaagttttaaatgtatgtctggaacgtagcaaatggtcagcagaaggtggctagtattgtatcygttagtgagataacaacatactgaaacttgggtagttaacactttcaaatacagtgaggctattgagcaaaggaaaatgaaataaaattgtataatctaccagaagccaaccaaccctcctttcctccctcatttctttccttccttccttccttcctcttacctcccttccttcctgttttttttaaagcttttgattgagtttgatggcaccataaagaaaacaactgtcaaaagtattctaatatttgaaatgaattatcgatggacttttattactgatatggttacttaaaccattgaagaagtattatgtgtaca

SEQ ID NO: 543566 - DNA, 358 bp, Homo sapiens
ggaagtcgtaagtgtgaaaatacatattttcaagaaagaaattgagctagttaatgagatatataataatgttttgtatggggatgctacamcagctatttcgtgcagggacgtttagagtcttcagttgtacacagttgttttaaaatgaagactagtttagtaggcccccaaagaaggcattaatttttcagtttttgaaagtcagcggatatatgcacgacaaaaattccatgccatccctgagtcatatcctcttctggttctcaccccactactgagaacctgagataataggagagtatgagcaatgtggcaggcctgtagttgggttcggggatgtcgtgagagtcagaaa

SEQ ID NO: 543567 - DNA, 628 bp, Homo sapiens
gctgccatagcaaattactacaaatratttgggttaaaacaacagaaatttattctttcacagttcaagaggccaaaagagcaaaatcaaggtattgtcagagctgattccttctggaagcgctgaggaaaagtctattccatgctctgctcctagcttccgtggctgctgacgtatctggtgttccttagcttgggtctgccctcctgtctctgcctcatcttcctatgaccttcctctctgtgtctctgtcctctcctttactgtcttctctaagaacattcatcactggattgagggtccactctactacaggatgatctcatctcaaacctttaattacctctgcaaagacccttgctttaaatgaggtcacattctgtggttcccagtggactggaattttgcaggggacactattcgacccactacagctcccaccgatatacatttcttagcttgtggtaaattctggtagcttcttttgctcctttaataattgcctacacttctttcctaatcctccttgactagtgttatttatacttggggcttattaggtagatggatttaaaacagtaatatgcctttgtgacttttttatgaccaggagaactcttagcaagtg

SEQ ID NO: 543568 - DNA, 440 bp, Homo sapiens
tgttaactgtttaactgtacatttaacatttactcttccttttgaagtttctcaagttgtgaataaagatttgaaattatatcaagtatatttttgtgtargacttttttgggagagctttgtatatgatttttttaaaatatagttctgtattcaacattgatcatatgactgcttggttttatatagtttatataagctatagttactgcttttcttagtcattttcttggtcttcctcactgtcatttgaatacataacgtctgcctccaagatttaaactggaaaaaaaaaattgatatgagtagcccctagccttctttctaggagctttcaggcattcatctaactacactttcctaaagggagtggacaacattttccttcccttattgcctgattggcctttgcaagtaaaggcaatatctagagcatgtgt

SEQ ID NO: 543569 - DNA, 456 bp, Homo sapiens
agctggcaccctttccttcttgggttctgccaagttctgtagtaagatggagaaccaaatacaaaatgggcagagtgatagaaagctggtaaattagtgaggcaggaccatttggaaaccaaatttccctgcaacttaaaaaacacagggagtcaaaggcagaacaggagtttcttcgtttctgagaaggagcgctgtgccctgaacctgcgcctgcctggaggaagttacactccatccgcatgagtgaatcatgagtcaggagggcaggctgcccactcctctgatgggcggagtgcttctgcctgaatctgatgtctcctgttctgaccctcaactggcccaggaaggtggctcaaccacttgttaccagggacctgcaccccatatgagtggactaacactgcaactccrgaaaagtgtctttttttcaccaatcagagacattccacagtt

SEQ ID NO: 543570 - DNA, 601 bp, Homo sapiens
ggaaggcgaaggagaggaagaagaaagggcaggagagacagtctccctcctcttcgttgtcatttgttcaagtaatataagtgcagaaaggaaggataaagaaattgatctaaaaagagaagcgtgcagaaacgggcaggagccgggacctcagaggagtgggctggattcagcacaggcctggggattaactaggtgtttgcaacctcactcttgagcccatgacttgaggaagaaccatgagaatctagstaaatctgaaaagatttaaggaacaaaatttgtatggggatccagccctttttccttcttggctgccaggatttataatgagctgggcctctaagagcagtctagcatgattcagacagaggccagcaaaccagggccccacttcctgtcactctgcaggcgacctggctcagaaactctggaggtaaagtgtggctgcccgctcaacagcctcaggaagtccccaaagccctatctcctatctcctgtgggtgggctctcccccactggccccgagggagactttgctcctttcctctcccatcccctccgaactcacctgagacaggcacccaggccagtgcggccc

SEQ ID NO: 543571 - DNA, 601 bp, Homo sapiens
ggaaggcgaaggagaggaagaagaaagggcaggagagacagtctccctcctcttcgttgtcatttgttcaagtaatataagtgcagaaaggaaggataaagaaattgatctaaaaagagaagcgtgcagaaacgggcaggagccgggacctcagaggagtgggctggattcagcacaggcctggggattaactaggtgtttgcaacctcactcttgagcccatgacttgaggaagaaccatgagaatctaggtaaatctgaaaagatttaaggaacaaaatttgtatggggatccagccctttttccttcttggctgccaggatttataatgagctgggcctctaagagcagtctagcatgattcagacagaggccagcaaaccagggccccacttcctgtcactctgcaggcgacctggctcagaaactctggaggtaaagtgtggctgcccgctcaacagcctcaggaagtccccaaagccctatctcctatctcctgtgggtgggctctcccccactggccccgagrgagactttgctcctttcctctcccatcccctccgaactcacctgagacaggcacccaggccagtgcggccc

SEQ ID NO: 543572 - DNA, 408 bp, Homo sapiens
acatgtatatatgccacacacacmccacacacacatcctcatacatgtatacacaccacagacacacacccgcacatgtatacacaccacacacccatacatacatgtacacacgtgcacataccacatatgcacagttacaaacacagagatataatttttcacaaacatattccattatataaaaagtctcacttccaaatttaaacttttaaaaccagattgccgaagatagggaacatcattctgaaagctggattttttaggtttcatctcatttaaaacattttaagtgcattttattaaatataaaaaagttctttcctaatagtaaaagcaagcacagattttagacgaaagggcctgctttccacttccagagtctaaaataaacctgtctctgcacag

SEQ ID NO: 543573 - DNA, 524 bp, Homo sapiens
atcctttggataatcgttcaggtaaattcccaaaggtcatggctcacagatattgggaccccagctctctacctgtgaagatggggtctgcaggagccaggcagaggggagccctgtggcagctcttcctgttgtggacaactttctcctcctggaacccatctctcttcttggctctcctgatagtttccctycctctcagctatcagtcacctgggaggattccatctcctctgcataacaaaagatgccactgacactcttttccgcaggatgttgctgctctgggcgatgtcctaggggagaagggagctttgagcttccaggattcaagaggaaaacagctaccctcgggagacagagtctcagccagggccatctgcagagccagacatcttctacacagcctgagacaattccaacctgtgttaataaattgcagcctcacccagcgggcatcctctcagaaactgagatctcagtgggatgtgttaggagctgccagccactcacagagacatgga

SEQ ID NO: 543574 - DNA, 568 bp, Homo sapiens
ccagccaagacacttttttttaatcaaaactctacttttaacaaactgtagaaatgatccctgaaagtatagtcttaaaactcaacttttaaaacaataatttgaaagaagggacaacactcaggagtagagactgactggaggtgggaagttacctcagtccttaaaacaagtgcctcctgggcggcagctcttagagatgacacggaagcatgaacaatggaagaaaccacagatcagtgagactattaacatggagaacctttgacactgtcgagaaagggacagacaacccggagaagtggtgaaaatatttgcaaatcacatctgacaaagatcatgtatccagaatatgtaaagaattcctacaactcaacaacaaaaagacaaaaacccaagttcraaagatggggaaaaaatttgaatagacatttctttaaaaaagatacacaaatgaccagttagcacatgaaaaaatgctcaacgttattacgcagtaaggaaatgcaaatcaaaccaccatgagataccacctataggatggctagaatcaaaaagactaatggca

SEQ ID NO: 543575 - DNA, 551 bp, Homo sapiens
aatccaggaactgaagtgatgtcttctggattcccactgttgttttctgttgcttttaccgcttgctctctgcctaaagcaattcttttatactcagataacctttctctcttttaaaaggaaaatagcctytaggatcttcagaattttatcttccaatttccatggaagtttttttcacacacacacaagcacacacctacaaataaggcttctcccttctcctgtagctccacatgattccaggaaaggactctgactgcctagtctgggcttcacacccacctgggctgatccttgggtggggaagagcggtgggaccagccagacctgcggcacaggctccccggggactgccgtaacagagtccactactggcaattccatttgaatcactgggctgggagaaagggttccccaaaggaaaggggtgggcagagtggtgagaggcagaaacagagcccccagcagcatcaggcacagacaggcatgaagctggaaaatggtacaatgaggtcaggacattctaaaggagcgaagcagattctctg

SEQ ID NO: 543576 - DNA, 551 bp, Homo sapiens
aatccaggaactgaagtgatgtcttctggattcccactgttgttttctgttgcttttaccgcttgctctctgcctaaagcaattcttttatactcagataacctttctctcttttaaaaggaaaatagcctttaggatcttcagaattttatcttccaatttccatggaagtttttttcacacacacacaagcacacacctacaaataaggcttctcccttctcctgtagctccacatgattccaggaaaggactctgactgcctagtctgggcttcacacccacctgggctgatccttgggtggggaagagcggtgggaccagccagacctgcggcacaggctccccggggactgccgtaacagagtccactactggcaattccatttgaatcactgggctgggagaaagkgttccccaaaggaaaggggtgggcagagtggtgagaggcagaaacagagcccccagcagcatcaggcacagacaggcatgaagctggaaaatggtacaatgaggtcaggacattctaaaggagcgaagcagattctctg

SEQ ID NO: 543577 - DNA, 647 bp, Homo sapiens
tcataccctgcccacctgcttctggtctttctccctccacagcccacagtggtccttccgagtgcaaacctgctcatgctaccctccgactagaagtcttcattggcctccactacttgaacagagctcagcagtcaggcctgtacgtgtccgaagcctgggtctgcctgtttctagccttatctctctatttgacccttcacaccccatagtcaagtggaaactcactgctttgagttcctgggraaaactgcatgctgttgtactgggcctttttttttttttttagagatggagtcttgctctgttgccaggctggagtgcagtgaggtgatctcggatcactgcaacctctgcctccctggttcaagtgactctcctgcctcagcctcctgagtagctgggattacaggcacgtgccaccacaccaagctaatttttgtatttttagtagagacggggtttcaccatgttggccaggacggtctcgatctcctgaccttgtgatgcgcctgcctcggcctcccaaagtgctgggattacaggcgtgagccacagcactgtactgggtctttatatagggtatcttctgccttgaataaaaattttccccaaatccacttggtgaagttttattttaaaaaacc

SEQ ID NO: 543578 - DNA, 637 bp, Homo sapiens
cctttggcttgtcctttgagtctctttttggtgtctcttgatgaatagaaattcctaattttaatatagttggatttctcattgttttcaatgtcttatttttagaaatctactcttacctcagagtcataaaaatattgtccaatattctaaaattttgcctttcacatataagtatttaagctacatgaagactatttttatgtatggtgtgaggtgtggatmcaactttccttttttgcatttcatagtttattttttttcccagttattgaaatactgcctttttcttatattgtttctgcatgattgtgggattatttctgggcactctattctgtttcattgatctttttgttgttccttcactaataccatagtgcttcaactactgtttctttacagtaaatctagatacctgatagcctaatttccccaccttgtttcttttcttcaggagtgtcttacagtggtgtgatcatggctcattgcaacctcaacttcccagactcaagcagtcttcccacctcagcatcccaagtaactggatgccaccaccatgcctggctactttttaaaaattttttgtagagatggggtctcgccatgttgcccaggctgatcttgaactctgggc

SEQ ID NO: 543579 - DNA, 484 bp, Homo sapiens
agggtcatatagaaaggaattccatattttttaggatttctgaaaccaagaataaaaaayaacttccacttttctctgcagatgagcggtatctttgaaaactggctgcacaaactcgtgtcagccctgcacacaagagagaaagacgccaatgtagttgtggttgactggctccccctggcccaccagctttacacggatgcggtcaataataccagggtggtgggacacagcattgccaggatgctcgactggctgcaggtactgggggatgagagggagtctcctgtcaccagcaggatctcaaacccaatcttcttaagaaatgcaggtcatgcatctgttgccatgaacttctggagtctgataaaaatctttgagattaaaagttttattgaattaagtattgtttggaatacttgaaagctgggactttttgagagccttttaattattgatagatctctggatttttcctgttact

SEQ ID NO: 543580 - DNA, 484 bp, Homo sapiens
agggtcatatagaaaggaattccatattttttaggatttctgaaaccaagaataaaaaacaacttccacttttctctgcagatgagcggtatctttgaaaactggctgcacaaactcgtgtcagccctgcacayaagagagaaagacgccaatgtagttgtggttgactggctccccctggcccaccagctttacacggatgcggtcaataataccagggtggtgggacacagcattgccaggatgctcgactggctgcaggtactgggggatgagagggagtctcctgtcaccagcaggatctcaaacccaatcttcttaagaaatgcaggtcatgcatctgttgccatgaacttctggagtctgataaaaatctttgagattaaaagttttattgaattaagtattgtttggaatacttgaaagctgggactttttgagagccttttaattattgatagatctctggatttttcctgttact

SEQ ID NO: 543581 - DNA, 595 bp, Homo sapiens
gtacacctccagaaagggcatagtcaactgcaacacagcatccacaaccatcctccayccccaagagcccaggctggccgtcacgttctcagcttcacttcagcatcttccagcatcctcaaacacgctcttcttcctttatcaggaatgccatcaatcttcatcacaggaagagaaacaatactcaccctccacaaacctatgcccaagtgcagcattttacctataaaccagagcaaggtacatttctggagccctgtactattcttttaggtggacagtgaataagctgagagagagttaatatcaacccatgcaactgtacaggaaggattcatggttctgttttttaaaaagagagagagagctgagtaaatgagtgtttaaccaaaggacagggctctgctttctattaagtttgactattttttaaccatttctttgaaataacattgttattatttttcccactaaaattgtaagataacaaggcagacaagaaaattgcgttacaagaatgcacttcagcattaaggctttcacacacagctatcacttcccattaccaatcctgcttttcaagagtttctctaat

SEQ ID NO: 543582 - DNA, 619 bp, Homo sapiens
acaataacttgtgtgtggcctagaagacttcaaatgttgtttctctaatgtgaatgttgaaataatgtcattgagtttacatttaataacatcttacgtttgcagagtgctttgttttttaaggtgtcttcatttataacatatcattttatccttttgataaaaggatagattaacaaccctagaaagctggctagaaattaagctatgattactgcattctatacatgagaaaactgaggcccagcacaggttaagggcctggaaagggacacacagcagaaatgtgacagtgttggaaccagactccacactcctgatccctaatccagggctcctgcttcaacaccttcctctttgatgctctctacrtgtgaagaaagttcaccctagattagtacatgctggaaacaagtggaaacaagacctaggttatccttaatgccagacagttgtattctgccacactgtgaattccaggatagcaagcactggtcagcaaattggcgcaaacatatatttgcattataatatttcttatgggtcaattaatctcctggaactaagaacaatcctggtctggaagcatgactgagacccagatgtcagtgcttaacag

SEQ ID NO: 543583 - DNA, 592 bp, Homo sapiens
atagtggggtggtgtggcagggggaggtggtgaggcagtggggggaagggagcagccgggggacctgccatcccagcagacattctggtcagcatcctccatttccatagcaaaaaaccatcactgtgcttgttaagttgtcatttcctgaaggaaagcacctgtcaccctcttcattttccccgctctgggcagttccacagagtgtaatcttgcactgcgattcccagcagctaaggtaactgagtttttagaaaaacaggggagagagttcatcaaagaaccacacatccggagatgggtatcccacacaactagttttgtggaagtggaaagcaatcacaagagaggyatttctgtatgtttggtgaaagtgttgaggaatgcgacatgtgataaagtcttagacatgaaccccagaaagactgtcttacctaacgaaagaatttgctatctttaagtagaaattctaacatccactgtgtttctctttttactttggtttccaggaagctcattataaatgtaatgctcaaataacctcagtagcctaagttatttggcatgatttcccccttcctccatatagttt

SEQ ID NO: 543584 - DNA, 574 bp, Homo sapiens
ccaactcttcttttaccgaggatgttctggcccagaagagttaaatgtcctgctcgaggtgacacagatatttttaaggcatcaaaattacaaccctttgtgcaaaaagctataaaaatcttttgtattcctcagtgacagacactacaaaaaatgcattgttcagtaaaatacttatatgtcaagatcccatcatagtaacagactctaagcacttaattcctttagttgtatggaaaastttaattaagagattctcaaggaattctttttattaagataactccccatacagtaaagaatctaccaaataaataaaaattcacctaagctttctcgggttggtccccaaagtgcttgctgtgagaaacaattccttgttagtgcaatacaatacagctcacaaatcttactttagttatgtggtctgtacctggagcattcaatgtgtataggaaaacggtaaacttctcaactttgtcctggcaggttagtatcataaatctaaccatgaaaaacattttgtgcatcaaggaaaattataagagtaatatcaacatagctggtttaacag

SEQ ID NO: 543585 - DNA, 574 bp, Homo sapiens
ccaactcttcttttaccgaggatgttctggcccagaagagttaaatgtcctgctcgaggtgacacagatatttttaaggcatcaaaattacaaccctttgtgcaaaaagctataaaaatcttttgtattcctcagtgacagacactacaaaaaatgcattgttcagtaaaatacttatatgtcaagatcccatcatagtaacagactctaagcacttaattcctttagttgtatggaaaactttaattaagagattctcaaggaattctttttattaagataactcsccatacagtaaagaatctaccaaataaataaaaattcacctaagctttctcgggttggtccccaaagtgcttgctgtgagaaacaattccttgttagtgcaatacaatacagctcacaaatcttactttagttatgtggtctgtacctggagcattcaatgtgtataggaaaacggtaaacttctcaactttgtcctggcaggttagtatcataaatctaaccatgaaaaacattttgtgcatcaaggaaaattataagagtaatatcaacatagctggtttaacag

SEQ ID NO: 543586 - DNA, 574 bp, Homo sapiens
ccaactcttcttttaccgaggatgttctggcccagaagagttaaatgtcctgctcgaggtgacacagatatttttaaggcatcaaaattacaaccctttgtgcaaaaagctataaaaatcttttgtattcctcagtgacagacactacaaaaaatgcattgttcagtaaaatacttatatgtcaagatcccatcatagtaacagactctaagcacttaattcctttagttgtatggaaaactttaattaagagattctcaaggaattctttttattaagataactccccatacagtaaagaatctaccaaataaataaaaattcacctaagctttctcgggttggtccccaaagtgcttgctgtgagaaacaattccttgttagtgcaatacaatacagctcacaaatcttactttagttatgtggtctgtacctggagcattcaatgtgtataggaaaayggtaaacttctcaactttgtcctggcaggttagtatcataaatctaaccatgaaaaacattttgtgcatcaaggaaaattataagagtaatatcaacatagctggtttaacag

SEQ ID NO: 543587 - DNA, 548 bp, Homo sapiens
cagccatgtgtgctgaggagagctgaaggacacaaagccagagccaggaggtgatatatgtcatggactgagaatgcacaaggaargctcactataggaaccccacaggaagggtacaaatctcccttccaaaccacttgaaactctgttgaaaaatcccttttgttagctgaacactgtcaaggctaaaactctacacatttccaagcagattaaagcaagcgtttttgtttttgtttttccttattttgttttcacatattatgcaaaagctcctggatctagtgacattttaataaagaattctcttttttagagctttagaaaatctccaaattggagattttctatctccaatttggcttacaggtattctgccttctatagtaggcttccagaatgaagctgagttatccacaaaggcatctaaactttaactttagcctcaatgttataatgctttagttaccaaaaacttagaagaatggcacaacgagctcaactatgatgcaaactcaggaacttccatgactgtgctttgcttcttc

SEQ ID NO: 543588 - DNA, 548 bp, Homo sapiens
cagccatgtgtgctgaggagagctgaaggacacaaagccagagccaggaggtgatatatgtcatggactgagaatgcacaaggaaggctcactataggaaccccacaggaagggtacaaatctcccttccaaaccacttgaaactctkttgaaaaatcccttttgttagctgaacactgtcaaggctaaaactctacacatttccaagcagattaaagcaagcgtttttgtttttgtttttccttattttgttttcacatattatgcaaaagctcctggatctagtgacattttaataaagaattctcttttttagagctttagaaaatctccaaattggagattttctatctccaatttggcttacaggtattctgccttctatagtaggcttccagaatgaagctgagttatccacaaaggcatctaaactttaactttagcctcaatgttataatgctttagttaccaaaaacttagaagaatggcacaacgagctcaactatgatgcaaactcaggaacttccatgactgtgctttgcttcttc

SEQ ID NO: 543589 - DNA, 548 bp, Homo sapiens
cagccatgtgtgctgaggagagctgaaggacacaaagccagagccaggaggtgatatatgtcatggactgagaatgcacaaggaaggctcactataggaaccccacaggaagggtacaaatctcccttccaaaccacttgaaactctgttgaaaaatcccttttgttagctgaacactgtcaaggctaaaactctacacatttccaagcagattaaagcaagcgtttttgtttttgtttttccttattttgttttcacatattatgcaaaagctcctggatctagtgacattttaataaagaattctcttttttagagmtttagaaaatctccaaattggagattttctatctccaatttggcttacaggtattctgccttctatagtaggcttccagaatgaagctgagttatccacaaaggcatctaaactttaactttagcctcaatgttataatgctttagttaccaaaaacttagaagaatggcacaacgagctcaactatgatgcaaactcaggaacttccatgactgtgctttgcttcttc

SEQ ID NO: 543590 - DNA, 548 bp, Homo sapiens
cagccatgtgtgctgaggagagctgaaggacacaaagccagagccaggaggtgatatatgtcatggactgagaatgcacaaggaaggctcactataggaaccccacaggaagggtacaaatctcccttccaaaccacttgaaactctgttgaaaaatcccttttgttagctgaacactgtcaaggctaaaactctacacatttccaagcagattaaagcaagcgtttttgtttttgtttttccttattttgttttcacatattatgcaaaagctcctggatctagtgacattttaataaagaattctcttttttagagctttagaaaatctccaaattggagattttctatctccaatttggcttacaggtattctgccttctatrgtaggcttccagaatgaagctgagttatccacaaaggcatctaaactttaactttagcctcaatgttataatgctttagttaccaaaaacttagaagaatggcacaacgagctcaactatgatgcaaactcaggaacttccatgactgtgctttgcttcttc

SEQ ID NO: 543591 - DNA, 519 bp, Homo sapiens
atgtagtgggctgatgcttaaaaggcatctgaggagatcaacagccagttggatcttagtttcttattccatgaccacgaaatgagttggaggacggaaggagttaatttgtgtgtcagagaagcaagggcaaccccacagcttgcaaaaaaaaaaacaaaaataagtgcattttatttaaacaacggaacaaacatcagagagcatcccctgcaaagcccccaccccagagcctgctgatggaagcggggctgcaggacgctctgccacaacggcagcatctccaactgcacaaagaccccttgctgccagggccrggcaccggcctagctccttgcctgcctgcctgaggcagccgtggaatcagggccaggggtggcacaggtagaaaagacagatggaaacaatgcccatgaatatacccaaagtgtcccaggaggataaaagccatcatgaggaccagaagccaacccagtctttttttggcctcctggagaagttgtttttgagacctgagac

SEQ ID NO: 543592 - DNA, 629 bp, Homo sapiens
tgacccaaccaaggaagatgggaggcaatccttccttcagggccatcttgtcctaaccctcgcctccaaactggggtcatgggtccatcccaaaggttatgtgcaggagcctgttctattgttatgctctcaggcaccagcacctccacagacactmtgcaacccatcaccttttgctctatttcaaggagcgctgggatcccaacccaagcctgagggtcacagagagcatggctgggagcctctcaacagtcacactagcctcagagaccctggaaagggagagaagaaactattgaactctccagggagtgtgccttcatagggccccatagggaagggggatcaggactttgagggctgctgggcaaggagactcctacaccctctctagaagaaatgctactacatcttctaaaagcactgacaacaatcagggtgataagtttgatggggacagtgtaatatgaccccaaaaccaagagctggggttctactcaatgtaagacatggactttctaacccacaatggagctaagcgtgctatggggtgtgtgcgtgtgtgttcgcctgtggccatttcctctcctcccacctgataaaaaatgttggcagattctaaattacaa

SEQ ID NO: 543593 - DNA, 547 bp, Homo sapiens
gaaatctccacatctaataatcaccccaagaaattatgaagcaggtggtctcaggatcacaccgtagaaaacagcagagtagaggtcaaacacagggactttggagctgaaacactcatatcctggctcttccatttattagccacgtgacacaggacaagccatttaaccccactctgcttctcaactcttacagtattttacataaattatatagacaattataaagataatcacaataactggcayacagtataataaatacacaaaaactagctattgtttttattattcatagaatattaataattaataatctaagaagaaataaatattaaatgcacctttaaagtaatgtaacatactgggattagaggctgattaataaagagacaatcaaaaaaaaaggaacattttcggcaacttttcctaagttatgctcaaatattattctgaatagcaacctataatgacaaaatatccaagaaaatgcttgtgccctaggaacccatcaaaaaccaaagacttcagtctaaaaatagcagca

SEQ ID NO: 543594 - DNA, 627 bp, Homo sapiens
caggaggggcttcccctcgttcacgccaatggcagcgccaggtgttcagggagctcttgcgttcaaaccacgaagaagacgcagtttaatctcatcccackcagataaagagtaagttatttttttctgtttcagaatgtcatattcattttttacatctaacaaaaccactttttagaaagctaatcacagtctaaccgaatatgcagtgcagcaattatgctcctcgcctttatccaaaggagttgagacgtccacgcaaaaacctgcacaccgatgtgtacagcagccttattcataatgaccaaaacttggaagcaacccacaagtccttcagtaggtgaagggttgagccgcggtgcatccagacagtgcaatattattcagcgctaaaaagacacgagctatcaaggcctgaaaagacatggaggaaacttccacgatattagtaggtgagagaagcccatctgaaaaggctacacaccgtatgagtccaactctttgacattctagaaaggacaaaactacagagaaagtaaaataatcagtggttgccaggaatttggagagaggggtgaacaggtggagacagatttttagggcagtgaaactctttgtatgatgtta

SEQ ID NO: 543595 - DNA, 627 bp, Homo sapiens
caggaggggcttcccctcgttcacgccaatggcagcgccaggtgttcagggagctcttgcgttcaaaccacgaagaagacgcagtttaatctcatcccacgcagataaagagtaagttatttttttctgtttcagaatgtcatattcattttttacatctaacaaaaccactttttagaaagctaatcacagtctaaccgaatatgcagtgcagcaattatgctcctcgcctttatccaaaggagttgagacgtccacgcaaaaacctgcacaccgatgtgtacagcagccttattcataatgaccaaaacttggaagcaacccacaagtccttcagtaggtgaagggttgagccgcggtgcatccagacagtgcaatattattcagcgctaaaaagacacgagctatcaaggcctgaaaagayatggaggaaacttccacgatattagtaggtgagagaagcccatctgaaaaggctacacaccgtatgagtccaactctttgacattctagaaaggacaaaactacagagaaagtaaaataatcagtggttgccaggaatttggagagaggggtgaacaggtggagacagatttttagggcagtgaaactctttgtatgatgtta

SEQ ID NO: 543596 - DNA, 627 bp, Homo sapiens
caggaggggcttcccctcgttcacgccaatggcagcgccaggtgttcagggagctcttgcgttcaaaccacgaagaagacgcagtttaatctcatcccacgcagataaagagtaagttatttttttctgtttcagaatgtcatattcattttttacatctaacaaaaccactttttagaaagctaatcacagtctaaccgaatatgcagtgcagcaattatgctcctcgcctttatccaaaggagttgagacgtccacgcaaaaacctgcacaccgatgtgtacagcagccttattcataatgaccaaaacttggaagcaacccacaagtccttcagtaggtgaagggttgagccgcggtgcatccagacagtgcaatattattcagcgctaaaaagacacgagctatcaaggcctgaaaagacatggaggaaacttccacgatattagtaggtgagagaagcccrtctgaaaaggctacacaccgtatgagtccaactctttgacattctagaaaggacaaaactacagagaaagtaaaataatcagtggttgccaggaatttggagagaggggtgaacaggtggagacagatttttagggcagtgaaactctttgtatgatgtta

SEQ ID NO: 543597 - DNA, 627 bp, Homo sapiens
caggaggggcttcccctcgttcacgccaatggcagcgccaggtgttcagggagctcttgcgttcaaaccacgaagaagacgcagtttaatctcatcccacgcagataaagagtaagttatttttttctgtttcagaatgtcatattcattttttacatctaacaaaaccactttttagaaagctaatcacagtctaaccgaatatgcagtgcagcaattatgctcctcgcctttatccaaaggagttgagacgtccacgcaaaaacctgcacaccgatgtgtacagcagccttattcataatgaccaaaacttggaagcaacccacaagtccttcagtaggtgaagggttgagccgcggtgcatccagacagtgcaatattattcagcgctaaaaagacacgagctatcaaggcctgaaaagacatggaggaaacttccacgatattagtaggtgagagaagcccatctgaaaaggctacacaccgtatgagtccaactctttgacattctagaaaggacaaaactacagagaaagtaaaayaatcagtggttgccaggaatttggagagaggggtgaacaggtggagacagatttttagggcagtgaaactctttgtatgatgtta

SEQ ID NO: 543598 - DNA, 555 bp, Homo sapiens
tggctaatttttgtattttttgtagagataaggtttctccatgctgcccaggctggtcatgaactcttgagctcaagtgatctgcctgcctcagcctcctaaagtgctgggattacaggcgtgagccaccatgcccagctaacctaaaaatgttttctttttttttatttgcatatccttaagggccaagtttagaaacagcagtaggtttatagttgcccagaaaagtcattcctactattaacaagtagaaaagtgcaagtctgattttaaaaaaaaaaattaagttacacaaagtgcaacttctgataggagtacctgttgcttgataagagtggaaatctgggaagatggtagagtgagattttctttcaaacaatggctctgaaattgtgcatttgtcaaagatttggttaaaataaagcattgaggaccttaccagagctctcttcttactgawagagatgaattaagaaacttcccaattgtctcatatcttatttctacttactggtaatctctactgtctttcctctttagaatcccaaactcctg

SEQ ID NO: 543599 - DNA, 534 bp, Homo sapiens
aggttactctctattacgaagcaacatcatataacataaaattgtccagcccaaacagagatgatggccagggtaggaccactcctgactcttgctgtatccgtggaacacactgctaatcaatcaaaacatttgtcttactaaggctggatatggcctcagaatcctccccagtagagatttatataaggcctataactactgaaatgaaacatatttccaacactgttgtaggttatgcattgagagtgaggaatgaccctaaaagatatattgataagccagtagaaattatttcattatacctcacatttacacatgyagagcccaggaatgcatttctgctatatttatcttggactatgtccatcagtgactcagaatggccctatgctttgggtcagagagtttggacactaaatttatgagagaaaatgacaagcttcaatcacaccaaattctaaatgtagccaaaaaccacataattaactgcagatttttcaaaggtaacagttattgattttaaattaattt

SEQ ID NO: 543600 - DNA, 575 bp, Homo sapiens
gaaacatcatatttgaaaacaaggtggggccttcatcatatgcaaccttcatattttaggtaagaaataaaaatgcaattgctaaagatttcatttaaacatttttattacacttgccaactgtccaaaagaatgcctcaaatattaagaatacacaatttttgacatcttaagtcttcatatatttccttttatcttcatggtactttgcacaaggtcttagatggtggcgttcaataaaaaattattctattagttaacttaatacaatgctyggaatctgtgtacagtagttgttgacaacttaatttattataatctccttcctgtattttctttcctaagaggatttaaagcagctcccaaaggataggagcttaggtcaggtcagagggagataaaggcaagaaaactattcatatcagttaatatagttttttgctttgtttcaaaatttgactacaacaagcatagagaggcaaggatttccctttttctctcttctacttcttttccactaccctggcactaccttccaaaagaaatttcacattggagatcctgtgtccattcat

SEQ ID NO: 543601 - DNA, 575 bp, Homo sapiens
gaaacatcatatttgaaaacaaggtggggccttcatcatatgcaaccttcatattttaggtaagaaataaaaatgcaattgctaaagatttcatttaaacatttttattacacttgccaactgtccaaaagaatgcctcaaatattaagaatacacaatttttgacatcttaagtcttcatatatttccttttatcttcatggtactttgcacaaggtcttagatggtggcgttcaataaaaaattattctattagttaacttaatacaatgctcggaatctgtgtacagyagttgttgacaacttaatttattataatctccttcctgtattttctttcctaagaggatttaaagcagctcccaaaggataggagcttaggtcaggtcagagggagataaaggcaagaaaactattcatatcagttaatatagttttttgctttgtttcaaaatttgactacaacaagcatagagaggcaaggatttccctttttctctcttctacttcttttccactaccctggcactaccttccaaaagaaatttcacattggagatcctgtgtccattcat

SEQ ID NO: 543602 - DNA, 648 bp, Homo sapiens
agcacacaaacaagtattcccacaataccttcagttcacttacattcccataataccttcagttcgcttaaacagacatttaatgaagtgcaatactccttccgtagcggcctttgcatcacctaacttattactgacacatccaccagagggggaaggaacattgtggagatgaacagttgaatggtatttacaggagaccactgatccctatcaaattgtagtgtcattttagccttcacaagtgcaaagataatttctatgatataggaactgattgaaattttctcttccctttccatccaaggtgcatttctatgtggagtagatgaggtgtcataacactgtgtacctttcttcctattatagtatgagtaattttacatctatttgaaattttcatgagtacagtgaccatgtcttcttttttcttatcatcgytcagggataatattcaaaattgttagcaactggcctagcacagtgacaaatcaattagaatggatgctgcttagaacaccactttgttatgtacaaacagaatatcagttcagcaactggcataatgtggagaacataacagctcatcagtaaataattgttaaacaaatacgtggatgaagaaattaaccgacttactggatcaga

SEQ ID NO: 543603 - DNA, 611 bp, Homo sapiens
gcattttccaaacttaattgatgtcagattttttcccaaaaattwttttttttcattaacaccctgaaagacaccagtattccatgaaacataggttaggaaatgttgccctggagaaattctttgatatttaatccttttgttgattttttttttttctctgaaaaaagactaaaattctgggcattggtgttttcctagtactccaaatctcatacagggtatcttacagcagctctcctatgaagtatggtaatgacttattcctccaaaatgtttgccctgcacctcatgataaaaaagactccatattcagtcctaaccccctgcttctcttcctttcattgctatttttctttagagttgtgctttccccattacttcaccattcatttttatttttttcacaatatgttcttttctgcctgcctaataggttcagttgtgtggtgaaggctgaggaggagcaatttggagggatttgcagaggttgttcaataggcaaataaaatttcaaggaatttttaacattagggaagaggatagaaaagagatgagctgtttacctttaaagttgtctgtgaacaagtagaaccaaaaataaaagttta

SEQ ID NO: 543604 - DNA, 637 bp, Homo sapiens
ctgaattatgttctcctttgggaaatgctttgaatcaaatcaattttcttataagcaagctagacttcaacgtttttttcttacttcatatgatatctgaaatatatacatatgtgtgtgtgtgtgtgtacaacatacctttttcattgcccttggttctgtaaatgatttttaagcacgttttctatttgattaatcaatcatgagtatctaattaataatggtaaacaatgatctatgtaatgtttctggagtccatgtattgagtactatgtgrttaagttttgaaacctcctagttgaggtgctacagatagtaaggatgtttatcaagattatgctaaaacaatggcattcctattttttatgtgacttgccatccatttcggtttttacccaatgtaaaggcctcactgtgttccaagatgtgtagacagtggaacacacttttcataatgccagtgaggcaggaaaactgcctgagcacagaccactcaaagcagacacataacaggagcaatcacatctctcactcagacaggcaatgattcttgagtactagttttcataagacattttgcagctaaggttgaaggaattcatctttcttgtagaacaactgcagactaaggcctctt

SEQ ID NO: 543605 - DNA, 637 bp, Homo sapiens
ctgaattatgttctcctttgggaaatgctttgaatcaaatcaattttcttataagcaagctagacttcaacgtttttttcttacttcatatgatatctgaaatatatacatatgtgtgtgtgtgtgtgtacaacatacctttttcattgcccttggttctgtaaatgatttttaagcacgttttctatttgattaatcaatcatgagtatctaattaataatggtaaacaatgatctatgtaatgtttctggagtccatgtattgagtactatgtggttaagttttgaaacctcctagttgaggtgctacagatagtaaggatgtttatcaagattatgctaaaacaatggcattcctattttttatgtgacttgccatccatttcggtttttacccaatgtaaaggcctcactgtgttccaagatgtgtagacagtggaacacacttttcataatgccagtgaggcaggaaaactgcctgagcayagaccactcaaagcagacacataacaggagcaatcacatctctcactcagacaggcaatgattcttgagtactagttttcataagacattttgcagctaaggttgaaggaattcatctttcttgtagaacaactgcagactaaggcctctt

SEQ ID NO: 543606 - DNA, 519 bp, Homo sapiens
ggaatgtcttgaacatctcaaatcaatagaaacacaacttctcctacatctggctggactggcttcaagttttcagaggaagagaaaaggaactttacatcactgatgtagaatgagaaggtgaataagtataggagaaattgtttttttaatctgaaagcactggtatctaataaacaataattctgtgcctgttttcatccttcctgcctcaaatgcttcctgagcaaaatgtaagatgatctcagtaatctttatttgtagcctttagagtatgctgcagtgatggtgatttagggactaggagagtttcatagggtagaggtcaagatttgaacccaggcagttggattccatagcttgccttcttagccactacgctcaattgttttccatggtrgtaagtatattattcctaagagcattcattttttaagaattatcagctcttagaactattaaatatcatccagatttcctggctttgtaggtgtccatgaagaggctgggagaccacca

SEQ ID NO: 543607 - DNA, 405 bp, Homo sapiens
gatgggcctcagttaatcagtcactgtttttagtatgatttatcacaatgcctgtcaacwaatagaaatatacatatgtatatatgtgtgtatataaatctgtgtgtgtgtgtatatatatgtatgatagttcacatcttctgttaattccaccaaatcatgtcaatcttctagaaaacaggccaggcgcggtggcttatgcctgtaatctcagcactttgggaagatgaggtcactggaaatcaggagtttgagaccaacgtggccaagatggcaaaagcttgtctctaataaaaaatatacaaaaattagctgggcatggtggtgcatgtctgtaatcacagctacttgggaggctaaggatggagaatcgcttgaactcaggagacagagactgcagtgact

SEQ ID NO: 543608 - DNA, 405 bp, Homo sapiens
gatgggcctcagttaatcagtcactgtttttagtatgatttatcacaatgcctgtcaacaaatagaaatatacatatgtatatatgtgtgtatataaatctgtgtgtgtgtgtatatatatgtatgatagttcacatcttctgttaattccaccaaatcatgtcaatcttctagaaaacaggccaggcgcrgtggcttatgcctgtaatctcagcactttgggaagatgaggtcactggaaatcaggagtttgagaccaacgtggccaagatggcaaaagcttgtctctaataaaaaatatacaaaaattagctgggcatggtggtgcatgtctgtaatcacagctacttgggaggctaaggatggagaatcgcttgaactcaggagacagagactgcagtgact

SEQ ID NO: 543609 - DNA, 405 bp, Homo sapiens
gatgggcctcagttaatcagtcactgtttttagtatgatttatcacaatgcctgtcaacaaatagaaatatacatatgtatatatgtgtgtatataaatctgtgtgtgtgtgtatatatatgtatgatagttcacatcttctgttaattccaccaaatcatgtcaatcttctagaaaacaggccaggcgcggtggcttatgcctgtaatctcagcactttgggaagatgaggtcactggaaatcaggagtttgagaccaacgtggccaagatggcaaaagctygtctctaataaaaaatatacaaaaattagctgggcatggtggtgcatgtctgtaatcacagctacttgggaggctaaggatggagaatcgcttgaactcaggagacagagactgcagtgact

SEQ ID NO: 543610 - DNA, 640 bp, Homo sapiens
gggtgtctgtgatacatatgaaagagaatagtaaaaagtacmaaacaaaaaatagtggttggtagggtttgggaaaatgaaaaataagagatgatagataaaatagtatacaagcttctatgcagtgaatcagggtctgatttatggaaagagaagtaaagatactatgaaaaaaagaaaagtatcaaagaaaacaaaattacttgtatctttactattattataatagtttggttttgattctaatgatagttttccctaccacacgagattgataaattgaaacaatatatttaatggctattttgccagaaaaatgaaaatctcactaggtacaccttgtctatgctgttatactttattatctttatcttaaagtggccaatgtaacacagttgttaatgatattgaatttgtaccatctgaaatagcatttacctatgattacaaattacttactaaagtatgatttggtgccttttaatatacagttcaaataaaacatttttcctaggttagcagaaagttttttattttataatttaatttaatttaattttattttatatccagggtgttcatgtgcaggtttgttacatgggtatattgccctttgttggatttgaggcttgtagtgtac

SEQ ID NO: 543611 - DNA, 640 bp, Homo sapiens
gggtgtctgtgatacatatgaaagagaatagtaaaaagtaccaaacaaaaaatagtggttggtagggtttgggaaaatgaaaaataagagatgatagataaaatagtatacaagcttctatgcagtgaatcagggtctgatttatggaaagagaagtaaagatactatgaaaaaaagaaaagtatcaaagaaaacaaaattacttgtatctttactattattataatagtttggttttgattctaatgatagttttccctaccacacgagattgataaattgaaacaatatatttaatggctattttgccagaaaaatgaaaatctcactaggtacaccttgtctatgctgttatactttattatctttatcttaaagtggccaatgtaacacagttgttaatgatattgaatttgtaccatctgaaatagcatttacctatgattacaaattacttactaaagtatgatttggtgccttttaatatacagttcaaataaaacatttttcctaggttagcagaaagttttttattttataatttaatttaatttwattttattttatatccagggtgttcatgtgcaggtttgttacatgggtatattgccctttgttggatttgaggcttgtagtgtac

SEQ ID NO: 543612 - DNA, 655 bp, Homo sapiens
tactaaaaatacaaaaattagcctggcatgggagcacatgctggtaatctcatgtatttgggaagctgaggcaggaggattgcttgaacctgggaggcagaggttggagtgagccgagactgtgccactgcactccagcctgggtgacaaagcacgactccacctaaaaaaaaaaaaaaaaaagagagagagagaaggaaaaaaaaagaagatatggaactgtaaaagagggaccaaccagtaggaattctcatcagagagggatgcagtttttaccacagagagggatgcagctctgagacaggggaggggaaggaaataccctgaattctctcttctacattgccatcccctattgccttccattaacccagctggatgccagacaggaagggatctcaactgctaccctctgcatgagtttgccttcttgggctcagagcagggcagagaattgtcgagagactggatcttgagcgggtgagaatagagaggcacargagatatcaccatgggatataatcatgcctctgattttctcactgatcagaccacacctagagcactgtgctcaattctggccattaccttctaacatggtcattgacaaacaaacctatttaataccaatgatcatgaacagatactgtaggaa

SEQ ID NO: 543613 - DNA, 649 bp, Homo sapiens
gttctgtcttcctctcagagcatggaatctctcctgccaatggggggactgtgtggtttgaaaaagctcctgtaggtggttctgattcagaacaccccacccatccagcactggattgagaactaggggtcaaaaggcacactgaacggtagacgtgaggcttcctacgtctcctatttcacagactttatggaaaagcaggtttggaaatgaatgaacccaggatgaaaatttaagtctctataaaatatttttcatctacaaagaaacaactttttcctctaccaaagttatttcagatacatgtgtcttcattatggtcatctgggtatttgtaaggaataccacatcccttgcatttcaggtgtgttgtgaattaaagattacattattttccttttatccttatcatctccaaacctcctacacaacaattgcaaaagaagtaatactgcaaactctcaagtctgttgtgaggattaatttacttagattacataagatatttaaaacaataaaaggtgcttaatgtataaaacctattatcatagttaacttttcttttagtcttatggctacattgtgtagtaaatattgtataatctgcattgcatagtcatacmaaaatgtcatcttcacagtacatttc

SEQ ID NO: 543614 - DNA, 513 bp, Homo sapiens
ctgcagtggctcatgcctgtaatcctaacacactgggaggccgaagcgggtggatcatctgaggtcaggagttcgagaccagcctggccaacatggtgaaaccctatccctactaaaaccacaaaaattagccgggcatggtggcgcatgcctgtaatcccagctactcgggaggctgaggcaggagaattgcttgaacccaggaggcggaggttgcagtgagccgagattgcaccactgcactccagcctgggccacaagagtgagactccatctcaaaaaaaaaaaaaaaaatctagagtggtctctatgtgactctctaatgcaattctaacactgtatgattgtgcattttcctattttaaattaccagtctttcagagggaagagtayataagaagattcttcccaaaataatttgtgcaaattgttgacagccgaagtttgtaatgcacataaaagtaaaacttttatgtgtttattgttcattttccaggaagttctcaattacaa

SEQ ID NO: 543615 - DNA, 649 bp, Homo sapiens
aaataggcagatttattttagggaaacagattagtaaaaccagtttttcactagattatttacaaattgtctcactatacgttatacatattacatgcaaaggaggccttatgatccttttttaactattctctcatcaatattaagatagaattctttaaaaggaatgtaactgctcacccttttgaagtgtttaaatgtcttcactaaaaatttgacattttctacttgatttggtttactttttcctgaaaaaagtgaacacagtgaaaggaagtgataaatagggatgcaaatgggttatcctttcttgttctaaaaaattagtcttaagtttatttttctctctataggagataaaagatgtatgacatggaccacttatggtttaagctgaattgcctctgtcttataatttttactgagattcagtttatgtttgaccyaaaaaatttaagtatcatacaaagagtttatataagaacttaatataattttctatagctcttttaacaagttgtaaactattttattaaccctttctttaaaaggctaccaagaagctgataattcatgagaaacagataaaatgactataaattattcctctcaaataggacatttggccctctttctaaaataatttcat

SEQ ID NO: 543616 - DNA, 554 bp, Homo sapiens
ttcttaatttctaatacttgcatttgaatgtctgatccctaacataaaacaagaatcaggtaaattatttctgarggccctgtccctgggttgtcaatttataaagtattaaattttgttttctttttgtttctttcttgcctcatctgcaatatagaaacaactcttctaggctaccacatagggcttcagatttctgtaactgacacaaatatgtgtaaataattttgcaagcatagagttataaagaatacttagactactcatgcaggcagttcctgaagttgggtcactgttgtctagaatagttaaaacattttataactacttttatgactacaaattttattggttttatttttcgtttcaaagaaagtcaaaagtattactttagttttgaacaaaaaaatgcacagaagtatctaaaataaaaagaaaaaatccttcctgttttacttccctaggggtaaccacagttagcacttgagtgtttttctttccagacctttgtttctgtttgtgtctttgttttagttttaggttttgcacctaca

SEQ ID NO: 543617 - DNA, 546 bp, Homo sapiens
agatcagtatgccttagcagatggaggaagttttactcacacttaaaacattttttttttcttgtagaaccagttagttcacatggccctctggcatactagaaagctggagtggctctaataatggtggcattataatagaatctaactggacatttgttacttcgttcagggttcatattgttcagattattttgttttgtattatcttgttttattgcttgctgtaaattgtaaatgttacaataacaaactgacccagggtgagaacaattttcagcttgctggatttctatataaataatacaatctgtgtatctcccacatcggtttgctcagatagtttataaaacaccaataaaatgtctgacttcaggattaaggaagctgtgtagtacggtggataaacacttgataagwgttggaaggtaaggcttctgatcttatttctgccacttctaattgtggagcacaaaccacaaatttatttcctcttgggtaaaatagggagagttcaattgacaagggtgtccttagtgtcctata

SEQ ID NO: 543618 - DNA, 532 bp, Homo sapiens
acgaaaagtctggaacagaatgtatacacaattgaacataaaaactaatattttaaaatttctagaaaagggaggataatttattgacttttaattaagcaaagatttgttaaacaagacacatattttacatttctaaataatattaaatgaacctcaaaattaaaaacatctgactttcagtagacattgttaagacaatgaaaatacaagctcataaattggaaaaaaacatttgcaatacacacgacaaaaaattatacattcagaatcaatatataaagaatacrtactatgctattatgtatatacacgtgtatatacactataaatgtatacattatataataaattacatactaaatttaaaaactaagacaaactaccaaataaagaattggcaaaatacctgactagaagttaaaatacataaatggtcacaagcatgtgacaagatcataatgaatcagggaaatgcaaattaaaactgaaatgagatacaaacacatacatagaatagcaaaaagtgttg

SEQ ID NO: 543619 - DNA, 601 bp, Homo sapiens
tcattctctcagcattctttaagaatacatcatcaactatagtcactatgctgtgcaatagatctcttaaacttattccttctgcctaactgtaatgttcctatcctttgagtaacatttccccagttccctgtatccccaatccaaacttctgatagaagaggccgcagcctccagtgagggccccttttggtccatggatatcccactttgggaagtcattttgctgggggttgcatcatttttaaaggtacagggttggaaaaggccagtggttttcaaactctgttatttggaatcaaaataatttcacactgttctccatagtggttgtaatataataattgtacatttaaaaataactttaaaaatgtaattggattgtttgtaactcaagggataaatgtttgagaccatggatattccattctccatgatgtgctgatctcacattgcatgcctgtatcaaaacatctcatgtaccctataaatatatacagctactatgtacccaaaaagtgttttaaaaatttwaaaaaaattccacatgaccctgcttgaaggaccctttagaagctggaggtagcatatgcaggacaaa

SEQ ID NO: 543620 - DNA, 540 bp, Homo sapiens
taatccaaattatccattttgtggcagaagaagctgagacagatgataagtccragatgtcacgtctcatcaatgccagagtttcaatgaaaacaagtttgctcatttccaacaattacactttggggtccctttctctttaaaatgtgatttcgagtgattgaagcttatggaatgatgaatgcctaggtggttgggaaatgtggtatagtgaaatgagtccctggatttcagcttcaaccacatctgtggcatcacccgcatgaacatggatttaatttctttttcttacttaaagagattgttaaaaatcttgttgcactgtaaaaatatatctcccagggatttcataaatgaacctagctagctaattttacactcttcaaaagtgtgaaaggattcgtaagagaaataaataatagaagggagtgtatgtgggggagagagtcaatccactttggtcggctactcattataagaaaaatgttcagtaattataaaacttgaatatgcaatgactaggtgtcacaggtcttgcag

SEQ ID NO: 543621 - DNA, 557 bp, Homo sapiens
tttcacattgcttgcctgtatcaaaacatcccttgtgtcccataaatakatacacctaccatgtacccacaaaaattaaaaatttaagaaaatgggagaatgcggcagaaattacactgggctgactgtggacccagtctccaagatgattggccacttctactttctttttcatggaaagttcaccacaggcgaatgccatggaaggatcccaactgtaccagcacagtcatgccttgaggaagttcaaactagccacatagacagattatggggaagcagctcatcccctgcggttctagccatctctgccaaggtgccaaatatgtgagtgaagaaactatctggtgaaaattgtatgtgtgtttatatgtatatgtacaaatgtacatcaaatgactttatgtgtgaacttgacaaggccacagcatccggatatttggtcaaacattattctagatgctcctttgaatatacttcttagacacacttaacatttagatcagtagacgactgagtaaagcagattaccctctataatatggtgggcctcatcc

SEQ ID NO: 543622 - DNA, 507 bp, Homo sapiens
gttgccccacctttcttgcccctccaccctgatcttccagcccgcttcattatccagaccatttctgcttttcaccctccactgactccccacaggcttcaattagtaattttaaatggtcaccaattttccttaagccttgagcagtaatggagrtttaggtctaaattaaaatttgctaatttaaaagcatttgcccactaatcgctgctgaagtgcaatcacttggccgctgcatctcaggactgtcctctcatggcctcctgcctctgtccctggaagggttaacccatgtggttctcaactcatgggattttgcccctcatgcgacattaggcaacgtctggagacacttttggttgccttggggagggaggtgccactggcattagtgggtagaggcctgggatactgctaaacaccctacaatgcagaggacagtcccccacaacggagaattatcagtgctgagtttaagaaaccctagatatagaaaactcccaggct

SEQ ID NO: 543623 - DNA, 507 bp, Homo sapiens
gttgccccacctttcttgcccctccaccctgatcttccagcccgcttcattatccagaccatttctgcttttcaccctccactgactccccacaggcttcaattagtaattttaaatggtcaccaattttccttaagccttgagcagtaatggaggtttaggtctaaattaaaatttgctaatttaaaagcatttgcccactaatcgctgctgaagtgcaatcacttggccgctgcatctcaggactgtcctctcatggcctcctgcctctgtccctggaagggttaacccatgtggttctcaactcatgggattttgcccctcatgcgacattaggcaacgtctggagacacttttggttgycttggggagggaggtgccactggcattagtgggtagaggcctgggatactgctaaacaccctacaatgcagaggacagtcccccacaacggagaattatcagtgctgagtttaagaaaccctagatatagaaaactcccaggct

SEQ ID NO: 543624 - DNA, 507 bp, Homo sapiens
gttgccccacctttcttgcccctccaccctgatcttccagcccgcttcattatccagaccatttctgcttttcaccctccactgactccccacaggcttcaattagtaattttaaatggtcaccaattttccttaagccttgagcagtaatggaggtttaggtctaaattaaaatttgctaatttaaaagcatttgcccactaatcgctgctgaagtgcaatcacttggccgctgcatctcaggactgtcctctcatggcctcctgcctctgtccctggaagggttaacccatgtggttctcaactcatgggattttgcccctcatgcgacattaggcaacgtctggagacacttttggttgccttggggagggaggtgcyactggcattagtgggtagaggcctgggatactgctaaacaccctacaatgcagaggacagtcccccacaacggagaattatcagtgctgagtttaagaaaccctagatatagaaaactcccaggct

SEQ ID NO: 543625 - DNA, 610 bp, Homo sapiens
tcctgcacctccgcggggttttagaatttgaagtgcattttcacctgcagtctcctttgagtgtcctgatagccacattaggtcagcaggacgtaccgtattatctccactttacaaaagagaaaccaaggcacccggagatccaccaaaggcccaggctcactttgctgtgagtgacacagtcagaactatcatcctactttctattcccagacaaaagcattttatttccatttagttggacttgcacatgtgatactcacaccagcccttcagcccagttgcaagcccctgtgggacaaaggctgcgtgtcatgcttctacacctcccacaagcctagacactcagagtgaggctcagaaaggcttgttgtggtttcctgcccatgctggaatatggcattggcccccaaagaaargatcttcttgatagccagcccttctattgtttgtgttcttctttgtttggacttgccctctcttctctgcctgctgcttgctgctcctccttctctcaccttccagaagcccttcccttctcgcctatccctccctcatcttccccacttccctgtccctccctctcctgctgtgcatggttgtctgctca

SEQ ID NO: 543626 - DNA, 610 bp, Homo sapiens
tcctgcacctccgcggggttttagaatttgaagtgcattttcacctgcagtctcctttgagtgtcctgatagccacattaggtcagcaggacgtaccgtattatctccactttacaaaagagaaaccaaggcacccggagatccaccaaaggcccaggctcactttgctgtgagtgacacagtcagaactatcatcctactttctattcccagacaaaagcattttatttccatttagttggacttgcacatgtgatactcacaccagcccttcagcccagttgcaagcccctgtgggacaaaggctgcgtgtcatgcttctacacctcccacaagcctagacactcagagtgaggctcagaaaggcttgttgtggtttcctgcccatgctggaatatggcattggcccccaaagaaaagatcttcttgatagccagcccttctattgtttgtgttcttctytgtttggacttgccctctcttctctgcctgctgcttgctgctcctccttctctcaccttccagaagcccttcccttctcgcctatccctccctcatcttccccacttccctgtccctccctctcctgctgtgcatggttgtctgctca

SEQ ID NO: 543627 - DNA, 585 bp, Homo sapiens
tgaagtgcattttcacctgcagtctcctttgagtgtcctgatagccacattaggtcagcaggacgtaccgtattatctccactttacaaaagagaaaccaaggcacccggagatccaccaaaggcccaggctcactttgctgtgagtgacacagtcagaactatcatcctactttctattcccagacaaaagcattttatttccatttagttggacttgcacatgtgatactcacaccagcccttcagcccagttgcaagcccctgtgggacaaaggctgcgtgtcatgcttctacacctcccacaagcctagacactcagagtgaggctcagaaaggcttgttgtggtttcctgcccatgctggaatatggcattggcccccaaagaaaagatcttcttgatagccagcccttctattgtttgtgttcttctttgtttggacttgccctctcttctctgcctgctgcttgctgctcctccttctctcaccttccagaagcccttcccttctygcctatccctccctcatcttccccacttccctgtccctccctctcctgctgtgcatggttgtctgctcacag

SEQ ID NO: 543628 - DNA, 620 bp, Homo sapiens
agacagttattaattattactactgtcacctctccctcatttccaaacacccttattctaccagcagcacaactgcattagtcagggtcccccagataaacagaaccaacagagttctgtttaataaatataaagagatttattatcaggaattggctcacatgattatggaggctgagaaatcccacaatctgccatctgcaggctggacacccaggagagctggtggtgtagttctggttcacgtccaaagcctagagtaccaggagagtggatggcataagttccagtgtgagtgccaaagaagaacaatgccccagctctaaaacagtcaaaaaagggaattttcctttacttctcctttttattttatgcagaccttcaatggatcaaatgaggcccacccacattgaggagggcaatctacctattcaaaggttaatctcatccaggaataccctcacagacacacccagaacaatgtttaaccaaatacctgagcaccccrtagcccagtcaagtccacacataaaattaaccatcaccacaacaaagcccctatcaaacaacatcactagtacccaggtggcaagagcttttaggaacatctactgccatta

SEQ ID NO: 543629 - DNA, 556 bp, Homo sapiens
tgcgatcttggctcactgaaatctccgcctcctgggttcgagtgattcttgtgcctcctccttcctagtagctgggattacatgcatcctccactacacctggctaatttttgtatttttagtagagacagggtttcaacatattgcccaggttggtctcaaactcctagcctcgagtgatccgcccacctttttggcctcccaaagtgctgggattacaggcatgagccaccacacccggcccctaatttgttttgttcaccactccacacttagcccctagcctagatactaaaaaataaatgcttgatggatggrtgaaaggatttaaaactaaaatcttgagtgggtagagctgcatggccctaggaatcaggacacctaaggtctccttgggattcttatcatagccagagatgtttcctggctgctggctctgaaatcacccacaggattcccaagaaagcattgagagagaatgcctgctgtcacagtctggagaaaagacatcctgtggcctctgaatgaactcagcagagccttgcaagtgtcatcc

SEQ ID NO: 543630 - DNA, 625 bp, Homo sapiens
tatactccttatagtcactagaaggcgagagwgaggtggtatttatattgatgtttacatttatagtgaccatatatcctaatttgccagggacagattcaattaataccagttgttccagcatcccatgccactcaataatagttctggagttttcctttaaatgaatggttgctatcaagcattaacataaattgggatttgtttggtctctttactttcagaaacctgtaattaagaaaattatctcttcaacacgtttgaaatatcaaaggtgccttagacaactctaacagatacaacataaaaaatacttcaattggaggacaaatggagagtcctactgagtgaagcaaaatatccgcaagcaggaataactaggaatagctgactccatctagtttctggcagtagtggaaaaatattcaatgctgttgcacctgccaattacttcattaataatcagttgtgccatgtcctgtgcaatattgcaaagccacgagatggcttttttagtgaaaactgtagtaagctgtcagctatttataagtgaaatatgagaaggaaaaagatattcagtatttagactgcatagaaagaatagtctgaacattttggctatatg

SEQ ID NO: 543631 - DNA, 625 bp, Homo sapiens
tatactccttatagtcactagaaggcgagagtgaggtggtatttatattgatgtttacatttatagtgaccatatatcctaatttgccagggacagattcaattaataccagttgttccagcatcccatgccactcaataatagttctggagttttcctttaaatgaatggttgctatcaagcattaacataaattgggatttgtttggtctctttactttcagaaacctrtaattaagaaaattatctcttcaacacgtttgaaatatcaaaggtgccttagacaactctaacagatacaacataaaaaatacttcaattggaggacaaatggagagtcctactgagtgaagcaaaatatccgcaagcaggaataactaggaatagctgactccatctagtttctggcagtagtggaaaaatattcaatgctgttgcacctgccaattacttcattaataatcagttgtgccatgtcctgtgcaatattgcaaagccacgagatggcttttttagtgaaaactgtagtaagctgtcagctatttataagtgaaatatgagaaggaaaaagatattcagtatttagactgcatagaaagaatagtctgaacattttggctatatg

SEQ ID NO: 543632 - DNA, 622 bp, Homo sapiens
ccctcgtgggcttctgtcaatcctatgcttcaaacaagtatgagctaagcctagtctagatgtgacctggaatataaacaatccaatgagtttgacttccttcagaggtggcacctggagaggccatacatttattcaagtgatgccaccattgctaaacacaaggctgtatgcctctttgggaatgtgggagttcagtcattcaactaatgtctgttaagagtgtccaatttccaggcactgtaaaagtgctgggcaaagtcagaggaaagccaatccctgccttcaaagagatgacaacctgttggaagacacagccacgtaatggagtaattggagtggggtgtaaatgtacaggggacatacaagagccacctctgcatgggggcagtcagscagggtctcacagaagaggtgaagcatgaactaactgtactgaagggtcatcagagttcaccagggtgaccagagaggacattccagttgcagggaatagcatatgcacatccacaggaaaatgagaaatcatgtttcagtagggctagagcagaggatgttgtgttgggtggtggagccatatgagggagaatagattggtgggattcataagagccagaattgg

SEQ ID NO: 543633 - DNA, 464 bp, Homo sapiens
tcctcccaaatctgcagtcaaatcactttcaggctgttctcttgatgtggtttttcaattgccatctgaaaggagtgttagtcatcttaataacgtgaattaatcatcagtctggccggctggacaatatcgcaatcacaacaacacagaaatgttccagccagaatgagaacgtaygaacataacttaactcagaaatattgcagctgcattcaacaaacttccaatcaaaagagacctaccagtcatttctaaaattttttggctgttaaagtgcttttgtcacaaaagggatgtcagcagtgtaatttcagactcaaacaagtaacagaattgcaggaattatggacattttgtgatcagaatacctttagccaaatgataaagttatattttgtagaacaaattgaattctgtcctgtgtatcaatttctgaagaatgtaatttttattaataagccatt

SEQ ID NO: 543634 - DNA, 583 bp, Homo sapiens
gcaattgccatcttgataatataatgtatgtctgtgctaccaaaacaatataatatcttgatcatatatttatcatcttcataatgtaacattagctgtctagtggaaaaaacaaacaaacaaaaacctcamacacaatagtttgtgtgtgtgatgataatggacttatcaatgtcatttccatggggtcaactacacactcatgcctgtggacttaggacagcagaggctgctcactgcaaaggaaagagaaactgtggcctgtgggggtccaggacaaagcgttggtgaagttcactgtcgctctgcgtaccctccagcgtccgggtgcaggagtcctttggctctgaggtgcaggtctcaggaagcctcctcagcaccgaggtgtttggatgaacttgatttctaggtgtattactcttctgaaatgatgcacgtcaaaatgacagctaattaacctgggaaaagtgacctctgtagtaaagaggaatggaaatccagcacaaactccactgggaagacacagaaaccctaagggtgaggaagggaggcatggaagaattgctgagcggtgactagcctg

SEQ ID NO: 543635 - DNA, 583 bp, Homo sapiens
gcaattgccatcttgataatataatgtatgtctgtgctaccaaaacaatataatatcttgatcatatatttatcatcttcataatgtaacattagctgtctagtggaaaaaacaaacaaacaaaaacctcaaacacaatagtttgtgtgtgtratgataatggacttatcaatgtcatttccatggggtcaactacacactcatgcctgtggacttaggacagcagaggctgctcactgcaaaggaaagagaaactgtggcctgtgggggtccaggacaaagcgttggtgaagttcactgtcgctctgcgtaccctccagcgtccgggtgcaggagtcctttggctctgaggtgcaggtctcaggaagcctcctcagcaccgaggtgtttggatgaacttgatttctaggtgtattactcttctgaaatgatgcacgtcaaaatgacagctaattaacctgggaaaagtgacctctgtagtaaagaggaatggaaatccagcacaaactccactgggaagacacagaaaccctaagggtgaggaagggaggcatggaagaattgctgagcggtgactagcctg

SEQ ID NO: 543636 - DNA, 583 bp, Homo sapiens
gcaattgccatcttgataatataatgtatgtctgtgctaccaaaacaatataatatcttgatcatatatttatcatcttcataatgtaacattagctgtctagtggaaaaaacaaacaaacaaaaacctcaaacacaatagtttgtgtgtgtgatgataatggacttatcaatgtcatttccatggggtcaactacacactcatgyctgtggacttaggacagcagaggctgctcactgcaaaggaaagagaaactgtggcctgtgggggtccaggacaaagcgttggtgaagttcactgtcgctctgcgtaccctccagcgtccgggtgcaggagtcctttggctctgaggtgcaggtctcaggaagcctcctcagcaccgaggtgtttggatgaacttgatttctaggtgtattactcttctgaaatgatgcacgtcaaaatgacagctaattaacctgggaaaagtgacctctgtagtaaagaggaatggaaatccagcacaaactccactgggaagacacagaaaccctaagggtgaggaagggaggcatggaagaattgctgagcggtgactagcctg

SEQ ID NO: 543637 - DNA, 583 bp, Homo sapiens
gcaattgccatcttgataatataatgtatgtctgtgctaccaaaacaatataatatcttgatcatatatttatcatcttcataatgtaacattagctgtctagtggaaaaaacaaacaaacaaaaacctcaaacacaatagtttgtgtgtgtgatgataatggacttatcaatgtcatttccatggggtcaactacacactcatgcctgtggacttaggacagcagaggctgctcactgcaaaggaaagagaaactgtggcctgtgggggtccaggacaaagcgttggtgaagttcactgtcgctctgcgtaccctccagcrtccgggtgcaggagtcctttggctctgaggtgcaggtctcaggaagcctcctcagcaccgaggtgtttggatgaacttgatttctaggtgtattactcttctgaaatgatgcacgtcaaaatgacagctaattaacctgggaaaagtgacctctgtagtaaagaggaatggaaatccagcacaaactccactgggaagacacagaaaccctaagggtgaggaagggaggcatggaagaattgctgagcggtgactagcctg

SEQ ID NO: 543638 - DNA, 465 bp, Homo sapiens
tgaagaaataagaaaggattacccagaagttctgtctggaaaagttcccataggagaaaaggaaaagaattcaaacttgcagattcacagatcaataactcaggtgggaagaggaagatgaataaattcacacaggtttatgagtacagggrctcatacatgaaggaaggaatggggaaagagaaggctaaatgtaaaaatatacagcaaattcagcaaaatctaaatggctctgtttatccggggatgttttggagtccttgattcttcttagatcttctttagatgctcagtaaactggaccttggcatggaggaaagagaggagaaaggcagagtgagagagtgcaaccaacacacccccagcattcagtcccagtctccaggaccatgatccactttgtaaagaaccaagactcaatcaacagcctctcagtaacctatttagaataatagcatccagaga

SEQ ID NO: 543639 - DNA, 576 bp, Homo sapiens
tctgccttttctactaattcagactctatagaaggattctaggaattatatttacaacaaatagaggtcagggatccctgaacccagagctgcagaccagtatgggtctgtcacctgttaggcactgggtacacagcaggtgatgggggtggtgagccattaccacctaagctttgcctcctttcagatcagcagtagcagtagattctcacaggagcgtgaaccctattgtaactgtgcatttgagggatctaggttgcatgttctttatgagaatctaatgcctgatgatctgaggtggaagagtttcatctcaaagccatcggtcccccsatcctacgtccccccaaccctgtctgtggaaaaattgtcttccatgaagccagaccctggtgccaaaaaggttggggaccactgctataggtgattcccatgaatactaatgcttggaaaacatggaattatggcattttcagaaggaatttacattataaaagagacagaaattacaattcaggctcacttagccattcattcccttgtagcatgcagtaaagcagtacatctcttgatctt

SEQ ID NO: 543640 - DNA, 638 bp, Homo sapiens
ggtctcacgcgtcatgctaaggaatttggatctgattttacaggcaacagagaaataatgaaaaattttaagtaaggtggtggcatgtacagagtttgattycacaaggttttgtggttcttcaatagaaaatgaatcagaaagtagtaagaaagggcagaggcaaggaggttaggtaagacattcttgaaatggtacagatgaggaatgtcaaagggctgaactaagacacagcatagaacagaaatcatatttaatccatttgaataaggtgtcagtcaatggttgggttccctgagcatgagactctgaggcagagattagtatgcattatgtttattatgagatcaacaccttaggaaaagaaggtaaggaagaggattggccatatggagtttagttgggatacagggctaatgaaggccttatctgaccatacagtgagctgtggagctagaatagcccctgagtgttaaccccatggggctaacagggctagcggtcaggaccatattgatgagtcactggatatgggctacatctatgaatggggaataatttgagtgacatgcctatttccaggtaatacctgaatgaggctgagagctgagggtgttctggccacagcactctaagca

SEQ ID NO: 543641 - DNA, 510 bp, Homo sapiens
agaaaatgaatcagaaagtagtaagaaagggcagaggcaaggaggttaggtaagacattcttgaaatggtacagatgaggaatgtcaaagggctgaactaagacacagcatagaacagaaatcatatttaatccatttgaataaggtgtcagtcaatggttgggttccctgagcatgagactctgaggcagagattagtrtgcattatgtttattatgagatcaacaccttaggaaaagaaggtaaggaagaggattggccatatggagtttagttgggatacagggctaatgaaggccttatctgaccatacagtgagctgtggagctagaatagcccctgagtgttaaccccatggggctaacagggctagcggtcaggaccatattgatgagtcactggatatgggctacatctatgaatggggaataatttgagtgacatgcctatttccaggtaatacctgaatgaggctgagagctgagggtgttctggccacagcactctaag

SEQ ID NO: 543642 - DNA, 597 bp, Homo sapiens
tgaatccgcctggtcctggatgttttttggttggtaagctattaaggatatgaacagacacttctmaaaagacatttatgtgggaaaaaagctcaaaccctacttctggctacccacctccaccctacccccagtttctagtaaccattattctactctctacttctatgagatcaatgtttttagcttccacataagtgagaacatgctgtatttggtttaattcacttaacataatgtcctctgggctcatctatgttgccacgaataataggattttgttccttttttatggctgaatcataaacaccacattttaaaaatccattcatctgttgacgaccactttggttgattccatattttagtattatgtatagtcctgcaattgacatgggagggcagatatctcttcaacctacagatatcctttccttttgttacatatccagtagtgggattaagaaatagtcttttaacagtaagcctttggagaacctaatgaactgagcaactatccagaagcatcaatatgtgactatcatgtcttcaaaacaccccccaaatacccagagtactatgaattctctctgaagc

SEQ ID NO: 543643 - DNA, 524 bp, Homo sapiens
ctggctaaaactcatcccagaggataatggcaacccatgccttaaaatcgctgggctgtttcttggtggtgttggaatggtgggcacagtggctgtcactgtcatgcctcagtggagagtgtcggccttcattgaaaacaacatcgtggtttttgaaaacttctgggaaggactgtggatgaattgcgtgaggcaggctaacatcaggatgcagtgcaaaatctatgattccctgctggctctttctccggacctacaggcagccagaggactgatgtgtgctgcttccgtgatgtccttcttggctttcatgatggccatccttggcatgaaatgcaccaggtgcacgggggacaatgagaaggtgaaggctcacattctgctgacggctggaatcatcttcatcatcgcgggcatggtggtgctcatccctgtgagctgggttgccaatgccatcatcagagatttctataacycaatagtgaatgttgcccaaaaacgtgagcttggagaagctctctact

SEQ ID NO: 543644 - DNA, 571 bp, Homo sapiens
aaggagcacatctgacctttgtgcagctcattagtagtaagtgtagaagtaaatatgcaataaagaacagtattttttaatttgcttgtattttacttagaggcatgactcaaatgctttggctcatcagaatactgaatcacattaaggacaatctcattgttaaaaagaaaaaaaaaatggcagtaataaatgattgcctcaagcaatggcataccayacttgaaatctaataaataaaaaatgagaagtagaggacaaattatgaaaagacatctttcttctagtaaatctaacatccagaatttaattttaaaaagctcaggattatctaccaaatagaagtaacattaataatttaaatattattgcatgtaccgtttgttagtatttataattttttggttttatggtttttgaaagtttataccatgtttttatctgaaaatagttgaagtaatatatcataaatatgttgctaaaaaacttgtttttctaagctatttgaacatcattcacagttgagaagcactttgctaatgccccagttaaagtgtttttaattataatt

SEQ ID NO: 543645 - DNA, 507 bp, Homo sapiens
caaattataagtagatttcattcattaattagtttctgtccagggcacgcatacagacatttcaataaacatgaatattgaaactaagaagctatgtctgggaggctatgcrattagcacatgaaacttcatttagagaattaggaagtcctagaaaactcttgatttgtcagttatatggctatgtgacactgaatccattataaagaaatattaaatatctgtcagatatttgatttacatagtaccaactaaacaatgtgtttggtttttcattgaaatgtttaaagactgcaaaatcctcgtgccgcagttacatctctaattcaaggttaaacgttcaaaataattctcatcgaaataatatgagattatgcattttaaagtttcattcctctttttccttacagattatacaaatctttatgtatatgttccaagaatttagaataagatatgtgtatctaacttagttaacttgtaaggaaagcaccaaataccagattt

SEQ ID NO: 543646 - DNA, 507 bp, Homo sapiens
caaattataagtagatttcattcattaattagtttctgtccagggcacgcatacagacatttcaataaacatgaatattgaaactaagaagctatgtctgggaggctatgcaattagcacatgaaacttcatttagagaattaggaagtcctagaaaactcttgatttgtcagttatatggctatgtgacactgaatccattataaagaaatattaaatatctgtcagatatttgatttacatagtaccaactaaacaatgtgtttggtttttcattgaaatgtttaaagactgcaaaatcctcgtgccgcagttacatctctaattcaaggttaaacgttcaaaataattctyatcgaaataatatgagattatgcattttaaagtttcattcctctttttccttacagattatacaaatctttatgtatatgttccaagaatttagaataagatatgtgtatctaacttagttaacttgtaaggaaagcaccaaataccagattt

SEQ ID NO: 543647 - DNA, 560 bp, Homo sapiens
gtctgggaggctactcagagatggccactagataaccaggctacatatgatatttgctgggacacgttccccacgtggaaactccagccccacccagtcccatttgccactcaccttggaagtgttaggagctttygtgggggcacatttaggccccactgcagatcagaaatcctcagtagctccaggggcccacagcgtaaagcccagaggccttcgggtgccatccaggacattttgtcatctcctcccaactgtcctctccagccccttctgcctttcctctcccttggatcttctgctcagactggccccctctctgcccacctcacccctgactcacctaggatgttccccaggcctttgaccccatgtgccgttagtaccgaaggtgggggagcactcgctttctccctggatgcccaccaaatcccgccacacattctaggaccagttctaggaaacctgcctccactgggagtgatttctgggcgtttctccagggtggtgccttgtattaatcacctctgcatctgcagtggttggtatggtgtgaagaa

SEQ ID NO: 543648 - DNA, 560 bp, Homo sapiens
gtctgggaggctactcagagatggccactagataaccaggctacatatgatatttgctgggacacgttccccacgtggaaactccagccccacccagtcccatttgccactcaccttggaagtgttaggagcttttgtgggggcacatttaggccccactgcagatcagaaatcytcagtagctccaggggcccacagcgtaaagcccagaggccttcgggtgccatccaggacattttgtcatctcctcccaactgtcctctccagccccttctgcctttcctctcccttggatcttctgctcagactggccccctctctgcccacctcacccctgactcacctaggatgttccccaggcctttgaccccatgtgccgttagtaccgaaggtgggggagcactcgctttctccctggatgcccaccaaatcccgccacacattctaggaccagttctaggaaacctgcctccactgggagtgatttctgggcgtttctccagggtggtgccttgtattaatcacctctgcatctgcagtggttggtatggtgtgaagaa

SEQ ID NO: 543649 - DNA, 622 bp, Homo sapiens
ttggacaaataggattaggatgggtggaaagaagcagagaaggccatccaggccagagacacatgggacatggtgggggatgtttgtgttagatcatcctggctagagccagttccctgctacatattctcatgctgagctggtcttctccttcacaggacttatcaccatagttattgattatgtgtttgtgtgtttgtgtgattatttgattaatgtgcatctcgtcctgtactgtcaggtccatgagggcagagatcatatgcgtgcccagttggatcccaagcaccaattttggtagttagtccaggcttggtgaaaaagaaatgagaatgaataaagctgcagagatgggtgtggggtggcccgcgatctggctgttaggagtttgaaatcttttggaagatattaatttaaacaattactgtatggattccagtggaggggcacatgcttgctttgggcttctcctaggctgccaggttactgtaaggactgtctgaggaaagtaagctctggggaagaaggcatgggacccwgccatgccaggccaacccatcagcagaccccaaagaaaagtggacaaagaaacacaagagtttttaaggagatatttgatata

SEQ ID NO: 543650 - DNA, 569 bp, Homo sapiens
gatggtgagcatatttcatgtggatccgtaaatttttagtaatatttaaaagatttcagcaggccaggcacggtrgctcacgcctgtaattccagcactttgggaggccgaggcaggtggatcacgaggtcaggagatcgataccatcctggctaacacgatgaaaccccatctctactaaaaatacaaaaaataatttagccaggtgtggtggtgtgcacttgtagtcccagctacttgggaggctgaggcaggagaattgcttgaacccgggaggtaaaggttgcagtgagccgagatcgtgccgctgcactccagtctgggtgacagagcgaggcttcatttcaaaaaaaaaaaaaaaaagatttcagcaatagagaaaaatgtaatggaatatctggaaaacctttatacatccatcttacctcttgaaatgtttctggttttcaacaaacatgatgttttgtgccttccactgtgtggagtggctctagatggtggtgtcatcaatagccacccgctcatctcagactgcttgaccttgaagcagtttctggaaatgcccctga

SEQ ID NO: 543651 - DNA, 642 bp, Homo sapiens
tgtaacacttagcaattatgaacagtgagcacccactaagtgtcagcactgttgcatcatcctctttaatttctatagcagtcatgaagtagattctgtgattacctcattttacagataaggaatctaaggtcagaaaggtaaaggaatttgcccgagtaaatggcagagccagaattcaaacccaggcagtctatctccagaaacatcactctcagtacctcacacactgcctctttcccgggggaactgccaacccraggcgtgcagaggctggcagccatgctccctgctgtgtgggaaagccgcatccaagccaatctgcagagaagcagatatgagcgatggaaatcagaacttggcaacatttgagtccttagttctgcatcctttttctcctttcccatctcttggtttggttacatgaggcaataaataatcttttttttttttttttttgagacagagtctcaccctgtcgcccaggctggagtgcaatggtgtgatctcggctcactgcaacctccgcctcctgggttccagcgattctcctgcctcagcctcccaagtagctgggattagaggcacgtgccaccacgcctggctaattttttgtatctttagtagagacagggttttacc

SEQ ID NO: 543652 - DNA, 609 bp, Homo sapiens
ctgtgcacgaccacaagctcaaaaggataaccttctgccctctcgactttgaaaccccaagacccagaaaactgctagcccagcatcccttcttttcgtgccacagccaagaaagcctcctcgccaaaaaccacaccttgtcactgggaaggrctcaagaaaagctactgggaaggaaactgaccccagagttcacccgtctggtttctaataataagctctttcaaactctccctttcctttatttccatttcccagtttctctctcacttcttcttctgacccaaaatgggtgtcatgaagtgcctccagtccctttcctggttttacatcttcaacaagattgattgacatccctttatctcctctagctatgcttggcattttggctggtgactgcaaagtggagtctgtggagtactcttggcatatttcaaatggttgcagattttcaggtattgtgatggggcaacatggtcttgtagaaagagaacttgttgggatgttcaactccatcttaaccagtggtgagactgtgggcaagtcgacaagaaaaacctttgcgttacaaaggggatgcggggaggggaacctggttctccaccccat

SEQ ID NO: 543653 - DNA, 609 bp, Homo sapiens
ctgtgcacgaccacaagctcaaaaggataaccttctgccctctcgactttgaaaccccaagacccagaaaactgctagcccagcatcccttcttttcgtgccacagccaagaaagcctcctcgccaaaaaccacaccttgtcactgggaagggctcaagaaaagctactgggaaggaaactgaccccagagttcacccgtctggtttctaataataagctctttcaaactctccctttcctttatttccatttcccagtttctctctcacttcttcttctgacccaaaatgggtgtcatgaagtscctccagtccctttcctggttttacatcttcaacaagattgattgacatccctttatctcctctagctatgcttggcattttggctggtgactgcaaagtggagtctgtggagtactcttggcatatttcaaatggttgcagattttcaggtattgtgatggggcaacatggtcttgtagaaagagaacttgttgggatgttcaactccatcttaaccagtggtgagactgtgggcaagtcgacaagaaaaacctttgcgttacaaaggggatgcggggaggggaacctggttctccaccccat

SEQ ID NO: 543654 - DNA, 609 bp, Homo sapiens
ctgtgcacgaccacaagctcaaaaggataaccttctgccctctcgactttgaaaccccaagacccagaaaactgctagcccagcatcccttcttttcgtgccacagccaagaaagcctcctcgccaaaaaccacaccttgtcactgggaagggctcaagaaaagctactgggaaggaaactgaccccagagttcacccgtctggtttctaataataagctctttcaaactctccctttcctttatttccatttcccagtttctctctcacttcttcttctgacccaaaatgggtgtcatgaagtgcctccagtccctttcctggttttacatcttcaacaagattgattgacatccctttatctcctctagctatgcttggcattttggctggtgactgcaaagtggagtctgtggagtactcttggcatatttcaaatggttgcagattttcaggtattgtgatggggcaacatggtcttgtagaaagagaacttgttgggatgttcarctccatcttaaccagtggtgagactgtgggcaagtcgacaagaaaaacctttgcgttacaaaggggatgcggggaggggaacctggttctccaccccat

SEQ ID NO: 543655 - DNA, 266 bp, Homo sapiens
attctcatattttctagcccatcctattctagtctggtctattttttttacttgaacatcactgttttttctttttaagacactgtctcactctgttgcacatgctggagtgcagtggtgcaatctcagctcactgcaacctccacctcccgggttccagcgattctcctgcctcagcctcctgagtagctgggattacaggcatscgccaacaggccaggctaatttttgtatttttagtagagatggggtttcacaatgttgga

SEQ ID NO: 543656 - DNA, 266 bp, Homo sapiens
attctcatattttctagcccatcctattctagtctggtctattttttttacttgaacatcactgttttttctttttaagacactgtctcactctgttgcacatgctggagtgcagtggtgcaatctcagctcactgcaacctccacctcccgggttccagcgattctcctgcctcagcctcctgagtagctgggattacaggcatgcgccaacaggccaggctaatttttgtatttttagtagagayggggtttcacaatgttgga

SEQ ID NO: 543657 - DNA, 543 bp, Homo sapiens
tacaaaaatgtaataccatcaccattcyttcactaacttattttggaatatagtttttcattaaaatgttatttattaaatatattaagctgggtatgcacacctgtagtcccacctatttgggaggctgaggcaagaggatcacttcagcccaagagctcaaggccagcctgggcaacacagtgagccactgttactaaaaaaaaaaaaaaatttaattaaaattaaaatgttatttatattaagctgtagtttaattatttcaaatgaattaatatatatgaaattaattcctaatacagtaactatcaatagatataaacctatataaacaaaagctacttggagtcctacataatttttaagagtgtaaggggatcctaagaccaaaaagtttgagaaccactacattaaagtaatacttaataccaccttttaatttaccctctgagtttttgtgtgaatcttacacgtgctgccataaatgtctaaaggaagctgaacagagcagaggatataaatcttcctttaagcattgtaatg

SEQ ID NO: 543658 - DNA, 610 bp, Homo sapiens
gggaggaaaaaagctttctcttttaagatggcttccccctccccttttacagattggattgtttcttggatttgctggagagctgctttcgctaattgcttgcagactgcagtccagtccggcctgccaactgtggaggcggtgtggtggggctgagtgataaagagtaaggggtttagacgcaggcagacctgatttggaactccagttctkccacttcctcctgcgaaacatcaggcaggttgcttaacctctctgggcctccgtttctgcatcagtaaaatgaggatgctcacgggtgagttgagagtaacacaggattggaacatgtacatacttgtcacagtgcctgacccatagtaggtactcctttaatagtaaccattattactactattgtctttggtatgtcacacattacaagtgccacctggaattgagtctacttgagcctgagacttagaaatgcaggcaagagactctagaaggctgtcaagcacttgtagacaggaaaggatggcttggttgaaagatggctccactgctgtcactaggggccctgccccattcagtcttgcagcaggctggcagactggccaccttaaagcca

SEQ ID NO: 543659 - DNA, 495 bp, Homo sapiens
agcctcaaactcctgacctcaagtgatcctcctgccttggcttcccaaagtgctrggattacaggcatgagccaccacacctgacctcagttgtttctttatcttaaagccggcagcattagagactttttactaaactgttaatgtgacatttctgatgtcagatgtattctgtttcaatagctgttctttaaaatcaggctttacaagcagactattatactacaggtgattgtccaacagaaattttgggtacgatgcttttccttttggaccaaattctaaaagcagttgagctgcaagggtgcattgtataaatggtctagacaatgcaaccagtggctgaagacccacataattactgtataaacactaatttgtatgctcttttgggtttatttcaaaattaattacttagcttttttaaaaagctagctccaatttctaggagatgcaccatagacacaagactacagtcaccagctacagttacca

SEQ ID NO: 543660 - DNA, 461 bp, Homo sapiens
cttcatctctactaaaaatataaaaattagctgggtgtggtggtgggtgcctgtaatcccagctactcaaaaggataaggcatgagaatcacttgaacatgggaggtggaggttgcaatgagctgagatcatgccactgcactccagcctgggcgacagagtgagtgagactccatctcaaaaaaaaaaaaaaaaaraactcctcataattactctttcaccagaagcttttcttatctggccttatatttctatagacttctgttttaaaaagattccatgaactcatgtgcagatttccggagtacttttatctgtgtagccccttcccttgagaactctgcctcacaggttcttcacagagccgcctggccttccccatctctgacctctgtctctgcagctctgtgaagctgcctcacttttttggagttctccctccctggactgtagcccaggac

SEQ ID NO: 543661 - DNA, 151 bp, Homo sapiens
ctgcccagcctgggcacccacagcccagcttctctccacatgcagacctgtcctccctgactgctggcccagctcctgcagtcacccagcagctaccagagggccyggccaaaaatcacacaagacttttactcaagttttctaaaataag

SEQ ID NO: 543662 - DNA, 634 bp, Homo sapiens
ggccagtcacctcaagggtgtgtagctcctgggcgcggacaaagagctgcatattggtgactgaaccgcggtcccagctgccactactgcgaagatggagtcgagaaagaggaagaagcgagggcgcgtccgtacagaccgcgggctgcatgtcacgtcactgctcagtcatatttatacctacttttaattacatgtggactaagaggtggtttatggagaaatttccaggtaaaaggcagtaactttggggttgtcaggtcattgccatagaaaaaggcagtaactcccgggtattgccgtggcaatggtaaactgacatggcacactggtggttatgtcttatggaaagctgcttcaaccccattccagttttagctagtcctcaacttggtccagtgtctaagccctgccstacatgttgagtctcaactcccacctcaagggcaccacagcagagagcagagagctgcagccaaaaccccaggtttcatgggactggctcattcatgctgggcagatggtcccccgacaggtctcccctaaagtgctccaagtccttctcaatccctgtatgtcacaactcttattttaattaggcataaaaattacataatgcagaaattacataatg

SEQ ID NO: 543663 - DNA, 591 bp, Homo sapiens
gcactgactcacagcagtgttataaatggcttttgggaatccaccctgcctacagtatcccatattttcatcaggtttcagaaattactccactacttgaatcttctagattctatgctttttcraaactgttatattgtgactgtgctgtttttactggaactatagttacttgatactgtcactgacataggaatcatcaggagagattatatttttttctggctaaccagaaaagtttgtttttcctgtgaaattttttttttttgaaggcaataggtgtttaagatgttttttttttttctttcagggattcacagaactacttcctattgatttgattaaaatttttgatgaaaatgagctggaggtttgtattataaacattattttatgtaaagtggattttttaaagtatctctcattactttacaagtaatattttaatattcttggatccataatgtcctagagagtaactttagatgaattatattacatgtctcttatagggcttatttgccaatgtggttctattacatgtctcttatggggcttgtttgccaatgtaggagtaaggaacagcaaaaa

SEQ ID NO: 543664 - DNA, 551 bp, Homo sapiens
gggacatttagagtttgggtgacttgaggaatgtcctacgatgagtccattaggcttttggagacgagggccctgagagaagctggggctagagatacacttgggaattgtccacatggaggtactaacttaagccatgagaggargaggaggaggaaaaggagaaagagacacagagagagagagagagagagagctcaccaagaacaaattattggggaacacctacctttaggagaggagaaaaaatagtaggagtatttgaagagtgagagagtaaccagaagattgaaatgtcatggaaaccaaagacacagtatcaagacagaagaaatcatcgataacactgaaggcagcacactacgggggagaaagaagactgggaattggtggttagatgtgaccacctggagatctgccatccccctgcccacgtcccaaagagcaggtagatgcccttgcgcaccagtcaggaatgcaatggggagtcatggaaaattttccagcagaagattgacaagatcagagtttgctggaagcaggctcacatg

SEQ ID NO: 543665 - DNA, 517 bp, Homo sapiens
gctgtccttccatgtggtgaggcrtcgcacacacctgggcacagatgcaccccatccttctctgcaacctgtggtcggggagccggaggcagagaagggccatgggtggcgatttgctttctacaacaactggaagggcagaaagtgattccaaacatgacttacagcaatgttgtgaacttaatctcaaaaagctccagaaaacttgttactagcatgacaaagtcatctctgaaaaccaaccatccattgtcaatgagaaaaacgcacaaaatttgaggaaagacaaagaaagcacttgttagtgtttttctggaaaaaaaaaatcccttcttgcccaagagtaatatatgttcattatagagctttttaaacttcgaggaagtaaaaaaattgaaatgaaaactgtccacatttcttttgcccagagatggccactgtcagcactgttgcaagccctgctctctctcctctccttttctgtacgtacgtgtacttttaaaaataaacataggcg

SEQ ID NO: 543666 - DNA, 517 bp, Homo sapiens
gctgtccttccatgtggtgaggcatcgcacacacctgggcacagatgcaccccatccttctctgcaacctgtggtcggggagccggaggcagagaagggccatgggtggcgatttgctttctacaacaactggaagggcagaaagtgattccaaacatgacttacagcaatgttgtgaacttaatctcaaaaagctccagaaaacttgttactagcatgacaaagtcatctctgaaaaccaaccatccattgtcaatgagaaaaacgcacaaaatttgaggaaagacaaagaaagcacttgttagtgtttttctggaaaaaaaaaatcccttcttgcccaagagtaatatatgttcattatagagctttttaaacttygaggaagtaaaaaaattgaaatgaaaactgtccacatttcttttgcccagagatggccactgtcagcactgttgcaagccctgctctctctcctctccttttctgtacgtacgtgtacttttaaaaataaacataggcg

SEQ ID NO: 543667 - DNA, 474 bp, Homo sapiens
gagtgggacgtggtctgtccacccctcattaggtgagcaagcgcagaaaacgcattttcatcccccaggcttctgtatactctcgtgtggaataaaaactctattgctccggtctgcatgttggtgacgccccagaatccygatgtgacagcctcgtacctgaagtgacagtgttcagggtgggggctttgaggagtgattaaatcatgagggctgcaccaacgtgaatgggatttgtgcccttataaaacaggctggagcatgttcctgtgccccctttggccacgtgaggacaccttgaaaggccactcacgaggaacagtccaggcactgaatccactggcgcctccagaactgtgagcagtaacattccgttgtttataaattactcagtctccagtacttggttcctgcagctagaacaggctaaggcctctgtccgtgttccagggaagcctccacagggcagtcact

SEQ ID NO: 543668 - DNA, 626 bp, Homo sapiens
gactgccaagagggaaaaggtttcaggaccaggaagaaggtcagcaggagagcagccactgcatctccatatggcggttgggccggggtccccaggaccacctcaggcttgatggttcacgagaaggactcccaggactcagcacatgatctaactcccgcccacccactagagcgaccgagtgtccggcacagccggtcaagggaaaaggtgtgtgaggtgaggtcagaagaaggcaggcaccgtctccagcaccctctcccactggacccactggactcactggacctgcgaattctctcagcaaagagcggcaacacgtgtgaagtgttgtccaccagggcagctccttagaccccccagggcttctgctgggggtctcacacaggcaccctcttcttggcgtgcaccaagattccagaattcgagaaggaatgcaggtgttcaggaaaaacgcctcgggcatggagaggcactgtcaggttgctgggagccctcctgaaatccgagtccccagaggccagcccagggtcagcctggtaagcagaccctatakaggatggcagtcaggcctgcttgttaactcttttctgcatcatcctttgaagggagaagtcaaaaagagc

SEQ ID NO: 543669 - DNA, 587 bp, Homo sapiens
gctcacaggattactagtggcgcaaagttcactggatcctaaagctgcagcgcctttcttctaaaataggaatgagatcatttgcaagtaagtaattttaaaaagcaatttctgttaggaatgtctcaatgacttaatttttttttttaacaaaagcatgactttagaactttacataaattatccttactttttctcattctagacacgtcatgtttcattcctgtagtggtaaggtttgggtagcaccagttatttttgtatagaatcttttcattgcttcaaaaataaatcataattcttttttaagagatacaggctttgtgctgtaaattaatgtgagtgcatctctgtcccscattatactaaacatttttgcatagaatatttgttctgcaggacattatcagtagctttccattttactgcatgtagatggacctgctgctttaattaatatgtcactccccgagtgatacaaaggaattatttacctcgtttctaaaacactaaactaactgagctcacttgcaacttccggcacggtctgtttatttccattgcatttaacaaaattaaaattttga

SEQ ID NO: 543670 - DNA, 597 bp, Homo sapiens
acgtccctgttcctggcccaccctgaggtgccagccgcacctgttcgcatgagtcacgaaggctcctccctctgctcgtgtctcctacatctgcatcctcacctttgaaaagagtctcatctgaagtctggatcaataaactgccaataaacggaaaacagccttgctttttgccttttccatgttcaagtcttctaatacaggtgttaaaatggcataaagcatttttcttcaatattttgggactgaactgaaaatggtatctggagtgacactgtgaaagggttaaattgtttactaaataaaggcaccatccagggcatggaaaggtgcatcctttatttaaaataatttttaaaggaaattatctatcttaaactccatactttcattcacttgcttcctagaacttaagtgttttcaggataagtatttggggcacgggactggcacatgttccaggccactcattctgcacagtttgaggaatatgtttacggcgcaattttgcacactctcatgttgccacacgtccggagcttgggttgaasgagcacagcagcaaagatgtgctttgttttacagtgaggtctgtgc

SEQ ID NO: 543671 - DNA, 593 bp, Homo sapiens
tcacgtgctattccatgtcacactgctgtcaaaggtgagaacacttctgcctttaagccctcagtccaggggaggaaataagaccacatccatacgggggcatctcaactggattccacctgaagtcactgtaattttggggggagataataaatcaacattttgtgtgatacatactgagatttttcaaattgacaagttcccctaaagcatagactgtcttctgcagagggaactgcaacagcgtggatgactgaaatgagctgagactcacccgccaggtgaggaggcccctcctgagagcaggtgagcgggctcatgcctcggaaacatcgtctgcaatggccaactcaaggccgctctcagctaccaagcacttgtgggagctgctcaygcgaataaaacctgagcctgccctggggtcctgacccgaacgagtgattccacaaagcagaagcaacggcccacagacctgtgccccagtgcgtgggaatgatggtgcacacagtgtggttaaggtctggcacgtgtcccgagcagaacaacctcagccccaacagcctggagtgcggcccacctagtgacttgcacca

SEQ ID NO: 543672 - DNA, 361 bp, Homo sapiens
gatccgtatgaagtggtctggaataaaattttaatwttccccgtggatatccaattttcccacaccaatttttaaatagtcaatttctacctaactcccttgtgattctacctctcttccatgttaaagcacacttttcaaagagttaaaagcaatttttatgcaactatacagtcagcttttgtcaaaagtgcagtaagtctttaaaacatttttttagagacagagtcttactctgtcacccatgatagagtgcagtggcactatcatggctcgctgcagccttaaactcctggtctcaagtgatcctcctgtctcagcctacccggtagctgaggactacaggcatgcactaccaagc

SEQ ID NO: 543673 - DNA, 578 bp, Homo sapiens
caagaccacggacatggcaagacygcagacacagcgagactacgtacatggcgagaccacagacacggcgagacaacagacatagtgagaccacacacacgacgagaccatggacatggtgaggccatggacatgagaccacagaggcagtagggcacgaacatgccacagacaagaccacctacatggggaccccacaggcaaggtgagaacactgacacaggagatcatggatgcagggagatcacggttgcagtgggatcatggacacaagacagtggacactgtgagacaatggggctgccagcatggcaagaccaccaccacagggagatcatggacatggtgaggccagggacatggtgaggccagggacacggtgaggccagagacatggtgaggccagtgacacatgtgtgaacctccctaagctccgtgtaagcatctcgggccgtgcaaggagactgacgtgacaaagcagccacggccagaggtgtgagaaagacaggggcctaaggacatcgcatcctccccagtctccccagccttctctgcctgctccgcctgcttgggacctg

SEQ ID NO: 543674 - DNA, 573 bp, Homo sapiens
gctggaacctgggaccaggaatgasaggaagtcctgcactgagcagcagcagggatgaggatgttggtggccactgtggacagtatcagggtaggacgagggatgtgtgtgggtctaggatcagaagtcgagagttctagtttaatcggactcaacctgagatgcctgtgaagctttcaggtgaacttcagctcagaaagtggtagctggctgtgtacgtgtgggagttcagtcccaactgggtgccgttaaagctgggtggagacgtgcagggagagacgtgaaggtggctcagatccaccagaaagaaaaccaaggtgagaggctggagggcattttgtcactctccggactctgctgccctacactaaaaccccgtgaaggggaagaagggatagagcggaagaggaccttgcagtgggtcctgctgaccctcttacgcagacctcctctccgactgcatgtgtctgttgtatctctgaagaaccctgaaagcccctctctttcctttaatcataaaactcttcttgagaaagcagcgcaccctcgctgtctccacatgtcaatcatctg

SEQ ID NO: 543675 - DNA, 443 bp, Homo sapiens
ttttttagaaatatgtttagttagacaaggctctagaagacagaayattgtctttgcagattctagaacaaatcagtttgatcatcagaattacctatgaattcttttttatgtttctttgtgtggctgttctgctgcagacagcccaagggccaatatttgagaggcactttacaagcagaaaaagcacattttctataacccagtgagataaaatgcaattttattgaataaaataaaagcctgtcctatgatactgccctttacattaagtgtatttttgccaacaccatgcaagtatgcatttggaaggtgtcctctttgtagaagcccaggttggcgtgtgggctgcagggggcggtctggctgaggccacgcaagaagctggagggctgcgcttcaggagaactgccagccttttttgcggcagggaagatgttgct

SEQ ID NO: 543676 - DNA, 490 bp, Homo sapiens
tacacacaccagccagtcctacactaacaaacagctaaggagatcaggaatagcactccttgtggggtagacagrcacacagatgctgatgacccagacactgtagtgtatgaaaagaagcaggacctggctctgctgaagtatgggacctcgagggcagatcacaaaccctccccacaaggggattctccactatcaatcaatcaatcaatcacttctctaggtgctcatcccagccacagtctgaggatgccccacctctaagtcacaccttccctgtctgaaacccccacccgcagccctactccagtcatggccaaacctggttgtcccatgctggtcacaaagtaacattttactggcacccactggacatgaagatttaacccaaggcagcattgttcttggggttcttggacatgtcttgatgagccaaggtgtttctggcaggtgcaagggccgctgtggctccactggccctagttacagc

SEQ ID NO: 543677 - DNA, 546 bp, Homo sapiens
taccatcccagaaagcagggctctctggtttgaggcctccatttacacacaccagccagtcctacactaacaaacagctaaggagatcaggaatagcactccttgtggggtagacagacacayagatgctgatgacccagacactgtagtgtatgaaaagaagcaggacctggctctgctgaagtatgggacctcgagggcagatcacaaaccctccccacaaggggattctccactatcaatcaatcaatcaatcacttctctaggtgctcatcccagccacagtctgaggatgccccacctctaagtcacaccttccctgtctgaaacccccacccgcagccctactccagtcatggccaaacctggttgtcccatgctggtcacaaagtaacattttactggcacccactggacatgaagatttaacccaaggcagcattgttcttggggttcttggacatgtcttgatgagccaaggtgtttctggcaggtgcaagggccgctgtggctccactggccctagttacagcccagaagctgatt

SEQ ID NO: 543678 - DNA, 546 bp, Homo sapiens
taccatcccagaaagcagggctctctggtttgaggcctccatttacacacaccagccagtcctacactaacaaacagctaaggagatcaggaatagcactccttgtggggtagacagacacacagatgctgatgacccagacactgtagtgtatgaaaagaagcaggacctggctctgctgaagtatgggacctcgagggcmgatcacaaaccctccccacaaggggattctccactatcaatcaatcaatcaatcacttctctaggtgctcatcccagccacagtctgaggatgccccacctctaagtcacaccttccctgtctgaaacccccacccgcagccctactccagtcatggccaaacctggttgtcccatgctggtcacaaagtaacattttactggcacccactggacatgaagatttaacccaaggcagcattgttcttggggttcttggacatgtcttgatgagccaaggtgtttctggcaggtgcaagggccgctgtggctccactggccctagttacagcccagaagctgatt

SEQ ID NO: 543679 - DNA, 637 bp, Homo sapiens
aagccccgagctctgcccagaggatgtagggtgagtgagaggcgagcggcaggagtgggtggtgcagacagggagcaccactgaacaccctcggctgccatttctgccttcttcccaggaccccacggagtgggcattttcttccctgggtcccttgaatactaagcggcagrggtgggattcaaatctgaggccacacacctgcaaggctggatttgtgcctcaggtggggacaggacaagggcagaggtgaagtgggagcccctgactctgcagtggaggagctggggaggcttcctggaggaggtgaccccaggcagagaaaggaggagtttcaggcagagggactggcatgtgcaaatgtggggatgggggcctggcccccaaggctgtgaatgccttggtttgtgtctgcctctccagtgtatcctcccctgccacacacacaccagcctggacaaccccagagcacaagggctgggacagtgcccagaaaaggcaaagtgactgaagaatgaattcaaataaattaatcctgttcatgctccatgagcactcttgttccacagaaagctcccatgcctcaaaggtccttggaccaagtgcctcgggtctgtgcccggctagaagtgtattc

SEQ ID NO: 543680 - DNA, 637 bp, Homo sapiens
aagccccgagctctgcccagaggatgtagggtgagtgagaggcgagcggcaggagtgggtggtgcagacagggagcaccactgaacaccctcggctgccatttctgccttcttcccaggaccccacggagtgggcattttcttccctgggtcccttgaatactaagcggcagagstgggattcaaatctgaggccacacacctgcaaggctggatttgtgcctcaggtggggacaggacaagggcagaggtgaagtgggagcccctgactctgcagtggaggagctggggaggcttcctggaggaggtgaccccaggcagagaaaggaggagtttcaggcagagggactggcatgtgcaaatgtggggatgggggcctggcccccaaggctgtgaatgccttggtttgtgtctgcctctccagtgtatcctcccctgccacacacacaccagcctggacaaccccagagcacaagggctgggacagtgcccagaaaaggcaaagtgactgaagaatgaattcaaataaattaatcctgttcatgctccatgagcactcttgttccacagaaagctcccatgcctcaaaggtccttggaccaagtgcctcgggtctgtgcccggctagaagtgtattc

SEQ ID NO: 543681 - DNA, 582 bp, Homo sapiens
ctggaaggcagtggcatgatcatggctcactgtgcctggaacttctgggctcaatctatcctcctgcctctgcctcctaagtacctgggaccatacggactataggcacatgcaaccacatgcaactaaaaatttttttttttttttggagagacaggggtcttgctttgttgctcagcctatgaattcttcccctcaaccactcccccagtctattaattcttttcttttttgagacaggatctcgctcttgtcacaaaggctggagtgcagtggtgtgatcacagctcactggcagcctcaacctcctgggctcagttgatcttcctgtctcagcctcctgagtagctggaactacaggcatgtgccaccacacccagctamttttttatttttttgtagagacggggtctcattatgctgcccaagctggtcttgaactgctggactcaagcaatcctgccttggcctcccaaagtgctgggattataggtgtgagccactgcccttggcccaaattctttgaaacattaaaataggtagttctcttagccaggtgtggtggtgcatgcctgcagtccc

SEQ ID NO: 543682 - DNA, 648 bp, Homo sapiens
cagcgggctctgagcatccacctgcattccagcatttcacagagcagaggttcagtgggagatgctgggcccctccagaagataacagacaccagaggcctggtattcagacaccagaggcctgaagcatgccctgcagcaggaatcctccaatctttccacacacactyacattatggcttctaattgctactcagaaaaaacacagacaaacccacacacaacaacaacaaattgggaagactttctcatcaacattattgtcctattttttttttattgagtaaattatcaactaattccagatgcagatgcataatacgataatattattaacttgaatatcttaagggattagccaataagacccacagagaccactggtagcttctggatcagagggaacaattaaccccctcaaaattatgatgggaacccacactcctccgatgcagcccttggctgcattgttcatagggaaatttgtccggcatgaaactaggggatggtggggtacaggacagtgaagcccgctgatttgtactccagaggcagccattgtcccatctttggccccctgggaaactgttttgacacatggtctgcaacaatttcacacaactggtaaactacatcattagtattcag

SEQ ID NO: 543683 - DNA, 507 bp, Homo sapiens
ttgggatcataggtgtgagctaccatgcccagcctcagtgacttttcacaaatggcatttatgctgaatactgatattcagctgggtgaagagagggtgaacgggtgaaagttacagtgtaactttcctactgtcttcctaagaatgggaataagtcttctgcacatytgaaaagttataaacaatattattaaaagccatatcagggatttactacgaagataggaccccagagggactaactgcgtcttctagtagagtaaagctcgtctctggccacccagcgggccagtaacacagtgtcctggtaggcagactggtgtatcaggtttcagaggatgccccagggaacaggactagaagtatatgagctctttaaaagcacaaagcagtcgtttccatgttcagattatttagagattatgaaggcaccaaccctgctttcgatctgcatacagtcaagtggagcagacacaagtcaataatcgcagtagagccacttaagtt

SEQ ID NO: 543684 - DNA, 642 bp, Homo sapiens
ctgaaagcttgtctcatatcagaaaatctgagaacaaaaataatctttaacagacatagaaatattgaatttcaaattcatcrtttttcatcatagaaacaattatttcaagttataaaatcaaaagatttaaaaaataagcatttatttatggcccaaaagggaatgacaaaaatgtacaatacaaacaacctgtaaaattgaatctataactactgtcacaatgttttaataactcctaaaaataccaaaccatagcaacccacatatattctcctatgaacattctgaagtttttagatttacattacttttgtcaataaccaagaaacgaaatgtggtgactccataattcacatgtgtgccattctagccctaaaatacaacacccacattaagctttgattagaagcacacgctcacaactcaaaacatgaaggtgtaaaaattctgattactttaaaacattatggtgttcaagggggaaataccagtttattattatttttgtatctatctgttaatttggggaaaggaaagagttggaggacaggaattggttttggggtgtttggtatgatacctggaactgtgcattttttaagagtctttcattaatgcaacttcctctttatttataag

SEQ ID NO: 543685 - DNA, 646 bp, Homo sapiens
gattgatgtgctctaagttacttcacccatctagctctatttttcctcatataatgcgagatgctcatactaacaaattaaacattcccatagtaaaagattagtaagcaaatactgaagtaccttaaagacatactttaaataaatacaattcagtacaactttcagttgtgtatgagagtgcttcaaataataataatgtttataaatattcaatgaatatttattgagaacttaccatgctacatgtgttgggtactggatamtattattagatagtctatagacagaaagatatcaaaataatatgtacatgaaatttctagcacattcatacacagaaataagtagtgttatctcatttaaaagcgtggctttgctcaatatgggcaggagaaattttaaaactttgcttctgatcataaaatcaataattatccattttgtagaacttgaaaatatataaaaagttctaaaatgaccagaaaaataatctgaaatactgatagatttcccctattaatatatttcaaaaagttattaatgtgatatttacacatacattatatttttgctttttgtttcatttgtttttcttttataatttcaattttattttagattcagggggtatatgtgtaggttc

SEQ ID NO: 543686 - DNA, 646 bp, Homo sapiens
gattgatgtgctctaagttacttcacccatctagctctatttttcctcatataatgcgagatgctcatactaacaaattaaacattcccatagtaaaagattagtaagcaaatactgaagtaccttaaagacatactttaaataaatacaattcagtacaactttcagttgtgtatgagagtgcttcaaataataataatgtttataaatattcaatgaatatttattgagaacttaccatgctacatgtgttgggtactggatactattattagatagtctatagacagaaagatatcaaaataatatgtacatgaaatttctagcacattcatacacagaaataagtagtgttatctcatttaaaagsgtggctttgctcaatatgggcaggagaaattttaaaactttgcttctgatcataaaatcaataattatccattttgtagaacttgaaaatatataaaaagttctaaaatgaccagaaaaataatctgaaatactgatagatttcccctattaatatatttcaaaaagttattaatgtgatatttacacatacattatatttttgctttttgtttcatttgtttttcttttataatttcaattttattttagattcagggggtatatgtgtaggttc

SEQ ID NO: 543687 - DNA, 646 bp, Homo sapiens
gattgatgtgctctaagttacttcacccatctagctctatttttcctcatataatgcgagatgctcatactaacaaattaaacattcccatagtaaaagattagtaagcaaatactgaagtaccttaaagacatactttaaataaatacaattcagtacaactttcagttgtgtatgagagtgcttcaaataataataatgtttataaatattcaatgaatatttattgagaacttaccatgctacatgtgttgggtactggatactattattagatagtctatagacagaaagatatcaaaataatatgtacatgaaatttctagcacattcatacacagaaataagtagtgttatctcatttaaaagcgtggctttgctcaatatgggcaggagaaattttaaaactttgcttctgatcataaaatcaataattatccattttgtagaayttgaaaatatataaaaagttctaaaatgaccagaaaaataatctgaaatactgatagatttcccctattaatatatttcaaaaagttattaatgtgatatttacacatacattatatttttgctttttgtttcatttgtttttcttttataatttcaattttattttagattcagggggtatatgtgtaggttc

SEQ ID NO: 543688 - DNA, 634 bp, Homo sapiens
cttttccacacaggttcataggctagcatcactctccaaaaccaaacttaaaaccaagagtcatttggtaagaagaagcacatatacatatgtttacatttgtatgtatttgtgttttgagggggctagtaagggacaggcgatgggagggagaagaatcatttagatcaaagggaagaaaggaaccagtgatatttcagagagggggtcagcttctgttggaaggaaaaaggaagaggtatttcccagcagagagaagcccaagacagaattttttacatagtagggttcccatcctacaacatccctggtactgttcaaggtttccccaagccccttatttttgatgttacccccattccacaagaagcttagaatgagtgcttcccctgaactgaacttgaaagtactcatccagcctgatttgtaccccctgcacctgtcctctgtccccaaggctgccttagggtcccatctacttgacccaagcaagtaaagtactggcccayttagccaactcaggcccaagtcttcattcccccaaagcacatcctatgtactattgatggcagcagtggcccattaaagcagctgctgccatgacactggctgcagtggggaagatgtgacccgg

SEQ ID NO: 543689 - DNA, 607 bp, Homo sapiens
caagacccagtccattggaacttactgagaaatgcaatgagatgctatcgaccaggggtgtccaatcttttggcttccctgggccatattggaagaagcattgtcttgggccacacataaaatgcactaacaccaacaatagctgatgagcttaaaaattccaaaaatctcataatattctaagaaagcttacaaattgtgttgagccacattcaaagtcatcctgggccgcatgctgcctgcaggcaatgggttggacaagctttctgtagactttccaagaagaagacatttcttgagctccatgttaaatatttgttacttaacaaacatttaataaataataactatgttctagcccttggtcagtgttacccttcggaatgcaaaagttagaacaatatattttaatttttttctctgtatcctcaaatctaatagctgtccccaaatacgtgtatatataggatcagttcrctataggtaccgtaattcttaactgaagaaattgttcctgcaagagaaaggggaatgtattctaatttgaagatgtctcccaggcaattctaatgagaaggaatgcccttctccagcctgacagcctcct

SEQ ID NO: 543690 - DNA, 590 bp, Homo sapiens
acaacaggtacattgctgccctcatcttgcccagcacacactagctgggggtatgtgcaggtaccacatctcactaagtcctagtttccttattttagtttccccactaaaaggtaagctccacaatggcagggacttattccccctgttttattcactgatatatcctggatgcccaaaacagtgcctggcacatatagtagtcacttaataaatatttgatgaatgaaatcatctccaaggtgggcacaaaagtagtacacctcatgggactgcttgaatattgaatgagatagtgtgtaaaatattggctcagtgcctaacacatagtaagtgctaaaaartggtagctattattattactattattattatgcaaacctttgtctttgccctactaaacaggtgacttgctccacctgaaccagtaactggtaattcaagatccataaaaaggatttgttgagtgacttctgcatactcacctggaggtgtggacaaaatgggctttaagaaaccattttgaatgccagatccgcccctcctcctcttcacctctccctatataagtcaaagacatcatcttccct

SEQ ID NO: 543691 - DNA, 535 bp, Homo sapiens
aagagacaaactatgaatacatgctacaacacagaggaaactcaaaaacacaagttaaagaaggctgacacaaaagactacatattacatttacatgaaattccacaaaaggcccaaaggatcaaaaggcaaatttatagagacagaatgtacatcagtggtttcctaagacaggaagtgagaacagggaataaccataaacaggcatgatcaaaatgtgatgcctgtttggggtgatggaaaaaactaaaactggtagcaattgtacagttctatagagtcactaaaatcrtagaactatagactgtagacttacaatggctggatttggtggtatgtaaattataccttgatacaggtgttaaaaacaaaagccaactgccctgaaaccaggaataaaagcaataaccgcagaaaatgcttgcttttcctattcaagcaggtggaattatacctacatgctaagatgtagaagtccttggtgttcttggggctaaagtcagtggcttctggattgcaacacactaacatggct

SEQ ID NO: 543692 - DNA, 583 bp, Homo sapiens
tgatagcaggttggaggtgccatccctgtgatatcataaagccactgatggcaagttccctttgggcttgcattgctgcttcctgactcctggaaaatgaacagaggatagtttggcagatcaggctgtctgtgaactggccagctcacatctccagcctcagagctaccctcagtcccatcaaactttgtactataacaagtaatgtgcttgggcactgtgtgcctctgcctttctaagtggtctatagagatattatgggattttatcactacaactgcctatgaggtaggtactacattcttccacattgtagatgagaacactggggcacaaagaggttataagctttcccaagggcacggaactagagagtagagaggtttgcattgaaatccatgcaaagtctgggctctttactaccacacaggatggcccctgaggaatttctccctgagccctrctccccctcacccaacgctgggctggaaaccactgcctctgtacttcatggcacttgttacactaagctgtgactgcttaactgtcccccactagactgtatgctccctgaagcagatac

SEQ ID NO: 543693 - DNA, 537 bp, Homo sapiens
ctttttactacattttcttacctataccattcaagtcttggcttaagcatggatttctctggaaatcctcacacaaaaccttccaggttatgttaatgtctgtctttatattcattcagcactgcatacctcagtggttctcaatttttgtyacacattaaacacattaaggagactttttaaaccattgatgctagtatgaaatccactctgatttgcttctgtaacatgtagccaaagcaggcagattttaaaaataacacagatgtttccaatttgcaacttaggctgagaacaagtgaccaggaagaatatttttctaatcattagtcttctcttcaagctagttttgtgatagctgtatttatatctagttggttgagttcattgcctcaaattcaatgtaagtgcctgacaattaaaaaataagtagccaggtgcggtggctcacatctgcaatcccaggactttcgggtggatcacctgaggtcaggagtttgagatctgtctggccaacatggtgaaaccttgtctcca

SEQ ID NO: 543694 - DNA, 540 bp, Homo sapiens
tgagagaaaactaggacgacccaggaaggcaggagggatccaagactcctcagatttgggacttggtgattaagaagtrcagggtggccatgggataaggaagctgacagagtgtggggcagggtgggggcagggcagaggcagaacaggacccacgaggatgttcaaatagggccatgacatgatctgaactgggcttctggaaggacggtctggcagaattcataatcttaccatttacatacatcacatgtactgccctgggcccctaacaggtgcttgctctttgggagaacctaaggctggagcctaaacagccgggaacagctagtggtgccctgcatcccctggccaccctgtgccagcctctgagagaaggggtagtaagaagtgggcatgtgtagggcaggtctgcccaagaccgcaagatcgttcgttatagagagaattgttgtcctattcatctcagaacccccagtgcccaagacagggcctgacactttgtagatgctgaaaatatacttgcatgaatgaacaaat

SEQ ID NO: 543695 - DNA, 541 bp, Homo sapiens
ctgagagaaaactaggacgacccaggaaggcaggagggatccaagactcctcagatttgggacttggtgattaagaagtacagggtggccatgggataaggaagctgacagagtgtggggcagggtgggggcagggcagaggcagaacaggacccacgaggatgttcaaatagggccatgacatgatctgaactgggcttctggaaggacggtctggcagaattcataatcttaccatttacatacatcacatgtactgccctgggcccctaacaggtgcttgctctttgggagaacctaaggctggagcctaaacagccgggaacagctagtggtgccctgcatcccctggccaccctgtgccagcctctgagagaaggggtagtaagaagtgggcaygtgtagggcaggtctgcccaagaccgcaagatcgttcgttatagagagaattgttgtcctattcatctcagaacccccagtgcccaagacagggcctgacactttgtagatgctgaaaatatacttgcatgaatgaacaaat

SEQ ID NO: 543696 - DNA, 611 bp, Homo sapiens
ctgagagaaaactaggacgacccaggaaggcaggagggatccaagactcctcagatttgggacttggtgattaagaagtacagggtggccatgggataaggaagctgacagagtgtggggcagggtgggggcagggcagaggcagaacaggacccacgaggatgttcaaatagggccatgacatgatctgaactgggcttctggaaggacggtctggcagaattcataatcttaccatttacatacatcacatgtactgccctgggcccctaacaggtgcttgctctttgggagaacctaaggctggagcctaaacagccgggaacagctagtggtgccctgcatcccctggccaccctgtgccagcctctgagagaaggggtagtaagaagtgggcatgtgtagggcaggtctgcccaagaccgcaagatcgttcgttatagagagaattgttgtcctattcatctcagaacccccagtgcccaagacagggcctgacactttgtagatgctgaaaatatayttgcatgaatgaacaaatggtgacatgtgtgccctgcctgtcaaactgttgccaaccaggagagagcaggaaaggagtatctccgctg

SEQ ID NO: 543697 - DNA, 177 bp, Homo sapiens
aattcactcattagggactcctaagtggrgctggagcatgggcccaagagcaggagctccttaaatgttggtccccgaccctgtctttcccccaaatgcttcttgagtggaaggagactgaattctcttggtctggaatcagggcttgtgcccctggaattgttcttggctgtcagg

SEQ ID NO: 543698 - DNA, 482 bp, Homo sapiens
aaatgacaacacagggaacaaagaagcaaaggaccacaatacagtgggaggcacaggtctgaaaggctctgcgcctcccatctgaggtgcggatccgcaggatggaacagacgatggacacataggacagcactatcaggacaaagcagcctgaggccactatcccaatgtccacaaagatgaccatcwcgttggctgaggtgtctgcacaggccagtttcaggatgggcggtgcgtcacagaagtagtgctggatctggttgggtccacagtagggcaaatggaaagtcaatatggtctggacagcagagtgcagagagccactgagccaagtgccggtggccaggagggcacacctgctcccactcatcatgctggtgtacctgagcgggtaactgatggccaagtagcgatcataggacatgactgtgtagaggaaacactcggtgctccccaggaagtggaaaaaatagagctgagcc

SEQ ID NO: 543699 - DNA, 482 bp, Homo sapiens
aaatgacaacacagggaacaaagaagcaaaggaccacaatacagtgggaggcacaggtctgaaaggctctgcgcctcccatctgaggtgcggatccgcaggatggaacagacgatggacacataggacagcactatcaggacaaagcagcctgaggccactatcccaatgtccacaaagatgaccatcacgttggctgaggtgtctgcacaggccagtttcaggatgggcgrtgcgtcacagaagtagtgctggatctggttgggtccacagtagggcaaatggaaagtcaatatggtctggacagcagagtgcagagagccactgagccaagtgccggtggccaggagggcacacctgctcccactcatcatgctggtgtacctgagcgggtaactgatggccaagtagcgatcataggacatgactgtgtagaggaaacactcggtgctccccaggaagtggaaaaaatagagctgagcc

SEQ ID NO: 543700 - DNA, 482 bp, Homo sapiens
aaatgacaacacagggaacaaagaagcaaaggaccacaatacagtgggaggcacaggtctgaaaggctctgcgcctcccatctgaggtgcggatccgcaggatggaacagacgatggacacataggacagcactatcaggacaaagcagcctgaggccactatcccaatgtccacaaagatgaccatcacgttggctgaggtgtctgcacaggccagtttcaggatgggcggtgcgtcacagaagtagtgctggatctggttgggtccacagtagggcaaatggaaagtcaatatggtctggacagcagagtgcagagagccactgagccaagtgcyggtggccaggagggcacacctgctcccactcatcatgctggtgtacctgagcgggtaactgatggccaagtagcgatcataggacatgactgtgtagaggaaacactcggtgctccccaggaagtggaaaaaatagagctgagcc

SEQ ID NO: 543701 - DNA, 482 bp, Homo sapiens
aaatgacaacacagggaacaaagaagcaaaggaccacaatacagtgggaggcacaggtctgaaaggctctgcgcctcccatctgaggtgcggatccgcaggatggaacagacgatggacacataggacagcactatcaggacaaagcagcctgaggccactatcccaatgtccacaaagatgaccatcacgttggctgaggtgtctgcacaggccagtttcaggatgggcggtgcgtcacagaagtagtgctggatctggttgggtccacagtagggcaaatggaaagtcaatatggtctggacagcagagtgcagagagccactgagccaagtgccggtggccaggagggcacacctgctcccactcatcaygctggtgtacctgagcgggtaactgatggccaagtagcgatcataggacatgactgtgtagaggaaacactcggtgctccccaggaagtggaaaaaatagagctgagcc

SEQ ID NO: 543702 - DNA, 620 bp, Homo sapiens
ctgtgcatatttagatttgtggcattctatttgaaagtgattgaaaaaaaaaagaattcaagtcacctacttgtagactctaggctgatggggatttaggcacaaaccttccttctgctggggraggaaaggaagacaacattcacaagtaacagccaattatgttctctgtttgccatgtaagtgcacacattttgcccttcactttttatcttggctttcactgccttcctcccttcacaatctacaggaaaaatgagagagacagagagagagagagagagagaaagggaatcatcttaggtaatagaatatatgggttgatctataatttatagatctcactgctgaaaaaaattaaaacaagtagaaaaatatattagatttttttaaagtgtgaaacttggaaaggagtctttactactgctacccctgtaccttctgctgccacaaaattaggatgtggcttaacttgggtctggttagacaattacagactttggagacagaaatgaagtctaccggttactcatgtgcactgaattcaggtgactgcagaggataaggaacttgttattgtaattttctgttcattaagagctatctgagatccttctttt

SEQ ID NO: 543703 - DNA, 621 bp, Homo sapiens
cctgtccacactgattcatattataacatatttttaaaacaccatctgattacattgctcactggtgactcttcacagcctggaggatgaagtacaaacattatagcatatcgggtaagaatctttatcaccagatcctgcaggcctytctgttcacatgcccgtgtatgaaactgagttgtggcttctcaaacacactgtgctgtgggaccaagaatggttgataaacctctactaaactcttcaatctggactgctctcaaatggtgtctcttccataatcccgatggagaagttgatttctccttcatttctctctagcttgtgagttactgacggaattccttcagcagcatactttagagactgtggggaatgcagacctgagttgaattcccagaaacacttcttactcgctgtagggcattggcctattacttgaactccctgagcctcagtttcctcccttttggttctgaataatacacctcccacctcccctcatgtggatattggcagcatgatgtaatatctattaagtacatcacaatgctggctcatagagctaaagcagtaatttttagtaatttaattccctctccttcttagctaagttaggag

SEQ ID NO: 543704 - DNA, 551 bp, Homo sapiens
cctgtccacactgattcatattataacatatttttaaaacaccatctgattacattgctcactggtgactcttcacagcctggaggatgaagtacaaacattatagcatatcgggtaagaatctttatcaccagatcctgcaggcctttctgttcacatgcccgtgtatgaaactgagttgtggcttctcaaacacactgtgctgtgggaccaagaatkgttgataaacctctactaaactcttcaatctggactgctctcaaatggtgtctcttccataatcccgatggagaagttgatttctccttcatttctctctagcttgtgagttactgacggaattccttcagcagcatactttagagactgtggggaatgcagacctgagttgaattcccagaaacacttcttactcgctgtagggcattggcctattacttgaactccctgagcctcagtttcctcccttttggttctgaataatacacctcccacctcccctcatgtggatattggcagcatgatgtaatatctattaagtacatcacaat

SEQ ID NO: 543705 - DNA, 438 bp, Homo sapiens
agcaataatcttatatactgatttgcttctttggtggccaagtaagtaaaattcatttgttaggtatggcagctcttggctgattacatctaaattggctttggttacyttaagcacacacacaaaaatatattagaacactattgagtaggtcccagaatcaatgggaggtctagagaacaaggcttgcaaatggatagggatcaaagctaggtatgagaaccatggccagaggaatggcactcatgctgtcccagcactactgccttcagcactggtgacaaaatgcattctaaattgcccccattgtatcagtcagagtcttaacaagaaataggtggcagactcaggaggatctaaagatctatttacaaagaagtgggtgtaggtgagccaccagggatagtgtggtaacctgctgctagtagtagtaaccag

SEQ ID NO: 543706 - DNA, 612 bp, Homo sapiens
agaaaatagatgaggggagggtatctttttaactaacgaagcatttacaatgatctatttaagagaatcttctacatgttttgaacatatacattgataagtaaattccaggtataattttcatcttaaattggaaaaaacattacccataaattctctttaaggtttattcttccactttctccttaaaattaatgaaaatctaaaaattaatttctctctgaaagcacctttttaactctcctcaacggatattgatttttcagttgttacagttttttgcacttgaatattattctccattttggaatattttccaggtatacattataacaaatgcttttggttagtgatcaaaatgctgttaatcacaattgctatttctgtgatgsatatccatggcaggaaatcaaaaacaattgagcctgtcaagattaaatggcttgctctgtccataaaggaaacctcacagccctacactggaccatcattcctcctttgagagtcctaaagtagtctgaaaatattataataagtggatagtcagctaattctttgaaatcataaaactaatttgctttttagttttgccgcctttaagaaagctcttca

SEQ ID NO: 543707 - DNA, 530 bp, Homo sapiens
caggagggcgcatcatcccattatgtcagagtggcaaggaactgggtgaatgataatatgtaaaactagatttgagaaaataatcatgtagagtaggcagcatgctagccatagctgaacacttgcttacttctgggktgtgctaaaggcacaggcatattcagtgaatatcagaaacaaatcatgaggcaacacagatgcacgtgcagggattgatggaaatgctgcaatgatgtgccgtttttaactttgcaccgtggattgaagtatggagggacaacagtatgaatagatcatgtgttgaacagatcatgttattacgtattccagtgtaatatcacaaaatcaatgttcattaatattttcctgtatttccagattttatggctatcctgtagaatataagcttcttagagggctgagattctttcttgtttgctgttttatctccgctacctagcacagttatgtctccttactattttaattttcgttagaatgtgtttggttgaaattcctttacagctact

SEQ ID NO: 543708 - DNA, 311 bp, Homo sapiens
ctgcaggtaaaccagcaaacccctccctccaaaggcggaaatcagtactgtcccctccccagggaggaaacagctttgctggggaggcaaggaggttctgcagaaaggctgtgcactcaggagacagcagccctgggcatgacatctccccaacacctctctacctgctttcaaccctgctggcctcatctgtaaaatggggggcatcccagcctccagatggtgagaaattaatttctgttttgttttttttttttwaatggggagagtaacagcaacctcacagactttcaagaggattaaataactga

SEQ ID NO: 543709 - DNA, 594 bp, Homo sapiens
tgtgcaatggaggcaacaaaagcacaggtaaggawgaattgcggatgaaggatgcaccaggaagcactcacttatctgcatctgacccctttccgtgcccctggcccttgacctggcttcccacctgcttcctttctgctcctgtgttcccgccatgctgaccgcgtcatctctccccttcccactggatgacccccggccccagatcttcctgccaatgacttatcccattcaggtttgcctgaatggagaagccactccattggagtagccactcggggatgccttctggatcccctgcccagtccttctggttggagcttctttgagctcttaagagaaccttctgcacttgttagctgaccctccaccgcatttagattgtcatctccatggagcaagcccggatttgtgttgttgccagttgtacctccagtgctgggcacatagtaggtgctcaatagctgtttgtgagtaaatggctggctaggtacactaggagctcatccatcagcaatcctcactgcaagctgccctgcccaatctgccactgtgccccggggcagacaaacagaggtacctgcaaaggcctca

SEQ ID NO: 543710 - DNA, 593 bp, Homo sapiens
tgcaatggaggcaacaaaagcacaggtaaggaagaattgcggatgaaggatgcaccaggaagcactcacttatctgcatctgacccctttccgtgcccctggcccttgacctggcttcccacctgcttcctttctgctcctgtgttcccgccatgctgaccgcgtcatctctccccttcccactggatgacccccggccccagatcttcctgccaatgacttatcccattcaggtttgcctgaatggagaagccactccattggagtagccactcggggatgccttctggatcccctgcccagtccttctggttggagcttctttgagctcttaagagaaccttctgcacttgttagctgaccctccaccgcatttagattgtcayctccatggagcaagcccggatttgtgttgttgccagttgtacctccagtgctgggcacatagtaggtgctcaatagctgtttgtgagtaaatggctggctaggtacactaggagctcatccatcagcaatcctcactgcaagctgccctgcccaatctgccactgtgccccggggcagacaaacagaggtacctgcaaaggcctcag

SEQ ID NO: 543711 - DNA, 547 bp, Homo sapiens
attgcctgaacccaggaggcagaggttgcagtgagctgagataatgccactgcgctccagcctgggcgacagagcaaractccttctcaaaaacaaacaaacaaacaaaaactcttcttcctgcattgtacttactgaagccccatgtgaccctgctttatctatcttcattctgaagctggaaatgaacccttgagatggtttggatactctgctgttcatgggcagcagcaagcgcgggacctgagctggtgctctgcgtcattctgacacctggtggccttgcctagcgtgggaggggcacaaggagagtgggtaactctctccctgactacgtgacttgtgcttttatttgaaatatcttgaatttctagaaataccttgaatatcttgaatattcaaatgtttaagaatgaggatgcttgcaactgatacgggtagttctttctgctccgtttgtaccagcagttgggagtcgatgggattctgggttagcagaggggcacttgaggacattttcctcctggttctcaggcagcggccggca

SEQ ID NO: 543712 - DNA, 561 bp, Homo sapiens
aaagcacccaagtgttttctgcctgtgggcagatctcaaagagaaatgtgcagttgaaaaggactggtccttacagacttacccatcaaagtsatcctcaagtggggaggcagaagctgcagtggaacttccgcagttgcagctctagttgggaagagaatccagaggagactgcgggaaaagacccgtcatcactgggagtcttgagcttctttgaatgttggaagcagccccagtggcagtatcagggctacaagaactttgccaatggccgagggctctgataaacccaccctgtcacagggagaaataaagactagcagagcagcatttttgttcttgtgaatgcctgcattcaaatttgcaggggtctattttttttttattggtcgatttttcacttgaagatcttctagagatcagcacactgctgcatgccatattggttgtactatgtagattatgggagaatgaatggttctgctctcaagaagcctacatcctggttcataaataaatgctaaattgtactgtacacactattcatgttacagaagtttg

SEQ ID NO: 543713 - DNA, 561 bp, Homo sapiens
aaagcacccaagtgttttctgcctgtgggcagatctcaaagagaaatgtgcagttgaaaaggactggtccttacagacttacccatcaaagtgatcctcaagtggggaggcagaagctgcagtggaacttccgcagktgcagctctagttgggaagagaatccagaggagactgcgggaaaagacccgtcatcactgggagtcttgagcttctttgaatgttggaagcagccccagtggcagtatcagggctacaagaactttgccaatggccgagggctctgataaacccaccctgtcacagggagaaataaagactagcagagcagcatttttgttcttgtgaatgcctgcattcaaatttgcaggggtctattttttttttattggtcgatttttcacttgaagatcttctagagatcagcacactgctgcatgccatattggttgtactatgtagattatgggagaatgaatggttctgctctcaagaagcctacatcctggttcataaataaatgctaaattgtactgtacacactattcatgttacagaagtttg

SEQ ID NO: 543714 - DNA, 561 bp, Homo sapiens
aaagcacccaagtgttttctgcctgtgggcagatctcaaagagaaatgtgcagttgaaaaggactggtccttacagacttacccatcaaagtgatcctcaagtggggaggcagaagctgcagtggaacttccgcagttgcagctctagttgggaagagaatccagaggagactgcgggaaaagacccktcatcactgggagtcttgagcttctttgaatgttggaagcagccccagtggcagtatcagggctacaagaactttgccaatggccgagggctctgataaacccaccctgtcacagggagaaataaagactagcagagcagcatttttgttcttgtgaatgcctgcattcaaatttgcaggggtctattttttttttattggtcgatttttcacttgaagatcttctagagatcagcacactgctgcatgccatattggttgtactatgtagattatgggagaatgaatggttctgctctcaagaagcctacatcctggttcataaataaatgctaaattgtactgtacacactattcatgttacagaagtttg

SEQ ID NO: 543715 - DNA, 663 bp, Homo sapiens
attcttggctgattacttctaacttgaacgttggatctcagctttgatgtaactacctctgggaagcccccctgccccactagactgagctgagtgcccctcctgtgtgtttccccacatcatctgcctgagaactcataccactcattatgattkcttgttcatgcctgtcttccccactaggttgtggtcagtgaaagcagagaccacatctggtttactctccataatatcccctaatcaccatctagcgtaaatggcaatgaagaggaattcaagaaatactaaataagcgagtgaatgaatgagttttatgctgagatttaggtgagggtaagttgctttggatttatgctagcatttctactctgatctgaaaagatccttgttaagacaatattattattattcctcttttccttgtagaaactgtctacagattatttacacctcaaaacatgaagggctttccgtgtagttaaagacaatgtaggtaggggccatttctgcttaccaaacttatggtttgaccaggatcttggtgctttatcagataaagaagaatgtgtatatgataacacttgttggtataggtgtcttccaaatcatgttgaaaaatacagcattaaagctctgtgaaaggaaaactaatttgagttcctt

SEQ ID NO: 543716 - DNA, 440 bp, Homo sapiens
tttatagttgctgtatatgctttgaattatgagtttactttcaaataaaggtgtttctgctagaacgtatctgaaaatcctcactttaaaaagctgaaaaaaaattggggacaaacaactcaaaatctatgcaatgttctaatctaagcaacagcaaaacagtatcaatcccaacagaaaacactactccactaaaaagacactataatcctaaaaaataaagaaatgctaaaatacatacaagaatatccccaaaaggtgaagttttgatgatgaaaggggtgaaggattgagcattctgttttataaagagacaaggtaaatgttgacaggtyggaaagaaccacacaataagtacttctaagatagagcatgtgtctaaactagagaggagtataacaggatgcatggacaatctgtatagctctggattctcccac

SEQ ID NO: 543717 - DNA, 587 bp, Homo sapiens
catgtctgggttcacagagtgatacatcatttatcaatctatatattaatttatttgggggtcacaggatggccaactttttatttttcagttaagaacattaaaaaaaccctactatctactatcatttcatgaaagaaatgctactttaaatctaaaaagaggaaggatatcatatcagaataaagaacaaacttttagatggaatagatgtagcttcattaaaaactcactctattgcacttatctctaatttttctcagcctgctggaactatgccacggatcagcactgcctacagactgttgtctgacaatccctgaatgggaagcaatttgaarccaaacatgagttctagaactttaatccactcatcagatctgagggaagtcttgaaaaatatgtgctttccaaaaaagcagcctgggcttggtgcagtggctcacacctataatccctcctataatccctgaaaggctgaggcaggagaatagcttgagtccaggagttcaagaccagcctgggtaacacggcaagaccctgtctctatgaaaataaaaaaattagccaggtgtggtggcacatgc

SEQ ID NO: 543718 - DNA, 587 bp, Homo sapiens
catgtctgggttcacagagtgatacatcatttatcaatctatatattaatttatttgggggtcacaggatggccaactttttatttttcagttaagaacattaaaaaaaccctactatctactatcatttcatgaaagaaatgctactttaaatctaaaaagaggaaggatatcatatcagaataaagaacaaacttttagatggaatagatgtagcttcattaaaaactcactctattgcacttatctctaatttttctcagcctgctggaactatgccacggatcagcactgcctacagactgttgtctgacaatccctgaatgggaagcaatttgaaaccaaacatgagttctagaactttaatccactcatcagatctgagggaartcttgaaaaatatgtgctttccaaaaaagcagcctgggcttggtgcagtggctcacacctataatccctcctataatccctgaaaggctgaggcaggagaatagcttgagtccaggagttcaagaccagcctgggtaacacggcaagaccctgtctctatgaaaataaaaaaattagccaggtgtggtggcacatgc

SEQ ID NO: 543719 - DNA, 590 bp, Homo sapiens
atattcatcccaagaatagtaataagtaagccagggctagctactagaaagtccaaaacattaatctgtaaaattgagaaataagtgaaatttacactagcctcattccagcggctaggctgtcactcagcaatatttggtgaaatgtatagatttgacaggaggtttttcatttagctccaaataactctgtagaaaagtggcctacgccacgtgggaacaatccttttggtccarcttatctcactgtctcaggaaaaactttgtcaagactgttgccagtcttgacattgcaatcttcagagataaataccacatttaccagaggctaagcacctgaacaatcagtgtgcatccttgcaggagaggcatatcatgctcaccttattacaaatatgaatcaggtgggcataaacaggtgttattacaatatgatcctgggaggttttgtttttgagggtggggggaacttgtgttatgaattttattttaaaatccacatagatattagataagcatgaggaaaagaaccgtgtttacagataattaaatccagaggagttatacattttcattcatcctgaagattt

SEQ ID NO: 543720 - DNA, 634 bp, Homo sapiens
aggacaaaattaccgagatttgcaaaacaagcaaggaatacactctcactcatgcacagagtgagagagcaagagagagaaagagagaatttggctccatgtagtctgtgtactagtagggaatctggaaggattttggtcagaaagtgataatgtcccattagaggaataccaatattgtgatggtcaccggatggtttggaaaatggagggaaacaagtttgcaggctaatatgggagaattgacctgaaatcacgaagtggacagtgagagagggaaaagaagaaatgggctagtgagacactgtggtatacaaatcatagaggctttgtgaatgattgagtgcacttagtggagatggacttaagaaaaggaagaagtctaaaatgacttcatgggtgcgaatgtgaaacctgtagcattactaatggaaaaaagggkcagtgtatgagtacagaaactacttttaaaaacgttcagaatagtttggttttaggcatgtatttgagttaacagcaggatatgcatgtggaaatattttatagtcctatctcaaaaaggcagatagttcagtaaatgagagtattcattatctactattgagagcgtcagtatgaaaatttaaaattttca

SEQ ID NO: 543721 - DNA, 331 bp, Homo sapiens
attttctctattgacagatgaatagcagagacagaaagcagaaaagaaatgaagaagagttaactatcatctaatatgcaagtgttatgggaaaaaaagtattttggraacacagggaagtaagcaattaccaattactttgtgtaggactgggggattaggaaaagtttgtgatttttttttttttttgagatggagtcttgctttgtcacccaggctggagtgcagtggcacaatctcagctcattgcaacctctgcctcctgggttcaagcagttctcctgccacagcctcccgagtagttggttttacaggcacatgccaccacacc

SEQ ID NO: 543722 - DNA, 441 bp, Homo sapiens
tgcatggctcacaaggcctcctggctgctggcaggaagctgctgttccttgccctgtggacctctccataggactgcttgagtgtctccagggcatggcttttccctagaatgagtgatctgagagagacagacagagcccaagaagaaaaggagcactgtcttttatggcctrgtttcagaagtcactctgtaacttctaacacattctttttactagaagtgagtcactaagtctggccacattcaagtggaggggaattagggtttgttttttgtttgtttgttttatttttttttttggaaggaacactaaagaaaattgtggacacattttaaaaccagcatactctcaactgttctttttggctggtaatggtaagctacccagctcttaaccagacaccaatcagagctccaccaaaggttctttggggatagt

SEQ ID NO: 543723 - DNA, 580 bp, Homo sapiens
acacccaccttcatgcacacctgccttcatgcacacccaccttcatatacacctgccttcatacacacccaccttcatgcacacctgccttcatgcacacccgcattcatacacacccacattcatacacacctgccttcatacacacctgtattcatgcacacctgccttcrtgcacacctgccttcatgcacacctgccttctccacctgccttttgggtggctgtgtgttgctgctcacccagatggagaggaaggacatctcttctggagtctctctgaccagagatccctgcctgtgccagttctggcaaagcccagacattaccatttgggtgaaaaggtgctgggaaagaaagaagaaaaactagggactaggaagatttttccattcagtaactcatgaactgttaggtacgtgtgtgtgtgtgtgtgtgtgtgtgtgtgtgtgtgtgtgtgtgtcttgactcagaaagccctgggggctccaaggggctattggttgcatttccatgggttcacagtctgggctttgtcctcttggctgggctgacctgcctggccacctgccaaatccag

SEQ ID NO: 543724 - DNA, 580 bp, Homo sapiens
acacccaccttcatgcacacctgccttcatgcacacccaccttcatatacacctgccttcatacacacccaccttcatgcacacctgccttcatgcacacccgcattcatacacacccacattcatacacacctgccttcatacacacctgtattcatgcacacctgccttcgtgcacacctgccttcatgcacacctgccttcyccacctgccttttgggtggctgtgtgttgctgctcacccagatggagaggaaggacatctcttctggagtctctctgaccagagatccctgcctgtgccagttctggcaaagcccagacattaccatttgggtgaaaaggtgctgggaaagaaagaagaaaaactagggactaggaagatttttccattcagtaactcatgaactgttaggtacgtgtgtgtgtgtgtgtgtgtgtgtgtgtgtgtgtgtgtgtgtgtcttgactcagaaagccctgggggctccaaggggctattggttgcatttccatgggttcacagtctgggctttgtcctcttggctgggctgacctgcctggccacctgccaaatccag

SEQ ID NO: 543725 - DNA, 482 bp, Homo sapiens
tatggcaaagtcctatgtaaacattaacagaatgcatatttacattttataaatattgaatactgtgatttagctccattttataataaatatttatttcttattttatgtgatataaacctgatgactattacataggcatatagtgatgattatcactgatatgaaagcagtacccttgarctatgacctctaaatatgacgtggtctacacatcttatctagaatgaaatataatttatatatttaactttctttttactcaattatatcttcttggtgattttgtttaactacacttgaagctcttcagtgtttacttcacacatgaaaagtccttctgtaaactaagatatccattacaattttgctcaaggatggatgtcaacacaatggaatatttaataatataaatagatgttaatatgtgcaaccaacttcaggaaacgaatgcaagatttcatcagctcagttaactgaat

SEQ ID NO: 543726 - DNA, 567 bp, Homo sapiens
tggggctgctcctgctagggtgtcaccatggktccccaagctgatgtgatgctgtcagcatcctgtcggcacctccttggcctgtaccatttcggggcatgctggctgacattccgactgccagcttctatatcacttgcctgaggcctttctttgcctgctgcagcctgctttgcccacatatgtggtaaaccagacacaccggggaattcatgctcctagagcagccctcaaccattgattgatgggagttggtatatatgccccagctccctccccgcctcaggtaggatgattcagaggctgttcaacactcccagaattcctcagtggggatgagctttaattcccttagtaggaactagcttggtaacacacctttttgggggccttttttcctttcctgtctcacttgcccactctcctactagtgtttactgggatcaaacaaatgacttgtatttgaatccctttctccaggtctgcttctaggggaacccaaactaaaatggatgggttatgcttagatcaaactaaagtgatacaagaccattcttttgggccatt

SEQ ID NO: 543727 - DNA, 599 bp, Homo sapiens
gtgggatccacagaggtgtcctgaagggacagcatgctggccagtgtacctgcctcatgcaaggccttgctagtttgtggtagtgttataaataaggttcaaaggcttcaatagcacaattaccagtctacacatgactcaattatgtgaaaaataaaggttcttaccattgattttactgatagagcaaactgtagtcatcaaccaaagagtaattgggatcatctgcaaaaggcagaacacagaaaacaacagtaacatcaatttttcataataagatctcacccttttcaagccagggcatttcacttacagattctggtgtctatccttttgtaaagagaaaatagatctgccaacaaaaactataaatggtagtcacgactccaaaccagaggacattctggaaatcactattctgacttctttgccctttttcatccatgctcaggtacagtacccacagtaaaatcatctttaaaaatggacagaaatagcatcctacattaccaagtggtaattctaaaacaacaagaaataaaataccttaaatcttcatattgttsaaagatataatttcagccactacagtttttttt

SEQ ID NO: 543728 - DNA, 585 bp, Homo sapiens
tggcttccagcaccgcagctccgcaaccactgctggcgtctcctgaggctcgcgcgcccctggtgggcgtgagaggaggcgtccccgcggcggtccggcctcaggaagcccgtgggaggcagagtcagtcccgcggatgacgcgcccagtgggctacgttcaggaagtcatttgatcatatgggcagagcgaaggtcaaggcatagtggataacagaaaccagaaatgaaaaaaaatctctttcactcccgcctcctaactttcatattatgatccttacaggggaaagggtagtcagaaagccacgtaggactgtggagggagggaaatcccagtcacgtcgtttcagtgcgtgaaaggcaaaggaaatttcgggcccccaatcactatgcaaaaaggaaaaaattaagatggaagctgagccatgcaagaaacagccttttccttctattgctaagaaagtagctaacaaatgaaaggccagatatctccacagagagctacactaggtacaccttttatgtaaagtacygatttactgagatgaatacatcactgactattttcctacctgctccttttctc

SEQ ID NO: 543729 - DNA, 465 bp, Homo sapiens
gcttaccatgtgccaaactctgtgctaggtacttacaatacaagtgaatcaggtgatccctgcctcattgakctcattgtgattgaggaaacagatactgctaatcatttatcaaatactcggaacttgctaggctctgtgcagagctaatgtacttactcctaaaatagcactcaatatcactatgttcatgaaataaacttacatcagtaaagaaatgggaaaactatattttttttttttgagatggagtctcgctctgtcacccaggctggaatgtaatggcgcaatcttggctcactgcaacctccacctcccaggttcaagcaattctcctatttcagactcccgagtagagaaggggtttcaccctgttgcccaggctggtcttgaactcctgagctcaggcaatcaacttgcctcagccttccaaagtgctaggattacagacatgaaccaccacac

SEQ ID NO: 543730 - DNA, 361 bp, Homo sapiens
cagtgtctgacctagaacatgggcatgwatccaccaccttatattgcttctctatgcaacctgatgccagttacttgcttaaaagtaggcttccgtagcaggaagagtttcaaatgcaaaaaatgatagggagaacgacagtgacagagaggttggaggagttaaggcttctccaagcttcatctcactttataattccaccttggggcagcccaggacataatgaccaatgttctgggcaaacttcagagtgcgcctacttcctttttaagtctctggtgaaacatcaaagaattcctgctgtgctgctttattgaaagtagatctcaacttagttatctggtggaccccccagcttgag

SEQ ID NO: 543731 - DNA, 465 bp, Homo sapiens
gcttaccatgtgccaaactctgtgctaggtacttacaatacaagtgaatcaggtgatccctgcctcattgatctcattgtgattgaggaaacagatactgctaatcatttatcaaatactcggaacttgctaggctctgtgcagagctaatgtacttactcctaaaatagcactcaatatcactatgttcatgaaataaacttacatcagtaaagaaatgggaaaactatattttttttttttgagatggagtctcgctctgtcacccaggctggaatgtaatggcrcaatcttggctcactgcaacctccacctcccaggttcaagcaattctcctatttcagactcccgagtagagaaggggtttcaccctgttgcccaggctggtcttgaactcctgagctcaggcaatcaacttgcctcagccttccaaagtgctaggattacagacatgaaccaccacac

SEQ ID NO: 543732 - DNA, 587 bp, Homo sapiens
aactggaaagtgaagtctaaagaggtaatgtgattttatgttacctacaattttgcagygacaaatgacactgtcatctgggacaggccgtccagggtgggaacctatcatgctgactgtaattgttttagaagcattgactttggctggagtggtttcatctcccaccaaatgctgaaaaggaggagtttcctgaaaaatgatgacctcatcatgtttgtggactttgaaggtacttttcttggtcttcctgagtaaataatcctatgctcttggcactctactgattttatcctgattttaaagcacacatggagggtggggatgaggttaaaaaaaatgtgttgtaggagaaccacattttcttcaattggtcaaggactcacatctttattttaactgtccctgaaagaaactgaaattttagtgtcatctttttgaaaattttatcagaggtaacagttcactgatttcaatttagtttccatcagtctatccatgctaactttatgcttcattttgcaaattcaataaataaaaatgtgactggattactttaaaataaaactagctagtaccgtgggaat

SEQ ID NO: 543733 - DNA, 502 bp, Homo sapiens
aggccgtccagggtgggaacctatcatgctgactgtaattgttttagaagcattgactttggctggagtggtttcatctcccaccaaatgctgaaaaggaggagtttcctgaaaaatgatgacctcatcatgtttgtggactttgaargtacttttcttggtcttcctgagtaaataatcctatgctcttggcactctactgattttatcctgattttaaagcacacatggagggtggggatgaggttaaaaaaaatgtgttgtaggagaaccacattttcttcaattggtcaaggactcacatctttattttaactgtccctgaaagaaactgaaattttagtgtcatctttttgaaaattttatcagaggtaacagttcactgatttcaatttagtttccatcagtctatccatgctaactttatgcttcattttgcaaattcaataaataaaaatgtgactggattactttaaaataaaactagctagtaccgtgggaa

SEQ ID NO: 543734 - DNA, 502 bp, Homo sapiens
aggccgtccagggtgggaacctatcatgctgactgtaattgttttagaagcattgactttggctggagtggtttcatctcccaccaaatgctgaaaaggaggagtttcctgaaaaatgatgacctcatcatgtttgtggactttgaaggtactttkcttggtcttcctgagtaaataatcctatgctcttggcactctactgattttatcctgattttaaagcacacatggagggtggggatgaggttaaaaaaaatgtgttgtaggagaaccacattttcttcaattggtcaaggactcacatctttattttaactgtccctgaaagaaactgaaattttagtgtcatctttttgaaaattttatcagaggtaacagttcactgatttcaatttagtttccatcagtctatccatgctaactttatgcttcattttgcaaattcaataaataaaaatgtgactggattactttaaaataaaactagctagtaccgtgggaa

SEQ ID NO: 543735 - DNA, 361 bp, Homo sapiens
cagtgtctgacctagaacatgggcatgaatccaccaccttatattgcttctctatgcaacctgatgccagttacttgcttaaaagtaggcttccgtagcaggaagagtttcaaatgcaaaaaatgakagggagaacgacagtgacagagaggttggaggagttaaggcttctccaagcttcatctcactttataattccaccttggggcagcccaggacataatgaccaatgttctgggcaaacttcagagtgcgcctacttcctttttaagtctctggtgaaacatcaaagaattcctgctgtgctgctttattgaaagtagatctcaacttagttatctggtggaccccccagcttgag

SEQ ID NO: 543736 - DNA, 502 bp, Homo sapiens
aggccgtccagggtgggaacctatcatgctgactgtaattgttttagaagcattgactttggctggagtggtttcatctcccaccaaatgctgaaaaggaggagtttcctgaaaaatgatgacctcatcatgtttgtggactttgaaggtacttttcttggtcttcctgagtaaataatcctatgctcttggcactctactgattttatcctgattttaaagcacacatggagggtggggatgaggttaaaaaaaatgtgttgtaggagaaccacattttcttcarttggtcaaggactcacatctttattttaactgtccctgaaagaaactgaaattttagtgtcatctttttgaaaattttatcagaggtaacagttcactgatttcaatttagtttccatcagtctatccatgctaactttatgcttcattttgcaaattcaataaataaaaatgtgactggattactttaaaataaaactagctagtaccgtgggaa

SEQ ID NO: 543737 - DNA, 502 bp, Homo sapiens
aggccgtccagggtgggaacctatcatgctgactgtaattgttttagaagcattgactttggctggagtggtttcatctcccaccaaatgctgaaaaggaggagtttcctgaaaaatgatgacctcatcatgtttgtggactttgaaggtacttttcttggtcttcctgagtaaataatcctatgctcttggcactctactgattttatcctgattttaaagcacacatggagggtggggatgaggttaaaaaaaatgtgttgtaggagaaccacattttcttcaattggtcaaggackcacatctttattttaactgtccctgaaagaaactgaaattttagtgtcatctttttgaaaattttatcagaggtaacagttcactgatttcaatttagtttccatcagtctatccatgctaactttatgcttcattttgcaaattcaataaataaaaatgtgactggattactttaaaataaaactagctagtaccgtgggaa

SEQ ID NO: 543738 - DNA, 502 bp, Homo sapiens
aggccgtccagggtgggaacctatcatgctgactgtaattgttttagaagcattgactttggctggagtggtttcatctcccaccaaatgctgaaaaggaggagtttcctgaaaaatgatgacctcatcatgtttgtggactttgaaggtacttttcttggtcttcctgagtaaataatcctatgctcttggcactctactgattttatcctgattttaaagcacacatggagggtggggatgaggttaaaaaaaatgtgttgtaggagaaccacattttcttcaattggtcaaggactcacatctttattttaactgtccctgaaagaaactgaaattttagtgtcatctttttgaaaattttatcagagktaacagttcactgatttcaatttagtttccatcagtctatccatgctaactttatgcttcattttgcaaattcaataaataaaaatgtgactggattactttaaaataaaactagctagtaccgtgggaa

SEQ ID NO: 543739 - DNA, 538 bp, Homo sapiens
tcctctgtgtgtcgtgctgtgccagcttggtggaggggtggcatgctctcaaaatgaactgtttctcttactgttcaagcacagcttctcttagttctgcagtacaattgggtgtctcagtctcactcctgagttctgggatattcagaaaggtattcttgcctgtggatagttgctagttggatttccatgtgggggtgtggagctggagaaattctattctgccaccttgtgaagtcattctctggaataattttagatttacatagagttgcaaagatggtaaagacagtttctatacactcttcacttagtttcttctgatgttaacctcttatgttaccatggcacatttattaaaaacgagaaattaacattgtacaatactatyacctaaatgacaggctatatttaaccagtttttcatttttgagaggaagtctcactctaatgcttaggctggagtgcagtggtgcgatcttggctcactgtaacctcaacctcctggtttcaagtgattttcattcctcagccaccc

SEQ ID NO: 543740 - DNA, 566 bp, Homo sapiens
aatcggaagtctttaaaatttttaatgtgattatttactcagcccaagacccccgacccacaagagatacacacaaacaccagaatagtcattatataaggcaagtgcaaactgacggttttttattttgtggaaaatgtgcctgtatcgaataaatagttacatatttgagttcagctttttattctctagaattaaatttctaatttactataataataatagctaatgtttattgaacgcataccacatgccaaggattattgcattgctcttatgtattaactcatttactcataaccrcagattgaggcaggtagtcttgttatcccagttttacagatcaggaaactgaagcacagagaaactaagaaatttgcccaaattcttatacctgataagtagcagaactggaatttgaacccacacattctggcacttaatcattatataattacttttctatttggataaactttatcttaaaaattatggccaacagaatagctcttgaatatactgaaagtgaagaaaattctaattaaagcaattgtaaatgatggtaa

SEQ ID NO: 543741 - DNA, 604 bp, Homo sapiens
agaaaccaatacaatttctatcatttcaatccagaattctttcaattgtttcaggttatggaggcattggcccataaaatattttgcccgataatgttttccaaaaagggaaatcttttctgctctcatcaacaacaaaatgtctggaagaaaaaggaaatattaaggaataaaaatttggctgaagagcctctctacttaaaggaatgaaaggtgtttcaaaaagttactaacaataagcacaaaaacaattaaacattaaatatagaaacaaaagaaatatttcatgattttcygtagctcttattggcaatcaaaaaccagaaaacaaaagcagcaggggggaatgcaagaataaatgaagtgcagagaaagggcaaacatgagtaaatagtaatgaaagctttttaaaactacaataatatcttgtagaaatataaaatgcaataaaaaagtgtattacaacaatggcacaagggtgagagatacacaaatacatggaagtaaacttgtaaggatcttgcattctttgggaagtggccaaagtactaataacttaagagaacatattgtgatcttgagggaaatgactaaaagtttcatt

SEQ ID NO: 543742 - DNA, 539 bp, Homo sapiens
tttggaacataactattgcccttggatatatctgactgcctttcacatgtcagaaaatactagaagcctaacaaacaataaaacttgtatttgacagttatttttctaatacagatgacaagattccagtattttaatgtgacctctgggagtgggactagagatgccggcagtgaccactagagggtggaaaatcaatcctcctagtgatgtaaacagctttggtcccacaaatttgctttgtgattttccctttttttctctcttctagtcaacatccctgggttcatccacacctgtgttttctatgagttctccaatatcaaggagatttaacagtttgtttggtaaaacaggtgagtagtggcctctatgttctccctgcttgcccagaacacatttggtcaaatggggagcctcaayacccctactctttcaccccactcatggcatttacctaaaatgtcctcttttggggtagaggttaaatagaggaacttacattttcacaaatcaccaaaaagtgggtacagagggca

SEQ ID NO: 543743 - DNA, 474 bp, Homo sapiens
ttaaggattttaagcagaccatactatgatcatattagcattattaaggcttgtattgaggatttagaataagattattgattactatagtaatcaatattgaccactgcagcaatccagatgaaatatactagtaaaatgatctaagggagaaggagtctgcaaactttcactgcccatgaagttttactataacacagacacatccatttctgtattatctgtggctgttttagtgagacaatgacagagccaaggagtcacagcagagactggcctgcaaagccttaaacatttactatatggcactgaccagaaacattgccaccccttgatctaaaaaaaaaaattatagagaaggagaaagtwtttcagaaatttcaagcagttaaaatgaatcatttgtggttggttaaatgtggagtaggaagaaagataagtttaagatttttactatggattgaatgaacaggt

SEQ ID NO: 543744 - DNA, 474 bp, Homo sapiens
ttaaggattttaagcagaccatactatgatcatattagcattattaaggcttgtattgaggatttagaataagattattgattactatagtaatcaatattgaccactgcagcaatccagatgaaatatactagtaaaatgatctaagggagaaggagtctgcaaactttcactgcccatgaagttttactataacacagacacatccatttctgtattatctgtggctgttttagtgagacaatgacagagccaaggagtcacagcagagactggcctgcaaagccttaaacatttactatatggcactgaccagaaacattgccaccccttgatctaaaaaaaaaaattatagagaaggagaaagtttttcagaaatwtcaagcagttaaaatgaatcatttgtggttggttaaatgtggagtaggaagaaagataagtttaagatttttactatggattgaatgaacaggt

SEQ ID NO: 543745 - DNA, 474 bp, Homo sapiens
ttaaggattttaagcagaccatactatgatcatattagcattattaaggcttgtattgaggatttagaataagattattgattactatagtaatcaatattgaccactgcagcaatccagatgaaatatactagtaaaatgatctaagggagaaggagtctgcaaactttcactgcccatgaagttttactataacacagacacatccatttctgtattatctgtggctgttttagtgagacaatgacagagccaaggagtcacagcagagactggcctgcaaagccttaaacatttactatatggcactgaccagaaacattgccaccccttgatctaaaaaaaaaaattatagagaaggagaaagtttttcagaaatttcaagcagttaaaatgaatcatttgtggttggttaaatgtggagtaggaagaaagataagtttaagatttytactatggattgaatgaacaggt

SEQ ID NO: 543746 - DNA, 271 bp, Homo sapiens
ggtggccctggggatactccaagtcatttgctcttcccagattatctcctttcttatgggccaaagcaaaggatgctggcacatgaatggacagatggattgatgcataggtagctaggtaggtaggtagagagacagagtgaagatggctttggcgagaacaaatgacccattttcaaatttaccctcaaaggtaccatccttttkttaagtaagcctcctacttcacctctcctcttttcaatctgccctcatttctatttgcaatgta

SEQ ID NO: 543747 - DNA, 454 bp, Homo sapiens
acaggtggcaagaacagtcttgtgcctgacagaatgaaggagctggacagcaggatgcagggccttcaaggaagacaactatcttcaccaaagagaagagaggtgaaaagcaagctcttcctctcctttgcaaaaaacaaccttcacaaaataaatattttaaaatatagtctttgtctatcaaatacttctgcwaacagtttttatcagaaatattactgagtattttcaaagacattaaatcaggttatttgcttgtttattttaattagccaactggaacttgcttgcttgtatgctttgccattggttgaaatgaaaatatctttgaactgctatttgaaaactgtgcaatcaatttgcaatcccttccacagatggccctgctcttgcattagtgttactggcattgcaaatgccaggattcggtcctgccactccttagcattgggag

SEQ ID NO: 543748 - DNA, 452 bp, Homo sapiens
cccctgaatttttattattaactttataacatactttgggacatggtcatgttgttttctaattttcccgtgcatgagacttttgtccttcccaaaccatccgactatatgttgcagccaagctatccagtaaagcaggtatgaagcatagttkgtggcactccactgcagttcattgagaacttaggaaaataaactgcattgaatataagactcaaacacggaggacacaacgaatagcagaattgaagcaactctcacagggtaaatcaccctgttttttgtttttttttaatgaaatgggcacatgtgaagcttcaggacatagcctgggagcatgttttccctgtctacacacgatccagggttggcatccacaaaatctcagccaacatctccagtccacctgcactcaggttgtcagtgaccttgatatcagttgtgaaatgttt

SEQ ID NO: 543749 - DNA, 610 bp, Homo sapiens
aattcacccaaaaggctttctctgtgtatcaaaatagtttgctttcattccgtccttggggtytggagaaagtggtggctgggatagagccctggggagatgggaggtggacatgtgtgaagggagccacatcaagaagttctccaattggggtgtccctggttcctgtttcatcctccccacagtatccagaagcctcctttgccttgttcccctccatgagggcagagatgttggaggctgtcagggctttgagcacttgggctggcacctgagacttgagtgaaagaaatgaggaaaatggagtgcagtcctcaaccaaaccttcctgaaatgaaaggtgttcttctcttcctattatgctgtgattaaggacattatccttagcaaaataactcaggtacagaaaactaaataccactaataatgagaacaaatggacacacagaggggagcaacagacactgagacctacctgagggagggaatgggtggagggagacgatcagaaaaataaatattgggtactatgcttagtacctggttggtgaaataatctgtacaacaaccccaccccatttgagtttacctatataacaaacctgcacat

SEQ ID NO: 543750 - DNA, 610 bp, Homo sapiens
aattcacccaaaaggctttctctgtgtatcaaaatagtttgctttcattccgtccttggggtctggagaaagtggtggctgggatagagccctggggagatgggaggtggacatgtgtgaagggagccacatcaagaagttctccaattggggtgtccctggttcctgtttcatcctccccacagtatccagaagcctcctttgccttgttcccctccatgagggcagagatgttggaggctgtcagggctttgagcacttgggctggcacctgagacttgagtgaaagaaatgaggaaaatggagtgcagtcctcaaccaaaccttcctgaaatgaaaggtgttcttctcttcctaytatgctgtgattaaggacattatccttagcaaaataactcaggtacagaaaactaaataccactaataatgagaacaaatggacacacagaggggagcaacagacactgagacctacctgagggagggaatgggtggagggagacgatcagaaaaataaatattgggtactatgcttagtacctggttggtgaaataatctgtacaacaaccccaccccatttgagtttacctatataacaaacctgcacat

SEQ ID NO: 543751 - DNA, 612 bp, Homo sapiens
cctctcgacctcacccaacagctcacagacccaagtgtgattctccagcagcacaacttccaagggtgcaacctgccagacactcacccttccttggctggaccccaaatcccyggacccacccctgctcttagcagcatgttagtaaatgactctccaggggcctgatagagagcgtttgctggttcccatggtgtgaatactcccaccatggccagtttcaagctactaatgtttaaatgtttgtttgttgtaaacaaacaccactgtttgtcgcatagttcattgtatagttaaccatcagctcttgtaagctggcagaggcagttccaacacaccctccccaacctgctcagagaccagcaggcctagagagtaagtgggaggctctgcgggggatgccgtgcccaccactgggtcagggcaggacatgctctcttcattccactacccacctccaagcccacataccctgaagttaaagcaatgaagaatctttattcccatttccctacacccatgggtggagagaacaagctgccactgatctcaaccattagtagatataattgtagacatagatatatagacataaatatttcttttgtgtct

SEQ ID NO: 543752 - DNA, 444 bp, Homo sapiens
cctctcgacctcacccaacagctcacagacccaagtgtgattctccagcagcacaacttccaagggtgcaacctgccagacactcacccttccttggctggaccccaaatccctggacccacccctgctcttagcagcatgttagtaaatgactctccaggggcctgatagagagcgtttgctggttcccatggtgtgaatactcccaccatggccagtttcaagctactaatgtttaaatrtttgtttgttgtaaacaaacaccactgtttgtcgcatagttcattgtatagttaaccatcagctcttgtaagctggcagaggcagttccaacacaccctccccaacctgctcagagaccagcaggcctagagagtaagtgggaggctctgcgggggatgccgtgcccaccactgggtcagggcaggacatgctctcttcatt

SEQ ID NO: 543753 - DNA, 592 bp, Homo sapiens
gtgcccacccagattgagggtgggtctgtctctcccagtctgctgactcaaatgttaatctgctttggcaacaccctcacagacacccaggaacaatactttgcatccttcaatgcaatcaggttgacactcaatattacccatcacggggtctcactgtgtttaccaggctggtcttgaagtcctggcttcaagcaatcctcccacctcagcctcccaaagtgttgggactayaggcatgagccaccacacccagccctgagtgtgtttttatgtattaattcctttactcttataataattctatgaggcagatgcatttattactcccgttttactgatgaagaattagaggcacagagtagttcaggaacttgcccaagtctatatagctagtaagtggtaagactgagagttgtgctaagggcagtctggcccctgagtctgcgtgcttaatcatcatgctatttagatatgaggatgcgcttcaccttcagcaagcatctgaaagctgggagatgttatgagtgaacacagagtgtccagtggcttaaatataatgctgaggccacaaaaatgctggaacagactg

SEQ ID NO: 543754 - DNA, 566 bp, Homo sapiens
ctggcccagagtgtctgctcaaagcattgtcrtctggagagagcctccaaaatatcccaagagcaggtgggaaccgaacctggagcaaagccttcagccctcagtgtaggcagctttgcctttggagggtggtcaggggacaaagatttggatcccattgcacagatggggactgcccagagccatatggcatagaagaagacttctcttcctggccaggacttgttgatgtgatattatagtaggctgagcccttgcctctgtgcccggccacatccatctctaattgcgcaggtgtgagaggtctgtgggagtgcttcctgcccttataaacaggagctctttcttccatggagtttcactggcagaagcccctgaaatctgctgttgcttattaacaaggtagttgttgtgttgaggccagtctggaaacttagtttagacttggggattaggacaactagtttctagccctgtaataacagaaatctctatctggatcccccaactgactgagctggttggcgttcatggaaaccattgacaagaaagaagacagaacaagt

SEQ ID NO: 543755 - DNA, 566 bp, Homo sapiens
ctggcccagagtgtctgctcaaagcattgtcgtctggagagagcctccaaaatatcccaagagcaggtgggaaccgaacctggagcaaagccttcagccctcagtgtaggcagctttgcctttggagggtggtcaggggacaaagatttggatcccattgcacagatggggactgcccagagccatatggcatagaagaagacttctcttcctggccaggacttgttgatgtgatattatagtaggctgagcccttgcctctgtgcmcggccacatccatctctaattgcgcaggtgtgagaggtctgtgggagtgcttcctgcccttataaacaggagctctttcttccatggagtttcactggcagaagcccctgaaatctgctgttgcttattaacaaggtagttgttgtgttgaggccagtctggaaacttagtttagacttggggattaggacaactagtttctagccctgtaataacagaaatctctatctggatcccccaactgactgagctggttggcgttcatggaaaccattgacaagaaagaagacagaacaagt

SEQ ID NO: 543756 - DNA, 553 bp, Homo sapiens
aatgatgggcctgctaattattagatgtggaagcttgcacatgttttcaacttctctaagccttagttacttgtcaaaaaaaaaatgaagataatatcttgttcctagaattatactgaagattttaaaaagataatatataacatcgtgtgtgtgtgtgtgtgtgtgtgtgtgtgtgtaaacaggtcctggcacatagagtgttytctataaatgagattcattatatttcattatgacttaaattcattatctctatcccagaactttcttgctatacagagcaatagatctaagtagctacatgaaattttcaggtagatagacctcaaattccaaatacaaaaagaaaaattaacatccacattcctctgagcctgggttctcctacagcgctcaccatctaacaatacctcacgcgttaagtatgataatcttatagttcttcctcatccaagtggtcttcaagccctctagactttacctctaaggataaaggttatatcctctccacttctcccaggcacatagattctctaaacctcttatgagg

SEQ ID NO: 543757 - DNA, 594 bp, Homo sapiens
ctggtagaccacgtttaactcagtttctcttcctagaaagcatgcccaaacacaaatgagcgagaatgatgttgcagtaggaatraccttgaatcttatgtctttaatagttacaaaaaaaaatacttcttaaaaacggtaatttaacctttatagtcaaaatatcttggggtatattcttgagatttgcagatccactgtaagctggttaattctcagcttctcatatatgatgatggaagtggtgaaagcaaggaatggggaaagtaatgcgagcaggagacaatgagacaaagggaacattagctccagcagaaatgccagggttgtgctattttacataaaatgtagagactttataaccatataggtccatttaaccaactgccattttttcctacagttgtcatatttattgcaactacatgcattataaaccttgtaagacaatgtatgttattatttttgctttaagaaattcagagcaagtctttgctattgtgaatagtgctgcaataaacctatgtgtgcctgtatctttatagtagaatgatttataatccttagggtatatacccagtaatgggattgctg

SEQ ID NO: 543758 - DNA, 595 bp, Homo sapiens
tgggcacataaccacccagaattaaggtaacatttcccagcctctcatcccaccaggtatggtcttatggattagactgaccaacaggatgtgagtgactgatggtgggcaacttccaggcagtgcccttaaacagatgggacacatgccctccctccctccttccccttctccttcccatgagtgtgaatgtgattgcggaggtgatgagccawtttggacaatgtgacgtcaatgccctagtgatgtggatcaatacacaagaaacctgtatccgtgacaccactcggttgtgcataagagaaaaatatttccatcttatttaagctgttgtttttggtttcaattacagaagcccaatacacatccaaagccaaaatgacagaaggaaatggaagaaaggccactgaaatgcagagtcagtgcacctaaagaggcccagagaagatgtggcctttattttgccccagtaacaactgtgcatggagcccttgacccttacagaatgctgacccttgaagtgtaaatgtctagagccttccttgtaaattacccaatgtgaaaggaggctctgcttggacagggctgtgatcct

SEQ ID NO: 543759 - DNA, 595 bp, Homo sapiens
tgggcacataaccacccagaattaaggtaacatttcccagcctctcatcccaccaggtatggtcttatggattagactgaccaacaggatgtgagtgactgatggtgggcaacttccaggcagtgcccttaaacagatgggacacatgccctccctccctccttccccttctccttcccatgagtgtgaatgtgattgcggaggtgatgagccaatttggacaatgtgacgtcaatgccctagtgatgtrgatcaatacacaagaaacctgtatccgtgacaccactcggttgtgcataagagaaaaatatttccatcttatttaagctgttgtttttggtttcaattacagaagcccaatacacatccaaagccaaaatgacagaaggaaatggaagaaaggccactgaaatgcagagtcagtgcacctaaagaggcccagagaagatgtggcctttattttgccccagtaacaactgtgcatggagcccttgacccttacagaatgctgacccttgaagtgtaaatgtctagagccttccttgtaaattacccaatgtgaaaggaggctctgcttggacagggctgtgatcct

SEQ ID NO: 543760 - DNA, 640 bp, Homo sapiens
gggcaagtatatcactggtgacaaggtgctggcctcaaacacctaccttccaggacctcctggcctgcctgggggccagggccctcccggtgagtgtggargagggcacaggagggtgatcaccaacagaaaaagcctgccaaaagctcacatttgctggggcctggacaatgttctccagcttccatcgaggagaaacaaggcaggtgtccatgggactgccacacacccatgcaatgagagagcctgggaaataggccctcaagcctgagaaaccctcatagccaatagcaatgtgggagaaaaagctcattgtcctgggattggataagattcctaaagatcattttaagttaaaaaaaccaaatgaaaactatcttaaacctttttctggaaaaattttaacatatacaaaaatggaacagtattatgaaccccccctgcttggggctcctcacccaattctaacaactcagagccagcctcttcctactgctccccagtcttccttccacctttccttatttgttcgcatatttatacctatatttatttttatacctagctatatgtttttacaagtcaactgtattgacatacaaatgacatgtaatgtactcatttaaattaccattcaaat

SEQ ID NO: 543761 - DNA, 640 bp, Homo sapiens
gggcaagtatatcactggtgacaaggtgctggcctcaaacacctaccttccaggacctcctggcctgcctgggggccagggccctcccggtgagtgtggaagagggcacaggagggtgatcaccaacagaaaaagcctgccaaaagctcacatttgctggggcctggacaatgttctccagcttccatcgaggagaaacaaggcaggtgtccatgggactgccacacacccatgcaatgagagagcctgggaaataggccctcaagcctgagaaaccctcatagccaatagcaatgtgggagaaaaagctcattgtcctgggattggataagattcctaaagatcattttaagttaaaaaaaccaaatgaaaactatcttaaacctttttctggaaaaattttaacatatacaaaaatggaacagtattatgaaccccccctgcttggggctcctcacccaattctaacaactcagagccagcctcttcctactgctccccagtcttccttccacctttccttatttgttcgcatatttatasctatatttatttttatacctagctatatgtttttacaagtcaactgtattgacatacaaatgacatgtaatgtactcatttaaattaccattcaaat

SEQ ID NO: 543762 - DNA, 525 bp, Homo sapiens
aaaataattatgtgctaaaataacaacaaatttaatttaagggatgctaaaaatcatctcaaagarcatgactgcttatggagtaagaaagataaatatagaattttagttgaaagaagtaaaaaaagtctatattttatacaatcagttgacattaaagtgcagattcatataaattatgaatgtacattatgtctattgttgcctagggaggggcagaaaaaaaatgttctaaaacctttgagcagattgagtccatttacaaaataattttttatcaaaaagagagaaatgttttaataaaaagcacaaaggtttctcataaagttattaatatgatttttgtatgaataaaatgtattatatttttgtttataatttgtcggtgtattttaataacaagcccaattgtagaactatagcaaactgaataaatcatagaaaaattgccatgatagcatgaattttctgatgaataggtagccatcctgaagtaatattcatatacagtaataggaattaagc

SEQ ID NO: 543763 - DNA, 625 bp, Homo sapiens
aaacatgatactatttttccattctctatttcattttatctctttcccaggtacgtctatttgaatcgccatataaatacaaggaaatggcacatgcctttctttaatgcagtctagcaaatttatattactttatgsttggtaattgtaaatcatggggtaatgagagctgcaatatgaatatagaatttgctgcttttttgtactaagctacttcttaaaaattatccctgatggtcttaaattgcctacaatttacttgaagctaatgatagttatgtagccatctggaataaggaagaatagttacttgtaaaacttctttataataatatttacacttacacacagattgctccaaagattaaagcacagatgatgatggaaggcacaatcatgataagctaccagccatgtggagacaaagtaaatattttgcgaatggtttttttctaatcctgcctcaagacagaaagatgttgactatcttattgatgaaattgaaaggcttgggaaggatttatgatacttcaatgtgaacttggatatcccatgtaaacatcaacttaattctattcctaaggataataagaaaggaatattgaaactgttataaaaatgttat

SEQ ID NO: 543764 - DNA, 625 bp, Homo sapiens
aaacatgatactatttttccattctctatttcattttatctctttcccaggtacgtctatttgaatcgccatataaatacaaggaaatggcacatgcctttctttaatgcagtctagcaaatttatattactttatgcttggtaattgtaaatcatggggtaatgagagctgcaatatgaatatagaatttgctgcttttttgtactaagctacttcttaaaaattatccctgatggtcttaaattgcctacaatttacttgaagctaatgatagttatgtagccatctggaataaggaagaatakttacttgtaaaacttctttataataatatttacacttacacacagattgctccaaagattaaagcacagatgatgatggaaggcacaatcatgataagctaccagccatgtggagacaaagtaaatattttgcgaatggtttttttctaatcctgcctcaagacagaaagatgttgactatcttattgatgaaattgaaaggcttgggaaggatttatgatacttcaatgtgaacttggatatcccatgtaaacatcaacttaattctattcctaaggataataagaaaggaatattgaaactgttataaaaatgttat

SEQ ID NO: 543765 - DNA, 625 bp, Homo sapiens
aaacatgatactatttttccattctctatttcattttatctctttcccaggtacgtctatttgaatcgccatataaatacaaggaaatggcacatgcctttctttaatgcagtctagcaaatttatattactttatgcttggtaattgtaaatcatggggtaatgagagctgcaatatgaatatagaatttgctgcttttttgtactaagctacttcttaaaaattatccctgatggtcttaaattgcctacaatttacttgaagctaatgatagttatgtagccatctggaataaggaagaatagttacttgtaaaacttctttataataatatttacacttacacacagattgctccaaagattaaagcacagatgatgatggaaggcacaatcatgataagctaccagccatgtggagacaaagtaaatattttgcgaatggtttttttctaatcctgcctcaagacagaaagatgttgactatcttattgatgaaattgaaaggcttgggaaggatttatgatacttcaatgtgaacttgratatcccatgtaaacatcaacttaattctattcctaaggataataagaaaggaatattgaaactgttataaaaatgttat

SEQ ID NO: 543766 - DNA, 241 bp, Homo sapiens
cctcggcctcccaaagtgctgggattacaggcgtgaaccaccgtgcctggccacttctcggatctctgattggagccccttctggtagtttgctgacccttcctaaatgacatacctgtgatggactctagtttttctgtgaagcagtgggtgagatataggatgataagrgcatggggaagaaccgaaatggctttaggggaatgggtgatatgaccaaggacatttgaaatgggcaacc

SEQ ID NO: 543767 - DNA, 506 bp, Homo sapiens
cttgagcttgcttgcctcttcctggtttttgtttcttgttatttgcattcttgaatggcaagagaaagtgcaaaaaacaagggtaaactttaaagggaccatgaggcaaggaccgactgtagaatgggagagaccacagcaggctctccatcatctcccacagcgtctcctcatccagcgccgtgagcgcggagccttgcggcattgcggcaccgttccgccatggctgggcactgggaggaccctaagaggggcggccataggggtggagttgtcagggaagcaggagcccgggagagccagggtgacacccttttaaaatcaactccgtcgtaaaattagcaaggcacactctttgccagtcaacccacggtcctgagatgtttacggcagaggaagcatcttggtaaagtctgcaaggacaaacttgccsctatatcacaggacaagatctgcttttaagatgattatactcatgctttgatgtacttaacacactgaaatga

SEQ ID NO: 543768 - DNA, 537 bp, Homo sapiens
acagcaaacatagcataatgtaaggaagaggtgaatggtagtttgcctaagaattaattattactgttattgccttggggaagaggccagggaagaatgtgaggctatgccttacctagctatacacccagcaccagcctgaacatgcacagaactgtcactctataaatggagataaatggcaaaagaaagaaggagtaacagtcttactttctcataaataatgtatttcagtggtaccaactttgttattactgagggtaaaggatccagtgaagttggcttgaaagtcagtttttcttcaatcccataataatcaagtggaaacttttaagataaaaagttactgggggtgtggtagtttcagcatcatggcaggaattacacttttcccacttaggagttcaatgttcaatggaaytgagtgtccagcagaccaggaatgcagtattatactttgtcaacttgaaaatgtcatgtatttgagatttctaatcacagtaaaaaaattctccacttgatttggtcagcttactg

SEQ ID NO: 543769 - DNA, 632 bp, Homo sapiens
ttcctctatatacatacacacacaccttttaggaggcaaactacttaaaaataagtggcagacactgtgatctctgatcctcaaagaccatatatctcctaaggacaaaaacgttctcctatattacctcaatacaattatcacattcaaaaattctaacattgataagtattattatataatatacagtccatattaaaatgtcccaattctctcagtaatgccttttaaaactttttttgtttgggattcagaatctaaggaaatacactcaacatttggatatcaaatctttttagtctcctttaatgtagaatagtttcctagtccccctcatttttgtgacaatgacagtacccagcasttgttctgcagaatgtccctcaatctgtttgattgtttcctcatgattagatgcaggctaaacactcttggcaggaacattatatgaaacattgtagtcaggtgctactaccaagaatatgacttattgttgaaattagagacacacttcaaaatagatcttttaaatacttgcaacttctcagtgataacaaaagaaaaagtagtaccaaaaaaggggcaaataacctaatttgggtttggattttctttttatttgtttcagggaa

SEQ ID NO: 543770 - DNA, 609 bp, Homo sapiens
gggcttttttcctcttctctataccgcttttattttmtatcaattcaacttactgagaggaattttcaaggctttttttcttttcagcaagcctgttagccatgctaagcaaatactgagtgccaggttttttaacttaatgacaagtggctggaaactctggtgaatgtcttcctctatatttaagaaaatttatctgttgagaaaaacactttaaaattaccactattgtcttccggtctccaaaaaagatataggcaaaacagttttctcaaatactccataaaatttttcctttaaaaagagattattttattttaaacaagaaatcaatacccactaggaaagcaataccatgtcagagtgagaaagagagtgtgtatatcctccagaggccaaatagaatgtaattttaaaatgtgcaatggttaattctgtttatcaatttttctgggccacaggatgcccagacatttggaacatcattatgctaggtatgtctgtgagggtgtttctgggtgagactgacattttgcaatggtacaccaagtaaagctgactgccctccttaatgtgggtggcccccctccagtcaaccaaaggcctgca

SEQ ID NO: 543771 - DNA, 609 bp, Homo sapiens
gggcttttttcctcttctctataccgcttttattttatatcaattcaacttactgagaggaattttcaaggctttttttcttttcagcaagcctgttagccatgctaagcaaatactgagtgccaggttttttaacttaatgacaagtggctggaaactctggtgaatgtcttcctctatatttaagaaaatttatctgttgagaaaaacactttaaaattaccactattgtcttccggtctccaaaaaagatataggcaaaayagttttctcaaatactccataaaatttttcctttaaaaagagattattttattttaaacaagaaatcaatacccactaggaaagcaataccatgtcagagtgagaaagagagtgtgtatatcctccagaggccaaatagaatgtaattttaaaatgtgcaatggttaattctgtttatcaatttttctgggccacaggatgcccagacatttggaacatcattatgctaggtatgtctgtgagggtgtttctgggtgagactgacattttgcaatggtacaccaagtaaagctgactgccctccttaatgtgggtggcccccctccagtcaaccaaaggcctgca

SEQ ID NO: 543772 - DNA, 654 bp, Homo sapiens
tggtaagtttagcactttttgttgtccaagaaagtgtgtaagaaacaagggccagcattttcactggactgtcaaagcaaagattgcaataattttgtaaaattttgcaaaaaaatgacaactctgtgaagtgaaggcaatgttaattagcttgatcatggcaatcctctcacaatgtctgcatgtgtcaaagcatcatcacatagtacactataaatatatacaatgtttgtcaattacaccaaaataaagccggaaaaaaaggaaaagaaaagaaacatgaaaagaaagtgacaattgatatatatgttgtgtaacatcaaataaaactgcatgtgaactaacatcacgtttgcagaaacagaggaactcaacggttaatgtcaatcttatgaaataaatattcytaagatgtttatataggagtatagtttatgcaattaatatgttcttaaaacattaggagcaaacataacataatttttacaaattaaaactttttgtcatgctaggaggaaaaacatttgaaaggacattctctggtcaatatttctataaaagttacttatctcattttaatgttaattctgtatgttgtaaactgattcatcctgagacccactttttgttactgaattcttatcaaaaagcaaa

SEQ ID NO: 543773 - DNA, 456 bp, Homo sapiens
ttaataataataataaaattagttgctattattaagcctgtcttaaactgcagagaacaagacagacacaggggatgacctacaagcttcaagactcagagaattcaacaaccttaagaaatacctcctgggcagaatgctgtatttggaaggttggaagactctgagcttgagaaccctgaagaaggcggaactgttgggttgccggcagccgggaagggtttgcctgacactcttggctgggcgggaagaaatggggggaaggagaagggcggcgcactgggctgctggaagctgggttccttccgaagggacgttacgctaccgtccgtaatatcaccccaagccctagcattctcaggaaagtcgcttatgaagctatgactcaagtgccgcagtrcttgggcccacgcttcgcagcgtggaatcagcggcggggcgcggcggcacgaggaa

SEQ ID NO: 543774 - DNA, 607 bp, Homo sapiens
gtaaaacaactcacagatattaaatggctttccatggttacctatttctgtaaaaattatttacacagagtacaaataaaacacaaagtgtctccttggcaaggcatagtgatagacacataggagttaaaaacttattaaagacatgatccttatcctcaaggaacctctattttaggaaaaataaaacatattctccaaatagccacaacgtaataagtgtataataaatccaatcttaagtgagtcattccattaaggatttaggagtttgrtggacagagaaactgtgggtggcagagtagttaggggaaacatgattggggcagaggcagaaattgcatgatgactggacagaaaaggctgtgaacagatatgagaagaaagcctcccaggagcagagaatagactaataaatgaacagagactggaacaatcaacattgtctggggcagtgaatatatctaatagctgtagcaaatagcagagatgctatgaaggggagctgtgaaagtcaaagatagaactggtggtggcactacatatgccactgaaagtgggcttgatgggaggatttttcatacttttattaggctattagtggcca

SEQ ID NO: 543775 - DNA, 607 bp, Homo sapiens
gtaaaacaactcacagatattaaatggctttccatggttacctatttctgtaaaaattatttacacagagtacaaataaaacacaaagtgtctccttggcaaggcatagtgatagacacataggagttaaaaacttattaaagacatgatccttatcctcaaggaacctctattttaggaaaaataaaacatattctccaaatagccacaacgtaataagtgtataataaatccaatcttaagtgagtcattccattaaggatttaggagtttgatggacagagaaactgtgggtggcagagtagttaggggaaacatgattggggcagaggcagaaattgcatgatgactggacagaaaaggmtgtgaacagatatgagaagaaagcctcccaggagcagagaatagactaataaatgaacagagactggaacaatcaacattgtctggggcagtgaatatatctaatagctgtagcaaatagcagagatgctatgaaggggagctgtgaaagtcaaagatagaactggtggtggcactacatatgccactgaaagtgggcttgatgggaggatttttcatacttttattaggctattagtggcca

SEQ ID NO: 543776 - DNA, 583 bp, Homo sapiens
cctcaagaaaggctttggtgttagtcattcacaccttagtataaatttaaagtttgggggaagtttcttccaggtatatttacatgttaagtgatctgcartgacagcaagaaagattcgttctccattagagaattaaggtatcgatgaaggaggagaggttctctttcttggcaggggaaggatattctctggactgtttaaatcagacttctgtccttactcaaagaatctcttcaacccatgccagcttaactgctagtattcatgggactctatggccatttgtttcctttagatgttttttcacagaataaagccagaagtcctttttgtataactacctaagaagataactggctccgggcctttgaggactgtggtaggtttcagggccagcagatgggccccataagaccctagacccaaccctgatgcctgccttctgtcacagcactcactattgcgacgccctttgactccatctacttcggcctgtgtggcttcaacagcaccctcgcatgcatagcgataggaggcatgttctacgtcatcacctggcagacgcacctcctcgccatcg

SEQ ID NO: 543777 - DNA, 583 bp, Homo sapiens
cctcaagaaaggctttggtgttagtcattcacaccttagtataaatttaaagtttgggggaagtttcttccaggtatatttacatgttaagtgatctgcaatgacagcaagaaagattcgttctccattagagaattaaggtatcgatgaaggaggagaggttctytttcttggcaggggaaggatattctctggactgtttaaatcagacttctgtccttactcaaagaatctcttcaacccatgccagcttaactgctagtattcatgggactctatggccatttgtttcctttagatgttttttcacagaataaagccagaagtcctttttgtataactacctaagaagataactggctccgggcctttgaggactgtggtaggtttcagggccagcagatgggccccataagaccctagacccaaccctgatgcctgccttctgtcacagcactcactattgcgacgccctttgactccatctacttcggcctgtgtggcttcaacagcaccctcgcatgcatagcgataggaggcatgttctacgtcatcacctggcagacgcacctcctcgccatcg

SEQ ID NO: 543778 - DNA, 596 bp, Homo sapiens
tagggtgtgtataggtctaggttcataataagagtttccaggttcaggcaaatctccttccaacattttttccctggtaaaataaggagaaaataagctcctcgggtttccctgaaggagaaaartgaatcttcaggagacagtgtgagtggcctgctttgggaatgaaaggaatcatactagtgtctccatgacttccttatgcaaatggaccactgtccctgatagaaataatcatgctaatgatggtaatgagaataataactgccacaaatggtagagcatttgcaaaattcctatattatactattgtccccattttgtagatgagcaatctgaggctcagagtttaaataacttgctcaaagtctgactcaaagtttgtacttttagccactccagtgctgtccaatatttccaacttctgcctgtatgtttgcttttcattaattccttcactcaacttggccatgatgcatatttatggacctcatcctgaagctgcctccacatgacacccatggagccttctgcctcagtcgcactggtcagggctgaaggtgtgtagtgaatctcagacctccttggaaaaacca

SEQ ID NO: 543779 - DNA, 596 bp, Homo sapiens
tagggtgtgtataggtctaggttcataataagagtttccaggttcaggcaaatctccttccaacattttttccctggtaaaataaggagaaaataagctcctcgggtttccctgaaggagaaaaatgaatcttcwggagacagtgtgagtggcctgctttgggaatgaaaggaatcatactagtgtctccatgacttccttatgcaaatggaccactgtccctgatagaaataatcatgctaatgatggtaatgagaataataactgccacaaatggtagagcatttgcaaaattcctatattatactattgtccccattttgtagatgagcaatctgaggctcagagtttaaataacttgctcaaagtctgactcaaagtttgtacttttagccactccagtgctgtccaatatttccaacttctgcctgtatgtttgcttttcattaattccttcactcaacttggccatgatgcatatttatggacctcatcctgaagctgcctccacatgacacccatggagccttctgcctcagtcgcactggtcagggctgaaggtgtgtagtgaatctcagacctccttggaaaaacca

SEQ ID NO: 543780 - DNA, 596 bp, Homo sapiens
tagggtgtgtataggtctaggttcataataagagtttccaggttcaggcaaatctccttccaacattttttccctggtaaaataaggagaaaataagctcctcgggtttccctgaaggagaaaaatgaatcttcaggagacagtgtgagtggcctgctttgggaatgaaaggaatcatactagtgtctccatgacttccttatgcaaatggaccactgwccctgatagaaataatcatgctaatgatggtaatgagaataataactgccacaaatggtagagcatttgcaaaattcctatattatactattgtccccattttgtagatgagcaatctgaggctcagagtttaaataacttgctcaaagtctgactcaaagtttgtacttttagccactccagtgctgtccaatatttccaacttctgcctgtatgtttgcttttcattaattccttcactcaacttggccatgatgcatatttatggacctcatcctgaagctgcctccacatgacacccatggagccttctgcctcagtcgcactggtcagggctgaaggtgtgtagtgaatctcagacctccttggaaaaacca

SEQ ID NO: 543781 - DNA, 256 bp, Homo sapiens
gatgcataatccagagattatatatcaatgtggttgcactttgtggctgaatttagaaaactctagcctataaaattatagttggttrctaacatttggtcatcaatgaaatgaccggaacaaaggctctaatgactaggttatcaggaaacttatctgaattctccattgtgctctcaatgtggacatactttttataatcaaagtacccatcagctagagctggagaagatctgggctctctcactggtgccac

SEQ ID NO: 543782 - DNA, 589 bp, Homo sapiens
taagcatataccttttggctgtgcagrtgtgaaatccaggtttaaatttcctcctgcacctacaacatacataacgaaacaaatgtagaaacaaataatagggaagtaagttatagatggtcctttagaagtcaatttcatctgcgcatctaaccataaaagcagcatctgctctgctaaatacaggtgttttatatccttgtcattaattggaggggacattatgtcatcatacatcaacagttaaggttggtgaaagtgccacttatctcaggtgctgtcattaatcaggttcttttcagcttggtgactccagaggctcgtctcgaagctgctctatgtgaatgggttttccctgtaggtttgaggtgtccttttattatcattttgaatgaaaaccttgggacccagacgtaagaggccattaagggagctgtttcgatgcttcagagaagagagacattttcctccatcaccttcattgcccccactctctgtgtctccaccaagcagccacggtggagaggaaggcaaagcagcacaagctgttgtctcatcacggtttaacccattactgaatttcaacaaa

SEQ ID NO: 543783 - DNA, 631 bp, Homo sapiens
ctgggcaatgtaaagagatcctcatctctacaaaaaataaaattaaaaattagccaggcatgctggtgttcacctgtagtcccagctacttggaaggctgaggagggaggatcatgtgagatcaggagttgtaggttacagtgagctatgaaaatgcccccgcactccagccagggtgacagagtgagactctgccttgaaaaaagaagaaaagaaaaagaaaagtgaatgattacaagctgagttttagatatgctgctttatagggatcttcaagctatcagtgttagcacatagtccaatgggacattgcctaattttagatattcaaaatgtagcatttccaaatgaggattctactttgaatagttagtctgaaaaagaacgcactatgccaacaatcgtgtcattgctcaaaactcatctaaggtttctccttgaaaatttcgctgagagccagtttgcagcttctctaccatcagccttggattcaaaaggtgcttttcagatatcctctaagctcctctgtgtataccaaccacagcactcactctwggcattgcattgtcattttatttgctgtatctctagaacctgagctcttttagtttgctcacccctggattctggt

SEQ ID NO: 543784 - DNA, 599 bp, Homo sapiens
ctgaatttcacagtattaaagttattgggcatattgacaacagcatttaatggagagcagtgaggaagggagctaatgggagagaaaaagaagagagttcactgagacaatggccacaggaaaaatttgttgggaaggacaacagagacatgtagcagtagcacttgcgcaaagactcattcatatatctattgaagcaggaaagatagccaagggacgaagcttaggaatggatgctggtagatatgtaggttagttacctgctgcttgatttggctttctgaataaagtaagtactgaagtcataaggtgatgaagaggcagagttggaggtaaggcagtctgcaaagagaggggaaaatgtggagcagttgttttagagaatggtacagcaaccacatcagggaagcatcacagaaattctggttgggtgcccattggaggtctgtgttatggaattttaagtaagaactggcagcacaagtgtgttttcttttttccctacaatgttcagttgtttgggtgcagggacasaataggttggtaattgaatttcatgagaatcggagtttgccaatgaaatatgacaaagtgagaaa

SEQ ID NO: 543785 - DNA, 666 bp, Homo sapiens
ctgcaaacccaggaatgccagtgattgccaggagccaccagaagctggaagagtcaagccaggattcttccctagagtcatcaaaaggagcaggaccccgaggatatcttggttttggacttctagcttccaaaacaataggataattgatttctgtcattttaagccccccagtttatgacaacttattacagcagccctggggaaccaacaaaacaagaaagtgctaactaaggctgtgtgctgaatgccccttcatttgagagtgtggagttaaccagaagygttttaccaggaagccaatgacacttgtgctctgggaacccctcacctacttagctctgtcaaggcaaggtacacccatagtcatatttttttttttttttgagacggagtcttgctgtgttgcccaggctggagtgcagtggtacgatctcggctcactgcaacctctgcctcccgggttcatgccattctcctgcctcagcctccctagtagctgggactacaggtgcccgccaccatgcccagctaattttttgtatttttagtagagacggggtttcaccatattagccaggatggtcttgatctcctgacctcgtgatccacctgcctcggcctcccaaagtgctgggattacaggcatgagccactgcgccccac

SEQ ID NO: 543786 - DNA, 666 bp, Homo sapiens
ctgcaaacccaggaatgccagtgattgccaggagccaccagaagctggaagagtcaagccaggattcttccctagagtcatcaaaaggagcaggaccccgaggatatcttggttttggacttctagcttccaaaacaataggataattgatttctgtcattttaagccccccagtttatgacaacttattacagcagccctggggaaccaacaaaacaagaaagtgctaactaaggctgtgtgctgaatgccccttcatttgagagtgtggagttaaccagaagtgttttaccaggaagccartgacacttgtgctctgggaacccctcacctacttagctctgtcaaggcaaggtacacccatagtcatatttttttttttttttgagacggagtcttgctgtgttgcccaggctggagtgcagtggtacgatctcggctcactgcaacctctgcctcccgggttcatgccattctcctgcctcagcctccctagtagctgggactacaggtgcccgccaccatgcccagctaattttttgtatttttagtagagacggggtttcaccatattagccaggatggtcttgatctcctgacctcgtgatccacctgcctcggcctcccaaagtgctgggattacaggcatgagccactgcgccccac

SEQ ID NO: 543787 - DNA, 666 bp, Homo sapiens
ctgcaaacccaggaatgccagtgattgccaggagccaccagaagctggaagagtcaagccaggattcttccctagagtcatcaaaaggagcaggaccccgaggatatcttggttttggacttctagcttccaaaacaataggataattgatttctgtcattttaagccccccagtttatgacaacttattacagcagccctggggaaccaacaaaacaagaaagtgctaactaaggctgtgtgctgaatgccccttcatttgagagtgtggagttaaccagaagtgttttaccaggaagccaatgacacttgtgctctgggaacccctcacctacttagctctgtcaaggcaaggtacacccatagtcatatttttttttttttttgagacggagtcttgctgtgttgcccaggctggagtrcagtggtacgatctcggctcactgcaacctctgcctcccgggttcatgccattctcctgcctcagcctccctagtagctgggactacaggtgcccgccaccatgcccagctaattttttgtatttttagtagagacggggtttcaccatattagccaggatggtcttgatctcctgacctcgtgatccacctgcctcggcctcccaaagtgctgggattacaggcatgagccactgcgccccac

SEQ ID NO: 543788 - DNA, 666 bp, Homo sapiens
ctgcaaacccaggaatgccagtgattgccaggagccaccagaagctggaagagtcaagccaggattcttccctagagtcatcaaaaggagcaggaccccgaggatatcttggttttggacttctagcttccaaaacaataggataattgatttctgtcattttaagccccccagtttatgacaacttattacagcagccctggggaaccaacaaaacaagaaagtgctaactaaggctgtgtgctgaatgccccttcatttgagagtgtggagttaaccagaagtgttttaccaggaagccaatgacacttgtgctctgggaacccctcacctacttagctctgtcaaggcaaggtacacccatagtcatatttttttttttttttgagacggagtcttgctgtgttgcccaggctggagtgcagtggtacgatctcggctcactgcaacctctgcctcccgggttcatgccattctcctgcctcagcctccckagtagctgggactacaggtgcccgccaccatgcccagctaattttttgtatttttagtagagacggggtttcaccatattagccaggatggtcttgatctcctgacctcgtgatccacctgcctcggcctcccaaagtgctgggattacaggcatgagccactgcgccccac

SEQ ID NO: 543789 - DNA, 621 bp, Homo sapiens
gtgcataagattttattagcaagccaaacccaggcactgactcatcattcttgagagcaattatatgcatttaagcaagtaggcaagtgaaaaaagtcataaaaaaatcctaaaaagctctgacaaaattcatataaaaatctacctctttgcaacaatttctcttctgaaagttacttgtagagtcaatttcatatattaaattcagattttccaagggcatctcaatggcaacaattccctctgaaagaatatcaagttgtctttttaagaacttgtctgcattgcatctggctcatctaggcattatatggacattgtgaggtgccaaatttgtgggtgtgttctagtcaaggtggwcttaggcccaggggaaagaaatccactaaaggtaaaacagagccaagtaatgatgttactgttgctaatcgtggtagtaatcgtgggcacagctactatttgttgagctcttgctatgggccagaaatcatactaagacctttaaatgcattatttcattgtatcctcacagtagccttatgaagtaaatatactgggagtgaggcacagaaaagtaaagcgattctcccaagattccctaggatttgaacccaggcaagg

SEQ ID NO: 543790 - DNA, 639 bp, Homo sapiens
atggaagaaaaaagaaaatgttgataaagaaccaaatggaagttgtagaattaaaaaattttaatccttgacattaaaaatcaaataaattaaacaacgggattagatactgctaaagagaaaattaatgaactagaagatagagcagawtctattttctggactaccacaacagagagataaagaagtggaaaatatgatagagaggttatgagacttggaggaaagcatacatctatgatgagtcctagaaagggacaatagggttattggaagaatagtaatatttgaagaaataatggctgtgaattctcttgtgtaaatgggaaagacaaatcatcaaattcaaatgcacatagatgatatgtcctagatgcctctcttccgactctagcatgaaccagaatgaaacatgagggtttattctgcaagtttgaccacagtataagaaaatgattcaaataggaagtgatggtatctgcagatgaactggcttctgcccttgaggattccactttgtcagctttgatcctgcctcttcccttctccactccctgtgcttgagctttggtgttttgtatgtttgtttttccaccatacctggcttatggagatacgtggattcaagccttctatttc

SEQ ID NO: 543791 - DNA, 330 bp, Homo sapiens
ataatgacacagttatatcatgactactggctggtcaacagcaattgttagacacagttgattgtgcaaagcatcccaatttcagagacattaatgtgaaaaaagaaatatgttttcagaatctatgagatatatatctacacagtacagcattatacccaacacttggtagatgctttaaaagttattctctttttttctctctttttctttttacacacacaatagctatcaaattggtgrgtctactgataaagcttatgagttcacagggggagtaaatatcttgaagtagagaagtcaaaattgctttatggaaggaatgggaaa

SEQ ID NO: 543792 - DNA, 573 bp, Homo sapiens
aaccagggaatccacttaatgaaaagatgacttctttgtatatttttttctcaaaagatgacaaaatagttccactattttggcactaaagtttttgyttgtttgttagtggtattctctctctacaggaaatgagaaaacatctcaaccataggctgttgatacaaagaactctgcaggaaagcatctttgtgatggtacgccttgaaaaactaatcaagtgctttatgaaaatatcataaatctaatttatggaaaaattagatttatatgcaataaacaaaatgtctctaagtgtatcacatttttatgccaacaacgaaaggttttttgttcagatatttttactagtttagttctgagggcataaacctctacttggtagaagaaaatgaacaaaaaaaaactatctgttactaggtctttctttattcggactcaaaatcgacctttgaagtatgaccttctccaggttctgctgtatttaagggcacaatttaaacaacttttaactctaattatctttatagttctggcatgacaatgtcattgtagttgggtctccacccagaa

SEQ ID NO: 543793 - DNA, 573 bp, Homo sapiens
aaccagggaatccacttaatgaaaagatgacttctttgtatatttttttctcaaaagatgacaaaatagttccactattttggcactaaagtttttgtttgtttgttagtggtattctctctctacaggaaatgagaaaacatctcaaccataggctgttgatacaaagaactctgcaggaaagcatctttgtgatggtacgccttgaaaaactaatcaagtgctttatgaaaatatcataaatctaatttatggaaaaattagatttatatgcaataaacaaaatgtctctaagtgtatcacatttttatgccaacaacgaaaggttttttgttcagatatttttactagtttagttctgagggcataaacctctacttggtagaagaaaatgaacaaaaaaaaactatctgttactaggtctttctttattcggactcaaaatcgacctttgaagtatgaccttctccaggttctgctgtatttaagggcacaatttaaacaacttttaactctaattatctttatagttctkgcatgacaatgtcattgtagttgggtctccacccagaa

SEQ ID NO: 543794 - DNA, 483 bp, Homo sapiens
aaaaaaaaaaaaaaagacatctgaatttggggtcaacctaattgtgttcagttgatgaggttcttataacctagaaaatcttacatccttttttgtgccttattgcatcatatatatatatatacactgaagataataacaataacacagtgaagtaatgattaatttgggcaatatatgaaaaattatttggtaaatggcacatgttttgtcaatagtacatatttatatattgtgtttacacwaatatttcatttttcctccgaaatagcttttatcttatatctaagaattttctatagcactggctataatatatgtgtatatacaaatgattagcatgtagttgaataaaattaattctgcttagcaaaagtttggattcttatttgaaaacagaacttgggtacagcgtaacatgcatgtctttcgtatactgtgctcgttttcagataaactgcacagtcacctgagatttagcca

SEQ ID NO: 543795 - DNA, 483 bp, Homo sapiens
aaaaaaaaaaaaaaagacatctgaatttggggtcaacctaattgtgttcagttgatgaggttcttataacctagaaaatcttacatccttttttgtgccttattgcatcatatatatatatatacactgaagataataacaataacacagtgaagtaatgattaatttgggcaatatatgaaaaattatttggtaaatggcacatgttttgtcaatagtacatatttatatattgtgtttacacaaatatttcatttttcctccgaaatagcttttatcttatatctaagaattttctatagcactggctataatatatgtgtatatacaaatgattagcatgtagttgaataaaattaattctgcttagcaaaagtttggattcttatttgaaaacagaacttgggtacagcgtaacatgcatgtctttcgtatactgtgctcgttttcagrtaaactgcacagtcacctgagatttagcca

SEQ ID NO: 543796 - DNA, 627 bp, Homo sapiens
caagtggcagcttacttagatatatttttacatttaaaggtcttaaatggatgactaggcttcatatttattggacagtcctaatagagattttctgcaatggcctttagtcactgttttagtgtgttaatggagacaagtgaagccccaaggccatgtgttttcaagagtgcttctagaaatagttttcttctattttgaggccaatttcaattttttttttttttttacttacagtgaacgctatggtaataccttcaaggagtacatgggaaatttttctgagcttgggatttttgatagaaaaataacaacctatgttctctgtgcctaaagccatctttttttcccattggttccaaggttctgggtcatgggacacaaaaagaaccattttaaattctcaccttactcacctttaacagcttacagtatttttatatttcgtgcatattcaaagccagcttgcctctgcgaggcgtcttaagctctttctcattacttcctgggaaagtcctgagtctgaccattaagtgggtcatagctgctctttctgttatttttatcttytcttcttttactttccttgctggagcaattttgaattttagcaccagctatggaccc

SEQ ID NO: 543797 - DNA, 606 bp, Homo sapiens
tgttgcctctaagtgtcatttaatctggggatgtctaccatctataaattaaggaagttgaccagaaaagttattggagcatatactcaccactattgtttttctgtattaatagtggccgctcagaaaccatgattagtggttgtctctacctcaaatatctgccaaactggccttctgtgggcttctaagatcccacactgtattcccctgtaaggaaacacattgaatgtgattgttaaaatcaaaacgctatgaggaagatgagatatacrtggctgttaacgtcctagtacagagtagttgatcaagttagttgtatagttcagtgttgaggcacctatgggtaagaatgaaaaaataagtttctcttagagaagattgtttgaaggggcaaatgttagggtttgtggggaacccagcttaacagtaggacttcacctgcttgagagaatacgaggagaagtgtatggagggagaagcaaaaggagatgaggaaacccatttcatagaataaggttttttctgtgtctttccattcacttatgtagctacctctctttgtgagaaagcctcaaaatactcccaatgaaatttatacagaga

SEQ ID NO: 543798 - DNA, 606 bp, Homo sapiens
tgttgcctctaagtgtcatttaatctggggatgtctaccatctataaattaaggaagttgaccagaaaagttattggagcatatactcaccactattgtttttctgtattaatagtggccgctcagaaaccatgattagtggttgtctctacctcaaatatctgccaaactggccttctgtgggcttctaagatcccacactgtattcccctgtaaggaaacacattgaatgtgattgttaaaatcaaaacgctatgaggaagatgagatatacatggctgttaacgtcctagtacagagtagttgatcaagttagttgtatagttcagtgttgaggcacctatgggtaagaatgaaaaaataagtttctcttagagaagattgtttgaaggggcaaatgttagggtttgtggggaacccagcttaacagtaggacttcacctgcttgagagaatacraggagaagtgtatggagggagaagcaaaaggagatgaggaaacccatttcatagaataaggttttttctgtgtctttccattcacttatgtagctacctctctttgtgagaaagcctcaaaatactcccaatgaaatttatacagaga

SEQ ID NO: 543799 - DNA, 620 bp, Homo sapiens
tacctacatttccatacttagtttcctgttacccactccatcatagacaaaggataacgaattaaaatacatgacagtgcattaatatcaacaaaaagttacaagtgtgagcacatagcatcataaacctgggtaactcctatgtgctcaattaacaygcataacacataattcatgttttataaaataatatttttattgaggtaaaattttagccatattgccaggcactcactgactttaagtgtgtaattcaataagtttggactaatgtttaaaatcatgcaaccacctccaaaataaaaataataaaacatttccattatgagcaaccattgttttgattttgattttggttcatgataccatgaattagtaaacttgtttttgaactcatatgaataaaatgacacatagctattctgtttttatctagtttctcttattcaacataatttttctaagattcatccatgctgtttctaatatcagtagtttattttatttcagtctgagccattgtccattgtgttactataccaggatatgcttattcaatctcctatttgtgagcatttgcattgtttccagtttttgttggttactatgagtaaagcctt

SEQ ID NO: 543800 - DNA, 610 bp, Homo sapiens
tttttttttcttttggatatatacccagtaatgggattgctagatcaaatgtagccatgtttaagttatttgacaaatctctaaacaatgtgcagtactttccacagtggctgaactaatttacattcccaccagcagtgtataagtgtttccttttctctgcagcctgactaacatctgttgttttttgacttcttaatagccattctgactggagtgagatgatatcttgttgtggtcttgatttgcatttctctgatgagtagtgatgcaggagcattttctcatatgttttttggccattgtatgtcttcttttgagaagtgtctgttcatgtcttttgcccatttttaaatggggttatttcctttttgtgtgttcaattgtctaagtttccttgcaattttggagaattattttagtggggacaaaaaattaaagaccgaaatgacatgattctattgtggaaaagccaacacctaagcaactttctccaatgaaatgttatcaatcaaggaagaagaaagtcttccccccrccccccaaaaaatgcattattaaaaaaattattttgtttcccaaatagttctgacctaaataaacacatatg

SEQ ID NO: 543801 - DNA, 596 bp, Homo sapiens
ttacagcttataaatggctttcacatatatactatcaattaaactctacaaggtgaagatctgaggtaaagttataaatcatcttgattgggactctaaggtttaagaagtgagcacaatgtttcccaaacttctctgaacattggaaaccaccaggggagcttcaaaatttactagtgtctgagttccaactccagaaaatgtgatttaattggtttgggatctcacgtgggcactggaatgtttaaaagaaaagatgcttccaatgtgcagtcaagcttgaagtctacttcataagtttctaaagttctacaactggaaagaaacagaactaggattaatttcaagacagagtgtgtctagttygctactttcaacataggtaaatatatatatatatacatacacacacacacacacacacacacacagagctggatctaataacctcctcattcctatcataggaaactcagtaaaatgaattttcactctttttccaccaactttatttccatagagtttaaaattgggtggatactggttggtggaagtgaattaactgtatttggtagattagatcaagaagattacag

SEQ ID NO: 543802 - DNA, 511 bp, Homo sapiens
ggaaaggcagtttaatggaaaattaagagactgcaagaaggagaaatacaatcttttctttcttcactatctagtacagcattgattctgttcacagaccacttgtctgtgagagactatattttcatttcttttacaaatattaatcaacattataggtttcttgggataaatgtacatttgttcctttttgaatattaagtatatcttaaggattgataacaagacatgtgcattagtttaaggtatctattagtaacttgaatgcttaagtaagggaagatggaagaaaataaccagcttctcatgtyaattgtttcaaaaccataataaacacccactcaggtccaaggcatcttttgtcaattgctttatctatggactgtattgtgagatggctttacacaaaagaaatagataagtgatggtgctggttttaccaagcttgaggatctggatttgctgataagcctctttgaggtgatggtatcacagaaaaagaagtcccagg

SEQ ID NO: 543803 - DNA, 500 bp, Homo sapiens
gaatgttatttagcaatgcaaagaaatgaagtactgataaatggtacaacatggatgaatcttgcaaacattatgctacatgaaacaatacagacataaaagaccacatattatgattccagttatatgaaaattccagaattgggaagtctacaagaacagaaagtagattcgtggttgccacagcctcagggaccagataatggggaattrgaatcaacttcaaatgtctatgaagtttcttttgaatgcgataatgatgttctaaaattacatagtgttgaggtttgcgcaattttttaaatataataaaaaccactgagctttatactttaagtgggtcaattttatggtatgttaattacattccaatacatcttttataaaaaattctaatggggcaagtttccattcaggggactcctttgtggcattcacgctgcactgtctacttctgtgggtttctcctctcccgttcttgtgcctagtcatacattttt

SEQ ID NO: 543804 - DNA, 500 bp, Homo sapiens
gaatgttatttagcaatgcaaagaaatgaagtactgataaatggtacaacatggatgaatcttgcaaacattatgctacatgaaacaatacagacataaaagaccacatattatgattccagttatatgaaaattccagaattgggaagtctacaagaacagaaagtagattcgtggttgccacagcctcagggaccagataatggggaattggaatcaacttcaaatgtctatgaagtttcttttgaatgcgataatgatgttctaaaattacatagtgttgaggtttgcgcaattttttaaatataataaaaaccactgagctttatactttaagtgggtcaattttatggtatgttaattacattccaatacatcttttataaaaaattctaatggggcaagtttccattcaggggactcctttgtggcattmacgctgcactgtctacttctgtgggtttctcctctcccgttcttgtgcctagtcatacattttt

SEQ ID NO: 543805 - DNA, 620 bp, Homo sapiens
tcatgtggcctctttgttccctgcagaggttaatgagcatcaattacctgggcagcgtgtaccccagccgggccgtgatcaccaccatgaaggagcgccgggtgggcaggatcgtgtttgtgtcctcccaggcaggacagttgggattattcggtttcacagcctactctgcatccaagtttgccataaggggattggcagaagctttgcagatggaggtaaaagttgtattcatttttgtatttattcctctccgctcagcaatatacattccgctttagttttatagcttctttacatgtgttgttgtattaaattagagatttttaggtttgacattggtgaaagagaattggctcaaccctgagttttgcagttaacatttttcattgcatgaagactatagttaacgacagatgcaaaatggtaatgggatttttgcttgtttaacttaatacacaaaatattagtgatatcttcatagtgttattagtctaatactgtgtgaatgtgagtaaggttaaccagatattttattttatagagatttttctttaacaagaagtttgtccttatgactgaataatacrtgaaattagtatatgtttgagggaagagct

SEQ ID NO: 543806 - DNA, 506 bp, Homo sapiens
ctgttcaaattcctctctcyatctttcactgcaacctatgtgacattttcttcatcattccctgctactccttagcaagattgctatgctctgaacccgccctgccttctctgttctggggatctttttcctgctgtttttacatcccagagtattctgttcccatcagaattctccatcccttaaggcccagatctgatctcaccttcaggatgacagtatccctgttgggagtgaccccgctgatttctaaatctttaccaccttttcagcctttttctttttttttgtgccatttttccaggccttgtcacatgctctttgatattactttgatatacaaatgtttgctatacttttccttcttcctcttccaggttataaacatgttgaggcccggggctgttttctaagttgttattttaggcttgtgtatatccaccaccatgccttaaaaaaaggcctcacattagtaagagctcagtaacatttgctgaatggatgaa

SEQ ID NO: 543807 - DNA, 635 bp, Homo sapiens
gcacctgacgcccttctccgcgcggggacgctttgccacggtggtggaggagctcttcagggacggggtgaactgggggaggattgtggccttctttgagttcggtggggtcatgtgtgtggagagcgtcaaccgggagatgtcgcccctggtggacaacatcgccctgtggatgactgagtacctgaaccggcacctgcacacctggatccaggataacggaggctgggtaggtgcacttggtgatgtgagtctgggctgaggccacaggtccgagatgcgggggttggagtgcgggtgggctcctggggcatgggagtctgtggagccggcgaaataaaatcagagttgttgcttcccggcgtccctacctcctcctctggacaaagcgttcactcccaacctgaccgataacgcctgccatctaaaagtctttaacttgcttgctagtcgtggagatccaaagatctagcgtttgtaatccagtaggatgtggtggtaaatggtaccccttcagtgtttctcaagctgaaggtccaggagtccccaggaccaccgtttcctggcttgagcagcttkttggaaccggagggaggtttcagggactgcttatgaaccagataccaggttgggtc

SEQ ID NO: 543808 - DNA, 508 bp, Homo sapiens
ccaaatttagcttaaagaattaacagaaagtatatagtgaagagttggcctggggctgggtgtggtggctcatgcccgtagtcccagtgctttgggaggcgaggcaggagagtcacttgaggccaggaatttgagaccagccaagacccagtctctacaaaccaatttaaaaagcttgtccaggtgtggtggtgcacacctgtagtgctggggaggctgaagttactggggaggctgaagcaggacratggcttgagcccaggagttctaagctgccatgagctacaatcatgccactgcactccagcctgggtgacagagtgagagcctatctcaagaaaaaaaaaaaaaaaaaaagatggcctgtatgacagtactactaagttccccaatcttactcccagagttttgataaaatatgtaggttttggttctgtaaaaaatgtcatgtaattgaaacagataatctacaacaaaggcagagcattaaatatctcagcaccttctg

SEQ ID NO: 543809 - DNA, 508 bp, Homo sapiens
ccaaatttagcttaaagaattaacagaaagtatatagtgaagagttggcctggggctgggtgtggtggctcatgcccgtagtcccagtgctttgggaggcgaggcaggagagtcacttgaggccaggaatttgagaccagccaagacccagtctctacaaaccaatttaaaaagcttgtccaggtgtggtggtgcacacctgtagtgctggggaggctgaagttactggggaggctgaagcaggacgatggcttgagcccaggagttctaagctgccrtgagctacaatcatgccactgcactccagcctgggtgacagagtgagagcctatctcaagaaaaaaaaaaaaaaaaaaagatggcctgtatgacagtactactaagttccccaatcttactcccagagttttgataaaatatgtaggttttggttctgtaaaaaatgtcatgtaattgaaacagataatctacaacaaaggcagagcattaaatatctcagcaccttctg

SEQ ID NO: 543810 - DNA, 333 bp, Homo sapiens
ccttattttacccagcccctattcaagmtggagtcactctggttcaaatggctctaacagtttgagtaagaatttaaggaaattgtaatccaatattttcagatgtttcttcccacctcatacttatcagttaatgttatatttcctataggattactgttacatgtataacaaggctcagatacttttgaggctttatacatcagaaataaaaacaaaataggtattaagtcttacaatgaaatagaaagtgtaatccagcttaggtccctaaatcatgtctatggactcttacactattaacttagaatgcctttttcacttttttcaaac

SEQ ID NO: 543811 - DNA, 589 bp, Homo sapiens
aatttgatggaaaagaaaatcttcaaagaatttcatacctagccaaaccatcaaacaagtacaatggcagcatgaaagtattttccaacttgcaaggtctcctagagtttacctcrgatacaactttctcaagaactgctacaggatgtcttataacaaaacatgggattaagccaaagatccaccccaacagagatgcaaagtgatgtcccagaacaataactgtgcagagcagtagttagtctagatgggagcagtaatacaaagggttctaggataccagctccaggaaaaatgaatggaactgagagattaccactaagtatgactgtaattgaggtgatttttacaattctgttgcagaatttgactatggctttgagacaaatatagagaaaacaaagcaaacaagaacacgaggtgattcacttttgcaaaataaaaataagtcgtaagaatggagatgcaatccagcagaaaaccataaaaaaatctttatgatataaatgctggatattgactttagctaaaaattgagccaaaagctctctctggggagaagagaacatgtatgtagttgaggaagaga

SEQ ID NO: 543812 - DNA, 589 bp, Homo sapiens
aatttgatggaaaagaaaatcttcaaagaatttcatacctagccaaaccatcaaacaagtacaatggcagcatgaaagtattttccaacttgcaaggtctcctagagtttacctcggatacaactttctcaagaactgctacaggatgtcttataacaaaacatgggattaagccaaagatccaccccaacagagatgcaaagtgatgtcccagaacaataactgtgcagagcagtagttagtctagatgggagcagtaatacaaagggttctaggataccagctccaggaaaaatraatggaactgagagattaccactaagtatgactgtaattgaggtgatttttacaattctgttgcagaatttgactatggctttgagacaaatatagagaaaacaaagcaaacaagaacacgaggtgattcacttttgcaaaataaaaataagtcgtaagaatggagatgcaatccagcagaaaaccataaaaaaatctttatgatataaatgctggatattgactttagctaaaaattgagccaaaagctctctctggggagaagagaacatgtatgtagttgaggaagaga

SEQ ID NO: 543813 - DNA, 517 bp, Homo sapiens
ttctgacccctctggctcccttccaactaaggatgtgtattagtccgttttcacgctgctgatacatacccaagactgggaagaaaaggaggtttaattttacttacagtccatcatagctgggaggtctcacaatcatggcagagggcaaaaggcagttcttacatggcagtggcaagagacgataaggaagaagcaaaagcgaaaacccctgataaacccaccagttctcgtgagacttactcactatcacgagaatagcacaggaaagaccagcccccatgattcaattatctctgctgggtccctctcacaacacmtgggaattctgggagatacaattcaagttgagatttgggtagggacacagccaaaccctatcagagggccaaccacattggcagcactcagccccagttcagggtgggctacactcatgggggtggggtgcacagggccatcagggatgcccagcccttgagtcagggtgggaagccaagatagtccagtgggccac

SEQ ID NO: 543814 - DNA, 517 bp, Homo sapiens
ttctgacccctctggctcccttccaactaaggatgtgtattagtccgttttcacgctgctgatacatacccaagactgggaagaaaaggaggtttaattttacttacagtccatcatagctgggaggtctcacaatcatggcagagggcaaaaggcagttcttacatggcagtggcaagagacgataaggaagaagcaaaagcgaaaacccctgataaacccaccagttctcgtgagacttactcactatcacgagaatagcacaggaaagaccagcccccatgattcaattatctctgctgggtccctctcacaacacctgggaattctgggagatacaattcaagttgagatttgggtagggacacagccaaaccctatcagagggccaaccacattggcagcactcagccccagttcagggtgggctacactcatgggggtggggtgcacagggccatcagggatgcccagcccttgagtcagggtgggmagccaagatagtccagtgggccac

SEQ ID NO: 543815 - DNA, 533 bp, Homo sapiens
tttagcaaagcacctaccacagcaggtgctttgtgaaggaaacttttcctagggccaggagacttcccgcctgccccctaagcctgtgmaccaccacctgagtgcatgtctcttctgatgacatgatggggagttatctgagggcaggttggttgtcggcttgttctgggggctgcaggaagaaagaggggaccccagggtggaggtgagctaagaagagagaacttgtgaggtggaggttgcagtgagtcgagatcacgccactgtactttggcctggacgacaagagcgaaactccatctcaaaaataaaaaaataaaaaaataaaacatgaaaatacggtaaaaaattactgagagttctactgtaaggccaacaacagattctaataaaataaccagaactaatattaggcttcacctgtgccaggcattgtagttgctgacatctgttccctcttttaaccctcacaagagtcttctggagtaagtgatattatcattatttcttggttgaatattgtgttgttagaa

SEQ ID NO: 543816 - DNA, 533 bp, Homo sapiens
tttagcaaagcacctaccacagcaggtgctttgtgaaggaaacttttcctagggccaggagacttcccgcctgccccctaagcctgtgaaccaccacctgagtgcatgtctcttctgatgacatgatggggagttatctgagggcaggttggttgtcggcttgttctgggggctgcaggaagaaagaggggaccccagggtggaggtgagctaagaagagagaacttgtgaggtggaggttgcagtgagtcgagatcacgccactgyactttggcctggacgacaagagcgaaactccatctcaaaaataaaaaaataaaaaaataaaacatgaaaatacggtaaaaaattactgagagttctactgtaaggccaacaacagattctaataaaataaccagaactaatattaggcttcacctgtgccaggcattgtagttgctgacatctgttccctcttttaaccctcacaagagtcttctggagtaagtgatattatcattatttcttggttgaatattgtgttgttagaa

SEQ ID NO: 543817 - DNA, 482 bp, Homo sapiens
aacttctccactcagcaactttctactcaccctctttcatttaacaagcaatgttgattgcttactgtgaacgtcagactcagattacaattggtggctgggaagagtgaaaagagcatgggcctgatccatggtcaaatcccagctctggctcatgtaagttgtgtgacactgagaaagttacttaactcctctgaccatcagcttctttatctgcgaagtgaagatctttatgccagcctttcagagctgatgtgagaattagcatttctcaaacayctagctgaggccttcaagtcagtccttaagaatactcactgcttttaccatttctactactaatcatggttaataagacatgctcactgcactaaaaaggtccaaagtgttactggtggatgggaagcctgttatctatagtgggatccagtgaggaagaggtcaactctaccgggatggaatgggcaagacagacttcaagg

SEQ ID NO: 543818 - DNA, 631 bp, Homo sapiens
tgtccttgtttctatattaaattctttggtattaaaaacagaatgtgagccccaaaacatatctatatgctgtcagtttgcagccccttgggtttacaggtaggcgaatttcattgccttgggaaggaaaagatgaagcaggtcagtgtttttcccatacaggccaagagggtcctcatcccatcctggccctggaggtcagatggggcccatacagggtgggcattcttgtgatagccaccaaggcctcccagacaagaaagttagctacacatttgtgctccagcccttggcttctgggggacygcctggttttattaataaccctggatcgtgctcatagcacatcaaggtaaacagagacattcccagggtgtgtactgtaggcaattctaacagatgaagaagaagcaggtttccaaatataaatacgaagataagataagcaggcagagatccaagtcggcttcatactgagttgcaggctgtgagccatagacttagagaatcgtggctcactggggctggaaggggccctcatttggaggatagagaaacaggcccagagaaaagacaagacttcccaagattcattagatacttctgatttcttatagcatcggtttcctca

SEQ ID NO: 543819 - DNA, 640 bp, Homo sapiens
attggagtgagtatgaaagtgtttctaaaagaggagtgggcagtaaatgtccagagaggattgaggggaattctgaataaaatccaagaggtaggacctgttgctataccttctgggagccatagaaagcccctgggctgagtaatccgatgcctgtggccttttggaacttgggcgaatttgtcaacaacaacacggagctggtgaccgattgagtgggtcatgttttatcctcttgctgcatttcctcagagcaccctgtatgcccggtcctcttcaggaatgtgttcctggtggcaagttcttgtccaaagtatcctccatctagactgtgaactctgtgcagttaggaatggagtctgtgtgattcacccctggatcctcaatgcctggcyctggaatatagtaggcactcaactatcacctgatgtgtcaattttagataacgatggttggtacctatacagatcatttccagaggcgtcttgctgacagcaagggactgggaggaaaatagctgatgtgaagagatggcaggagatgtaggcattcagggaggaattagttgtttttttctctgtgttgcaacacttggctcatctgtttgggcaccttctccctgtcttgattggcatattag

SEQ ID NO: 543820 - DNA, 640 bp, Homo sapiens
attggagtgagtatgaaagtgtttctaaaagaggagtgggcagtaaatgtccagagaggattgaggggaattctgaataaaatccaagaggtaggacctgttgctataccttctgggagccatagaaagcccctgggctgagtaatccgatgcctgtggccttttggaacttgggcgaatttgtcaacaacaacacggagctggtgaccgattgagtgggtcatgttttatcctcttgctgcatttcctcagagcaccctgtatgcccggtcctcttcaggaatgtgttcctggtggcaagttcttgtccaaagtatcctccatctagactgtgaactctgtgcagttaggaatggagtctgtgtgattcacccctggatcctcaatgcctggctctggaatatagtaggcactcaactatcacctgatgtgtcaattttagataacgatggttggtacctatacagatcatttccagaggcgtcttgctgacagcaagggactggraggaaaatagctgatgtgaagagatggcaggagatgtaggcattcagggaggaattagttgtttttttctctgtgttgcaacacttggctcatctgtttgggcaccttctccctgtcttgattggcatattag

SEQ ID NO: 543821 - DNA, 640 bp, Homo sapiens
attggagtgagtatgaaagtgtttctaaaagaggagtgggcagtaaatgtccagagaggattgaggggaattctgaataaaatccaagaggtaggacctgttgctataccttctgggagccatagaaagcccctgggctgagtaatccgatgcctgtggccttttggaacttgggcgaatttgtcaacaacaacacggagctggtgaccgattgagtgggtcatgttttatcctcttgctgcatttcctcagagcaccctgtatgcccggtcctcttcaggaatgtgttcctggtggcaagttcttgtccaaagtatcctccatctagactgtgaactctgtgcagttaggaatggagtctgtgtgattcacccctggatcctcaatgcctggctctggaatatagtaggcactcaactatcacctgatgtgtcaattttagataacgatggttggtacctatacagatcatttccagaggcgtcttgctgacagcaagggactgggaggaaaatagctgatgtgaagagatggcaggagatgtaggmattcagggaggaattagttgtttttttctctgtgttgcaacacttggctcatctgtttgggcaccttctccctgtcttgattggcatattag

SEQ ID NO: 543822 - DNA, 475 bp, Homo sapiens
agctgtcccgtagaaataataaatgcatgtccacagtccatcattgaaagcccttggggtgaggcgtgtttcagaatttggtttgtttttagatttttgaaaggaaatagggtgcatatactgtatattatgtgatacgtctgaggctgtgctccataatcaaagccattaatttctctgcagcaaaatgtatgattgtacacactaagtaggaaagataaagacagtaaatagcttcacattacttcatgtcaggtttttcacccaatgagttataaaaaaaacccaaccttttggttttagaattttttgagtgtcaggattgataagggcctgtggctctctgattaatatttgctactttactatataaattcatagagagatgaagattgcctgtatgagactgcataaatcaattttcagtagttcccraagacatgtggacctcaggtaccctagggggcctggttcc

SEQ ID NO: 543823 - DNA, 561 bp, Homo sapiens
gccactatcctgggggtatattacttatagaagaaggcaaatctgaactggcatacctttccccccaggatgatgtctgaagtacttaattttatattcacaatggaaactctgccttttcaaagcctatttctacaacacttctcctaccagaaaaatttctctcaatcaggtcaatattcttcaaatgtgctatgcattctcttgtttctgaaatatgctactttatctcagggaccctgacttttgtttatttccacagcatccagcaaataccttgcattggtactcaaataaacatagaatataatagacttttcaagatgagggaaaatttaaaatttctcttatccaaaattgtccacatagcraaggaaaattctttatatacttggtactcaaactatgtttggtggccaacagcattttataagaccccaggtgactcaaaatgcaccttaaaatttgaaaggcattgcatctcagcatctctaattgaatgccattcaattgccatgtaggttgctaacaaataaacaaaacaccctatcctgttcttgg

SEQ ID NO: 543824 - DNA, 156 bp, Homo sapiens
acttgcattccagctatcaaaaaggccagcrcaagctgttctcaatagctgcatactgagccatccccagtgagtacaagccacttacacagaaagcagcctcactttagatatgttctgttctagttttattgcactagaaaaataaagaatctg

SEQ ID NO: 543825 - DNA, 534 bp, Homo sapiens
ctgctcttcaaaaagggtacttgggtcaggtgagatagctcatgcctgtaatcccagcactttgggaggccgagttaggcagatcacttgaggccaggagttcaagaccatcctggccaacatggtgaaacctagtctctactaaaaatacaaaaattagccaggcgtggaggtgcatgcctataatcccagctacttgggaagctgaggcaggagaatcgtttgaactcaggagttgcagtgagccaagatcgtgccactgcactccagcctgggygacacagcgagacaccacctcaaaaaacaaaaccaaacaaaaaccaaaaattagctgagcatggtggcatgtgcctgtagtcccagctactcagaaggctgagatgggagtatcacttgagctgggggagatcaaggctgctgtgagccgtgattgagccactgcactcaagcccgggcaacaaagtgagaccctgtctcaaaaaaaaaaagtaaattaaaggatagttgcacatgaacaaatcttaaaacatagac

SEQ ID NO: 543826 - DNA, 534 bp, Homo sapiens
ctgctcttcaaaaagggtacttgggtcaggtgagatagctcatgcctgtaatcccagcactttgggaggccgagttaggcagatcacttgaggccaggagttcaagaccatcctggccaacatggtgaaacctagtctctactaaaaatacaaaaattagccaggcgtggaggtgcatgcctataatcccagctacttgggaagctgaggcaggagaatcgtttgaactcaggagttgcagtgagccaagatcgtgccactgcactccagcctgggtgacacagcgagacaccacctcaaaaaacaaaaccaaacaaaaaccaaaaattagctgagcatggtggcatgtgcctgtagtcccagctactcagaaggctgagrtgggagtatcacttgagctgggggagatcaaggctgctgtgagccgtgattgagccactgcactcaagcccgggcaacaaagtgagaccctgtctcaaaaaaaaaaagtaaattaaaggatagttgcacatgaacaaatcttaaaacatagac

SEQ ID NO: 543827 - DNA, 538 bp, Homo sapiens
acctcttttcaactgtgtgactggagcaagttctgaaacctcttgactttacatcttcaggaacaaagtgggaataataacagggtaattgtgaggattaaataaaataatacctatggagagcacttactttctctggcacattctaagtgtctggtaagcattaaccagtcagttcatgggagtgggttggcattaatgccagaaccagggtttattttagtttgattcccaagtctaactctttcatgaccccagacggtctcctaaaacaattgtttctcatcctgagaattctttttttttttttcatgcactacttataaacttgatggaggcaatttccaatcatcagtaatctgaaataggcttggaaagatgacatatggccttatattaatatattaaatctttggttgccaagttatttgctttaatagttttycccctctataggttgaattgttttaagttctgcaaatgtaatatatgccgttctctctgagtgcaaaagcaatacaataagtattagttagaa

SEQ ID NO: 543828 - DNA, 585 bp, Homo sapiens
ggttttaataatctaacaattaatgtaattaatgtaayatttactcctaaccatttaaattgatttaaatttttctttttataaacaacattgtaataaacatccttgcatgactgtttgtttacatctaatgttatttctttaggatcaactcttaaaaatggaattgctgagtcttatagaatgtacacattgttgtgtctttgatacacattccctatttgctcccctgaaaattcaatctactctaagcacccaccagcccatgttcccacatcctcatcattaggtattctttttctttaagaattgccaattttatgtgcaagatgtggcttttgattacttttaggtaccaacattcactgttttcttggaacactttgatatttataaggcgatcagtatagactctcagggtagaagtatttaaaagggccagatttgcaaagatctagagttcttcataaatgctttatttaacctgccaactatgaaagtcttatctaggatttttcaggtggaacagacaagttggatggaaatgataaatataactgcattagataatagaattcagtctct

SEQ ID NO: 543829 - DNA, 585 bp, Homo sapiens
ggttttaataatctaacaattaatgtaattaatgtaatatttactcctaaccatttaaattgatttaaatttttctttttataaacaacattgtaataaacatccttgcatgaytgtttgtttacatctaatgttatttctttaggatcaactcttaaaaatggaattgctgagtcttatagaatgtacacattgttgtgtctttgatacacattccctatttgctcccctgaaaattcaatctactctaagcacccaccagcccatgttcccacatcctcatcattaggtattctttttctttaagaattgccaattttatgtgcaagatgtggcttttgattacttttaggtaccaacattcactgttttcttggaacactttgatatttataaggcgatcagtatagactctcagggtagaagtatttaaaagggccagatttgcaaagatctagagttcttcataaatgctttatttaacctgccaactatgaaagtcttatctaggatttttcaggtggaacagacaagttggatggaaatgataaatataactgcattagataatagaattcagtctct

SEQ ID NO: 543830 - DNA, 521 bp, Homo sapiens
acacatagcctgttttatgaaggactcttgagcaagttgaagagaaaaataaattattagaaacacttcattttaatgtggggagacattatgttctgagaagagcattggattcataagagacctaatttaaatccttgcctggccaataattaattgtttgaccttgggaaagtaacttttcttctcaagaccttgatatcctaatctgtacaattagaaaattgaattctaagaactcaccagcctcacctgaacctaactttctagaatctcaaagatttcrtgtcccataatattggaaacaagaatatgttctcagaggggagcgtggttcatttggttgaaagtcaagggactcaagcagcagcacgctcaacgatgatgcatgaactttggagtaaaactgacctgggcttgagtcctggttcttccactttattggtcatgtgatttgggataaatttgttcacccttttaagacctcgttttctcacctgtgagtttgtgtataatacttc

SEQ ID NO: 543831 - DNA, 514 bp, Homo sapiens
ggtaatgtggttttatgtcaaaatgcaaaatatgtgtactgattgacatataaattttgtttctatacatttatcctagaaaaaaataaatagggaatatgtgacataggtaggtaggtaggtagctaggtagatagatagatagatagatagatagatagatagatagatagatagatagatattcattggatgttcattgtagtattatttaagaacagtgaaataattgaaacaattgaataactgaattcaatatccactggaagaaaattgactaaattatctgtgcactcagactgtgaactaccgtagatctatttagaaggataaactatagctatatgaattgacatgggtaattattcacaggatattttatgtgtgaaaaaaacattagtaaataatatgtttggtaagactkttcatgtaatgaatgtttatttaactgataaaactagcacatgtaaagtatgttgatatccatggtatttgtcttgggggaggggataaa

SEQ ID NO: 543832 - DNA, 417 bp, Homo sapiens
aacggaactatcttagctaacatatataagcagtacaagagtgtgtatttcaaatatataacatttatattcagagtctcaccaatatcaggtctgtctgattctctttacatttcttgactttcattatctctgccctctgtgaatgttgacctaactcttttctgctacaggcagaaccaaggcaacatctttaaaccttaacaacacagataagaaagcatcattctctctctctctttctctcataatatttatrtattggatataataaagtaccctaccatttctatgttcattacttggaccaattactatgaagtgtaaaatgaggtaggctgcttgactaggaatgagtttgtaccattatgatcagggaggaaacagtgcttgatagtcccattagaactgaaaagg

SEQ ID NO: 543833 - DNA, 620 bp, Homo sapiens
aaagaacatgggatttggagccaagaaaatctggatttggatattgtttaaccttgcacagatcatttaagctcaatttaacataaacgcagatctgttttttatttgtaatattgtagtataatttttacttttaataactactgtgatgtttaacaataaaatatgtaaggtagctaggacacagtgagtgctaaaaactgatatttgccattacagttcttttcttgtgtttttgtttcttctaattgttttatctatgtgtaaagcaataacttcaaaattgagtgaaatgggagccattatcctatgactattacccacataatttcttcattatgtccaatctttgtacattgtgtccagtttgataaacagctctgatttattttcctgtcttgaatatatttaccagtgaaagctytccagtgtgtcactgaagaatgaaagcattaaactgtctggagacagaacttaagaatttgtgtatctcctttggccacagtttatcttgttttaaaagtgattgttggttgatatttcgtcttctgttcttttgctagcttcttcaagaatctttagtttataaacatctcaggatatacctggagtaaaaatca

SEQ ID NO: 543834 - DNA, 459 bp, Homo sapiens
aggaaagatgagcagagaagagaagataataaaaaggggagcatctatagactctatagacattgctcaaaagattgtttttgctgtggttactccacatggaagtgattggaagcaaataagcaagaatactactaagggtctgaaagaattttattatcataagaaccacaaggctggtatacaacgacctttgttgttagctctctaacacaatcctctgtccttccaagccgaaccaaggagagaacactcactcttgccaccttctgatgtggacagtggatgaagaagaacctcccaaatatgtaaagtcaaagctgcagggggcaatggacgaagaaaatactcactgagagcagaacaagaggctggttaacccaaacaactaatacaycagcaggatggacagtattcacgatttctacccaggagaatttgagatttactgtgagccag

SEQ ID NO: 543835 - DNA, 459 bp, Homo sapiens
aggaaagatgagcagagaagagaagataataaaaaggggagcatctatagactctatagacattgctcaaaagattgtttttgctgtggttactccacatggaagtgattggaagcaaataagcaagaatactactaagggtctgaaagaattttattatcataagaaccacaaggctggtatacaacgacctttgttgttagctctctaacacaatcctctgtccttccaagccgaaccaaggagagaacactcactcttgccaccttctgatgtggacagtggatgaagaagaacctcccaaatatgtaaagtcaaagctgcagggggcaatggacgaagaaaatactcactgagagcagaacaagaggctggttaacccaaacaactaatacaccagcaggatggasagtattcacgatttctacccaggagaatttgagatttactgtgagccag

SEQ ID NO: 543836 - DNA, 561 bp, Homo sapiens
catattaggcactcgatggctgccaaatttcattcttcaaagaccagcgttgcgctaacgtgaaatgcaagccaggaacaggagggaggagggggctggactgatgaaatggagggggagaaacccacatgcaggagagaaggaattgacatttgaacatggttttgtaataggaaaactgatcccaaggctgctcccgccccccagtgatgggccgctgtggacgctgtggtttccctgaagcccgtggtgggggttgcctgttccgtcagacttgctgcctccaactcactgtctccatggcgaagaggcaaagggctgggggctcctgcagccatggtttccctggcaacactcaccagcagcccagcccgggctgcacgtacctgtttgtccccaccaccactgcgagctattttggagcaatggaagcctctgcctgcacagccacccacggtcccatgaacccrcacacaggagccccctctgtgggctcctggcacccatccacccacggctcccacccagagcctgtccagcctgcagggagctgtgctgagc

SEQ ID NO: 543837 - DNA, 269 bp, Homo sapiens
gacaggcaggattcagacctgttcgtgtgatgcaaatggttcagggtgtggctggaggctgcctcccctgcaggccaggtacctgtkgggtggaggcttgatagagtggcagacctggagatgcatctcctttcattaggtttgcttgctcctgggtataagttctgagcctgcctgggtataagcctttttcctgggtataagttctgaacctgcctaagtccactgaagccaactttgcccttggcagcagactcagtataaaacag

SEQ ID NO: 543838 - DNA, 519 bp, Homo sapiens
gctggggaaagtgacaggcaggattcagacctgttcgtgtgatgcaaatggttcagggtgtggctggaggctgcctcccctgcaggccaggtacctgttgggtggaggcttgatagagtggcagacctggagatgcatctcctttcattaggtttgcttgctcctgggtataagttctgagcctgcctgggtataagcctttytcctgggtataagttctgaacctgcctaagtccactgaagccaactttgcccttggcagcagactcagtataaaacaggtcctgaccttctgtctccccattgtggtgggagtggggctgaggtacacaaacatgcccagatctctctgctgactgtggccccatgcagcggggaagtgggagaagagggcgcatgaactgatggttggaccaagttgagcgaggtttctgccgttgggtgtggagacataaccttgacatcactcagcctgccggcatcatggctttaactcagtctgcatgacctgtttgacct

SEQ ID NO: 543839 - DNA, 507 bp, Homo sapiens
gaggtgatttcacactcagaaggcatttggcaatgtctgcagacatatttagtagtcacaactgtgtgtgtgtgttgtgggggggggggtagttactgctgtcatcaagtgggtagaggtcaggaatgctgctaaacgtcctacaaggcatagccagcgcctgctcaacaaagaatcatctgaaccaacatgtcagctaacgttgagaagccctgctgagcatattgagcctctgtttcctcatctgtaaattggggtgaagagcagcaagctagaaggattaaatgtagtaggggtgatccctggaacatcgtagaccctccacacagttccttttggtcccctctcaaggcacttcttctttctgggtgtggagaagttggggagaattcaaaagtattgccaagctaattacagggcagagagtcacgttctgaaggaacatgaaaagtactggsattctttagcctgaagaagaaaggtggcttaaaggtgatttaataatag

SEQ ID NO: 543840 - DNA, 561 bp, Homo sapiens
agcagactgttaaagaggtccatggcataaaaaaataytaagaaggcaggccaggcatggtggctcatgcctgtaatcctagcactttgggaggccgaggcaggcggatcacctgagatcaggagtgtgagagaccagcctggccaacgtggtgaaaccgtgtttctactaaacatacaaaaattagccgggcatggtggtgcacaactgtaatcccagctactcgggaggctgaggcaggagaatggctggaacctgggaggtggagctgcagtgagccgagatcgcaccactgcactccagcctgggagacagagcaagactccgtcttaaaaaaaaaaaaaaaaagctagaaggcgacacggagaaaaatggcatcgtctgctttagctttcccaaagacccctctggctgcaacgggaagaggggattgtaagaagcaggacctcacatgagctctgtttacacagggagttgaatttaaccctcaccacaatcttaagaagtatacattattttgcctattttagagatgaggaaactgaagctcagatttctggt

SEQ ID NO: 543841 - DNA, 602 bp, Homo sapiens
gcagctccatccccaagtgcccccatcaatccagtgaatgaacgtgccctaggggaagaccccacccaccccacagagatgggatgtgcactctaacactgtctgccctcccactgtggcctagaggcaaaggtaacaactgaagagacacctgcaaaccagagccacggacagattccagaagctcctcctgagtagttctctgctcccacataacagccctttgtgagcctccactgcagtaagtggagggttagcagcactagggacctgagtgagtggcctgggagccaccagggctcatcccacttctggagggttaagctggctctcctgcagctcaggctggcccaacagccttggcctggagcgaaactacctttgctgtgcacagtcttgggaggccacagcctcrggctgctcctcaggtttttccaaagggccagggcagcccctggtttcctggggatagggcagggcttattctcccccctccctggtctggcccgtgcgtctcaactcagcacttcttgaaaacgcctctctccatcccgtctccttgccacccgccagcagcctccatggttcccattcgacaaggc

SEQ ID NO: 543842 - DNA, 619 bp, Homo sapiens
tgtactgcatcttcctctccttttcatcttcgcatctttatttactccaataaattccctaattaatcccacgccttctccccaatgccagcaaactctcaacctacacacccccttagagtactcttaaacattatttatttatacccatcaccatttattgtgactctgctgtatttataggcatttgtattgatttatacacgtctctgttgactgtgagttgggccagttccttctggtgaatacaatcactttggaagtagataggtggttatatatagtctatgccccaaatgttgaagacaggtcaagctctgcggatgaaattgaaaattagacaacagcaaaattagaattagctcccttgacatttggactgtgcatcagactgaccatcaatcagcatccctgatgctcttagacggagggagagatacaaagggctggtcatcaactgaccacaatcctggtgtgtgtaggtcctttgcatgayagtagtggggctgtccatggagctatgaagtggcattaaacccccctttcatgcccaaagttcctcttatccttaaaaacaatctgttgactcattgatacttcactctatatatactggaag

SEQ ID NO: 543843 - DNA, 596 bp, Homo sapiens
gaaaaacacaacatatggcatgaaaaataaaggtcatgaccatgtgttgattatagtaataaaacaatcagaagtaaaactaatgtaccaacaaattttctggccattaaatgagccagaagagaccacgaagagacaatgaaaggtgaatgtggatctttaggaggttgactccaaggtgttaagaagcaccatggtgaaacacrtctaaaaaaactatggcaaataaggtattttgacaaacttcttaaagtaataatgaaaaatgcagttttgtgcaaatttacaatgttgataaaaagtttggcactgtgctacattcctagaaacaacttaatgatactgaggagagaacaacagataataccaataaataatgttgactcttcttgggtatggaacaaggataactagagatatgttttcttattgcctcaaaaataatactgaaacagctatgtgaacccactgcagattagtatgactaggaaaaataactttaatatgttattattcatggatgagtattttcccctcaatatgacatttgtaacatgatcattacactcatgaagaccaagcataaacacatttta

SEQ ID NO: 543844 - DNA, 410 bp, Homo sapiens
tgatctggggaagttcttgggaggtggctttgttgagagggcactcatttagtgcaggtatgtataaaacactcttatagaaatagcaagcccgattcgtgtgaagatgcttaccaaagagtactgttctgttgcataaagtaccacccaaaacttctgggcataaaaacacataatctgttttycttattaacctgtcatttgtgcggaggttggcagggggacttaatcactggtctctttgcatcagcttgactggagctaaacgatgtttttttccaaaatgagttcactcctatggctgccaaattggtgctggttatcacctaagagttcggctaggattgtcagacatcttagttcttttctgtaaaggcttcacagagctggttagtctgccatggagtgag

SEQ ID NO: 543845 - DNA, 410 bp, Homo sapiens
tgatctggggaagttcttgggaggtggctttgttgagagggcactcatttagtgcaggtatgtataaaacactcttatagaaatagcaagcccgattcgtgtgaagatgcttaccaaagagtactgttctgttgcataaagtaccacccaaaacttctgggcataaaaacacataatctgttttccttattaacctgtcatttgtgcggrggttggcagggggacttaatcactggtctctttgcatcagcttgactggagctaaacgatgtttttttccaaaatgagttcactcctatggctgccaaattggtgctggttatcacctaagagttcggctaggattgtcagacatcttagttcttttctgtaaaggcttcacagagctggttagtctgccatggagtgag

SEQ ID NO: 543846 - DNA, 410 bp, Homo sapiens
tgatctggggaagttcttgggaggtggctttgttgagagggcactcatttagtgcaggtatgtataaaacactcttatagaaatagcaagcccgattcgtgtgaagatgcttaccaaagagtactgttctgttgcataaagtaccacccaaaacttctgggcataaaaacacataatctgttttccttattaacctgtcatttgtgcggaggttggyagggggacttaatcactggtctctttgcatcagcttgactggagctaaacgatgtttttttccaaaatgagttcactcctatggctgccaaattggtgctggttatcacctaagagttcggctaggattgtcagacatcttagttcttttctgtaaaggcttcacagagctggttagtctgccatggagtgag

SEQ ID NO: 543847 - DNA, 410 bp, Homo sapiens
tgatctggggaagttcttgggaggtggctttgttgagagggcactcatttagtgcaggtatgtataaaacactcttatagaaatagcaagcccgattcgtgtgaagatgcttaccaaagagtactgttctgttgcataaagtaccacccaaaacttctgggcataaaaacacataatctgttttccttattaacctgtcatttgtgcggaggttggcagggggacttaatcactggtmtctttgcatcagcttgactggagctaaacgatgtttttttccaaaatgagttcactcctatggctgccaaattggtgctggttatcacctaagagttcggctaggattgtcagacatcttagttcttttctgtaaaggcttcacagagctggttagtctgccatggagtgag

SEQ ID NO: 543848 - DNA, 636 bp, Homo sapiens
tgaaaataaggtatattaaaattattttgttaatacagatagacagcttaagaaacacagaacattgccaggcgcagtggctcatgcctgtaatcccaacacttcgtggggccgaggcaggcggatcatgaggtcaggagttcgagaccagcctggccaacatagtgaaccctcatctctactaaaaatacaaaaattaacctagcatggtggcgcgcgcctccagctactcaggagctttgaattatgctaatagayaaaaaaacaaacaaactgacaaagcaaacctgaacagtgaaagttctggctcagggaaggtgatatacggaataaacagtaaaagaaggaagcccttgatatccattacaacctgtgaccaacttcagaaatgagaactgtctagatttgatttcctctctggttattatttatatttattacatacttcagttatttatatttatattatctctttttttctataaatatttgacatcaagttatgaaacattaattttaccatttagtctttaggtagaagaataccctgtgactgagcttgcagagtaattaatataattaacaatggataatgtctgatggcattctgcatctcctcggttagggtaagggcaa

SEQ ID NO: 543849 - DNA, 586 bp, Homo sapiens
taaagacttattccttttattccatcagagtttataccttttcaataactcaagttcttcacagaaaagtrattatattatgcctagtcacaggactaaactaatttagtaaggtttgtcttctagccctggatttgcccttgctgggtctctaaccatgaacaagttctcccgcttcttccatccatccctgcttcctctccacaaaggcctgacccttagcactgagtcaccttgcacccttgtgacgtctagctgggctcaggccatggaaagcaccagcaagatatcaaggagcaggaagagccacagacatggatttcttctccaatccatctctgctttcaggtttctttgttttggcagtggctatctccctctatgacagttctacagggtaacacctcttcatttttaaggaaacataatgctaatggcaatgcagggaatttgacattttaaaggtaattttaaatgtatgattctaagacttttagataagttcgtcgccatggtaggattctggcaagaagtactgaagaggtatcaaggtgtgaagagaagccacagtgggagggagcagaat

SEQ ID NO: 543850 - DNA, 591 bp, Homo sapiens
agctggggtcgctatgacaaaataccatagtccaggtggcttataggcagcagaacccacttctaggattcaggaggctggaggtccaagatcaagtccccgcaggtttggtatcctgtgagggccacttcccagctcacggccaccttcttgccacatcctcacatggtgggatgggcaaggcagctctcaggggtctttttcataagggcactcaccccatctttgagggctctgtcctggtgagctaaccccctcccagagccccacctgctcatcctcatgctgaaaaggaggatttccaggcatggatttggggaaaacacacagatagcccattgccctggggatccctggtttctcaatatgcataaggagacattgggaatcagtgatttcttaagtcctttccagctctggaattcaattaattctgtcccatcagcatgaagtatctgagaggcggtcagtgacgtaagctgttattttcactgctatggaggtccagggagctgcgatccaggctccctcaggagagacacaggctcgagaaccacatcyctctgcagggctcggtgatgagctgggggc

SEQ ID NO: 543851 - DNA, 643 bp, Homo sapiens
tcataacatctcagaagtaacgatgcaccccagacacccacagggaacgaattctcagagatgtggcccccgctgggtccagaaccccatgcaaggccctcaggaggccacatgccaactgacctgttctacaaccaatgctatggaggaattgctcacatgatctgttataaaaataacttgctcwtgaagcttgcgtttctgttagatggaaaagtattggcaggatagccaggaaaaaagtcctaagtccaaacagaacaacaaggatatagaggtctgaggccaagccactttgtgaacccctcaacattcacagaaactggaagatctcaagtgtagaaatatgaccaactttaagaaaagagtagggaagaataaaaacagacatgtgtataagtaataaaaagagtgaatgaaggcataatcagaaagtcaacacaaataaaggatgatagattttttggattagttgttctctaatgattctcaacaaattattacgcagacatccaaaggccaatggaggtaagaatcacctggctgagcagaagaagaggagctgggagcctgcttctgccatcagcttcatttctgcaccctcccagcatagtcaacggtccccagaggtctccagaagtcc

SEQ ID NO: 543852 - DNA, 643 bp, Homo sapiens
tcataacatctcagaagtaacgatgcaccccagacacccacagggaacgaattctcagagatgtggcccccgctgggtccagaaccccatgcaaggccctcaggaggccacatgccaactgacctgttctacaaccaatgctatggaggaattgctcacatgatctgttataaaaataacttgctcttgaagcttgcgtttctgttagatggaaaagtattggcaggatagccaggaaaaaagtcctaagtccaaacagaacaacaaggatatagaggtctgaggccaagccactttgtgaacccctcaacattcacagaaactggaagatctcaagtgtagaaatatgaccaactttaagaaaagagtagggaagaataaaaacagacatgtgtatragtaataaaaagagtgaatgaaggcataatcagaaagtcaacacaaataaaggatgatagattttttggattagttgttctctaatgattctcaacaaattattacgcagacatccaaaggccaatggaggtaagaatcacctggctgagcagaagaagaggagctgggagcctgcttctgccatcagcttcatttctgcaccctcccagcatagtcaacggtccccagaggtctccagaagtcc

SEQ ID NO: 543853 - DNA, 643 bp, Homo sapiens
tcataacatctcagaagtaacgatgcaccccagacacccacagggaacgaattctcagagatgtggcccccgctgggtccagaaccccatgcaaggccctcaggaggccacatgccaactgacctgttctacaaccaatgctatggaggaattgctcacatgatctgttataaaaataacttgctcttgaagcttgcgtttctgttagatggaaaagtattggcaggatagccaggaaaaaagtcctaagtccaaacagaacaacaaggatatagaggtctgaggccaagccactttgtgaacccctcaacattcacagaaactggaagatctcaagtgtagaaatatgaccaactttaagaaaagagtagggaagaataaaaacagacatgtgtataagtaataaaaagagtgaatgaaggcataatcagaaagtcaacacaaataaaggatgatagattttttggattagttgttctctaatgattctcaacaaattattacgcagacatccaaaggccaatggaggtaagaatcacctggctgagcagaagaagaggagctgggagcctgcttctgccatcagcttcatttctscaccctcccagcatagtcaacggtccccagaggtctccagaagtcc

SEQ ID NO: 543854 - DNA, 490 bp, Homo sapiens
cctccctctctaacgtttttataaaaaagaaaaatcagtttggcaaaactagatgagctgaatgctcctaactattgctgtttgttgaaatgacctgcggtgatagctggtccgcgtgggatgaaacctgcatggactgacaggcttagtgatgtatgccaccagaaaatgtccccagtwcttttggaaatattaatgctgaaaagtgagaaataaaacaataccatttgtgaaatagtaaaaacgagaaaccctaggcttattttcagtcctgccctggaaaccctgtaataattaagatttttctagaaaactcttgagaggtgaaaagccctgggtggaaggacacgccctgctgtatgctacatgacctcggaagatactcgtgattctcttgatccttctctgtaaaatggggcacaccacacatctccaccaggggcactacacagggctcaggatgaagccctcacacggcaggaatttcaga

SEQ ID NO: 543855 - DNA, 424 bp, Homo sapiens
gtttccatgacagcaaaactgtactcctcgttcttcacacagcttcctctgctgcactgtttcccgggaatgtgtcatgccacgtgtttaaaagktttccttctgtacttccttcaggttcctactcaaatgtcagtttttcagatgtttctccctattgccctgtatatagttatactctctaactgctctctatcccttatcctgcattcttctcttttagggttgtattaggccattcttgcattgctataaagaaacacctgaggctgggtactttataaagaaaagaggtttcattggctcacagttctgcaggctgtacaggaagcatggtgctggcatctgctcagcttctggggaggtctcaggaagcttctaatcatggcagaaggtgaagggggagcagatacatcttacatgg

SEQ ID NO: 543856 - DNA, 424 bp, Homo sapiens
gtttccatgacagcaaaactgtactcctcgttcttcacacagcttcctctgctgcactgtttcccgggaatgtgtcatgccacgtgtttaaaaggtttcctkctgtacttccttcaggttcctactcaaatgtcagtttttcagatgtttctccctattgccctgtatatagttatactctctaactgctctctatcccttatcctgcattcttctcttttagggttgtattaggccattcttgcattgctataaagaaacacctgaggctgggtactttataaagaaaagaggtttcattggctcacagttctgcaggctgtacaggaagcatggtgctggcatctgctcagcttctggggaggtctcaggaagcttctaatcatggcagaaggtgaagggggagcagatacatcttacatgg

SEQ ID NO: 543857 - DNA, 464 bp, Homo sapiens
ggataagaagcctgcaaagtttttaagtgattgcattgccaaagacagcatgaaacagaattygtcatttcatgagcattcaaaattttaaatgacatttgagccccaatttatttaaataggaaatggatgagaaaactgcattctctttaaggaggggccttaaactctttaaaaaattttttcttattttttagacagagtctcgctctgttgtccaggctggagtgcagtggcacgatcttgactcactgcaacctgtgcctcctaggctaagatttttttgtgtttttttgtagagtcagcatttcaccatgttgggcaggctggtctcaaactcctggcctcaagggattcacccaccttggtttcccaaagtgctgggattacaggcgtaagccattgcacctggccaggaatattaaaatctatagggcattacttttatgcagcaagaataaaaa

SEQ ID NO: 543858 - DNA, 632 bp, Homo sapiens
gaaaatggtatagacattcggaccgacctgggctcagggccggctgtagaagaatgagcatccccaccacgttgctgggacgaggtgtctttgctctactcagaccgcgagagaagcacagagggaagagtgtgtgctcatgttaatgcacttaaattaattatttcaraaatggtggaatttatttaaagtgtttctttttcatgagccatttagaaaccaagaaaataatggaaaatttgttttgaatatttctccccaaaacgtgtgtgtgtgtgctgtatgaaatttgcacttcagggattaaagagtaatttcctgtgctcttgttgtttaaaagtctgcacagaagagctccatggcctgaacttttctgggcaatgtgcagagctgtttttagcttggactacaaataacaggtgaatccagcaggattcccagggggagtgctgatcctgcggaggtataactcaggactgaagagaacacagaatgctgtagggacaacaggaaattggagcccagtccagtcctaagttagcacatgcgtggtgctttttggcaccctgaagcagctaaaagcatggctctgaagtcagacttcctggatgccagttcctcaccgctcccca

SEQ ID NO: 543859 - DNA, 351 bp, Homo sapiens
tatcaaggggcaaatgagtgatcaggcagaagccttattaagargaacccccgctgagtagcagagttacctgaaagactctatgtggtagtttttgttttaatagaccctgttttaagactgaattgttacatgttttatgcccttggtcattgaaactctataaatttgataaaagacatgtatctaacatccaagaagctcaacaaactccagataggagaatttcaaagagacgcatgcctagatacatcataattgaagtagtttgggtatttgtccccacctgaatctcatgttcaattgtaatccccacggctggaggtggacctggtgggagtgtttacatca

SEQ ID NO: 543860 - DNA, 351 bp, Homo sapiens
tatcaaggggcaaatgagtgatcaggcagaagccttattaagaggaacccccgctgagtagcagagttacctgaaagactctaygtggtagtttttgttttaatagaccctgttttaagactgaattgttacatgttttatgcccttggtcattgaaactctataaatttgataaaagacatgtatctaacatccaagaagctcaacaaactccagataggagaatttcaaagagacgcatgcctagatacatcataattgaagtagtttgggtatttgtccccacctgaatctcatgttcaattgtaatccccacggctggaggtggacctggtgggagtgtttacatca

SEQ ID NO: 543861 - DNA, 562 bp, Homo sapiens
acaggcactgctggagtcacaaactcctggggatttgggggggcagggggccaccatcccctctgccactgacccagccccctggcttcccagccagtccctgctgggccctcctgccctgcatccagccccaagggtacggcacaagcaccagcctcggtgtccgctgcacccctccccactctcgggtctctaggatgttccaggctccacacagggaccactgttccagcaaggccactctctctctgtagctttaaacagcaggttttggaactcacagcagaagttggacgccattcccttacccctacctctggcattggggactgttgtaattttccccctgagggacataatcctgtctaatagttaggttttagtgatatacagggtgtagaacagaaataaaatatctagaamaaaatggaaaaggaagcatttaaagtattatctggccacattcatttaaccacctccatactctgaaacacagcagacacattcctcatctttgcatcctaagctagcatgtgagcatgctaatgaatgaatagtaata

SEQ ID NO: 543862 - DNA, 601 bp, Homo sapiens
ctgttgtagaatatttagtatatacctatgtcagtcaaagtatagtgagagatggtatcctctgaaacaaattcatggagattcattccctgtgtagaaaatacctgaagcaagtacatatttatctgtccagcatccctaccttcgagaaacattgtttcaccaytctatggtaaagcagattcatccccagatgtccccctactcatggggtggaggggcatatctcatgggactagaatattatctcatgccagtcccatgagataataacctcccgctcttcacaagtgaactttagttaaatttctgcaaccaaaaaaaggcttgatgtagcactgcttcatcatatacaatatatacatattgtatatacataatgcatcttagctttagaaatcagcatctacccaggcctagccaatccaaataccccacaggttaatcttcccctgatattccaaactgccacatctacaaaaagttagaattgttggcggctgcttttgtcactgtgtgaagtaggccccttgaggccaccaatcatgtggagggaagccaagtgaaaaatggaaatcaagaagcccagaggatgtcacta

SEQ ID NO: 543863 - DNA, 601 bp, Homo sapiens
ctgttgtagaatatttagtatatacctatgtcagtcaaagtatagtgagagatggtatcctctgaaacaaattcatggagattcattccctgtgtagaaaatacctgaagcaagtacatatttatctgtccagcatccctaccttcgagaaacattgtttcaccactctatggtaaagcagattcatccccagatgtccccctactcatggggtggaggggcatatctcatgggactagaatattatctcatgccagtcccatgagataataacctcccgctcttcacaagtgaactttagttaaatttctgcaaccaaaaaaaggcytgatgtagcactgcttcatcatatacaatatatacatattgtatatacataatgcatcttagctttagaaatcagcatctacccaggcctagccaatccaaataccccacaggttaatcttcccctgatattccaaactgccacatctacaaaaagttagaattgttggcggctgcttttgtcactgtgtgaagtaggccccttgaggccaccaatcatgtggagggaagccaagtgaaaaatggaaatcaagaagcccagaggatgtcacta

SEQ ID NO: 543864 - DNA, 551 bp, Homo sapiens
ctgaagctataataataattggataaggaatgtatattagtcttttttcaccctgctgataaagtcatacccaagacaaaagaaaaagaggtttaatggacttacrgttccacatggctggagaggcctgacaatcatggtggaaagcaaggaggagcaagtcatgtcttacatggatggcagcaggtaaagacagcaagagagcttgtgcagggaaactctcctttttaaaaccatcagatctcatgagacttattcgctatcatgagaacagcacaggaaagacctgcccccatgattcaattacctcctattgggctcctcccacaacacatgggaattcaagatgagatttgggtggggtcacattcaaaccatattggaatgataattgtcatttgccgagtatttacaaagggacaatcattgcacctaaccatcaccattgtcacctcatttctacatgacctcctgtttaaccacttccccaacttcaccacgccctcatcctcacactgcatggggtcccataggtattttcctcctcaatt

SEQ ID NO: 543865 - DNA, 624 bp, Homo sapiens
gcactgtaattctgccagcattgctctgatccagttcaaccccaagrcctatgagggtaacttttctttggttcttgttgaattcgattacatgaacaatctctagaagagcagaagagaattccttaactctgggagctgtattaacctggaaaagggagaatatcctggaggcatgggaatgcactcagactgcatcgcaagtcctgtgaaattacatccttctaagaacctttcctctcagagagcattcttgcttcaaatgagcccatttgtgtcagtactgtgagaagccacatccctgtcacctttctcaggctctgagaggtgccgacttaagatgtcgtcttagcacagcttttcaaactataagaataactttatgtcatgctcaagacaatcacaaagagaaaagaatttgatctccacactctcttgctgcccctctcaaacaagaggagaaataaggatttctcttagagataaggacactctgtgttccattcatcatgtgctagggtgattactgaaggcattacgcttcatgtgggcgttcaaggttgaaacccagatactttaatcacaaaccacttcggtccacactcctggctcccacaaattatt

SEQ ID NO: 543866 - DNA, 624 bp, Homo sapiens
gcactgtaattctgccagcattgctctgatccagttcaaccccaagacctatgagggtracttttctttggttcttgttgaattcgattacatgaacaatctctagaagagcagaagagaattccttaactctgggagctgtattaacctggaaaagggagaatatcctggaggcatgggaatgcactcagactgcatcgcaagtcctgtgaaattacatccttctaagaacctttcctctcagagagcattcttgcttcaaatgagcccatttgtgtcagtactgtgagaagccacatccctgtcacctttctcaggctctgagaggtgccgacttaagatgtcgtcttagcacagcttttcaaactataagaataactttatgtcatgctcaagacaatcacaaagagaaaagaatttgatctccacactctcttgctgcccctctcaaacaagaggagaaataaggatttctcttagagataaggacactctgtgttccattcatcatgtgctagggtgattactgaaggcattacgcttcatgtgggcgttcaaggttgaaacccagatactttaatcacaaaccacttcggtccacactcctggctcccacaaattatt

SEQ ID NO: 543867 - DNA, 624 bp, Homo sapiens
gcactgtaattctgccagcattgctctgatccagttcaaccccaagacctatgagggtaacttttctttggttcttgttgaattcgattacatgaacaatctctagaagagcagaagagaattccttaactctgggagctgtattaacctggaaaagggagaatatcctggaggcatgggaatgcactcagactgcatcgcaagtcctgtgaaattacatccttctaagaacctttcctctcagagagcattcttgcttcaaatgagcccatttgtgtcagtactgtgagaagccacatccctgtcacctttctcaggctctgagaggtgccgacttaagatgtcgtcttagcacagcttttcaaactataagaataactttatgtcatgctcaagacaatcacaaagagaaaagaatttgatctccacactctcttgctgcccctctcaaacaagaggagaaataaggatttctcttagagataaggacactctgtgttccattcatcatgtgctagggtgattactgaaggcattaygcttcatgtgggcgttcaaggttgaaacccagatactttaatcacaaaccacttcggtccacactcctggctcccacaaattatt

SEQ ID NO: 543868 - DNA, 309 bp, Homo sapiens
cttgattcacaaatatacgctcattttaaggccatgtggtatatggaaagagcacaaggctgtgagtcaggagataggagttccagcccagctttgccgtgaactcactgatccccagctcacagccatgagcacacttgatccactgctcatcccaccctcccagggccttcctcactgttcccagtctcgatcccagctttggccctagtgccaaagctctgggggtacaatgccccacamcctggcattgctaagccacagtacttggagaagaatcgctggagatgagagagggcagggccctca

SEQ ID NO: 543869 - DNA, 582 bp, Homo sapiens
gaagcagccccaggggaggactggaccaaggtgggcacgccagcatcaggtccttagtctctgaagaagtagccttcctaggtctggataaggagggcactggatgccctctaaactgcaattaactgtcttgccaaatttaccagctttctccattccccctgactgatacccacagctagaggaacacttgggacaggaaggctgctgtccaagatgtccaccatgtctgctcccaccagctgagccaaatgctttcctggaggcagctgggcttcrttcccaaacctgtttatgccagtggaacttgctattgtaattatgcaatttaattaaatattatacaagccaattaaatactgttgcaaaaaaaaagaagaaaatatttctatgaaaactaagttgaagctttggaaagactcacaaaaacatttttgagtcattttgagtcattttttaaaaatgctgttgagttaggtgtgggtgaaacaactgcggaaggttgttggggaaatatcaaaaaaatctagggagactttttacactcagattattttgccaatgtatttaatttgtcattca

SEQ ID NO: 543870 - DNA, 501 bp, Homo sapiens
tggcagggccaggctgcctctgaaccaccaagcatyatggcctcctgggagctacagaccctgccacagggcccatgacctggccatcctcccagccacagacactcactgaggggtggccatgtgctcatcttccacctgctggaaggtcagaggaagcaaagcacagcccgttcctaccctcccacctctgcaaggtgggtgtgtgcaggccctgggcagggagtttgggaacctgacttccgctcttgtctttagtgtgctcaaggcaaggtatttggccccactgggcttccgtggccttggttgtaaagtgagagatttgtacgactcccccaagcatgggacttgttttccccaaaagagactccaagaagaacaacaccaattttgtgtcacatgccgattataagtgctgtgcccaagaaaggttagtgcagattgggtggtggggggaagatgtcatgaatttgcctcaactttcaaggcctctctacaaag

SEQ ID NO: 543871 - DNA, 543 bp, Homo sapiens
agccaaggagtgccacaggctgccagcagccctccagaagctggcagaggcctgcagcaggttcccctcacagcttcaggaggaaccaaccctgctgacagcttgatctcagacacctggcctgcagagccatgagacaatcaattcctatgacctcacccactcaactcagtatgtgtgatttgctacggcagcctgagsaaacgaaaacaccatttctccccagcgttctttggtaggcctgaactctctgccttcaagccctcctgtccttcctgtccccaagaagccctcacgcaaccatcagaagcattactaagacacagatctgaccctgtcactcccaggcttaaaacccgcggaggcctctcctgcagcgtaagcacaggggattttgaagttggccaactggacgtaagccagccaccacctgaccactgagggcctttgagtccccctccttctcctctccttcctctgctctacacacccctagccagccaccctgaagtctttgcagtctcctgtggggcctgctgtccc

SEQ ID NO: 543872 - DNA, 284 bp, Homo sapiens
ccgtgttaagaaaaacgccgttttcctgctcttaatccattcctggtggagatgttgcttcaacttgaaggagccttttatgtgctgaagtcaactgcaatctaaaagataagttaaatcacttattcaggaagacaggaagcctttgacrgcagtgactgattaagatttcacagcagccagagccaggcctacggaacccaaagagtgctcgttccctcaccaaccagcactgttggcccctccttggcagcaagccaagctcagaatcctaccctcgggga

SEQ ID NO: 543873 - DNA, 284 bp, Homo sapiens
ccgtgttaagaaaaacgccgttttcctgctcttaatccattcctggtggagatgttgcttcaacttgaaggagccttttatgtgctgaagtcaactgcaatctaaaagataagttaaatcacttattcaggaagacaggaagcctttgacagcagtgactgattaagatttcacagcagccagagccaggcctayggaacccaaagagtgctcgttccctcaccaaccagcactgttggcccctccttggcagcaagccaagctcagaatcctaccctcgggga

SEQ ID NO: 543874 - DNA, 544 bp, Homo sapiens
gtaaagcaatgtgcccaataatatggctattcagtggctgggatgggactcacactaagatacatctgatggcaaatctgtgatcttacctgacaccttgaagggaagtcctaggaccattgggggtcccaagggcatgcatggctgacagtaaagatatcaaagttattccattaaaaatttgcttttatttggatttttcttcatcaataagataaagacaagtagaaaaagcagccattttagaccaaatatttctccccaacaagcctgctttgattcctgaaatttctcaattagatactcttccaaggcaagaatctctgtacttctgctattctcccacctacttaagacatctttgacctgccacctgcttatccagtttctgtccatctctcagggacagarggagggtttcctcctctgtgaagctcggtctgacccccttagaagggagccaatgcctgaccttcaactacacgtgtagcctgtccctgctcagggcacatgaaaggaggtctcaggcagtgcccacgtgctg

SEQ ID NO: 543875 - DNA, 501 bp, Homo sapiens
tacgaataatacctatgttatagggttaatatgactaaatatactttaaccactcagaacactggctggtacacagtaagtgctgcataattgttacactcacctgataagctgtgtgacttacccgagtttacatcatgtatagcaggttctcatgcagaagattaagtattctgagaagatgaatatgtttcataagtatttttgaaaagatgcatttcttctttgaatggtagttttcctcakgactctttttatccctatggttttatatctgtgtgatggtatgctatatatatatatatatacacacacacggttaaagtgtttataaattatatttatatatttatctaaatataaattatattatgcatacatttgtcaaataacatattattctgacaatagttaaaatggtaagggagattttatttagggctatcatattaggcgtcaagaccatcggacaatggtgagactccaaatacaacaaagaca

SEQ ID NO: 543876 - DNA, 575 bp, Homo sapiens
gctgaggaaactgaagaacggaagttagtgaagttgttcagggtctcactgagggctgtcctagccaaggtctgggcccagcctaactggctcaaaatctgtacagttgtggattayggcatcatgcactgttgggagcatcagaaaatgtcgataaaggctgaaactttctttctttaattgattattgtggtcagatgcctatcttacaaaagttttccttttcactccatcagttgttcatcacatttgtaagttcaagtatctctgaagttaatttaatttatatatttaataatatcttttggccaagtgtacaatgccaatttaaatccaaaccctggagtacttatcttgatggcttaatatatctgcaaccagactcaatttattcatttatttattagggttaggtgctgcagatatgatgacatgaacagtcacagttcatgaagcgtgaggtttgggggaattttgataagcatatgtgaatctaacacaccttacaggaagtgttaggactttggcaagcttagaactcccagagtggaaacacaaggggtgcatctgatccc

SEQ ID NO: 543877 - DNA, 483 bp, Homo sapiens
gggaaaaacatcataaattgtgttttctacccaagactgtagggagacagacagtttaaacatttccctgtcccagcaggagtaacatgaccatctcctcccacccgcaaggctttctcacctgagggacayttgggggagaactctccctgagcagggggtgggggcaggacactggccaggataatgatgatgacaatttcatagtatcatagcacaatgtcagcttccctgtgttgagtcactactggggatcaagtttttacacctatccccagcctatggggtggatattatccccattctctaggcgaaggaagctgagccttccagaggataggaaatgggcctgaggtcacactgggctcaagcagagactcaggcagggactgtctgcttcagcctctgggcccttttggctgccagcaaccttctcttcctgcatctcagccccaggaaggctgggcagcgctcaggcgcagt

SEQ ID NO: 543878 - DNA, 637 bp, Homo sapiens
cagaacacgatggaaatgaaaacatggtacaacagaggttacagccctctcctgacctgataaacttcatgatggagctaaagatggtttgggaagtttctttgaatcacaagcagaactgtatgtgctgtctcctcctgtctggatctactcactacttgctaaagagaagaattttggtttgggataaatttatgtggatcttcgctttggtgccataaaggtaagtgctaaagatgtttctgggggagaagactaagctctcttaagttaaaggcaaagaatcctgcaaaatcaccaggtggttaggtggattcttttgttctgttttccatttcttagaygtgatgagatccctaataagccttaaaaagccatcttttggcggcataagaatgacttaaggctttcgagatgttatgtatgaaagtaactaaaagacttgggcacttgggctgaaataacccatatggagtgcaacagttaagagaattgcaataagtaggagaaaacaaacaaaaactaaaatttagaatccttttggatttcctattttgttttactaaagagaatgaaccaaaatagagagtaaaactgttggctgagatttctttgtataaaaagccaacattctaag

SEQ ID NO: 543879 - DNA, 536 bp, Homo sapiens
tgctcctgaggcctgctcagcttggagcacaggtgccatcaaggctgagtcttgcttccttatggtgtcccctcattttcacctccrtgtggacactgctgatagtaagtctacaagggagtcgaaagtcactttctaaccagagaatttaaggtgactcgtgggagctgcctctcatgttttcatgttacatcaggaatcgggatctgtcctgggcataagaagccaaacttacgataaggtcatacctatgatgtggaacacagcagctatgccaatccgtcactgacatcattgccttcctctcacaactggaaagaaatcaagagtgcttcctttcagcagggctttcctccctgtcccaccccagtggaacccagggaagcaatgtcataatctatgttgacagggaagaatgtctctaagagtagccatagattttcttctacctgcactttagaaagttgattttaaagtcaatgctgtacaccagagatgctcttgtccataaaggatagattttctgttttgtacag

SEQ ID NO: 543880 - DNA, 559 bp, Homo sapiens
agctgggctgctgactggctggtgtggatactgagaaggttctaggaatgtagaaaattggaaactgtaacctacccctactgggtgaaaaactgtggcttgggtgatgctggcaggaagaggaaacaaagcagaaagcagccagtctcctggtcattctttttcctgctgttcagtctacattttgcatgcttttggaaaaactcgatagggagccagctagtaaagcagaaatatgtgyagagtcctggccccagcttctcaaagtggagggtgtggagacaaaagtaactccatctttgatgctgatctgccatgctaacgtctgattaatcccagtcccgtgaattcctcctggtttccactttatgtactgtccctagtgaaagaacaagccaaccttgatgttattgcacaaattatagctcttatgcacatagcattcttgcctgttctggaaagtgcctttaattatcttgctggtgtacatatgcccttcccctatggtatagaagccttgggtctggggagtaacattgtagagatctacctatcttgc

SEQ ID NO: 543881 - DNA, 534 bp, Homo sapiens
gccatctagcccggcctggacttgcatgaccctgagaatcagcacctccttcaattttgtgtccttggtgtcatctcacttgctttaccctagtcctggccacgctgcagagagaggtcttcttttaaaatgtcctacaggagtagcattttcattcccagttcttcttcattaacccttgaggaataaatattttgattcaaaatttcatcattcattatctttacttgggttttaatcagagttgatttttttaaacatttgaaataaactcaagtgcaacatcctccaatccttcatgtttgcagaaataacattcaactttgatatagtgcaactattatacatcaggcattaggttaggyctccacatacaagcagagaccatatctgtctagttccttgcaattgtgatcttaaagcctagcacatggcatgtgcttagtatttgttaagtggaaggatggatggatagatggataaatggatgaatggatggatggataaatggaaggatagatgaatggagagatg

SEQ ID NO: 543882 - DNA, 534 bp, Homo sapiens
gccatctagcccggcctggacttgcatgaccctgagaatcagcacctccttcaattttgtgtccttggtgtcatctcacttgctttaccctagtcctggccacgctgcagagagaggtcttcttttaaaatgtcctacaggagtagcattttcattcccagttcttcttcattaacccttgaggaataaatattttgattcaaaatttcatcattcattatctttacttgggttttaatcagagttgatttttttaaacatttgaaataaactcaagtgcaacatcctccaatccttcatgtttgcagaaataacattcaactttgatatagtgcaactattatacatcaggcattaggttaggtctccacatacaagcagagaccatrtctgtctagttccttgcaattgtgatcttaaagcctagcacatggcatgtgcttagtatttgttaagtggaaggatggatggatagatggataaatggatgaatggatggatggataaatggaaggatagatgaatggagagatg

SEQ ID NO: 543883 - DNA, 576 bp, Homo sapiens
caaggcaatgtatgtgtgtatactcaatccacttatattcacatatctatattttatgtaattatctgtattggtgctgacttaaacataagttcatactgatgcctccaattctaattcattattacatggcttattctagcctcctcccatgcttagttgtaatactctcactccaaaaatgcaaaatctggctcttaatatccacagttatcttatttaactgttgagtttctgtatacatgtatagtggttacagattgttaacatagaccccaatgaggaacaatcttatcaactagactacagtactgatatgtagtttcctttgtctttagttttacagacaccactaacttccaaaattacttctcagcatctttccccacctccatccagttcagttaagtttttttatggatttgttattcatttaattttttttgtctcattttatatcccatcatgtgattctttaatagcctactttttaaaaattggcattcatttsactccacactttgtttaggaaagttctatgagttttttaaatgtgcaatgttttgtatccaccat

SEQ ID NO: 543884 - DNA, 671 bp, Homo sapiens
tggctgagattgttatccattttaaagtcataaatctcattgtctgtacctctcacttgcaaatagctccatattatcttgccaaacgacttgtagtgttatcatttctataatttaatcattatgctgttactggaatttgatgtgtttatgctttattcctctaaataggttgcaagctcctttatgagcatgggtcagatgcaatgcttcattgtataataatgacactttacatttctctggcatttagagcttataaatcccttccacatacattaccatattcaagcttcacaataattctgtcaggttggaagagccagtattattagtatccaaattgggagtaagaagtatttaatgatttgcttaaagttacactgtaccatgttttccacggactggggacattggaggtgctcaataagtgtcattgattcatttgtacatttattcctagctcagttccacggccagcatgataatttaagcaatagcatttgtgttttggggagatgattggttgtaaagatatcctaaaagcattggtttcatatgcaaccttcttattcaccctgtttgagatgcatttggtgaatcaggacaatgcagatgataaatcagacttttcacaycagcttctccctcctatctttttccaaagtgct

SEQ ID NO: 543885 - DNA, 596 bp, Homo sapiens
ggtcctggatcatatcagacctgctttaaactggcaccctcctccatcctccaatctcctgggagctgatttaggaacagggccgtgcagagaaattcccagcagcactttggtgacgccagcgcagtctgggaagyctgacagggaggggcccactttctggaggacggggaggctctgagatagaaaccgtgcccacttcgaagcatgtgttggttcctcccagatccctcaaggtttatgtatacattatgtgctatttatccttaaacctagactcatcatattatttttcctggagaccatctagccgaaacctcctgttttatagagaaaaaatatggaaactaaaagagtcatacagctagtttgtctaagagttaatactgtaatataggtttcctaccttatccataccttcatgagcttgtgaaggcattattttgattccgtggacatgaaaccactccaattaagtgcattctttttatatgttccctttcttctacttcctttctttattccctgtctcccattctccattgttaccgagttctctctcctacacccagtacagctctctcttttttgagggg

SEQ ID NO: 543886 - DNA, 492 bp, Homo sapiens
gtgccgggccccctcccccacgacagcatcccgggagagtgatcttttaacagcgagtccccatgaagcctgtcggaggtgaaatgaaatcttagcagcttgggggaagcctggtcgggccgtgcgcgttcagatgctatttccagggcggtgatggaagcggcggagacgcgggccccttctctccggccgccccccacccccgccgcttcctgagagcctcacggagtgtttaaactgcagtgaaaaattagagtgcgcaggcccggccctctcctggcggagctctgckctcccgtgatagggggatggtttgcagcacacatgttcctttgtttggcgggaccacgtgctctgtttgcacagcagcatgtggtaccactggaggaaatcgaaccaacactgaaagttcaaggaacagccaagctctgctgggaagcggctgcgtcagggccgggatgaagtgaggaggcaggaggcggctggactccc

SEQ ID NO: 543887 - DNA, 593 bp, Homo sapiens
ttatatcgtcttctttgacgtcagtgtatcattgatgtacatcaatcagctaatataggcacataaaattccagagttaagagagataataaaaagcgtctttttcatttcacagatgataacactcaggaccagaggtgcaatgactagagctcagatctctggacttgaaaccttcatgacccagtagagtcttacaagaatcaacacatgaattgcacttgcttatgacaatactgttccattatttaactaataatytgttcattttattgatagatgtttccttatttatgagctcttcatttatccatatggtacttgctgttgcacatataaaaacactctggtgttcaattttttcaagttgttattttcatgtttaaaaacactctttggataaattaagggctcaaaataaggacaatttaaataaacatgccattagtttgacaacagaaatgccaactgaggcaggacccattaatttgttgataagtgattcactggatgtgtcctacaacatactcatcaactatctttaacacatcatttctgaagcacaaatcaaattctcagaaaatatataaacg

SEQ ID NO: 543888 - DNA, 593 bp, Homo sapiens
ttatatcgtcttctttgacgtcagtgtatcattgatgtacatcaatcagctaatataggcacataaaattccagagttaagagagataataaaaagcgtctttttcatttcacagatgataacactcaggaccagaggtgcaatgactagagctcagatctctggacttgaaaccttcatgacccagtagagtcttacaagaatcaacacatgaattgcacttgcttatgacaatactgttccattatttaactaataatttgttcattttattgatagatgtttccttatttatgagctcttcatttatccatatggtacttgctgttgcacatataaaaacactctggtgttcaattttttcaagttgttattttcatgtttaaaaacactctttggataaattaagggctcaaaataaggacaatttaaataaacatgccattagtttgacaacagaaatgccaactgaggcaggacccattaatttgttgataagtgattcactggatgtgtcctacaacatactcatcaactatctttaacacatcatttctgaagcasaaatcaaattctcagaaaatatataaacg

SEQ ID NO: 543889 - DNA, 623 bp, Homo sapiens
atctttctctgatttgaggtatgagtggagagtactactggtactctcgtgattcttacagtcacttgatcaaagcttgtttcttgcctggcttccaacctttgacccatttggcctgtctcctgtctaggaggggctttgggctttggtaggataatgttttacatctcatgatcctgtgtaatttgtaaactgcttttacataagttatttcattcgattsttgcaaaaacactgggaagcatggatctgtatttccttttcattgataagggaaccaaagccctgagaagtcacatgactcaggtacatcccttgaactcaagactttcagttataagaccatatattctttccattacctctccactgatagagctctgagctagaattcttggaagtgagagcaaggaatgcatgagaataaaaaagacataggagtgagaaagagtgggcagattattattgaggcaggtcacaaaacttcgttaggcctgggtttcctcattgaagtgacaactggacaaggtagctgtctaggactctccttagctttaagcttctctagtcttaaggaaacagcaaagaaaaaaaaaagaaaaagacaaatcaaaacaatgaga

SEQ ID NO: 543890 - DNA, 623 bp, Homo sapiens
atctttctctgatttgaggtatgagtggagagtactactggtactctcgtgattcttacagtcacttgatcaaagcttgtttcttgcctggcttccaacctttgacccatttggcctgtctcctgtctaggaggggctttgggctttggtaggataatgttttacatctcatgatcctgtgtaatttgtaaactgcttttacataagttatttcattcgattgttgcaaaaacactgggaagcatggatctgtatttccttttcattgataagggaaccaaagccctgagaagtcacatgactcaggtacatcccttgaactcaagaytttcagttataagaccatatattctttccattacctctccactgatagagctctgagctagaattcttggaagtgagagcaaggaatgcatgagaataaaaaagacataggagtgagaaagagtgggcagattattattgaggcaggtcacaaaacttcgttaggcctgggtttcctcattgaagtgacaactggacaaggtagctgtctaggactctccttagctttaagcttctctagtcttaaggaaacagcaaagaaaaaaaaaagaaaaagacaaatcaaaacaatgaga

SEQ ID NO: 543891 - DNA, 602 bp, Homo sapiens
gagggaaacagtgaccttggattcagggacactggagggaaggagccagggaaataaatatcctgacttyggattgctccttcctccaggattctgttggagattctcattggccaaacccaacgagaagccagaggctgtgaaagccctgttgatggggcctggacaatgtgggctccccagacagtgcagggagaagaagggttgcaagcggatctggacaggcaaaaagaaaagatctggcacaattcctgaatccagtctgcccctagaatgttcagattacttgagcctgtaaattttctttttttttttttgagacaaagtctcactttgtcacccaggctggagtgcagtggcgcaatcttggctcactgcagcctctgcctcccaggttcaagtgattatcccacctcagctcccagagtagctgggactacaggcatgtgccaccatgcctggctgattttctgtatttttagtagagaccgggtttcaccatgttggccaggctggtctcaaactcctgaccttcaagtgatccacctgcctcggccttccaaagtattgggattacaatgctgggacttggccagcgtgcc

SEQ ID NO: 543892 - DNA, 618 bp, Homo sapiens
caaaggagcagaagcgcaacacttctaggcctgcccttagctaggatacattcccacctccctttatgatggtgatcactgactgatcctctgcaatgtgactagctttgcatgtttgtcacttctattgattttcacaacaggtctgagttgtcaaatattactatttgacagatgaaaactgaaactcagcaagtttacatgacttgcccaaggtcacacacctgcaggtgactgagctgagattcataacccaggatgattcattccaaagcctggatgctttcttctgtgttgtgccacattttttgtgagaccccattagcaaatgactccagtctaccccattcaaaatacctcccaactattactgctctccagtccacggatacttrcctgcctcaggccctcatcacatcataattagactattctaagaatctactaagcagccttcatacttttactttctcctaccagatctaccttcctaaaatataatttgcatcatgtggcccgcttctctgctcaaaagcctccatggctccccactgcccaataaaagaagttcaagtttctgagccaaatctggccctcaccaattctccttcctttcct

SEQ ID NO: 543893 - DNA, 618 bp, Homo sapiens
caaaggagcagaagcgcaacacttctaggcctgcccttagctaggatacattcccacctccctttatgatggtgatcactgactgatcctctgcaatgtgactagctttgcatgtttgtcacttctattgattttcacaacaggtctgagttgtcaaatattactatttgacagatgaaaactgaaactcagcaagtttacatgacttgcccaaggtcacacacctgcaggtgactgagctgagattcataacccaggatgattcattccaaagcctggatgctttcttctgtgttgtgccacattttttgtgagaccccattagcaaatgactccagtctaccccattcaaaatacctcccaactattactgctctccagtccacggatacttacctgcctcaggccctcatcacatcrtaattagactattctaagaatctactaagcagccttcatacttttactttctcctaccagatctaccttcctaaaatataatttgcatcatgtggcccgcttctctgctcaaaagcctccatggctccccactgcccaataaaagaagttcaagtttctgagccaaatctggccctcaccaattctccttcctttcct

SEQ ID NO: 543894 - DNA, 607 bp, Homo sapiens
tgacattaccaccatataggtgagaaccctgggactctgagcaattaaaaattttgtccgtatatacccagctattaaacaccacagtgagaattcaatccagtcccctaaataagcaattccctaactatgtatttggggacactagtgttttatatgtttctgtagtctatcatgttagggaaatgctgagataaataaatgtctcagttacaggatttctcagagttgttgatatcctaatgtgcattgtgaatctgttagtaagagactgtgtaatgcatcctttcccaaagtagatgaatgtgatattgaagctactccttgaagggtgagtagaakttgagtatgagacttttgatctggttgctgactggctggccaaaaggacaaccaactgaccataatactttgtttttctccattttgctcctccctttctaatccgccctggcccaccttgctcaatgagcaccaatcgcagtgcccttttctttcccctcaagttcttaattactcaacaaccatactggctgtctttcatatgaatgtaagcccctttctgccttgggaatttataatatactgctctttctgcctggactac

SEQ ID NO: 543895 - DNA, 557 bp, Homo sapiens
gcagctccacagtttgctctggactccgtttcttcccaatgctcttgaacaggtcctggtgggttgtgtgatctgcaatgttcttccctcaggtcttcccaaagctgagtttccttatctttcaggtctgaatccccatgacgctaccttaaacaggcttcccttcagcaccttaccaaatgatgtcttcctcagtcattctctatcatactaccttattgtattttattmtattcctatcttgcatcattggcttgacttatttttctcattgatttgcttacttactaggtgtctgccccttcatgtttgtaatgcaagccctgttttaaattttcttgttcacccctcttttctagtggttttgaccatctggcataagcaagacaatgttctcttgcagtaaaatggatctttagaatttcttgtaattcaaatgcttctctgcttttgaagatcttttcccgtgatgtgtactcacctggcctccagcctaagttttccatcagatctgtcacatgctggaaatatcaggtctatggtagtatactttctga

SEQ ID NO: 543896 - DNA, 557 bp, Homo sapiens
gcagctccacagtttgctctggactccgtttcttcccaatgctcttgaacaggtcctggtgggttgtgtgatctgcaatgttcttccctcaggtcttcccaaagctgagtttccttatctttcaggtctgaatccccatgacgctaccttaaacaggcttcccttcagcaccttaccaaatgatgtcttcctcagtcattctctatcatactaccttattgtattttattctattcctatcttgcrtcattggcttgacttatttttctcattgatttgcttacttactaggtgtctgccccttcatgtttgtaatgcaagccctgttttaaattttcttgttcacccctcttttctagtggttttgaccatctggcataagcaagacaatgttctcttgcagtaaaatggatctttagaatttcttgtaattcaaatgcttctctgcttttgaagatcttttcccgtgatgtgtactcacctggcctccagcctaagttttccatcagatctgtcacatgctggaaatatcaggtctatggtagtatactttctga

SEQ ID NO: 543897 - DNA, 557 bp, Homo sapiens
gcagctccacagtttgctctggactccgtttcttcccaatgctcttgaacaggtcctggtgggttgtgtgatctgcaatgttcttccctcaggtcttcccaaagctgagtttccttatctttcaggtctgaatccccatgacgctaccttaaacaggcttcccttcagcaccttaccaaatgatgtcttcctcagtcattctctatcatactaccttattgtattttattctattcctatcttgcatmattggcttgacttatttttctcattgatttgcttacttactaggtgtctgccccttcatgtttgtaatgcaagccctgttttaaattttcttgttcacccctcttttctagtggttttgaccatctggcataagcaagacaatgttctcttgcagtaaaatggatctttagaatttcttgtaattcaaatgcttctctgcttttgaagatcttttcccgtgatgtgtactcacctggcctccagcctaagttttccatcagatctgtcacatgctggaaatatcaggtctatggtagtatactttctga

SEQ ID NO: 543898 - DNA, 657 bp, Homo sapiens
aaatgagctagtattgacctggagaacctaatgcatagtatcagcatattaataacaggtcattacatgctatgtctaactgctagggttgaaatgattgctgtcctttcaaatatcaaggaaatggtgtcatttagatttgcaattattgctcccaggttatcacgactactttcaaattagagttcagggagtaaaggagaacagcatggagtcagcatgggtttatatcataagttcactattattagacttatatccttgggtatattgcttaaaccatcttcggtctcaagtttataatttgtaaamtggggataacattttcttcttaggtgtgttggcagatggcatttgtaaatacaccttgcacaatgcctggtaaaaacttgatgttgaatgtatgttcatttcccttcctctatcaattcccacagcactctgtctgagccatgtttaggacttcgttggctttctacctgaatttctctagtcacttctgtccatataatcctttgttaggcaatgaattatctcacagctgagtttttaaaaatgttttatcttttcatcttccacagggtctgcccacagtaggtacccaattaatatttgtggcattaatggatccacgactaaaggcacaagggctgtgga

SEQ ID NO: 543899 - DNA, 657 bp, Homo sapiens
aaatgagctagtattgacctggagaacctaatgcatagtatcagcatattaataacaggtcattacatgctatgtctaactgctagggttgaaatgattgctgtcctttcaaatatcaaggaaatggtgtcatttagatttgcaattattgctcccaggttatcacgactactttcaaattagagttcagggagtaaaggagaacagcatggagtcagcatgggtttatatcataagttcactattattagacttatatccttgggtatattgcttaaaccatcttcggtctcaagtttataatttgtaaaatggggataacattttcttcttaggtgtgttggcagatggcatttgtaaatacaccttgcacaatgcctggtaaaaacttgatgttgaatgtatgttmatttcccttcctctatcaattcccacagcactctgtctgagccatgtttaggacttcgttggctttctacctgaatttctctagtcacttctgtccatataatcctttgttaggcaatgaattatctcacagctgagtttttaaaaatgttttatcttttcatcttccacagggtctgcccacagtaggtacccaattaatatttgtggcattaatggatccacgactaaaggcacaagggctgtgga

SEQ ID NO: 543900 - DNA, 602 bp, Homo sapiens
gtttcaccatgttgggcaggctggtcttgaactcctgacctcgagtgatctgcccaccttggcctcccaaaatgctaggattacaggcatgagccaccgcgcccagccctcattctctttcttgttcttggttctctcttctataaagtgggaagtttacgttaaacgactgacaatgctctttccaattttgaaatcttatgcctacattgatcattttgaatcaagtatttagcttgacttcaggttcagggatatccacaagagtgaacgcctgtgtagggtttctgaaggtccwttctgtagtccccacatacttacagatgctgcactaactttaagatgctcatttggtaattaagattgcttatgtaagagctaattctaaaaggatccttctagtctagagcttacactggctttgttatcattcctaaatacttaaagtcccctattatctatacattctgatttactgattctcattgctgatctcttcctcaaggcatttgagtttgtgactcttgaaagtcaagacttttcattttatatacaaatcattaactcagaaggaggggatgtgacttgtccaaagcccctca

SEQ ID NO: 543901 - DNA, 578 bp, Homo sapiens
tggaagaccttgaacaccaggcactgcagtatgggatctgtagcaaacgtgcatctcccttcctgggaggtagggtgtggagtggaactgtccatcgaatgcccaccagatggcatcccctgggcctaccgtagrcttttgggatcagaagctgagcccgcctttctgctttatgaaagatgccttaggatctcccctcattcgtgattatttccttacaccatctgcagatttttaactggctatttgtagggaaagggagagaagaagagaatagagaggcaccagcgataggccctttggaagcttcaggtctcaatatgaaaactgcatccccaagacacatctcctcacaatgggagtgaaaggagaggtgaaggaaagtatcagaaaaatagtaacatgaaattcctcttcatttgccagggccatagcaagaaagaatggggccttggtaagagacatttccaaactgacaatcagggtttcatatgggattttacactcctctaaggcggagggcaggtgttcaccttccatcctctctgctgccaagaccaaagtgggtgtttcaggct

SEQ ID NO: 543902 - DNA, 352 bp, Homo sapiens
ggcttcctccctttgcttgcttcccagggccacyaagttcagagaaaggtgctccctgcagcagcaccatgggctctggcaagccaagcaccgctccctgccttcccaagaaacctgagtgagcgtttggaagggcacagccccctcagggctctgaggaaggccggcttacctcctctccacccctctcctccgctgacatccaggctgcagctattctcgagcaggcaggaccccctttccagcagcctgggcttgtgccacttctctgccttcagtgttctccaagcttcccctggacccaggccctgtgtgtccatcaccactgggatatctgatggggacccagact

SEQ ID NO: 543903 - DNA, 525 bp, Homo sapiens
cttgtgaaaaggagaggcagttctaaataaaagcagtttactcaacacaaacaccaaagagcgtgtttagtgtttacataaatagggaactgtatcagttgtcttaccgtgtaaaaacccagcccaaaatatcatggcttaaagcaagaaggctcattcatttgctcttgaatccgcaatttggacactggctggtgaggacagctcttctctacttcatgtggcatcagctccactggggtgtggacctttctcctttcaggatggcttactcacgtggctagcaggttgacgctggctgttagcctgggctgccagcaaagggctgtgattcttcctcaagtgggcctctctgcaggctgcctgggcttcctcaaagcatggtggttccaaaagctggcatcccagtagaaccaggtgaaaggcatatgacccttcatatcccagccttggaagacacctagcatcacttccatcagggtcmaaaacctgccccaattcaaagggagaggacacagttcccca

SEQ ID NO: 543904 - DNA, 639 bp, Homo sapiens
gccccacacgcccaagaaagggagagaggtttaggatggacagatgactytcatcctgtaaagcaccctggtttctgagcctctggaaatcagagagacatgtggcatcagaaagccccttgtctgaggataggggtgcaggggagtgaacagagagccttgtacacacacacccgtgtgccccaggctgggggcagtggtggtccagccgagtccttcagcactgtggacagcgcctccatagcagggctgcgaagcctggagcagttctcagaggtgcaggacaccagaggccgcttacctgcatccagaagaccagctaagtcagatatattcaagtccaaccctgttgacccaggagtcttataaacaggggttgaaaatacctacctctcagggctgtcgggatgatcaaatgactggagaccatacagcacccagcactgtgcctaacatgtactagagaacactgtcaatatcgctaacaaccactctggctcccagccccaggcacttccaggccaggagatgaatagtctgtgcaaagcatattgatttccttggtgacacagcattgccatgttgcgggaccataagccaggagatctgggttcatgccccagtcttgccaaatttttg

SEQ ID NO: 543905 - DNA, 639 bp, Homo sapiens
gccccacacgcccaagaaagggagagaggtttaggatggacagatgactctcatcctgtaaagcaccctggtttctgagcctctggaratcagagagacatgtggcatcagaaagccccttgtctgaggataggggtgcaggggagtgaacagagagccttgtacacacacacccgtgtgccccaggctgggggcagtggtggtccagccgagtccttcagcactgtggacagcgcctccatagcagggctgcgaagcctggagcagttctcagaggtgcaggacaccagaggccgcttacctgcatccagaagaccagctaagtcagatatattcaagtccaaccctgttgacccaggagtcttataaacaggggttgaaaatacctacctctcagggctgtcgggatgatcaaatgactggagaccatacagcacccagcactgtgcctaacatgtactagagaacactgtcaatatcgctaacaaccactctggctcccagccccaggcacttccaggccaggagatgaatagtctgtgcaaagcatattgatttccttggtgacacagcattgccatgttgcgggaccataagccaggagatctgggttcatgccccagtcttgccaaatttttg

SEQ ID NO: 543906 - DNA, 639 bp, Homo sapiens
gccccacacgcccaagaaagggagagaggtttaggatggacagatgactctcatcctgtaaagcaccctggtttctgagcctctggaaatcagagagacatgtggcatcagaaagccccttgtctgaggataggggtgcaggggagtgaacagagagccttgtacacacacacccgtgtgccccaggctgggggcagtggtggtccagccgagtccttcagcactgtggacagcgcctccatagcrgggctgcgaagcctggagcagttctcagaggtgcaggacaccagaggccgcttacctgcatccagaagaccagctaagtcagatatattcaagtccaaccctgttgacccaggagtcttataaacaggggttgaaaatacctacctctcagggctgtcgggatgatcaaatgactggagaccatacagcacccagcactgtgcctaacatgtactagagaacactgtcaatatcgctaacaaccactctggctcccagccccaggcacttccaggccaggagatgaatagtctgtgcaaagcatattgatttccttggtgacacagcattgccatgttgcgggaccataagccaggagatctgggttcatgccccagtcttgccaaatttttg

SEQ ID NO: 543907 - DNA, 573 bp, Homo sapiens
ggtctaggcatacaatgtcaatgtttcattaatatcaagtactacagcagcttccagagattaagacagaaaaaggcttctatgacaataataaaacaaaatcaatttatcaaaacagccggcagctaatctacaattgaggtttgcagaacacattaaaataatgattaagcattgctgctaaatcatgggacaataatgtcctatgtctcatgtttttcagtaagagctagtcaggaagcttggggctgtcataagcctaaaagttaccatctacatagttttcattaatatattttattaaaacaattatttcaagtgtttgatttttaataactttattgctcattgactattacaaaaatgacaacattaaaaacctgaaayacagtcaattttgtctttagctctgtgcatgatcactttctgtattctaaatctgagcatatacatttgtagaaaagtttggttttagattactaaggtcacttgaaacactgaattacacagttgtgacctcatagacaaatgaaagaattacatgaaataatgcatacaatatgctctgcacga

SEQ ID NO: 543908 - DNA, 573 bp, Homo sapiens
ggtctaggcatacaatgtcaatgtttcattaatatcaagtactacagcagcttccagagattaagacagaaaaaggcttctatgacaataataaaacaaaatcaatttatcaaaacagccggcagctaatctacaattgaggtttgcagaacacattaaaataatgattaagcattgctgctaaatcatgggacaataatgtcctatgtctcatgtttttcagtaagagctagtcaggaagcttggggctgtcataagcctaaaagttaccatctacatagttttcattaatatattttattaaaacaattatttcaagtgtttgatttttaataactttattgctcattgactattacaaaaatgacaacattaaaaacctgaaacacagtcaattttgtctttagctctgtgcatgatcactttctgtattctaaatctgagcatatacatttgtagaaaagtttggttttagattactaaggtcacttgaaacactgaattacacagttgtgacctcatagacaaatgaaagwattacatgaaataatgcatacaatatgctctgcacga

SEQ ID NO: 543909 - DNA, 568 bp, Homo sapiens
tcactccagaatggacatttctttctgtggcttttcaacactggatgtgtacactttctcaggtagcagtagactcttaccctctttccatccaactaagagttgacccatagtcaagttgaggcaagacctaaacctggaacactcggcaaattagacattatgtgacaggagaccctaaagatttatatatttttaataattttatttaatgaaacattatataacagttacaatatgccaaatacattataawattaactcatttaatcccctatgaagtcatccccattttacagatggataaagtgaggcctgaagaggttaagtaacttgccaaagttctcacatctggtaagaagaagggccagggttcaaacccaaaaaagaatggctacagagtccatactttcttaaccacaataatatgaagcttctcaataatagtaataattgttcttctgcttccctaatatgtctttttttcaaggttctgaaggaaggtcaatcatgtaatgccaaaactctgagaaatcctagctttcaagttgtataggggaagagagta

SEQ ID NO: 543910 - DNA, 512 bp, Homo sapiens
tatctaataacaaagcttcagaacagatgaagttaaagtcttcagactgtaaaagagaaataagctaagcacagtggctcatgcctgtaatcccagcactttgggaggctgaggcrggtagatcaaccgaggtcaggagtcggagaccagcctgccaacatggcgaaaccctgtctctactaaaaatataaaaattagctggacgtggtggtgggtgactgtaaccttagctacttgggaggctgaggcaggagggttgcttgaacctgggaggcagaggttgcggtgagccaaaatcacaacattgcactccagcctgggcaacaagagcaaaactccatctcaaaaaaataaataaataaaggagaaatagacaaattcctaatgtctaaagttaaaaagattaactctacaaagtgttggtgaggatgtgaagcaactggaactatcatacactgctagtaataatagaataaggtaaaattacttcagaaaactgacagtttcttaaa

SEQ ID NO: 543911 - DNA, 512 bp, Homo sapiens
tatctaataacaaagcttcagaacagatgaagttaaagtcttcagactgtaaaagagaaataagctaagcacagtggctcatgcctgtaatcccagcactttgggaggctgaggcgggtagatcaaccgaggtcaggagtcggagaccagcctgccaacatggcgaaaccctgtctctactaaaaatataaaaattagctggacgtggtggtgggtgactgtaaccttagctacttgggaggctgaggcaggagggttgcttgaacctgggaggcagaggttgcggtgagccaaaatcacaacattgcactccagcctgggcaacargagcaaaactccatctcaaaaaaataaataaataaaggagaaatagacaaattcctaatgtctaaagttaaaaagattaactctacaaagtgttggtgaggatgtgaagcaactggaactatcatacactgctagtaataatagaataaggtaaaattacttcagaaaactgacagtttcttaaa

SEQ ID NO: 543912 - DNA, 561 bp, Homo sapiens
acatcttaagagagcatctcattctaccctttatcatctaggcaagagaaatgaaattaaaacaggtgaggtaatctcctgcaaggttccttagtggcagacacragtaaaatccacgtctccagattatcagtcttcctcatacacacacatattcacactcatacacacagtcaactatgcactctttaaactcatgagggcatgcaagaggcttatggctatggtgcaatccacttgaggcagagcgttagatcttggtcttgacatttcaaccacccgagacaagatctacttgaagctaaataatctcactggaatgctggtgctccagcaggagttcgtgaggatgctgcagaaagcataacctcaccctcctttttttccttttgatctctgggactcctagaactcgcttactgtgtctctatagtgtttcctttatcatcaaggtaaatttagaacagtcacactacgaaaacgtgttttcaaagtcagtgttccacaggaggaacatcacagaagaaacaatgcccagcactagtagccatggccgcacac

SEQ ID NO: 543913 - DNA, 561 bp, Homo sapiens
acatcttaagagagcatctcattctaccctttatcatctaggcaagagaaatgaaattaaaacaggtgaggtaatctcctgcaaggttccttagtggcagacacaagtaaaatccacgtctccagattatcagtcttcctcatacacacacatattcacactcatacacacagtcaactatgcactctttaaactcatgagggcatgcaagaggcttatggctatggtgcaatccacttgaggcagagcgttagatcttggtcttgacatttcaaccacccgagacaagatctacttgaagctaaataatctcactggaatgctggtgctccagcaggagttcgtgaggatgctgcagaaagcataacctcaccctcctttttttccttttgatctctgggactcctagaactsgcttactgtgtctctatagtgtttcctttatcatcaaggtaaatttagaacagtcacactacgaaaacgtgttttcaaagtcagtgttccacaggaggaacatcacagaagaaacaatgcccagcactagtagccatggccgcacac

SEQ ID NO: 543914 - DNA, 575 bp, Homo sapiens
tgatcaagttacactatggagactgtggcragacccactggtagaatcacagtagatgctcccagggttttgaaacaaacaaggctttgacttaatatcagactcagagacaaaatatctggccataagacatcaagaaagagtacactctgagttgcttcatgaaatgattttatccaacccataaggtaggccgttctgtatcagtcaagttttaatacaagtaccagaaactccttgtgttagtctgtttgcattgttataaaggaatatgaagctgggtaatttataaaggaaagacaattctgcatgctatacaggaagtgtggtgctgtcatctccttctggtgagggcctcaaggagcttacagtcatagcagaaggcaaagggggagctggcatatcacatggtaagccaggaagcaagagaggtggaggaagtgccaggctctttaaagccaccaaatcatgtgtaaactcatatagtgagaactcactcattaccacaagaacagcaccaagtcattcacatgggggatctgcctccatgatccaaacaccttccactaggccca

SEQ ID NO: 543915 - DNA, 575 bp, Homo sapiens
tgatcaagttacactatggagactgtggcgagacccactggtagaatcacagtagatgctcccagggttttgaaacaaamaaggctttgacttaatatcagactcagagacaaaatatctggccataagacatcaagaaagagtacactctgagttgcttcatgaaatgattttatccaacccataaggtaggccgttctgtatcagtcaagttttaatacaagtaccagaaactccttgtgttagtctgtttgcattgttataaaggaatatgaagctgggtaatttataaaggaaagacaattctgcatgctatacaggaagtgtggtgctgtcatctccttctggtgagggcctcaaggagcttacagtcatagcagaaggcaaagggggagctggcatatcacatggtaagccaggaagcaagagaggtggaggaagtgccaggctctttaaagccaccaaatcatgtgtaaactcatatagtgagaactcactcattaccacaagaacagcaccaagtcattcacatgggggatctgcctccatgatccaaacaccttccactaggccca

SEQ ID NO: 543916 - DNA, 567 bp, Homo sapiens
gttacactatggagactgtggcgagacccactggtagaatcacagtagatgctcccagggttttgaaacaaacaaggctttgacttaatatcagactcagagacaaaatatctggccataagacatcaagaaagagtacactctgagttgcttcatgaaatgattttatccaacccataaggtaggcygttctgtatcagtcaagttttaatacaagtaccagaaactccttgtgttagtctgtttgcattgttataaaggaatatgaagctgggtaatttataaaggaaagacaattctgcatgctatacaggaagtgtggtgctgtcatctccttctggtgagggcctcaaggagcttacagtcatagcagaaggcaaagggggagctggcatatcacatggtaagccaggaagcaagagaggtggaggaagtgccaggctctttaaagccaccaaatcatgtgtaaactcatatagtgagaactcactcattaccacaagaacagcaccaagtcattcacatgggggatctgcctccatgatccaaacaccttccactaggccc

SEQ ID NO: 543917 - DNA, 575 bp, Homo sapiens
tgatcaagttacactatggagactgtggcgagacccactggtagaatcacagtagatgctcccagggttttgaaacaaacaaggctttgacttaatatcagactcagagacaaaatatctggccataagacatcaagaaagagtacactctgagttgcttcatgaaatgattttatccaacccataaggtaggccgttctgtatcrgtcaagttttaatacaagtaccagaaactccttgtgttagtctgtttgcattgttataaaggaatatgaagctgggtaatttataaaggaaagacaattctgcatgctatacaggaagtgtggtgctgtcatctccttctggtgagggcctcaaggagcttacagtcatagcagaaggcaaagggggagctggcatatcacatggtaagccaggaagcaagagaggtggaggaagtgccaggctctttaaagccaccaaatcatgtgtaaactcatatagtgagaactcactcattaccacaagaacagcaccaagtcattcacatgggggatctgcctccatgatccaaacaccttccactaggccca

SEQ ID NO: 543918 - DNA, 664 bp, Homo sapiens
agctcactgcaacctccaccacccaggttcaagcaattctcctgcctcagcctcttagtagctgggactacaggtgtgtgccaccacgcccagctactttttgtatttttagtagagatggrgtttcacgatattggtcaggctggtctcgaactcctgacctcaggtgatccacctgcctcagcctcccaaagtgctggggttataggcgtgagccactgcacccagcctaggctctgcatctctaaccacgctcagtcaaaactgaggctgagggtccataaaccacttccagcagcaggacctagtaggcgtggcctggtgtgggtttagaactggggtttggatctgcagcttctaaacgggatgattttggacaactgacctgactcataagcctctgtttcctcatctgcaaggtggggaagatgaacctggccgtgctcatggaacaagggcatggggacatgcccacacccagggaatgcccaggctgttctggggcaacaagcagggtggacacctagggggtgtctccaagcaactgcagcagccacagttaacctgggaaatgggttcagatctttctacaaagcccaggattcaaatcctcattctgcccctcattgtgtgcacctaagaaagctcacgcaccctcccttcc

SEQ ID NO: 543919 - DNA, 613 bp, Homo sapiens
tcttcccttctctccaggaggcatgggcaccaccacaggaggtaggacaattatttcccacctgccttcagtcactcttcttggaccagtggatggagactgtttacaaagcccctccattgacctgcacctctcgcacctcccaactcttccaaactgcagtctggccactttgggtgagctctgtcttccactggttgtgaagtttgcctggtcctcatttttctgccccaaaaggagctgtgtctttgcaaccccagaaaggctgtgagcagcaattactcccatctccaggggccagattattccaggtcaaatcaagaccaagaccaggggctgccagacagggcaaccacagttctggaaagatcyggtcccttaaacagaggtgattggcagaggctcacccaggcacaagcctcagaaatgagacgggttctgacggccttcctccccgtcctgcagccagggcccccatccagcatcaatgaaagcagaagccacagttattcccagccgttgtgctagggggctcccatcatggcaagtcctcagcccagtccagccctggcagacaagtgcaccccagaacacgacccagcccaagctcctg

SEQ ID NO: 543920 - DNA, 529 bp, Homo sapiens
gcatgctggacctcagagaagaaagagaaaagtggacctcacatgcccagctcattcttagaaaaattatcaggcaaaaatatgtcaccttcctggagtggaataagtggagagatgaaagaggccaaaataacttactacagttctcttggatgttagagtgggaaggaatacttttttctctctaaaaatacctgatctattttaggcaagatgacatgtatttgtatttgccaggattttcctagtttacacctgttttcccagtgtaattatgcattgtgttcctttttattctcaaaagagttcaagtttgcatgataaattatgtggtcatcttaatattagaggataaggcagatttctctggaggtacagattgtggcayggtctttcagaatgagtaagagttattgcatctaagagagaactgatgaggcgtaggaatgaggaaagggagagggatggggaaagagaagcacaaacctcaggaaagcatggagaaatggctgaacaaagaaagtgtggt

SEQ ID NO: 543921 - DNA, 641 bp, Homo sapiens
cacagtgcgtataaatactatgctttatacaaccggtctctatgcttggacattcaagtagtttccaacattttgcaattacaacaaatgcttcaatgaacaatgaataccttatggatacacacacacacacacacacacacacacacacacgtatactgtattgttggaggtttatctttagagtaaattcttagaagcgggattgctaggatagaaaccaaatgcatatacaattttgttacatattgccaatcctccttcatargaatggtaccatttgctattcccaccagcagtgtaggagagctcctatttccttacatcctctccaacagaatgtatcgtcaaacttctaagtttgccaatctaatgaattagaaatagtactggtgttgttccaatttcatttctcttacaatgagaagaagatttgaacatcttttcatatgttgtctttctgtgcattcttgcttcatttatttgctcattcgttcataaagtttttgttcattttttcttttaatttttaaaagatgtttacaacttaggggtatatgccttttatgggaaaagaacactgaaaatattttctcccagtggtcatttgtcttttaacgtctttgcttttggtgtttacc

SEQ ID NO: 543922 - DNA, 589 bp, Homo sapiens
gcactgactcacagcagtgttataaatggcttttggaatccaccctgcctacagtatcccatattttcatcaggtttcagaaattactccactacttgaatcttctagattctatgctttttcgaaactgttatattgtgactgtgctgtttttactggaactatagttacttgatactgtcactgacataggratcatcaggagagattatatttttttctggctaaccagaaaagtttgtttttcctgtgaaattttttttttttgaaggcaataggtgtttaagatgttttttttttttctttcagggattcacagaactacttcctattgatttgattaaaatttttgatgaaaatgagctggaggtttgtattataaacattattttatgtaaagtggattttttaaagtatctctcattactttacaagtaatattttaatattcttggatccataatgtcctagagagtaactttagatgaattatattacatgtctcttatagggcttatttgccaatgtggttctattacatgtctcttatggggcttgtttgccaatgtaggagtaaggaacagcaaaa

SEQ ID NO: 543923 - DNA, 670 bp, Homo sapiens
ggtgcggtggctcatgcttgtaatcccagcactttggaaggctgaggcgggaggatcacctgaggtcaggagttcaagaccagcctggccagcatggtgaaaccatctctactaaaaatacaaaaattagccaggcgtggtggtgggtgcctgtaatcccaactattcggggaggctgaggcagaagaatcgcttgaagccaggaggcagaggttgtggtgagctgagattgagccactgcactccagcctgagctacagagcaagactctgtctcagaaataacaataataatctgtccctttgtccttacatgggagaaataatacatgccaagtcgctctgtatccctcattgtctgaatttagggaatatctgatgtcaccttctgaagggtcctggaaacaaaaaccaagtgtcttacctttgttcttgagatttgttagaggactggctgcagagaagcataaacatttcaggcaaaaaggaaaagagcactgaagctgggaatacaccgcaacacagacaatgaatgcctcactgctgccggctccagggccagcagtggagaggcacaggctgttggaccttcatcccrccaggtgctctttccacatccttcctcgggccaacaaggggcaggaatggaaatacccgggacccacaggcag

SEQ ID NO: 543924 - DNA, 573 bp, Homo sapiens
cacctactaacctcattttaacttaattacctctttaaataccctctctctaaatacagtcaccatctgaagtattaaagacttcaacttaggaattttgggcaaatacaattaagcccatcacaatcaggtaacatttggtaggacgtgtagatgctttttatctttaagggaataggcaaatcgttaaaaataaataaataaaaacttgttcaacttgtttaggtacattttcttatagtgtattgtggttcttatttttttaaccttccarctagtgtgtaaattggaaacattgtagcttaatttgatagttttagacataatcaaagatgatggaaatcttgttcttaaatttagtctattcagcaacttgtgtatcctcaactgctgaagactgaaaacttgagatgttcctcttgttttaagaatttgactgaaaacgggctgggcacgatggctcatgcctgtaatcccagcactttgggaggccgagatgggtggatcacttgaggccaggagttccagaccagccttggcaacatggcaaaaccccaaaaatacaaaaattag

SEQ ID NO: 543925 - DNA, 485 bp, Homo sapiens
atccaaggccaaaaagccaataaatgataggtcttgactgactccaaagccatgctcttaatcactaagatttcagtaactaccaatagaatacagatttctatattgggaaagaattgggctcatgattcttctaacttcaagattgtacaattaaataagtcagagaatgaaataaagagagaatgagttaaagtggacaagtttgtggatgtgtgtgactactgagtagtgaagttatgcaacaggtgtggtctgataaaaaatgcttgctgggctcagtggcacctgcctgtagtggcggctactcaggaggcttaggtgagaagattgcttgaggccaggagtttgaggctatagtatgcaatgatcaagcctgtgaatagccactgcactcccgcctgggcaaygcagagagggctcgtctctagacagacagacagacaaacagacagttaaaatttaaaaggctgggcacagtggtg

SEQ ID NO: 543926 - DNA, 647 bp, Homo sapiens
tccaccgtttctcatttctacgaaacatgaggctggcactgccttagattgcttttgcacagcatatatcttgcattatccaagttsatttcagtctctctgaaattaggcaacatgctttatacatttttgtacagttacaatgtctatcacagaggaagtactccgtaaacacttcttgatgaatttattatttcactaatcttacttcatagtgtctctgataataaagcaagagctctgaggcatcgctaagcctcgccatgatttgtatatacttgctgaacctcctctcagaagaaattgctactcctaatatcaaagtttgttgatcgatttatagtatcaggttttgtcaaagttacccattttaaagggacagaagaaatacagcactaagaagagggaactattctatttgagtagctaaagatccgtagaaatctactggactggtaaatatgtctctttagaatggctctagcaatactatgcttgtctcagatgggaaaaagtgaaaccaaagaaaagcattgtctgtagctatagggcactccccttggcccttacctgttgacattggtgcaaagaaaattatatgcaactcttaaaaatgttgatgcactagattgaagataatgaatgtt

SEQ ID NO: 543927 - DNA, 647 bp, Homo sapiens
tccaccgtttctcatttctacgaaacatgaggctggcactgccttagattgcttttgcacagcatatatcttgcattatccaagttcatttcagtctctctgaaattaggcaacatgctttatacatttttgtacagttacaatgtctatcacagaggaagtactccgtaaacacttcttgatgaatttattatttcactaatcttacttcatagtgtctctgataataaagcaagagctctgaggcatcgctaagcctcgccatgatttgtatatacttgctgaacctcctctcagaagaaattgctactcctaatatcaaagtttgttgatcgatttatagtatcaggttttgtcaaagttacccattttaaagggacagaagaaatacagcactaagaagagggaactattctatttgagtagctaaagatccgtagaaatctactggactggtaaatatgtctctttagaatggctctagcaatactatgcttgtctcagatgggaaaaagtgaaaycaaagaaaagcattgtctgtagctatagggcactccccttggcccttacctgttgacattggtgcaaagaaaattatatgcaactcttaaaaatgttgatgcactagattgaagataatgaatgtt

SEQ ID NO: 543928 - DNA, 642 bp, Homo sapiens
attgtttacagagcaattataatgtgccagataccacattgagcattttacacatattatctcattttgtctttgtaaaaaccccaagaggtaagcattctcattcttattttttaaataaagaaactgagacttcagtaacaaggcacagggtcccagacttggtaaggagtaaggctgtttcacacccagagcccactttcttcacygtcgtgctagcctcactcgtggagctgagctcgggacctggtgggcatcccttctctcttcccattcttcactgtctctaatcagttggaccatatttcccacctgattactaacggacagtctgtcggtataggcacccttcagcgttaaactgtttaggtaaccgaagctcctcttctcattccattccttgactacttggtgaggttgtggggaacgcaaaggaaaactctggagaggaagcctgcgcaatgcactgaatgttcgtgtttctccaaattcatgtgctgaaacttaaccctcagttgagaggtatttggaggtgggatctttgggaagatatgggaaactctgcactcatgaatgagattagtgccctgataaaacaggctcaaaggaactcattctacattctacccagtgagaaggcac

SEQ ID NO: 543929 - DNA, 571 bp, Homo sapiens
gtgcgatgctgccattgtcattataggatgagatattgctggatatgagaaacgaggaaagaacttggaagttaggagtgaagtccagagaaaaatcacttcgtcctggtcttctggtggtggcataaaaaaattagctacagtccctaaccaggcgacaaaccacactgaaatttctgtccttttcttgttttctttgcttctgctcagaagaggagggatgggggacttctctgcctgtctggccacttgccctggttcttagcattcaaaaggccttgctccctcccttggttcttgatagttctcacctcggcagggccgaatcctggaactgtgcctttgacagaaaccgccatcrcctccaagggctcatcctgctgtggcacacaccccctgccaagaaaggctccaggggtaatggaatgggctatgttccttgttttgtgactctgacatttgtccttcccagggtcttccctgctgttccaggtcctccacattcctgccttgggggccagttttatattccaacaaatgcagattgcgaggaacaagattggctttcaga

SEQ ID NO: 543930 - DNA, 669 bp, Homo sapiens
tcgacagtctgaggaccttattgataagctttctgtccaagaacaaacatcacagaaatcagcagagggaaatgtctcttgtgtgtacacttggcagaggagctgagcagaacacggacctgggtcacgtcagaatctatcccttcatgatgccattaaatggaatgttttcacacatgataactggctgtcttacagagcggggcacagttctaggcaaacacatgttcacacacactcccacgtgtacacacacagaacacgtggatgaccacaggcatatgcaaggcatgcttgaacagtaattcagacaatgaaacttctgggcccttgagccagcagggaatttcaatcctagtaatagattactgtccctgaccgaccagaagtctgggctcttataatggttttaaatcatagaattatagtttttaggggctgtagaaatcagctatttcmacctccaacccagagcatacaaatcctctccgacattcctgatgtgttgacacatagcctctgcttaacactccaatgatggggaacctattaccttacctcaaaccctacttgattgttgttattaataatgctactgtagattattgagcactgatgctgtgcctggcactatgctaaaccctctaggtagactattgcaattaagcc

SEQ ID NO: 543931 - DNA, 612 bp, Homo sapiens
attagctagtccataactcagcagatcacagtgcatgtgcccctgattcctgagctttctgcagtgcgagggatgtggcctcatccatcagccggccccacgggcatgcagacaggagcactgcagtgccgctggartcagcgcggagcagttagttctgggatggaggctgaggcagagtgaggtgtcggttccaccagtatgtggtatctccaaggctgtattagcagggggctgtcaatctccaggcagaaaaacaagagacagaaagaagaaacaatcaagaatcagacagcaacaagagagagggagcgagaggctgggggactattttaagtaatgtttgataaattacctgcctgtcctggcctcctcataaagatgctgtgcagctgatgttcgcatttgacaactcaccaccacagcaggctgcggggatgagacaagccggggctgaaggaggtggctgggcactcctacactagggaccccgggtgggggtccatgtccattggtcacaggttcacaggtggacgcatgcagcgctgcacacacatggaaacatctgtgctcacagggactgaggttgttgtgttcattgttatgcatata

SEQ ID NO: 543932 - DNA, 632 bp, Homo sapiens
gaaaacagtccccaccctcgcccagttcatgacctatattgggagtgacacacgctgggctttaagatgcttgccaagcaacatacaggcaagtgcaaagtagtgaatccaggttgaggaagtgggtgaggagaagaaatatcaggtgagaagcagacctgggggttgggagaatggggtaggaagagtcccagatatgcagtgaaaagtcatgccctgttaayggggagagaatagaaggaggggaggggagtggagggaagaggaagggagcagaggggctgagaggggaggggaggggagaggaggagagaggaagggaggggaggggacaggagaggagtggaggagaagggaggggagtaggaggaaggcagtgcacattgcatgcagtaaggaaagtattatgttataaaactttgtttcagctttttgtggggtgagtgtgtgtactgggtcctgagataaaatttctttcttgcatgatctaagaagtatgtgtgcatcacaggagtccaggctttgagcctgggatcagcacagttcctgactctgacccacacaccatgagccaaagctctagacctttcagaaattcttcaccatcagaaaaatggaggtggcacgccctg

SEQ ID NO: 543933 - DNA, 656 bp, Homo sapiens
gaaggtccctgcacatgtggaaagcactgtggacccaacgaaggcttccacaggaaggcaagcgggagtccttcctgcctccaggtcttggcttggaggaaggagaatggcagagaagagatcacagggctggtcctgcctcgaatagtgttgtgagtctttctgagctgagtttagaggcagcagttcagaaggaactacagtttccctcctcctgcgcaggcccacaggggtgctcacaggccaacaacctgcgccactggttggaatcacccgggagctttccagaaccctaatgcctggagtcctacccagaaattctcattttgattggaatgaggtgtggcctgggcactgagatttttaaaggctccgatctaaaattttttwaagatttttaatcttcagccaagtttgagaaccctggagtccacatgcacatagagacagcaatggccccagattctggctttgtaacggtgtctccatcgtctcaaatgctgtcctcaacttccccaaatagttttaacatagcttacatcaaaagaaaatatttattataagattatttgggaagatattgagaaattaggcaaagaatgaaaggtatagtagagaattccttcatgataattaagtctatgattaattgtact

SEQ ID NO: 543934 - DNA, 614 bp, Homo sapiens
catgtcttggacttgttattagagacaatttggcctccaggtgaattttcttgtcagtgacccactgaaacgagaagtcatcaataaagaaaaatagacattaccgacttgaccmaagcataccatttttaaatgtatccatccacaaaattacattttttggaagatagcccgtgtttgctaaacatctgagaattgaaaaaaaaaaaaaattacccagggcacagaagaaaaataatacaaatgtgtttgcagtgctttatggcttgaaaaatgacttcatcaattctcactgagtttcatactaaacaggcgagggaagcagaaccgtctttgtgtgatgtgcacgccgggtggtggatgcttcctctctgccatttctagaccttcttgggtcccctctctgcacctggagcccaccactttcctccttttccacccttgttgcccaacacacctgctgtctttagccaacagagcacaaatcacattttgcacatttcaaccttgttgcttagaccatggaaacagtggggacaaaggacagctctcatgggaactgtggtggctgtgcattgagccctcgccatttaccaagcattgtgctttgtgct

SEQ ID NO: 543935 - DNA, 588 bp, Homo sapiens
ctttaaacaccgcagccactctcctgctttaccatctgtttctctgtcagcctcattcccaaggtctgaattctctttcagctctcgtcaattagtgctacttaacacaatagtaggctcagaatacatgtttattgagtgaatgsatggttggaggaattaatggagtgagcaagttagggaattttacctggttgaaaaatttcgcttcatctacaagagcagaaattaattcttcttatctctgctgttcaaatcaaacccaaatctgttaaagtactataatataataaaataattacctactgtggggtggttactgctatttccaggaaactgaggctcaggggcaatcagataagaactggcatgtgaaagcatccagatttgggtatgtgtcttttaattccaagtctcttgttttctccactccactggagggaataattgtctctggggcagaacttcaagaaacatggggtgcctgggcacaggaaaaatcccctggtaagggagagggcacagaaaagggagatggggaaactcaaatcacatgtttttcctttactgctatttctggggctacat

SEQ ID NO: 543936 - DNA, 588 bp, Homo sapiens
ctttaaacaccgcagccactctcctgctttaccatctgtttctctgtcagcctcattcccaaggtctgaattctctttcagctctcgtcaattagtgctacttaacacaatagtaggctcagaatacatgtttattgagtgaatggatggttggaggaattaatggagtgagcaagttagggaattttacctggttgaaaaatttcgcttcatctacaagagcagaaattaattcttcttatctctgctgttcaaatcaaacccaaatctgttaaagtactataatataataaaataattacctactgtggggtggttactgctatttccaggaaactgaggctcaggggcaatcagataagaactggcatgtgaaagcatccagatttggrtatgtgtcttttaattccaagtctcttgttttctccactccactggagggaataattgtctctggggcagaacttcaagaaacatggggtgcctgggcacaggaaaaatcccctggtaagggagagggcacagaaaagggagatggggaaactcaaatcacatgtttttcctttactgctatttctggggctacat

SEQ ID NO: 543937 - DNA, 502 bp, Homo sapiens
tcctttgatttggagtgtggttcataggcatgcatgataatctggttcttgcaggggttcttgggaaccccaaagtgctacccttaacacatacagttttgtggggkttttttttctctaattaccttattttattcattaactaactggttaattcaactactatgtatctaaagagctccttctatgtgtcaaggtctgtgatagatgacagtccttgttttcaaggagcttagtcaggtggagaaagccatgtaaacaaacaattaaaacacagtgtgataagcgttagagatccttgctcaagatcagaggaagataaagaaagctctggacactaaactctgggaggtgggtggattggcatctgatggatcagagtaattctcacattgaatatttaaaagacaaatggcacttttcatccaaaatcatcctgattggctacataccttgtatacattaatcagattatttcccaattccctctcactgtgtgctc

SEQ ID NO: 543938 - DNA, 558 bp, Homo sapiens
tacaaaacacctctgagtcggattctagtctccccggaagtcctgggtggtagaggcttttctttgtggtgattatgggctctcaattagaaattaagagaggcctccatagccagcccctttggtcataaagccatcatcttgtcctctggaaagaggtgataaatgacactcaaacagaagactagctctgcgggagaccccggccctgtgactctttctgtgtcatctcaacctcaggccaggtgtgcacatcccgcaggagctccagtcacccttgtgaatgatcctcattctctgaaaaccaaagagcctgcrcatggctaataggacaagctgcaactcccccagaggactcacaaggccctttctagcctggctccccacttcccacctcatgcctctcctggtccctgggagtccccaccccaggcctctgtgctctgtaccctcttgtctgcattgctccagagcagctcaaataactcccctctgggagagtcctcggtgtgaccctctgccccacattataggcatgtgctctcggcgctgttctgc

SEQ ID NO: 543939 - DNA, 577 bp, Homo sapiens
ccacccaatctctggcactttgctatggcagccctagtacattaaatgtactaggttaaatattttaaaacaagtttgatagttaatttgcataatagaaaactgactttatttggtgcctgataagtaacatctattgtatttaaatatggacagacacaagttattatctgacctatgctcaggtaattgccctaaattccagtaaatgaatgccagagataaatttttagcagtttggtgaggaaactaaaaacaaaaacaaaaacaaacaaacaaacaaaaaacccaaaaaacagagtaagaactgtacgcttcattaggttacatgcaacctaatgaagaaaatgcttttaagtgtgttgtgttattgattacttatcaccctgggttctcttgttggacagtaattagtgaaacccaaaggcaaatgaatatttacaaagtttatctaaaaactggataattgttttatmttttagccactaatgtttcgcctactcacgtgtcaacttataaaggaaagccaacaaagtctcatcatctctattctatctttccttacaaggagcttttc

SEQ ID NO: 543940 - DNA, 577 bp, Homo sapiens
ccacccaatctctggcactttgctatggcagccctagtacattaaatgtactaggttaaatattttaaaacaagtttgatagttaatttgcataatagaaaactgactttatttggtgcctgataagtaacatctattgtatttaaatatggacagacacaagttattatctgacctatgctcaggtaattgccctaaattccagtaaatgaatgccagagataaatttttagcagtttggtgaggaaactaaaaacaaaaacaaaaacaaacaaacaaacaaaaaacccaaaaaacagagtaagaactgtacgcttcattaggttacatgcaacctaatgaagaaaatgcttttaagtgtgttgtgttattgattacttatcaccctgggttctcttgttggacagtaattagtgaaacccaaaggcaaatgaatatttacaaagtttatctaaaaactggataattgttttatcttttagccactaatgtttcgcctactcaygtgtcaacttataaaggaaagccaacaaagtctcatcatctctattctatctttccttacaaggagcttttc

SEQ ID NO: 543941 - DNA, 603 bp, Homo sapiens
cccgtatgattgcatatggatatttctaaaatatgttaagtgaaaaaaattacagatgaatacgtctagtaagatcccacagatgtcttcaaaataaccttacataagagaatatattcttatgaagatgtaaaagcattamaaaatattggaaggctatgaattcagtatcagccatggttacctcttggggaggaagggaaaaggggagccagttagagggagaattgcatagtctacataacttctgtatcactcgaattcttagaatagtctatgtattatttgtgtcattataaaattaaaacatggggaaaactcatgccaaaatgaaagagaaaaagttcaaagggaaaatgaaaagaaggaaaaaaatgcaatcttgagatttatggcagactagtggatatcatgtggcatacttaagttgctttattcattcatggtctgtgttgaggggggccataggacatagaggaacataatagaattttagggggtggtaagtactcattattcattggtaaaatgtggatttggggccctatgatgagattaaatgtgtaagagaagcaattccatttgaggataagggaaggcaga

SEQ ID NO: 543942 - DNA, 606 bp, Homo sapiens
catcaaggtttgtgcgtggcattcagactgctgctgtgaactgtggttttscctctcctggcttgatacgtcctcctgaggtctagctaactcacatttggccccgacctggtatgaccaccctcaccctgtacccaggctgtcagggacagttcatgctgggaagttcacagccagcacaaccttctcctccttcctaatgggcacagtggaaacctgggccatctccccaaagcagcagggtaagctcaggtgttggggaccttaagtttcctcactgaatccaaacgtttggacctcccacattcttccaggcactcttggaaacagtctgttcccgaaaacccaaacaggaagcaggctgaaatcctcctcaccctcaatattgctctcagccaaatttcacaatcctgcctgccaagattttgaaatagagaggggaggtcaagttttctttctctgtttccctcgcctccacatctttctcttcccaccgtcgttctggaagggtgttctgctttctttacctcatattctagacctttctactcaggccatgtaataaattctaagatctagtagccaggcttggctctccatgtgcta

SEQ ID NO: 543943 - DNA, 567 bp, Homo sapiens
tacaaaagttatggccatagtgtgtgataatgagatgagatagttcccttgacctccttcacgtgcaggaactggagtggctcatttcactgagttcactgctagccattcgtgggagggagcatgcaagtgagcaagtgtgggaaccagagggaacaaacactggaactggctggtcactcckctctggcaggagcaggctctttgtgggccccgcagcagcatccaagtgtgttacaaccaatactctttcagctctgccacccagggatggccaagtgccaaccagctcagtggaaggtcagggtggtagcccctgccaccttggcacctaggttcctgtccaatccaggaagaatcaggtcacatgaactgtttgaaaggagatgcataaggacgactttattgagtggtgggtggctttcagcagaaagagaggctggaaaggggatgggaaggtgatctttccctgaagccatactgtctgaagttagccacatctatccatagtctctgatgctcagttgcttctctgctctccactcagcctcttgtatcttacacact

SEQ ID NO: 543944 - DNA, 560 bp, Homo sapiens
tgtgtgtgtggtgaggtggggcccctcagctctcagggcagggtgctgtccttgcctcctctccctyattctctccctccagctggctcaccgccgtgggctcagtgctcactgtgtgcatgtcacagagagggctatgggtgagtctgtgtggggagctgcttgctgtgtggaagatgcatacttctggctagatgggagcagagcccctcactgcagcataaggctgatggtctgcttgctcaaggtggcacctcctgggtggctgcctcaccacagccttgctcagaggggagggttttcctctaccacacaacagggctgcatgtgtctcagcccagcaccctctgggctctgagggccccttgcctcctggttttctgtcttgagtaggcatatgtccagcccagtgagatggcatctaccacagagggatgctgtgcacctttgtgttacacccaggctcacactttgaggtgcaatgtgtgtgtgtgtgtgtgtgaatgggggatctgtggagggagaactcttggattgggtcccacgcatgactgtgaggc

SEQ ID NO: 543945 - DNA, 560 bp, Homo sapiens
tgtgtgtgtggtgaggtggggcccctcagctctcagggcagggtgctgtccttgcctcctctcccttattctctccctccagctggctcaccgccgtgggctcagtgctcactgtgtgcatgkcacagagagggctatgggtgagtctgtgtggggagctgcttgctgtgtggaagatgcatacttctggctagatgggagcagagcccctcactgcagcataaggctgatggtctgcttgctcaaggtggcacctcctgggtggctgcctcaccacagccttgctcagaggggagggttttcctctaccacacaacagggctgcatgtgtctcagcccagcaccctctgggctctgagggccccttgcctcctggttttctgtcttgagtaggcatatgtccagcccagtgagatggcatctaccacagagggatgctgtgcacctttgtgttacacccaggctcacactttgaggtgcaatgtgtgtgtgtgtgtgtgtgaatgggggatctgtggagggagaactcttggattgggtcccacgcatgactgtgaggc

SEQ ID NO: 543946 - DNA, 560 bp, Homo sapiens
tgtgtgtgtggtgaggtggggcccctcagctctcagggcagggtgctgtccttgcctcctctcccttattctctccctccagctggctcaccgccgtgggctcagtgctcactgtgtgcatgtcacagagagggctatgggtgagtctgtgtggggagctgcttgctgtgtggaagatgcatacttctggctagatgggagcagagcccctcactgcagcataaggctgatggtctgcttgctcaaggtggcacctcctgggtggctgcctcaccacagccttgctcagaggggagggttttcctctaccacacaacagggctgcatgtgtctcagcccagcaccctctgggctctgagggccccttgcctcctggttttctgtcttgagtaggcatatgtccagcccagtgagatggcatctrccacagagggatgctgtgcacctttgtgttacacccaggctcacactttgaggtgcaatgtgtgtgtgtgtgtgtgtgaatgggggatctgtggagggagaactcttggattgggtcccacgcatgactgtgaggc

SEQ ID NO: 543947 - DNA, 560 bp, Homo sapiens
tgtgtgtgtggtgaggtggggcccctcagctctcagggcagggtgctgtccttgcctcctctcccttattctctccctccagctggctcaccgccgtgggctcagtgctcactgtgtgcatgtcacagagagggctatgggtgagtctgtgtggggagctgcttgctgtgtggaagatgcatacttctggctagatgggagcagagcccctcactgcagcataaggctgatggtctgcttgctcaaggtggcacctcctgggtggctgcctcaccacagccttgctcagaggggagggttttcctctaccacacaacagggctgcatgtgtctcagcccagcaccctctgggctctgagggccccttgcctcctggttttctgtcttgagtaggcatatgtccagcccagtgagatggcatctaccacagagggatgctgtgcacctttgtgttacacccaggckcacactttgaggtgcaatgtgtgtgtgtgtgtgtgtgaatgggggatctgtggagggagaactcttggattgggtcccacgcatgactgtgaggc

SEQ ID NO: 543948 - DNA, 569 bp, Homo sapiens
gacccatcccgtggggggaaatattctgggccatggcgagttcattagaattagctgggaaatcaagttagtaacagaaagaaaaggatacgaagataaatttcagcagcatatagttttaatgatgaaactctaagtacttcaactctattacgtgcttgtgtaacatggggagataaacatacatctccctgatctctgtctctgttttctacttacctgtctaccacacatctacttattcccaaactgtttattatctgtctatcgtctacctactgtcaactagctgttatctatcatctaccactctgtcatctacctatctacctaactctaacttcgtattatttagaattattgaaagactggtagggattttggaaaaacccagaaagtaaaaataaatctatgtatccaaatcatagatttatctattcccatatcatgtcatstatttaccattgatgaaatgactgcatggattttttcttaaaaagccttaagagtccaacagagattttaatagaaagaaagtaaatacaaaatcaggagccgctcaccacagg

SEQ ID NO: 543949 - DNA, 599 bp, Homo sapiens
agctcctgaaaaccagtgagctgggaagctcccccaaattaacggagctctgagtagtctgagagttccagtaactccctgcaagaatgtgggtggtcctaggcctggggaagtatctcctgaaggccctcatgacagcaggctggagctcaaatttgagatggagctcagatgccaccacttgagatgtcctggtcattcgaggctgcacagagagccgtctcttgcatcacctgtgcccgcccttttggtctggggagggtgcagagctgtgctcatggctataccactgaagtgcccctgatttgacacttttgcttccaaaagctcccagctggtccctgtcccctgaatgtctacacrggatatctggctgcctccagctttccaggttttccatatccaccttcaggacagagggaatcccttgagtgccagccctcaggaaactcagaaaaaggatgagttgtttatttcagtggattcactctagaggtataagtcttattaaatattttagaaacaatgtttaaaacaatgataccgttctttcttgtgataccataagatatttttactttttttgtgtgggttttttt

SEQ ID NO: 543950 - DNA, 599 bp, Homo sapiens
agctcctgaaaaccagtgagctgggaagctcccccaaattaacggagctctgagtagtctgagagttccagtaactccctgcaagaatgtgggtggtcctaggcctggggaagtatctcctgaaggccctcatgacagcaggctggagctcaaatttgagatggagctcagatgccaccacttgagatgtcctggtcattcgaggctgcacagagagccgtctcttgcatcacctgtgcccgcccttttggtctggggagggtgcagagctgtgctcatggctataccactgaagtgcccctgatttgacacttttgcttccaaaagctcccagctggtccctgtcccctgaatgtctacacaggatatctggctgcctccagctttccaggttttccatatccaccttcaggacagagggaatcccttgagtgccagccctcaggaaactcagaaaaaggatgagttgtttatttcagtggattcactctagaggtataagtcttattaaatattttagaaacaatgtttaaaacaatgataccgttctttcttgtgataccrtaagatatttttactttttttgtgtgggttttttt

SEQ ID NO: 543951 - DNA, 613 bp, Homo sapiens
tgagcgttgtgcaggctcagcccctgggatgtggcctcattgtggtgttgaaggagggcatcacagtgtggcccygaccgtggggttgggcactgataacccctgcacctctacaccaggatgctggagcctgccatcccccactgtgctggggatggggaagatgcacccagggctttgaatgtcctcacaggtgacaagcctgcagcctgcatggaggccagcaggtgaaaaggaacagtttcagggtgcagaaatagaacataaccgtgtgaagcacagcctttccacaatgactattaataacacactgagtaacatttcttctgtagaaagatttggaggaaagtgagacaccacaaactggaaagaaatacaaaatcctaggttgagtaagacaatttctcatctgatgaactcttaaaatcagaatgtggtgtccctgttacagtaaagtgcataattcacacacgatcccttcttaaagtcagaagcccctaagaacatacctagaattgatattttaataatctgacacccgggcaagcttcgtaagcagtttttctctggtcttttcaatgaaacctttaattgtggccggtaactcaacaga

SEQ ID NO: 543952 - DNA, 613 bp, Homo sapiens
tgagcgttgtgcaggctcagcccctgggatgtggcctcattgtggtgttgaaggagggcatcacagtgtggccctgaccgtggggttgggcactgataacccctgcacctctacaccaggatgctggagcctgccatcccccactgtgctggggatggggaagaygcacccagggctttgaatgtcctcacaggtgacaagcctgcagcctgcatggaggccagcaggtgaaaaggaacagtttcagggtgcagaaatagaacataaccgtgtgaagcacagcctttccacaatgactattaataacacactgagtaacatttcttctgtagaaagatttggaggaaagtgagacaccacaaactggaaagaaatacaaaatcctaggttgagtaagacaatttctcatctgatgaactcttaaaatcagaatgtggtgtccctgttacagtaaagtgcataattcacacacgatcccttcttaaagtcagaagcccctaagaacatacctagaattgatattttaataatctgacacccgggcaagcttcgtaagcagtttttctctggtcttttcaatgaaacctttaattgtggccggtaactcaacaga

SEQ ID NO: 543953 - DNA, 532 bp, Homo sapiens
gaagggactgatagctaaaagctgttgccaaaatcactcccaacagttgaaacaacaatttttcattgaggaagaatctgggtcatgtatcactgcatccaccatgtaaggtgtgtttgtcatcaccttaaaaatcaaaaagataaactgagagaggttaagtgattgttcaaggtcatataataatagtaataataataataagtaggtgctgtatgccaggaccttttctaagcacatcacatggatctttgtttaagtctcacaacaaacttatttgataggtattattgtaattcctgttttaacaaataaataaacggaggcagagtaaacgtaagtaacttgctgaagatatcacagctaaaaaggggtggacctaggcttgaacccaagcacatacaacttcagaggccatgctgtaaccactgcctcatatggctgctgcggggtttgaacccaragcttcctgacagtgaagccatgaccctccatgctaagctgcatcttcaggactgtgactatgtgaagg

SEQ ID NO: 543954 - DNA, 600 bp, Homo sapiens
ctgtcagcgttctgatgacctcccctgtcttctgtgaaaacgtctacatttctggggatttcagacactgttcataagtgcccactcgccccctcatcccccacaaatcagtgtcttggcccagaaatgatagcctctacgttctccgcgtcctgcgggaagctgctgctctcaccacacaagcttcttgtctttcctggagagtgcagaagcctctcatcaggtctgaagtggccctgtttcttccttctttgcttcattcaaccaaaatatatgtcaggcatctgataactgaactgagggagccctgagctccaggagcccacagactgcaatgggcgacagacacacaagcagatcaayacgtgtggaatttcctggtggggcagagctgagcctcagacatgtctggacagtaaaggtcagaaatgcccccagataattgtgcttatccactgatgaacaaggacatgagttgattcttagtaaattaatacttgatgcatatcacaaaagaaacttggacaaacacagacataactctctatatatgtctagggttactgtgatggaagccaagctacagagagaatgtctgtc

SEQ ID NO: 543955 - DNA, 658 bp, Homo sapiens
cttctcatctcacgaatttcaagtgacttttgactattgccaaaaatcaaaaatcattccctgaaaacagaatctattgtaatttagatgcaaaagaatgtgttgtctgctttgcagccaattttcaaataaaaaagaaatgtttaaagcagtggaagcactgtttaaataaatatgccgggccaggcgtggtggctcacgcctgtaatcccagcactttaggaggccaaggcgggtcgatcacgaagtcaggagatcgagaccaacctggctaacacagtgaaacccygtctctaccaaaaatacaaaaaattagctgggagtggtggcgggtgcctgtagtcccagctatttgggaggctgaggcaggagaatggcaagaacctgggaggcggagcttgcagtgagccaaggtcacaccactgcactccagcctgggctacagagcgagactctgtctcaaaaaataaataaaataaaataaaataaataaataaataaatatgccctcccaggttgacatcttggaagaggataactctaagtttggttgtataatttctgctgtgtttaagaaaaattacttaacttgtgagacattatgaaaaggatgctggacttggtaaagatacaaatgggcttataatgttggtcaggt

SEQ ID NO: 543956 - DNA, 514 bp, Homo sapiens
agagaccctagccagatcaaaggaatcagaaagccccagcagctaagactcttggaatgtactcttggacagtcatggctagaaatgagaaagagagaaggagtccaccttgcatttgaaggcagatgtttgtctgtggctggtgtgggctgaagcggcttccttttgaaagaaggttgaagtatcgcttgtcttgtataggatataataaattcctcttcaaaggttttagcctgtaaattgttaagtacaatgagttctgagatcctctccaaagaaccaatgcatcagtatgttcagattctctgtkttttgtccttcattttaaagtttaacttcctctgttctctttgtttctttgcccctagtttcagtaaacacccccctcctagcctctatcacctgatctgtcctgagtcacccctggtcacctgctgtgacgtgagtcatcctgagtcacctgttctgtaaccatccttcccgccaaactattcacaccaccactccggctcgt

SEQ ID NO: 543957 - DNA, 619 bp, Homo sapiens
cccccacctgctactaccatcccatgtggggttagggtttcaacatatgaattttggggggacataaacgttcagtccattacactaatgaatttgtgtattatgtatttatttatttatttgccttcatatgtgagtgtatatgtatacttacacatgaggacagtgagaagtttcaactattttcttccagaaagatggccacttttaacagcactattggtaaagtaaaccatcttttcatggtgaacagaaacagtacctttgcctaataaacacatatacacacatgtgcatgcacacattcacatatacatgcacaytgcagcctatcactaggttttttaattaatttattcacatattcttttttgatgcacacattcttaagtcaatattatattcttgaatatttttcttttaataaattgtagattgctttaatcaaattccaaacacaaagcccaaagccctaagatattagggcttctaactaaattattttgggggtgaaacagagtctcactctgtcacccaaagtgcagtggtgtgatcatagctcactgccacctcaaagtcctaggcttaaacaattctccttcagcctgctgagtagctg

SEQ ID NO: 543958 - DNA, 654 bp, Homo sapiens
tctacagtcttacaactgttaaatgtagcccagacatatgaatcccctagtttatgtattctacacttaaacatataagatcaaagcatgttgcatcttcatcttacaaataacaaaactgaaattttttatgttagaaatcaagtttttgtcaatttccatgttttcactgggctgaggggagagaggagaatggaggcctacttaatacagattggacatttgtccagcagctataaaacaggtgaataatagattttttggagacttttatcctaaatatacttaaagtgaattacaactaaaatgtaattgttttgtaacagcatcacaccagtctggttcaattttcatgtaacaaagttataggttgttttttagttgccatggtctctcaaatkgaaggtcatggaacctgagaatacccagataagccaagcatgcaaccgtggagggaacctaagtgatctgatcaaataatggggacagaattaagaagtgaatcctggtaagatccaggatccaatcagattgagccctgatgtcaccctataacaattcccaggcagatcatgcctctagacaacacctcattgctctatccttctaaaacttgacccagcctccagcttggaaagagagacttgggtgttt

SEQ ID NO: 543959 - DNA, 566 bp, Homo sapiens
ccttttctcttattctttgattatcactatgaygtattgtttgggatttttagaaatgcaataattagtgtgatgcatgaatcaagagaacaaaaacactatgcatttttattgactatttaaagtaaaacagaaattatggatgtattagaagagattagtgacctacagaatatcaggtgccatagcaaattaactaacagacttggtttgtattacaaaactgttaaagtaaattcatatacttgggaatgcagaaatataaattgtgctccgaggctgtcctgtatactccagagaaagaaaccttgttttgcagaatcccgttctaataaattggctaattaaaagtagtgttgatggatttcaaatgcttttatctacacttcaggcaaaaatgacacattttaaaagaacagagcctacattattaatttgcatttatagtataataaagaagttcaagattggaatgtaagtacaatgaaatgatgtcagtagtgtagacttagtcaacacaagtaattaatttccttaatttgtcattaaaatttgcacaatggtag

SEQ ID NO: 543960 - DNA, 643 bp, Homo sapiens
gcatgtaatcctcaaatagatgacaaaaatccaattcagtgtagagtaactgcacacaccagcattaacagaagtccctagtacatacaagacaggcctctagccagaggaaatgtagtggcccagatagtgaaaatgacaactttggcctgaggtaaacaggcagcatactgttacattctagacacaaggcaagcagctatcgagaactgcagcgtttttctaaagtgtattcatgcagttttaggatatcatgacttttcagaaggagggtaatgcattctgataccaccatcttagaaaagataagagattacggctttacgtgcctagaaaataggaaaggaagatgttattattgtcttaaatattgaayacagtgtattttcacattgtcaaaaaataaaatatgcatattttgtgtgcatacaacacactttctaatagcaactgaacacatcaggtattatttaaaaacttcctctaatttgcaataataggcgataatgggattttcaagattaatatgctaaaccattgaaatgatgaagcagagcatacatatccccttgtagtggttatttagagatagaaaacaaatgaatattacttttttttactgtatatataaaaggtttatttt

SEQ ID NO: 543961 - DNA, 643 bp, Homo sapiens
gcatgtaatcctcaaatagatgacaaaaatccaattcagtgtagagtaactgcacacaccagcattaacagaagtccctagtacatacaagacaggcctctagccagaggaaatgtagtggcccagatagtgaaaatgacaactttggcctgaggtaaacaggcagcatactgttacattctagacacaaggcaagcagctatcgagaactgcagcgtttttctaaagtgtattcatgcagttttaggatatcatgacttttcagaaggagggtaatgcattctgataccaccatcttagaaaagataagagattacggctttacgtgcctagaaaataggaaaggaagatgttattattgtcttaaatattgaacacagtgtattttcacattgtcaaaaaataaaatatgcatattttgtgtgcatacaacacactttctaatagcaactgaacacatcaggtattatttaaaarcttcctctaatttgcaataataggcgataatgggattttcaagattaatatgctaaaccattgaaatgatgaagcagagcatacatatccccttgtagtggttatttagagatagaaaacaaatgaatattacttttttttactgtatatataaaaggtttatttt

SEQ ID NO: 543962 - DNA, 528 bp, Homo sapiens
tgtttcatgtctccaagaaacattatctrcaaataaaaggcatcaaaatattggaggatgtgatcttttatacatgtggaagactcctggagacataactttgggaaaaaaaatctgattttgtttctttggagaagagagggaaaccaatgctaaataaagatggacctccaacttccataccaggcccagaaaaagccatcatggaccttcctcactcataaatcaccttgattttctagtaggctagaccgaagtgatatcctctgggtttgcaagtagtggaaaagagtgtaagtcctttcagcactaactacataacagaaaaataatacagccttgacattccttgattctgggaatgtcatcctgagttgtttcatactatattttttttgcactttttgttatgttgtataaaaatattttcaaggactgcttctgtttaccatttcaagatgaccaagttgctcctataatttagaaaaaaaggcaatacttctctaactactactttatttgccgcca

SEQ ID NO: 543963 - DNA, 418 bp, Homo sapiens
gaatttcttgacaatgagcctagaatttctaagcagcagtctctcaatctgtgattacatatttccattctttgcaataagtacatacacagtttactttcatttttcagtctgagccttttttcagtgctgtaagaaaggacggaggctgttatctatggcaggtgagtcctcttctgaataggagtttgggactgggatcttagaaaatactttatttattgctgtgtaatgaacacaaaacatgaaatgggccaatagagtgcatgctgaatcktttttcttactggttgtgtgtagtttgaatcacgggagctagtattagacactgaaggagagaatatgttctccagatgtcttctagctagaaagaagttaattccctgctttcagcttctggtaatcaaagggagagtga

SEQ ID NO: 543964 - DNA, 649 bp, Homo sapiens
tgcatgaagacttaaaaaagcaacattgataggcataagggggtagaaaagaaacctgaataaattaaattcactgcatctccacctcctgcagatctatccaataaaggagagaaaggaccgcatacgcctggttctcatcatatgcaataaagagtttgaccatctgcctccaagaaatggggctgactttgccatcatggagatgaagaagctgcttgaggatctgggttacagtgtggatgtagaagagaatctgacagccagggtaacaacccctcagccaccccaaactcatacatattgaacacgcatccttctaataactagttagctttatagaagctcaacaaagtttaacaatctctgctaccttgtgtgtgtgtgtgtgtgtgtgtgtgtgtgtgtgtgtgtgatgcaaaaaatgaaagcattagattggtaaatttatgtctcttttttgctccaaatgtcctcaattccataaaactagacaaaatatgattggcacgagttttcacatttctgattgagattcaaagtctggtgattgggatgcagccccaagattctccataaaattatatagtaataagtgttaaasaggagtacagtcttaaaacaaatattgagtactaaattggtgacc

SEQ ID NO: 543965 - DNA, 566 bp, Homo sapiens
tacattatttgatatttaatcccaaattatgacaggcttaaattagaagattgggggtggggaggagaagtatgtagatatgggaatgtgaccggcaggatggsaaatagaaagccaaaggctaaaactgaaaaatttaaaaaaagaatagaggctgagtgtggtggcttatgcctgtaatcccagcactctaggaggttgaggcagttggatcacgaggtcaggagatcgagaccatcctggctaacacggtgaaaccctgtctctactaaaaaatacaaaaaattagccgggcgtagttgcgggcgcctgtagtcccagctactcgggaggctgaggcaggagaatggcgtcaacccaggaggcggagcttgcagtgagccaagatcgtgccgctgcactccagcctgagcgacagagtgagactccgtctcaaaaaaaaaagaaagacaaaagaacaatggaaacacgcaagtagaaatacggagttaagttccagaagaaacagttgaaaacgttgagtaattgattctgggagacaagcatcaggaacctggaagatacca

SEQ ID NO: 543966 - DNA, 566 bp, Homo sapiens
gtctggatgacagactgagaccctgtctcaaaaaaataaaagtcattacattacaataaaaattcaccaatatgttataacagtcttgacctttatgtacytgataatagcctcaaaatttctaaaacaaaatgacagaattccagaagaaagcatggaaaatttcaggtgtatttcagaggtggacagattagttaaaaaaattaacgacatatttaaacaataaaatatttaacaataaaagtaacaagtttgatttagcggacatatgtagaactttgtacctacccgtaagagaatatatgttcttttgaaaaacatacctgaccatgtatatagactacaataaaaaaaaaaaaagcctcaaaaaatactgatgagtttcacacagaacgacttgaggaggggctcaggatgcaagatgtatctagtacttccttcttctaccaggaagatcaaaaataatgagtaaggtgtcatctaaaagagaacacgggattccaacagagaacttacagaaaacaccagtagcaaggaaggaaaaggaagcgaggaagtctgctcag

SEQ ID NO: 543967 - DNA, 573 bp, Homo sapiens
tatatacatgctcttgggaaaactcttaccccggtccctgcagggtcagagggaatccctgcttgttctagcgcttggcttcctgggcctgaccwgaccagatggtgagctactacactccctaggccttcccctcggggatcccaggtgtccagaccaggatccaggtgggcatcgcagctcacctgttgcccctcctatccctcccctacccttcccaggtcccagcacaaacccatctgaagagtggcagctctccctcattctctgaatcttacctaggaaagtctagggaaggacatctggactcttcttggtcactgagcctcaactccacacatcttggggatctgctgcccccagagccaggcatccgaaaccccacagtctgcctccaagtcaatgataccctggccttcctggtgactcatgagcattacccagagtatgacctgtgagtgtccagagaccacagccccatcatcatggaggccctagagaggaaatgcccctgcatcagccaccactcccaaaggcaacgtattccctcctttctctctcctcaggggccac

SEQ ID NO: 543968 - DNA, 626 bp, Homo sapiens
tagctgtaaaggaatttcaaccaaacacattctaacgaaaattaaaatagtaaggagacataactgtgctaggtagcggagataaaacagcaaacaagaaagaatctcagccctctaagaagcttatattctacaggatagccataaaatctggaaatacaggaaaatattaatgaacattgattttgtgatattacactggaatacgtaataacatgatctgttcaacacatgatctattcatactgttgtccctccatacttcaatccacggtgcaaagttaaaaacggcacatcattgcagcatttccatcaatccctgcacgtgcatctgtgttgcctcatgatttgtttctgatattcactgaatatgcctgtgcctttagcacamcccagaagtaagcaagtgttcagctatggctagcatgctgcctactctacatgattattttctcaaatctagttttacatattatcattcacccagttccttgccactctgacataatgggatgatgcgccctcctgctggaaccacaggagtgagcttccccagcccatcaagtggttaaacaggtaagtttccagacttcatgccaatcatgtagtgaaggggacagccttat

SEQ ID NO: 543969 - DNA, 491 bp, Homo sapiens
ttagtgtattaatggaaataagacacagagcccaagaagtcagccaggaaattaataggatcatgtcctggtagatgccttgatcagccaagaatgaggaatatagaaaaaaggtctttaagttctgtactactttttctttgccacctctcccaggggccctggactcgtggcttaactatcctaaatagtcttgtgtgtctggcttaattaatyttcactctgctttctgggaaatacatttcataatttatgtgggtagctaaataaagttcttgaagacacatacccaatattaaatcaaactaagacttgccttcttcttaaaatactagagagtctttaatcttataaagttatgcattggtttgagggcgtgctctgtttaagaattccctgttaatggaataaatgggaggacagctccctcatagcccgtcttatgggcaatgactattttaccattttattagtatctgtgccatgaaagc

SEQ ID NO: 543970 - DNA, 632 bp, Homo sapiens
gttagtgtattaatggaaataagacacagagcccaagaagtcagccaggaaattaataggatcatgtcctggtagatgccttgatcagccaagaatgaggaatatagaaaaaaggtctttaagttctgtactactttttctttgccacctctcccaggggccctggactcgtggcttaactatcctaaatagtcttgtgtgtctggcttaattaatcttcactctgctttctgggaaatacatttcataatttatgtgggtagctaaataaagttcttgaagacacatacccaatattaaatcaaactaagacttgccttcttcttaaaatactagagagtctttaatcttataaagttatgcattggtttgagggcgtgctctgtttaagaattccctgttaatggaataaatgggaggacagctccctcatagcccstcttatgggcaatgactattttaccattttattagtatctgtgccatgaaagcacgatttcaatcaaaatggtaactaatgaggtatttttaaggctgtctaatttggtacttacctgatgactaatctaactatgtgagctgaattaagatgactaagtagccaattctaacaacaaaaaactcaaaataga

SEQ ID NO: 543971 - DNA, 379 bp, Homo sapiens
ccagctgcctctccagcctctgagcctgctgcaggacatggtgcagagtcaaggccagtgsctgtctcatgtccttaatggcagcctccagagtttcctgtacacccgactctggactctcctggcacggctgaagcactgcaatcacttgcctctgggccactagcacattggtgtccagcagggcctgtggccctcccatatggggcaatgtctggccctctcgtcaggaagccccctggagccggactgtcttcctgctcagtggctccacaaagctgtcaccaggcagcaagaggttccccgaagcatctcgcagccctcccagtacaagtagctgagctggaagaaagaaaccaagggggcaaggctgggagag

SEQ ID NO: 543972 - DNA, 518 bp, Homo sapiens
tggagtgaggggaggggacaccccactgtccccaggagcccacacacccagccaagtttggcttttaattcgcctttcttgtgatgtcttttgctgaatttgctgtcatgattgtcccgattaaaagagagagcattgtgtgttccctctatatccagaagtgtgcatgcaagattggagttacttctatttaaaatatgtgatggactcagaggggacagtaaggatggaagtttgcgtatggaaaaatagtttgtgttactttgtttttatttgatggttgctttacttgtggtgcagtgcacagtatattacctgtacagattgttgccttctgacaaacactgtgttaccaccgcccagatatgaacaccctggcagccgctctttggctaattcctaggcagtaacttccaagagacactcactattctggtcatgatcaacatattttaaatttatttttaaacattgtrtaaatggaaacctacagtatgcactcttttgtgcctgaatga

SEQ ID NO: 543973 - DNA, 483 bp, Homo sapiens
gctgcaagacctgagtgaagtcagcaaatgcacagataaaaacaagggcatgacaaagcatgtggtggacatgaagagaggagaatccaaaaatagcatcaggttccsccaggaaagtgtggcaagaacagcagctgaaaacaggaaggatttcgccccatgcagtagtgagtgagtgcaaggggcccatggtgagaactgaaagcctagagcaatccttccttccgggattaagacccctcacagaggggagactcttaagatggaatgagaattttgcagatgtagactagagaaatgtaagaaaaagaaagtgcagaaaaaggtgagaaaagggaaatttcctaaggcaagcttccctattttagcacactaattaaaacaacagaaaagtttgtgaggtgctatggtctgatgtttgtgttcactcctcccaatgcacgtgttgatatctcatcaccaatgtgatggtattaggaagaa

SEQ ID NO: 543974 - DNA, 483 bp, Homo sapiens
gctgcaagacctgagtgaagtcagcaaatgcacagataaaaacaagggcatgacaaagcatgtggtggacatgaagagaggagaatccaaaaatagcatcaggttccgccaggaaagtgtggcaagaacagcrgctgaaaacaggaaggatttcgccccatgcagtagtgagtgagtgcaaggggcccatggtgagaactgaaagcctagagcaatccttccttccgggattaagacccctcacagaggggagactcttaagatggaatgagaattttgcagatgtagactagagaaatgtaagaaaaagaaagtgcagaaaaaggtgagaaaagggaaatttcctaaggcaagcttccctattttagcacactaattaaaacaacagaaaagtttgtgaggtgctatggtctgatgtttgtgttcactcctcccaatgcacgtgttgatatctcatcaccaatgtgatggtattaggaagaa

SEQ ID NO: 543975 - DNA, 483 bp, Homo sapiens
gctgcaagacctgagtgaagtcagcaaatgcacagataaaaacaagggcatgacaaagcatgtggtggacatgaagagaggagaatccaaaaatagcatcaggttccgccaggaaagtgtggcaagaacagcagctgaaaacaggaaggatttcgccccatgcagtagtgagtgagtgcaaggggcccatggtgagaactgaaagcctagagcaatccttccttccgggattaagacccctcacagaggggagactcttaagatggaatgagaattttgcagatgtagactagagaaatgtaagaaaragaaagtgcagaaaaaggtgagaaaagggaaatttcctaaggcaagcttccctattttagcacactaattaaaacaacagaaaagtttgtgaggtgctatggtctgatgtttgtgttcactcctcccaatgcacgtgttgatatctcatcaccaatgtgatggtattaggaagaa

SEQ ID NO: 543976 - DNA, 483 bp, Homo sapiens
gctgcaagacctgagtgaagtcagcaaatgcacagataaaaacaagggcatgacaaagcatgtggtggacatgaagagaggagaatccaaaaatagcatcaggttccgccaggaaagtgtggcaagaacagcagctgaaaacaggaaggatttcgccccatgcagtagtgagtgagtgcaaggggcccatggtgagaactgaaagcctagagcaatccttccttccgggattaagacccctcacagaggggagactcttaagatggaatgagaattttgcagatgtagactagagaaatgtaagaaaaagaaagtgcagaaaaaggtgagaaaagggaaatttcctaaggcaagcttccctattttagcacactaattaaaacaacagaaaagtttgtgaggtgctatggtctgatgtttgtgttcactcctcccaatkcacgtgttgatatctcatcaccaatgtgatggtattaggaagaa

SEQ ID NO: 543977 - DNA, 681 bp, Homo sapiens
ctgtctccccttcaatgtgtagatattacaatctgaaaataaaatcctctttatcaaaacaataatctgaaaattagcataacgttaggttcctggtattatagatgaagaaattagagaaacattttaataatagcactgaggagggatattttactgctcagttggtgagttagaggatacagttactgccaagaaatctttctgcttttattttccttactgaacaaatcaatgaataatacagatatagatgcaaggtgttctggcccagtatccctgtgacattctgtatttccttatctaattggctgcttagctttttgtccatcacrtatctttactgtgtatcacctatttatctctctgtaattccatcatcataattcccatccccatcaatgttgcctttccaactagaagtccatgcagagttccacagttcttaaccacacataatgtctcacacaaaataactggtttagtaaatatttctttttagttgttgttttgtggaaattctttaatttttgttcatttgaaaagaaaagaacatcaagcaacccaaaaagtgcaaaggaaaaaaaattcattcaaattttattattcagaaataaacgttacctttgtgactatcactccagtctcctttccgtgtggatactggtgaaagggtcaata

SEQ ID NO: 543978 - DNA, 524 bp, Homo sapiens
caaataagcttgcttagggttctaagtctcaaaactgtgatgaaagagctaagttaatcaactagtgtattatgttgaggttcccaaaactgcatcactaaactgttgggctttggatgcagtatttggatgtgagaacttctgctgagatatgctctttctaccaacacamggaaaaacaaagcaggggccacgtgctggccactggctcaggctgggcagagaggactctcaggaagtctctctcttcggagacagtcaagctgccctcgcatctcacacgttggaagggggtcaggtagggcttccccagtattggtggaatgcaagtgataatatgggcctccagaggctgcaatttcttttttttttttttttttgagacgaaatcttgctgtcactcaggcctggagtgcagtggcggtgatctcagctcactgcaaacctctgcctccctagttcaagtgattctcctgcctcagccctcctgagtagctgggattacaggcatgcgctactacctc

SEQ ID NO: 543979 - DNA, 671 bp, Homo sapiens
tggcatgattgtccctgtgcttgggtaaactcctgtcattcactggcccccagagcccccctccccatcacctgcccatcagtccgtcctcatcctgccaggtggaggggtaagcctctggtcctgagagagcccactcattcattcaagaccccttgactaagcactcctctgttctacgcaccatgctaggcattgggaatggagcaatgagtaagatttagcccttgccaccaagaaactcagactcaaaaattacgggtgaggtggctcacgcctrtaatcccagcactttgggaggctgaggtgggaggatcacttgactctaggagttcgagactggcctgggcaacattttttaaattttttttcctttttttcttttttttttgagagagggtcctgctctgtcaccaggctggagtgcagtggcacgatctcagctcactgcaacctccacctcccagcttcaagcaattctcctgcctcagcctcctgagtagctgggactgcaggcacatgccaccatatccagctaatttttttgtatttttagtagagatggcgtttcaccatgttggccaggatggtctcaatctcttgaccttgtgatccgcccgcctcggcctcccaaagtgctgggattacagatacaagccaccgtgactggc

SEQ ID NO: 543980 - DNA, 671 bp, Homo sapiens
tggcatgattgtccctgtgcttgggtaaactcctgtcattcactggcccccagagcccccctccccatcacctgcccatcagtccgtcctcatcctgccaggtggaggggtaagcctctggtcctgagagagcccactcattcattcaagaccccttgactaagcactcctctgttctacgcaccatgctaggcattgggaatggagcaatgagtaagatttagcccttgccaccaagaaactcagactcaaaaattacgggtgaggtggctcacgcctgtaatcccagcactttgggaggctgaggtgggaggatcacttgactctaggagttcgagactggcctgggcaacattttttaaattttttttcctttttttcttttttttttgagagagggtcctgctctgtcaccaggctggagtgcagtggcacgatctcagctcactgcaacctccacctcccagcttcaagcaattctcctgcctcagcctcctgagtagctgggactgcaggcacatgccaccatatccagctaatttttttgtatttttagtagagatggsgtttcaccatgttggccaggatggtctcaatctcttgaccttgtgatccgcccgcctcggcctcccaaagtgctgggattacagatacaagccaccgtgactggc

SEQ ID NO: 543981 - DNA, 606 bp, Homo sapiens
acctacttttttaagggtcatagttctaacagatgaaacatggctaaagaccaattttaataaatctaaattggtataggtaatgttttcgtcttycaagagaaatataaccttgattcatacaaactatttcacacttaaaatggttgaacaagtatttccacagtaagggaggaacactagaatctgaaaggaacaaataagcatagaaccaaaaacgtaagccttactttcctttgtttttctgagccatttattcaggttgtcagagcaaacttaaaatgaagctatcccttgactctgtagccatgtaatgaaatggttaggagcaaaaaaataaacacagaaataggacttggttgtttttccattaactgtggctttcttgatgattgtgcatttccagaaggttaaacataattgcctcttctcccttcctgaagctcgtttagatacatcctgacacattcccacacacatagctcttctaacctaaggttcagtttggcagggaaattctttcaaatcagcaggaaagaaaatagtctgttatttactgggtatatgctattcaaaatcaacaaaataatagatcaattccataac

SEQ ID NO: 543982 - DNA, 606 bp, Homo sapiens
acctacttttttaagggtcatagttctaacagatgaaacatggctaaagaccaattttaataaatctaaattggtataggtaatgttttcgtctttcaagagaaatataaccttgattcatacaaactatttcacacttaaaatggttgaacaagtatttccacagtaagggaggaacactagaatctgaaaggaacaaataagcatagaaccaaaaacgtaagccttactttcctttgtttttctgagccatttattcaggttgtcagagcaaacttmaaatgaagctatcccttgactctgtagccatgtaatgaaatggttaggagcaaaaaaataaacacagaaataggacttggttgtttttccattaactgtggctttcttgatgattgtgcatttccagaaggttaaacataattgcctcttctcccttcctgaagctcgtttagatacatcctgacacattcccacacacatagctcttctaacctaaggttcagtttggcagggaaattctttcaaatcagcaggaaagaaaatagtctgttatttactgggtatatgctattcaaaatcaacaaaataatagatcaattccataac

SEQ ID NO: 543983 - DNA, 606 bp, Homo sapiens
acctacttttttaagggtcatagttctaacagatgaaacatggctaaagaccaattttaataaatctaaattggtataggtaatgttttcgtctttcaagagaaatataaccttgattcatacaaactatttcacacttaaaatggttgaacaagtatttccacagtaagggaggaacactagaatctgaaaggaacaaataagcatagaaccaaaaacgtaagccttactttcctttgtttttctgagccatttattcaggttgtcagagcaaacttaaaatgaagctatcccttgactctgtagccatgtaatgaaatggttaggagcaaaaaaataaacacagaaataggactyggttgtttttccattaactgtggctttcttgatgattgtgcatttccagaaggttaaacataattgcctcttctcccttcctgaagctcgtttagatacatcctgacacattcccacacacatagctcttctaacctaaggttcagtttggcagggaaattctttcaaatcagcaggaaagaaaatagtctgttatttactgggtatatgctattcaaaatcaacaaaataatagatcaattccataac

SEQ ID NO: 543984 - DNA, 603 bp, Homo sapiens
ttcctgactgtttagaaccatgaagccatacttgccttgtgccctgctgaatccccattcatatcacagtgcctggcacagagcctggtgctcaatgaacatttatgagaytgacctgaaattagttgtattgattgattttgttctaaaccacctgactcagcaacttgcccaaggccttgtccaaggtactcaacttctctgagcctccatttctttatgggtgaaattaaaataacagcatcactctatagcttctcaataaggactcaaatgagctggtatgtaaagcaatcagtgcagtatatggtatagtagatactcagtatgtggtactgttttcgtttcgatactttcagatatcaagaattgatcatggaccttctgggcctcatttccaaatcattcaaataggcaaataaagcatattaatagttacgaatgtgcaattgtgaacatccaaattagctgaaatgggcaaccctgaaataaaataagaggtgcaaaggttagactaggttatatttggtaattgaagtatttagttaaggcttgcatagaaatggaccataacctcaactctagaagacctgctttgcacac

SEQ ID NO: 543985 - DNA, 671 bp, Homo sapiens
tcctaccagcagtgtataataagtgttcccatttcaccacaacctcatcaacatctgttgtttttttactttataataatagccgttctgactggtgttagatgatatctcattgtggttttgatttgaatttctctactgattagtgatgatgagaattttttcatatatttgttggccacatgtatgtcttcttttgagaagtgcccattttttaatggaattatttgttttctgttcatcaaactgtttacgttctttatagattctggatattagacctttgttggagtcacagtttgtattttctcccattctctaggttatctgcttactctgtcgatagtttctttgaccatgcagaagctctttagtataattaggtcccacttgtcaatttttgtttttgtttcaattgctttttgggaccyagtgaaaattctttaccaaggccaatgtccaaaatggcatttcctaggttatcttcaggattttttaatgaagatgttactgagtccaatacattgactctcattcaaatacagtattgtttttaggttgtgtggacttgatctaaacagagttgctggaacaaaagtcatttactcttgcctttctgcttctcacacttggtctaaagcatttcataaaggtatgtaaggtatcatagc

SEQ ID NO: 543986 - DNA, 598 bp, Homo sapiens
tgcataaattaagatccagttaagtacagtgactccctcaagttcacacagataataaacagcaaaactatgctgaggtccccttctggggtcttgcatcccaagctcatgtttgctccatatacatgatactaatttcctaatgagaatattgctgtaataagttatgatttctaacaattagcttacaaatgaacttttgtaaaacaacttgtagtgagttgaggattgcccgcatagtgaaaccttgttagttttgattaccagtctgtcatagctgataatttatgatttgttttattttgctatgggcttggctatagagtattttggcagcatctgtaaaaatttcttttgaaacaatttttttggcaagattgcacctaaagcttctmaattatctagagaaattccaagttgttattatgtgtttgatatgttgtgttagtcttatccatacactgtggcaggttttgtgaagaacctctaccgttatctcgcctttgatgctggagagcccagtttgttagtgttaagttctggaaagcaataaaagtgcatctatctaaacatgttctatactaaattgctttcacta

SEQ ID NO: 543987 - DNA, 596 bp, Homo sapiens
aggagcatagtgagaatgcggcaggaggctctgttattactataaatattattatcactactgctctgtgctccagtggtgtattctgtatatttcatgcccgattcttcttttcttaaacgggtcagcacatctttagagtggcacagtgacagctttcagagggaatgtggtcctggtacccttatcttgtgtggctcctacttctcacgctccatgtacakagtagagacagcctctgtttttctgaactattgaaatataaaccagggtgccagttgccccttgcagagaatagctttatatttgtctctctgttggcaccttgcctattccttatcacccccacttggtcctaagtgcctgttctgtcatggtggttgcagttaccactggctctaatctctcttctcatctatttctttgcctcttaccactttccctaagctccttgaccgtgtgtttctagatcttctctgccacagaaagcagtctctctttttttgcaggtgagtcacatggagtatattgagtgggatcttgaatatttcagttcttgatgtaattcatgtcaaatgttaagacatgacaggcag

SEQ ID NO: 543988 - DNA, 581 bp, Homo sapiens
ttaccatatgtatgtgttactttttaaaaaaataaaaataaataaaatagaagaaactaaatcttcataaggtttttaactaaaagtataaaacaaatttctctggtttacagtgttagaccatgggggcagccagtaaaatacatcacaggcaagctcttctaatcatgtcctgatactttgaccactactagagaaatctgcctacctttgatctctaaggtcaagaagaaagggttgatgtcaaacacagagaacagcatagaagcaattttttttctccctaatccagagcttactctgttagtatgtggtatccatactattttaaattcaatccctgagagaggaaattagtgttgaaaatgttgagaagagataagacttgactgaatggatatatgacaaaaaactatttcatactygaaaaggagcttacaaaagaggcaaatctggggccagttcctcaagattcagccactgagcccagggctgggcccagatgctaaagacattctctctttttgtaagtatttgatattctttgtggtatcaagcacaactgaatgtggaaataattt

SEQ ID NO: 543989 - DNA, 581 bp, Homo sapiens
ttaccatatgtatgtgttactttttaaaaaaataaaaataaataaaatagaagaaactaaatcttcataaggtttttaactaaaagtataaaacaaatttctctggtttacagtgttagaccatgggggcagccagtaaaatacatcacaggcaagctcttctaatcatgtcctgatactttgaccactactagagaaatctgcctacctttgatctctaaggtcaagaagaaagggttgatgtcaaacacagagaacagcatagaagcaattttttttctccctaatccagagcttactctgttagtatgtggtatccatactattttaaattcaatccctgagagaggaaattagtgttgaaaatgttgagaagagataagacttgactgaatggatatatgacaaaaaactatttcatacttsaaaaggagcttacaaaagaggcaaatctggggccagttcctcaagattcagccactgagcccagggctgggcccagatgctaaagacattctctctttttgtaagtatttgatattctttgtggtatcaagcacaactgaatgtggaaataattt

SEQ ID NO: 543990 - DNA, 560 bp, Homo sapiens
aacccagtctcaaatgctcacttatcctatctccttggcacaaatctctcctctcctggattgccaaagaaaattcaaattattcttcaattagtcaggatgatttgactatcagcagttcatagtacccatcttcataactaagccacctagggatccagcagaaaaaaaagggatgaggggagtcatcatacaggaggtggatcatttascaggatccacacttcctacaaagcggttgtaatattaaataacaaaactgttttttattccaatcttcacataaaacaggaataattgtatactttcttactaatgtgttccatggagtttttcctccaagaagtggcttaggggaaaatgagccccagtaatgctttgtggcatccaatccttctaccccgaccctttgactttctgccccagcccctcttagttctcctagaattaggactaaggttaagtgccctcttgggatatgacttccttcccttcctcttgatacaaaaagagcctattaccaaccctcatacacacaagagttcccttcctagttgcag

SEQ ID NO: 543991 - DNA, 489 bp, Homo sapiens
cataacagtctgattcttatgagttgggcatcctgtgtttccctttaggggcctgcttccttcaaatagaggagatgggtgctatgaaacctattcactctggacttgggatggctcttctccatcttcccaagtctgagctggagcctccatgcccaactctgctctgctcttctatttcctgacagcagctaaggcatgttcctgttctgcccccaaattgaccttactaacagtgagaacttggaggagtcttcgggtcttgggaaatccaagttttcccggaaacgttttgttgtaaacagtgtccacactctttgctccaataaagctcggttccttaagccactttgaatgtcttgttatgktgtagctcgttgcaaaattcacctaattttatcacaaatgcaggaactttttttccttcctgttaatatacagtcaaacatattaccaagtactggagactatctatatcactgtataacc

SEQ ID NO: 543992 - DNA, 353 bp, Homo sapiens
tttttggttttcttttcttttctttttttctccaatcttaatctcactcacaacatcctgagtatgcctgtcatttcaattstacattaattctacattagcatcttcaaaaaatcatttttgtgtgcccacgttcctggtataataaggaatataaaacaacagtggataataacttgcagtaagttcttactatttgtcacattcttcgtgcattttcttaaacttcaacctaaacatcaacactaagaggtaggttcccatattatgtccattttagagattataaaaactgagacttagaaagatttgtaacttgctctggtagcacatctagtatggagtgttgggat

SEQ ID NO: 543993 - DNA, 616 bp, Homo sapiens
ggtgctctgcgggtgctagtgtctttccttcctcaagaatatttgtcggataaagtatctagtatgatagttttgtgagtttcaaagaaacactatttgaagttgaaaacctcatgaaaataagtgtgggatagcagaaaaatctcagactctggagctagaaggcagagattagatataactgcctatttccagttatgtctcatataaatgcaagtgacaaagttcattatattaggtgattgtaagtgtaagtgttagaggtaggaaatagaattggcttatttttctaagacttggagaaaatgtaagacaaatatttaaaatagggtttagtacycttctcttttacaacaacttttcttagtaaatttttttttctaaactgcaaagaaaagaaaagaaaaaggaaaatctagtaatatctacttagaaatcaatcccaatgtagttccacctactcccataatgaatatgctgaggatgtcctgaaaataattttaatatacaatcattagatgtcacacttacttatatgacaggcagcggtgtcagtgattccatgttataattctggttgcttaaactttttttggagggggatgggggccaaagt

SEQ ID NO: 543994 - DNA, 616 bp, Homo sapiens
ggtgctctgcgggtgctagtgtctttccttcctcaagaatatttgtcggataaagtatctagtatgatagttttgtgagtttcaaagaaacactatttgaagttgaaaacctcatgaaaataagtgtgggatagcagaaaaatctcagactctggagctagaaggcagagattagatataactgcctatttccagttatgtctcatataaatgcaagtgacaaagttcattatattaggtgattgtaagtgtaagtgttagaggtaggaaatagaattggcttatttttctaagacttggagaaaatgtaagacaaatatttaaaatagggtttagtactcttctcttttacaacaacttttcttagtaaatttttttttctaaactgcaaagaaaagaaaagaaaaaggaaaatctagtaatatctacttagaaatcaatcycaatgtagttccacctactcccataatgaatatgctgaggatgtcctgaaaataattttaatatacaatcattagatgtcacacttacttatatgacaggcagcggtgtcagtgattccatgttataattctggttgcttaaactttttttggagggggatgggggccaaagt

SEQ ID NO: 543995 - DNA, 580 bp, Homo sapiens
cattttgatattaatttttttctgagtaaaggaaatagagctaaaactcaaattggacagtttattttattattttmttttcacagtctaaattagtacttggtaagtggacaggtcgaatccattggctaaagtgattctttaaagacaaattttatttttaatcacctatgctatctatttcacaagaccaagaaaaatgattggtgcataacattttatgggtaaagttcatatgaaaacgatggtatggaaatgccctagttattcatccttaattaatatagtaatatttatattaatacataataagattaggtaaaataaatattgaagataaaataattagtaatccataatcagtcacatttaagcatggccaaaggtaataaggcagacattgttgatggtggatggctcctgctatgtttctttcattttctttcacctagtcagtttcattgattccatgctcaggaagagagaccatgttggaagaggaaattggtgaaggagctgcataggaaaggtcatgtttcttcagccgtaaccatgcagcctccattttgtgaactcagca

SEQ ID NO: 543996 - DNA, 580 bp, Homo sapiens
cattttgatattaatttttttctgagtaaaggaaatagagctaaaactcaaattggacagtttattttattattttattttcacagtctaaattagtacttggtaagtggacaggtcgaatccattggctaaagtgattctttaaagacaaattttatttttaatcacctatgctatctatttcacaagaccaagaaaaatgattggtgcataacattttatgggtaaagttcatatgaaaacgatggtatggaaatgycctagttattcatccttaattaatatagtaatatttatattaatacataataagattaggtaaaataaatattgaagataaaataattagtaatccataatcagtcacatttaagcatggccaaaggtaataaggcagacattgttgatggtggatggctcctgctatgtttctttcattttctttcacctagtcagtttcattgattccatgctcaggaagagagaccatgttggaagaggaaattggtgaaggagctgcataggaaaggtcatgtttcttcagccgtaaccatgcagcctccattttgtgaactcagca

SEQ ID NO: 543997 - DNA, 580 bp, Homo sapiens
cattttgatattaatttttttctgagtaaaggaaatagagctaaaactcaaattggacagtttattttattattttattttcacagtctaaattagtacttggtaagtggacaggtcgaatccattggctaaagtgattctttaaagacaaattttatttttaatcacctatgctatctatttcacaagaccaagaaaaatgattggtgcataacattttatgggtaaagttcatatgaaaacgatggtatggaaatgccctagttattcatccttaattaatatagtaatatttatattaatacataataagattaggtaaaataaatattgaagataaaataattagtaatccataatcagtcacatttaagcatggccaaaggtaataaggcagacattgttgatggtggatggctcctgctatgtttctttcattttctttcacctagtcagtttcattgattccatgctcaggaagagagaccatgttggaagaggaaatyggtgaaggagctgcataggaaaggtcatgtttcttcagccgtaaccatgcagcctccattttgtgaactcagca

SEQ ID NO: 543998 - DNA, 636 bp, Homo sapiens
gcctctctgttcaatgtgctccagtgtatctccagccttcttaaatactccaggtaagttctaaacacaatactccaggtgagttctggctcctgagagcagagggaagctgtttatttccttgttctaaaaagtggttatctgtcctagctgcacctcagaagcacttgtagagtttttaaattttaaaaaaygtattttaaaagcagagatgcccaagccctgctctagtcttcagaccagcatctctgaagagcgactgttacaatacatacttgtgaggctggttatttggacccaaaagcagggtttatcttgtaaatcaagcccactgctccagcctgtggtgatcttttaggatcctcgttctatcctataacatatttttattttgttccacttcatgttatttgcaattctgatggaccttcaccttatagcttcatccaagtttctatgaaaaattttgagctagccagggctggaggccgaggtcctgtatcacaaaatgagaaatcttccggtaaacaatttattatttaacattgtagtcgactgaaatttagcaaccactgccgtgtgcccctggtgagcctttgtatcatagaggctagagagctgaacaccacatttctc

SEQ ID NO: 543999 - DNA, 639 bp, Homo sapiens
tgaggcaatgtttaggttaaaagatctgtctcagtgattgggaatgctgaaacacgggtaaagaaaataaatgtcttgagggacattaacttatagagagcatatttatcccatatgaataccttgcctgccyggagtaatccagatatttaacctctgagacggcagttgaagcagagagtaatggaagtgatgacaatgaaagcgagaagggtgagggacaactgcagtgggggctcaagggattgtgatttttttttttaagaggagtccctaggtaaggaaccacatactgggttctgttaatcaacatttaatcaacacctaccatgtggcaggtactgtgctcaacaacaggaatataacaatgaatagaacagggtccctgactttaaggaacatacagtatggtaggaaagaaacacacttaaaatgtgctatactaatgctttgtaccatatagtggtcacacaaaggaataagtaacttttttttttttaagatacagggtctcactctgttgtgcgggctggagtgcagtggtctgatctagctcactgcagcctcgaactcctggtctcaagtgatcctcctgcctcagcctcccgaatagcagggactacaggcacatgccaccat

SEQ ID NO: 544000 - DNA, 639 bp, Homo sapiens
tgaggcaatgtttaggttaaaagatctgtctcagtgattgggaatgctgaaacacgggtaaagaaaataaatgtcttgagggacattaacttatagagagcatatttatcccatatgaataccttgcctgcctggagtaatccagatatttaacctctgagacggcagttgaagcagagagtaatggaagtgatgacaatgaaagcgagaagggtgrgggacaactgcagtgggggctcaagggattgtgatttttttttttaagaggagtccctaggtaaggaaccacatactgggttctgttaatcaacatttaatcaacacctaccatgtggcaggtactgtgctcaacaacaggaatataacaatgaatagaacagggtccctgactttaaggaacatacagtatggtaggaaagaaacacacttaaaatgtgctatactaatgctttgtaccatatagtggtcacacaaaggaataagtaacttttttttttttaagatacagggtctcactctgttgtgcgggctggagtgcagtggtctgatctagctcactgcagcctcgaactcctggtctcaagtgatcctcctgcctcagcctcccgaatagcagggactacaggcacatgccaccat

SEQ ID NO: 544001 - DNA, 639 bp, Homo sapiens
tgaggcaatgtttaggttaaaagatctgtctcagtgattgggaatgctgaaacacgggtaaagaaaataaatgtcttgagggacattaacttatagagagcatatttatcccatatgaataccttgcctgcctggagtaatccagatatttaacctctgagacggcagttgaagcagagagtaatggaagtgatgacaatgaaagcgagaagggtgagggacaactgcagtgggggctcaagggattgtgatttttttttttaagaggagtccctaggtaaggaaccacatactgggttctgttaatcaacatttaatcaacacctaccatgtgscaggtactgtgctcaacaacaggaatataacaatgaatagaacagggtccctgactttaaggaacatacagtatggtaggaaagaaacacacttaaaatgtgctatactaatgctttgtaccatatagtggtcacacaaaggaataagtaacttttttttttttaagatacagggtctcactctgttgtgcgggctggagtgcagtggtctgatctagctcactgcagcctcgaactcctggtctcaagtgatcctcctgcctcagcctcccgaatagcagggactacaggcacatgccaccat

SEQ ID NO: 544002 - DNA, 577 bp, Homo sapiens
ttctatttctatgttgattgacacatctcaaatatttttcagttctttatcagaatattcttgtgtctttagacataatatattgttatgtacaatttataaaatatcataatatattattaccgaaatggggcttgaacagccaaaaggggataaaatgagcgaatgatcaggtgttctcatgaatacttgtataactcccagctactatgataccttagaaatgattggtatgggggagccttctggtgtgcattwtaccaaaagcagcagtgggtaaaggagaaagaatggtactgatgtcaaaatcttgcctcgtagaagacaaaataaaaatgaaataaatacaaaacctgaagacaaatctaagaaatgatatttacactgtgaatggcattttcatatttagctattattcacaatgtaaagtaatcaaattccttgaatgtttaaactaaataaccaagttctcaaatcaaataattgcattgtttccaaatgcatatggttttctgttcagttgttttacatataatttccacttacatttttatccatttaatattgactgccaagt

SEQ ID NO: 544003 - DNA, 607 bp, Homo sapiens
gtgattgctttagtttaaattttcagtttaaattatgctatacataaaaaagagaacagcagatggaaatttatgtgcatcagaatttgggagactcaaaaaatcagcataaattgtaagggattttcaagaagactgacttaggcctaagctcatcattgcacartgctttttcaagtactgtaaacatggctgcctgcatctataaaaggtggcagaagcagggtgaaattaaggaaaaaggataggcttattttgtaaataggactaagctacctttctgactacttacattagcacatagtttataatcagactttcctcagactccaataaagttattttaaagctttacacaatgtataaaacttcagatgactcccaggaggatagtgactatggtaaactaaaattctgtactcacttttaatgctgcaattaagggtagagccacatttcataggatcagtggcaaacacatgatattccttctcctcttctggggatgtccccagagatccatcactcagcttgatcaaattaactgaatcattgttccactcattgagccagtgtgttcactgcctaaaaattcataactgtgcca

SEQ ID NO: 544004 - DNA, 570 bp, Homo sapiens
aagctaactcacagcctttccaccacgtttaaagtattagaagctggctgtgggtctctaggagaaagacactgacaatagctgtaattgaggttgctccagaagtaatcaaggcagaagtgcaaagtactggcctgccatttgtgtgagtttaccaaaaaacccacgtggccaaaatgctaatagactcctgagagtgttgaccttcaaaagatacaaagcactttgttaattaacataaatctagcttagaaagcacatttggtataattgcccttccaattaaaatgagatttgtttacttgcacattttrtttttcaattgttcctaccctattttaggaaaagaccccattatgaaagaaaacaaattctcaagaattctcagcttctctttcatgatggctggcaaagagaaaggcatctggattcagacaaacagtgatgatttctcctggctttacaatgtgtacaaatcttaccccctgcactctgctccatcagttcaatttaatttaattcaattcaagccaacaaatatttttaagtaatattagaacctgggtatat

SEQ ID NO: 544005 - DNA, 620 bp, Homo sapiens
cagatctgtcattactgtggggcctccctagccatgtggaactgtgagtccattaaacctcctcttttataaattacccagtctcaggtatgtctttattagcagtgtaagaacaaactaatacacaggtcacgtcatggcctaactttccaatcacattgtcactcattttcactacatatgaatgaagctttattcaggctgctgtaactttcaacaataatcrcacacacagccacacatgtacacacacacactcatatatataatgctatatacatatatatgtatttatgaacatatgactataattacatatttaaaatcactggctacttttgagtatccagtaaaatgcaagagggtaggcagaagctagtgaggaggagcttatgcagaattcatgctgtaaagtgttttactgtgctcgctaaatgttggctacagaattaacagcttctagaagtcctttcaccaaggaaaataataatgagtgaaaactgcagttttaaaactgccactgctgactatggagaggtaccactctctagacatatctgctgatgcccaggtccttggactttacatgttctcattctgtgtccacctgggtgtgaaag

SEQ ID NO: 544006 - DNA, 598 bp, Homo sapiens
gttcaggaggctgaggtggaaagattccttgagcctggaacttgaggctgcagtgagctatgattataccactgcactccggatggggagacagagcaagaccctgtttcaaaaagaaatgcatttgctcttcaatgaagaggaatccttagtattattatcattttctactacttatagcattttaaaatagctcaaagacaaaaaggacacagataatccggaagggtgtattcgacaaaacatccagtgataattttgtccatttcaaagtatttcacaatttttttctgacagactcaaggtagtattaaagcaacaaacttgaaggaggaaggctgagtcagagagaaacctggggaagtaagtagctgagaatccayacatgtcatgggagggctttgggctttggcaagggggtgggtttggagttccagacaagtttaacaaaattgacatatgctttgcattttgtggtccttagaatggtaagtagaactttgggctggaaacccattctttatccctccaagcccacttccatttttacttcattctaccatatcaaaatattataaataagagcttcctttttagt

SEQ ID NO: 544007 - DNA, 596 bp, Homo sapiens
ttaagtattcctttcttagaactatcatgcttgggcttttgctcattccacaagtcttgagaatatcctaagtattttgccaggtaaacagaacagagtccctctcttagaaagcttacagccaaaggatcagaaaatgacaatgtagtctgtaagtgttattggtgtaggtaamcttgaggttagagaatggctaattagaggaggtgaccttttatctgagttgtaatgcaattaaaaaggaaaagtgtaaagatgagaaaacaggagctatagttataacaacatctacacagtcatgagtgtaagagagaatcatgggatcagatcacggctaattgtgtgactgaggggagtggtgagtaataaatctggtttaacacaaaaaatcagttacaaacagatttctatattgtcattttaaagctacaatttaaaattaattggttgctaaattcttgacaaaggggtcaattgctgtggctatccattggtatttctttgaaaaaataaaaggttgtctggtttaaaaataatattattttatttcattattttagaccttataagcacatttagaatctgtatggaattag

SEQ ID NO: 544008 - DNA, 618 bp, Homo sapiens
ctgtagtctctcccccttttcatttctcgtatttgactcaaagtctaagccattgtttcccccaagctctttggtttgtttcaatgaaggctcttacctatttgggataaggtaaaggcatccctcaccccttacccttaagggttgggataggacaggattcccagaacatcaacaacagccctctctgaaaaccttgctctaatctccacactgttgtattgggcggtcagccaagggtcatgaaatcagtccctgtctaccagcttttcaaggctttatttggtgggctcatgcctcattttgaaatgagggagtaaaaggtaccttctcagttttagctgaaatagagaaaatgtctaattttaacttcctgttacagatgtagtgtatctttattaacatttcttacggtcattattgttctctggctaaggaagggttgaaactgccaaagaaggtgtaaatggaagagagacatccttccatttctagtttaaaatttttatttatttatatttatttagtttctayatattcattgaaggattattgagtacaatgccctgtgctaaatgctggagacacaaagatgaaaagaaaaatgttgctatcctt

SEQ ID NO: 544009 - DNA, 555 bp, Homo sapiens
cctctgggaatgattagaactcaggaacctggctttccattctacctctttaaagagatattgaccaaattcccctacgaaatgatattttggggctagatgatctttaaaattcctttaaacattaaatatcattgatctatattatttttaaagaaaaaaagaagcatattagttataactaaggcacatatatataaagtatgcattgtgaattacagagcataaattatgatagttgaccaatggtgtgcattccttatagtacatatgtagcacatttaagggtttaacacatttagcaaataaaagtataaaagtaaaaaactcctcttccagtttcctgttcttctatgccaacaagtttttaagactgaaggtatcaatgaatgtcttccataaaaagagatgtttcagaagggtgaaagccagtcatatttctgtaatgtaaacacattgtcctagaccctgatayactcgaatatgatccatggtcagcacttgtaaagagctgtgaaaagtgatggaggcgagatcattcataacatgtgagac

SEQ ID NO: 544010 - DNA, 685 bp, Homo sapiens
ccaagctctccctatattctatccatgtttactgcaagtcagaagtgcactgcagtcacagatttgcagggctggagcctaatgagctctctaagcctgaccaagccacaaaaacacagttgttctccgcaggaagagtctgctgtccctccatcctctcaactttgagcacaggttacaaatgcacatgcacttacaggtgctgctgacattagaccaaggctgagcaaaaccactttgtgatattttttttttttcctttgagayggagttttgctcttgtcgcccaggctggagtgcaatgtcacaatcttggctcactgaaatctctgccttccagtttcaagcaattctcctgccccagcctcctgagtagctgggattacaggcgcccgccaccacaccaggctaatttttgtatttttagtagagacagggtttcaccatgttggccaggctggtctcgagctcctgacctcaggtgatccacccaccttggcctcccaaagtgctgggattacaggcgtgaccaccatacccagccatgatttttaatacataaagttatctagcatatgtgcaatcacagattaaaggctcgttgtagtctgttgtgctaacaaagcgtggaccaaggactccccaagtgttctttggcatgccagatcttaaaagctccagaagc

SEQ ID NO: 544011 - DNA, 558 bp, Homo sapiens
ccgcaggaagagtctgctgtccctccatcctctcaactttgagcacaggttacaaatgcacatgcacttacaggtgctgctgacattagaccaaggctgagcaaaaccactttgtgatattttttttttttcctttgagacggagttttgctcttgtcgcccaggctggagtgcaatgtcacaatcttggctcactgaaatctctgccttccagtttcaagcaattctcctgccccagcctcctgagtagctgggattacaggcgcccgccaccacaccaggctaatttttgtatttttagtagagacagggtttcaccatgttggccaggctggtctcgagctcctgacctcaggtgatccacccaccttggcctcccaaagtgctgggattacaggcgtgaccaccatacccagccatgatttttaatacataaagttatctagcatatgtgcaatcacagattaaaggctcgttgtagtctgttgtgctaacaaagcrtggaccaaggactccccaagtgttctttggcatgccagatcttaaaagctccagaag

SEQ ID NO: 544012 - DNA, 620 bp, Homo sapiens
ggtcctgtcactgctcagcagattaattacacatcagcgcaataagccataagcgttccaggggaagttattgcagtatatcatttcaatgatctgtagatagcaggctgctgggagacttgttttgaacrgtgcctttcaatccatctctgagcttgagggtgcaccgaggcatgccagagttggaaacacttcagtgcccctcaaagtattctttcagctccttagcccatgtcttacatggttctggagattctaatgacactctaacagctatagcacttattatttacttattcaacacacaggcatgcagggcccaatggaaaggtgaatgaggaagatatttagggagagacttggcacttaatgcttaagtcatgaataaccttgttggtctctgtgtacctcatgtttttctccataaaaatgtaaatttgattatagaattttagccctagtgtttcattctgatagtagaaagaaaataccttggtagctcttcctgaaatgttgtatgagtcagtaaaccatctaagtatggttgatcaccaaagttctagaaggaagcatgtgatgctttacataagaagaatttgtgatattttaatgtagtgata

SEQ ID NO: 544013 - DNA, 612 bp, Homo sapiens
atgagcaaatgagtccagcaggaagacctaaaatagttggtgagggctgttatagaaattgcatctcaaccgggcgcggtggctcatgcctgtaatcccagcactttgggaggctgaggtgggaggatcacctgaggtcaggagttcaagaccagcctggccaacatggtgaaatcccctctctactaaaaaatacagaaattagtcaggcatgatggcaygtgcctgtaatcccagctacttgggaggctgaggcaggagaagcgcttgaacctgggaggtggaggttgcagtgagccaagatcacaccattgcactccagcctgggcaacagagcaagactctgtctcaagaaaaagaagaagaagaagaaaagaaagaaattgcatctcaagatacataataagaaaatgcaaaatagatattctcagcctgaaatatgctttcagaggatggcataacagaaggtgcctctggtttggtttcaaactctaatccataaaaaaggtgtacaaggtacatattaggtaatgtcaagtatgtgagagtaagtcaaatatttgttaaagtatattttaaatctatgaaggcagctcatttaaaaaataattc

SEQ ID NO: 544014 - DNA, 612 bp, Homo sapiens
atgagcaaatgagtccagcaggaagacctaaaatagttggtgagggctgttatagaaattgcatctcaaccgggcgcggtggctcatgcctgtaatcccagcactttgggaggctgaggtgggaggatcacctgaggtcaggagttcaagaccagcctggccaacatggtgaaatcccctctctactaaaaaatacagaaattagtcaggcatgatggcatgtgcctgtaatcccagctacttgggaggctgaggcaggagaagcgcttgaacctgggaggtggaggttgcagtgagccaagatcacaccattgcactccagcctgggcaacagagcaagactctgtctcaaraaaaagaagaagaagaagaaaagaaagaaattgcatctcaagatacataataagaaaatgcaaaatagatattctcagcctgaaatatgctttcagaggatggcataacagaaggtgcctctggtttggtttcaaactctaatccataaaaaaggtgtacaaggtacatattaggtaatgtcaagtatgtgagagtaagtcaaatatttgttaaagtatattttaaatctatgaaggcagctcatttaaaaaataattc

SEQ ID NO: 544015 - DNA, 541 bp, Homo sapiens
aaagattaatgtctgcatgcgagcaatagggggcccattatttctgatgcttattttgaaaaacttccaatccggcctcccataactaaggctttctctccatttcagcgtctcatccagcttttttttwaaaaaagttatattcagtaggctttaaagtcaatcttgatattttccactgttatggtttaaaaccctaaatagattacactgacaatactgacaaatttaatcttcctcatatataacttgaggataaaaggtcaaaaaggaaacatgtttctctcctctcctacagataaaaatgcaaatagctagtttcctttgaagtttgtaaatacagcatgtattctgtgttcttgtatagcattaaataggccactgtgatacagtaaaagttaactcttcaaagtctctgcctggctgagaaaaagggctgttttcttctaacatagatttcatgactatgataaaatcaattctgtgacagtgtgttctttgctttataaggagtacaattcctaaagcaactattttggac

SEQ ID NO: 544016 - DNA, 550 bp, Homo sapiens
gggagccagaagagagatagttttcacctggagtcgggctgctcagcagcctgggatctcctccaactgcctcagccacactccacatcgttctgccagtcagtggccaacatgctggtggctgttggtgtgttcctgtagacatccagcccccggtgtgttcctctgctgatgtgctcctctcaacgtccagccgcctgtgtctgcctgctaggctctcrgggtttttataggcacaggatggggatgtggaaggccagggtggtcttgggaaatgccaacattggggcaggaaaatgaaaataattgtccacacctaggtccctgggcacaggcccaagagtggagccctaggcagggaccatgccctcctctacccagcacttcccttccccaccttccatattggttaaagcgaccatgccattcccttcccagcacttccatatcagtatggcctctttcaattctgtcctgtcagtaataatattctgtgtccaaagcagttagtactgatgaatttcatggtgtgtgcggggagaacctaatg

SEQ ID NO: 544017 - DNA, 539 bp, Homo sapiens
aaaactcaagaccttgtccaagatcacagggcaagtgagtgataatccctctatggtgaaaatgatggaactgcactgaaatacatcaaagagtggaaggatttctttttgtactggaactgtgctgaatctgtatacaatttgggggagaaccatacctctaagatactgagtcttttatcaaaaaaatgctcatccgggcgtggtggctcatgcctataatcccagcactttgggaagctgagacggggggatcatgaggtcaagagattgagaycatcctggccaacatggtgaaatcccatctctactaaaaacacaaaaattagccaggcgtggtggtgcactcctgtaatcccaattactcaggaggctgagccaggagaatcacttgaacccaggaggcggaggttgcagtgagccaagattgtgcctctgcactccagcttggcaacaaagtgagactccgtcaaaaaaaaaaaaagcgccatttggatacatctttgttagatttattcccagtttatttacatatatgt

SEQ ID NO: 544018 - DNA, 589 bp, Homo sapiens
acattaattagatttttatatctaattaatagatttaaatctaattaacatatktgtataaatcaggcttgtattcctgggataaacctgacttgtatgtgatttattactcatcatttagaactctacatttccttataagtattgtgtgtgttgcatctgataatttgtgatatggaatctttttaaaaaatcactccatttggctggattatgcctgtaaccccagcactttgggaggctgaggtgggtgggttgcctgaggccaggagttcaagaccagcctggccaacatgatgaaaccccgtctctactaaaaatacaaaaattagccaggcgtggtggcactcgcctgtaatcccagctactcaggaggctgaggtaggagaatcgcttaaacctaggaggcaaaggttgcagcgagctaagatcatgtcactgaactccagcctgggtgacagagtgagattctgtctctaaaaacaaacaaacaaacaaacaaaaagaggccaggtgcagtggctcatacctgtaatcccagcactctgggaggccgaggtggataatgaggtcaggagttcgagaccag

SEQ ID NO: 544019 - DNA, 580 bp, Homo sapiens
ctcaaacagcccgggtttgaactggagggtctttccacttctccctgggttttcttctgcctctgtcacccaggagatggcaagaccaaccccccacccctcctcttcctcctcctcttcctcagcctacacaacatgaagaccacaaagatggagacctttaccatgatccacttccacttaatagtaaatacatttctcttccttatgattttcttagtaacatgttcttttctctagcttgctttatggcatgaatagtctataccatacaaaatatgtgttaattgactttgtatgttatagacaaggcttccactcaayagtaggctattagtagttaagtttcgggggagttgaaagttgtaggtggatttttcatctgcaggggcttggtctcctactctccatgttgtttaagggtccactgcacagttatgctgtttgagattaaaatacaacatgaagcatgagcatgtatcatgttgctgctctcccccctgctttaaatgatttttactttcttctttggatttttctgtgttcttcaaatttttttccaacaagcatgcatcacttt

SEQ ID NO: 544020 - DNA, 625 bp, Homo sapiens
taaatacatttctcttccttatgattttcttagtaacatgttcttttctctagcttgctttatggcatgaatagtctataccatacaaaatatgtgttaattgactttgtatgttatagacaaggcttccactcaatagtaggctattagtagttaagtttcgggggagttgaaagttgtaggtggatttttcatctgcaggggcttggtctcctactctccatgttgtttaagggtccactgcacagttatgctgtttgagattaaaatacaacatgaagcatgagcatgtatcatgttgctgctctcccccctgctttaaatgatttttactttcttctttggatttttctgtgttcttcaaatttttttccaacaagcatgcatcacttttatcacccaaaagaataatggctatgtctttagccagtgtcagcrcactgggagaattgctgtgctcggatgccttctgccagggtctgtgcctcgtccctccctggggtaggatgagggtttctcagccagggtctggcctcatccctccctgggacaggatcgaggtgtctcagccacagtgtcatgggcccgttgggccaagtcatcctttgttgaggggaggagcgga

SEQ ID NO: 544021 - DNA, 627 bp, Homo sapiens
tggtagggaaccctgtttctctgaggctgacgtacctctccttggtcagaaccccgccctcgtcctacccacccccactcagccccttccggctgctccggaggctgggagaccaaagcagcgagagctgggacccctcaccgccttccccacacccttgtcagggccgggcagcagtcagggcggtggtggcaggcgccagccgatgtctggtccaggagtccctggccaaccccagagatgaggctgtggccctgccaagcttcctgggctgcacctcctgaagggggaccccatcccattgtctatgtctgagccacacctggacaaacatgttctgtctctgagccctaaagctccgtttcctctggtgcgagaataagatcaggaagtccttayacacagtgtccctgtcctggccaccctggaatgggaacaaagcctctcctttcatggggtctttctgagactcagtgacattcccatgagacccatggctatggcccgggctccctgttcaaacacaagtcgtcagtgacctgacccaagggacatgccggtctgataccagccagcagccggtgtgccggaggcttatcagagctgctcgggttaccccggggagtg

SEQ ID NO: 544022 - DNA, 408 bp, Homo sapiens
cacaccccatagcacaatgctgtgaggtgctcagtttttccactccctgcacagagatgtcccccggatttgctcctccctcttaactggggctgcggagtcgggaggactctckgcagagggcaggatgttcagatgggtgggacagaaggagaggctgtggggcctccacagggcttggggtgcggaagaaagagccctgggggagaggtcagggcctggtccggccccagtgtggccttgggatctgtgtgatcttcagcaggtcatccttctttgggggtttcctgtgggttcctgggtcaagtagtgatgggaacaccttgcccacacactctgcaggctggccttgggatcaaatgcaattatttggggggagcgttgagacaggaaaaacactgtgcctgt

SEQ ID NO: 544023 - DNA, 515 bp, Homo sapiens
ccgtggccagtgtcttcttagtgtcttagctggacctcccactcccacccctgtgaagggtcatgaccctcrgtggcccctgagtggtagacataattagcagaggcccacgccatctgccactggccactagggcagcatgcacaaagtgtggtagtcaagggaaatattaacaggtcttgcatacacacacaatagatattgtaaagggattggtattcctttgctgcaggacttctcagtcaccttaaactgctcagtcaccaaaaatgtattcagcacctactaggtgccaagtactcatctagctgcttggaataagtggtgaataagacacacaagttttatgctctcatgacacttatatttcagtgcagagggaggtataaaataaatttgcaagtaaataagagaacttcaaatggtgagtgctgtgaagaaagcaaaccagtaaagggacagagggggactgatgtgttaatatgcattgtgactgtctaaggagaagcagaacg

SEQ ID NO: 544024 - DNA, 627 bp, Homo sapiens
ccgtggccagtgtcttcttagtgtcttagctggacctcccactcccacccctgtgaagggtcatgaccctcagtggcccctgagtggtagacataattagcagaggcccacgccatctgccactggccactagggcagcatgcacaaagtgtggtagtcaagggaaatattaayaggtcttgcatacacacacaatagatattgtaaagggattggtattcctttgctgcaggacttctcagtcaccttaaactgctcagtcaccaaaaatgtattcagcacctactaggtgccaagtactcatctagctgcttggaataagtggtgaataagacacacaagttttatgctctcatgacacttatatttcagtgcagagggaggtataaaataaatttgcaagtaaataagagaacttcaaatggtgagtgctgtgaagaaagcaaaccagtaaagggacagagggggactgatgtgttaatatgcattgtgactgtctaaggagaagcagaacggcatgttctatgagcaagtctcagaactgcaattccttggaaaggtattgaggaatgctctagaatggtcctaacactcaaatctaaagcgttcatccttggcatgagatac

SEQ ID NO: 544025 - DNA, 629 bp, Homo sapiens
aaaaaaaagagagagagagagagaaagaaaagaaagggagaaagagagacagaaagaaaagaaaggatgtagggtttgaaatcaacagacctgagcttctgttttgtctgtacaatttatgcagagggtggagggtagcctgamttctgtcacaggaccagctctctaattttgtacaagtcactctataggtctccgtcccctcatctattaaacagagatgatgatggtgataatgataacaattaactgggaggattgcaggaggataaaatggcatagtctgcatgaagtgcccaacccatggccagtgcttacaaatgttatctaagatcagcatgagctctgagaacctggcttaggctaccagtcctcaggccccactttgtcacggagatgacagtgagggaggggggagacagttgtccaagagatatctgcccatctcagaatgagcctgctgtgtggctttgagctttggcatgcagaggacagggtctgcaccgtccctgatctggtcacaccccctactcagtcttccgccgccatcaagctctgagtgagcctggccatgcatctgtcacacctagagggcagcctgggccagagacacaaacagcctgtagcca

SEQ ID NO: 544026 - DNA, 629 bp, Homo sapiens
aaaaaaaagagagagagagagagaaagaaaagaaagggagaaagagagacagaaagaaaagaaaggatgtagggtttgaaatcaacagacctgagcttctgttttgtctgtacaatttatgcagagggtggagggtagcctgacttctgtcacaggaccagctctctaattttrtacaagtcactctataggtctccgtcccctcatctattaaacagagatgatgatggtgataatgataacaattaactgggaggattgcaggaggataaaatggcatagtctgcatgaagtgcccaacccatggccagtgcttacaaatgttatctaagatcagcatgagctctgagaacctggcttaggctaccagtcctcaggccccactttgtcacggagatgacagtgagggaggggggagacagttgtccaagagatatctgcccatctcagaatgagcctgctgtgtggctttgagctttggcatgcagaggacagggtctgcaccgtccctgatctggtcacaccccctactcagtcttccgccgccatcaagctctgagtgagcctggccatgcatctgtcacacctagagggcagcctgggccagagacacaaacagcctgtagcca

SEQ ID NO: 544027 - DNA, 408 bp, Homo sapiens
ttttatcactgcacaaccagtaaatcactaagttttgataattttgtctcctaaacatttctcagatctgtccacttctctctgtaccacctctaccttagtttaggctactyctatcttctggattgaggttttcctgaatttatatctagcttcggccctgcaccccacctcctaaaacaaaaaagcaaataaaaacttcttttgttaatatttaaaaatctgtcttcctccaattcaatcattaaggtcttctaaaatgcaacagactctcctgcttaaacttttacataaaatctaaacttctgagcctggcctcattaggctgtaattatctatgtccattcctccagttccatgttctttttggttttttagctatttgcatctgttgtttttgtgcaagca

SEQ ID NO: 544028 - DNA, 408 bp, Homo sapiens
ttttatcactgcacaaccagtaaatcactaagttttgataattttgtctcctaaacatttctcagatctgtccacttctctctgtaccacctctaccttagtttaggctacttctatcttctggattgaggttttcctgaatttatatctagcttcggccctgcaccccacctcctaaaacaaaaaagcaaataaaaacttcttttgttaatatttaaaaatctgtcttcctccaattcartcattaaggtcttctaaaatgcaacagactctcctgcttaaacttttacataaaatctaaacttctgagcctggcctcattaggctgtaattatctatgtccattcctccagttccatgttctttttggttttttagctatttgcatctgttgtttttgtgcaagca

SEQ ID NO: 544029 - DNA, 602 bp, Homo sapiens
tgctacctttagccgaggcacacgctttccatttgccacaattgccgccattccccattgtctctcactgggctgtttcactcattgtcattactattgtgacccctgggagtgtttgaactagagtcactatgtcccactttcagagtcccaagagatataattcagcccagtgtgggtcagatgggcacccctggttcaaaacactgtggcaatagcagggcaggcgtcagcaaggtcagcgagagtgtagggggacctcttcagcaaggcctatgggcaactgtggggtctggggaaagggagtctagatgggcagatacttgaaaggagtttagtaccaagggggaagagattgaggctgagagcccccttatgagacatgtaataataggcctgtgtggtggctcacacctgttatcccagcactttgggaggctgaggtaggagaattgctgaagcccaggagatcaagaccagcttgggcaatggggtgaaaccccatctctacaaaaaatacaaaaattagccaggcataggggcacstgcctgtagtcccagccggttggttggctgaggtgggagaatctgagcctgaggtg

SEQ ID NO: 544030 - DNA, 575 bp, Homo sapiens
gcggttcccagtatgtgagcaacataaatgtataagttttaccagattagggaaaactgaattggcagaaaaattagttccagatgagtcatcttggacacatcattaaatatactacatagcagtttataaatttataaaatggaaacattgggatattatttataaagatcccctggattcagcagattacaactctgtagataatgcattaaagattgttaccaagcctatgctttagatctatagaattttaaagtacaattgttgctataattacataatgcatatagtatttatatatttctaaatctctttttttgtttatcactctattgctttatttctcattgctacaggtcatcttaagtttcycagataatactgatggagaattgtacggaagtgacaaagttcattcttctaggactaaccagtgtcccagaactacagatccccctctttatcttgttcaccttcatctacctcctcactctgtgtgggaacctggggatgatgttgctgatcctgatggactcttgtctccacacccccatgtactttttcctcagtaa

SEQ ID NO: 544031 - DNA, 687 bp, Homo sapiens
aaatgatgcccacccagactgagggtgggtctgcctctcccagtccactgactcaaatattaatctcctttggcaacaccctcacagacacattcaggaacagtackttgtatccttcaatccaattgagttgacactcaggattaaccatcacaatgccccatctagacatatctttgccccatcactattgccaagtaagaaacatagcaccagattggcacccttgagaaataaggggttccaaactgagttaaagatttccatttaggtggttctaaagctctgttggagtaagaagcaaataaaaacaggtgaactcaagctgttggccatgtgtagcattcttactccaacaaataaaaataagtgaactcaagctggttgccctctgagcagttttttccctcctgaaccactgtaggctaggcatttttaaaaaaagagaaagaaatcctagaaaagaggtatttaagagcttcctgggaaggtaaagttacctgttggagaggaggaaggataataggagtgctctaaattgtagcatagggactgcctgtgttgatacacacatacctgccacataaatacatataaagatactttctaaatttatctggagaatctgtgctcaagctgtgttaggttgtgtctcctgtcttgagatatataccataaactgtggct

SEQ ID NO: 544032 - DNA, 373 bp, Homo sapiens
gcccacccagactgagggtgggtctgcctctcccagtccactgactcaaatattaatctcctttggcaacaccctcacagacacattcaggaacagtacgttgtatccttcaatccaattgagttgacactcaggattaaccatcacaatgccccatctagacatatctttgccccatcactattgccaagtaagaaacatagcaccagattggcacccttgagaaataaggggttccaaactgagttaaagatttccatttaggtggttctaaagctctsttggagtaagaagcaaataaaaacaggtgaactcaagctgttggccatgtgtagcattcttactccaacaaataaaaataagtgaactcaag

SEQ ID NO: 544033 - DNA, 687 bp, Homo sapiens
aaatgatgcccacccagactgagggtgggtctgcctctcccagtccactgactcaaatattaatctcctttggcaacaccctcacagacacattcaggaacagtacgttgtatccttcaatccaattgagttgacactcaggattaaccatcacaatgccccatctagacatatctttgccccatcactattgccaagtaagaaacatagcaccagattggcacccttgagaaataaggggttccaaactgagttaaagatttccatttaggtggttctaaagctctgttggagtaagaagcaaataaaaacaggtgaactcaagctgttggccatgtgtagcattcttactccaacaaataaaaataagtgaactcaagctsgttgccctctgagcagttttttccctcctgaaccactgtaggctaggcatttttaaaaaaagagaaagaaatcctagaaaagaggtatttaagagcttcctgggaaggtaaagttacctgttggagaggaggaaggataataggagtgctctaaattgtagcatagggactgcctgtgttgatacacacatacctgccacataaatacatataaagatactttctaaatttatctggagaatctgtgctcaagctgtgttaggttgtgtctcctgtcttgagatatataccataaactgtggct

SEQ ID NO: 544034 - DNA, 614 bp, Homo sapiens
gttgagtatctgaggagagcaggrtagtttaacccctcatggcctagtaatcagaattcctggggagccaaggacagaaaaggcagcacacgccaaacgaatgacttgagatttgaaagtcctttctaaagctgcttgtttgaaatgcaatactcacattcctgtgtaaacaatgctgctaggactaacatttattgagtcctgcgatatgcttgatggaatcaagatacaccctctgtatttattattattattattacaacctcacctgattacaacctcaccatgtagaagtggcagacactggtttgctgttcaccaagtcagtaaccttttcctcttaggtacacagtcatttctcagccttcctaatattaggtgcatccatgtgagcatggaagatagatgggaatcatatgtaccacctcctaatgtagcccgtaaaaatgcctactgctcaatccttcatgccctctctcctccatctgcctgcccgatgcagaggctctagttgaaggctcccaagctccagaaaattacatccactaaatagaaggatacagggtccctgagtgcctgcatagagccaggccagacccctctactgacctgca

SEQ ID NO: 544035 - DNA, 472 bp, Homo sapiens
ccatgtggcatcaaagcagtgcccagaagtgatgcctgtgaagatgctgtcttaagtcttaggtagaataacaggaacttgctaggggcaagccccaaaattcaactaacggggttataataaatagatgagcacagagacgcaggggctgtgggtgggagcagccttctcacactgaccaccaccctggtgcaacaagggtacacagctagcaggaccaagctgtggccagcatcctgcatgagggagcacagttgattgtgccttagtcaggatgctgaggaagaggaattcagctgcaggcagtctccatggcaatggtaatggagaagggatgcagccagctcttcctggcccagcccttctgctagggacagaaaaacaagctctcccaggtgcttcctgaccagtaacmtctaaagtctaagccctccttatagctgctccatcacaagactggggtggggggcgt

SEQ ID NO: 544036 - DNA, 494 bp, Homo sapiens
atatcatgctcctggtgtcaggggggaaaccaactttcaggtctgctaattccacttggaaggatgatgtatgtgggaatgctctttagttggatattcaactcaatcctaaaccaatttcaagagggagtgtttatgagagccaagggcatctcttttagagctggcttcaggatccttgtttctgttagagatacgggatgtagggggaaccctccatcacaagagcagggaaaggcccccagaataagagaggagggagacagggcccgcccagcagagccataattatctgaggaggaagctgagaaaagaaaggagaaagaaggaataatcccttcatgctgcgcctcctctccccacatcccagcrttacatggctggattcctctagtggccagaaatatttaatcgaatacttttgtttggatcttgcatccctggtaacctgaagatgttaccatggcaatccctgagtaatacatctcgattat

SEQ ID NO: 544037 - DNA, 569 bp, Homo sapiens
tgtgaaagctctcgcttgctttctgccttcccttacatacatcatctgttcaatgcagctcaagctccaagccaaagcagctctcagcaaacatgctgagcctggtggtgggcatcagatagagtcaaaactgctcgggggcagtgctggccaccttggcagtgagacatgccaggccacatgcacagagggctctggggaggaccagtgtgttgtgatactaagagtcagaggatgcttcatctgatcctggcttgtatccatctattgatccattcaggtgctgaataaatgctcattaagtcccctgtgtgtaggctttgtgttgtggrctgtgggggatacatagatgaatgacacatgattccagcctgaagagcttacacaagccaccccagcacaaatccaaatgtgctactcaaatgccacgggggtctcaggaagcagagagcactcccagctagagattaggaaaggcctcatagggagctggcatttaagcttggataatggctgggatttcagcaggtcttgaggatctgctgaggacaagaaggaggcgtttcagc

SEQ ID NO: 544038 - DNA, 509 bp, Homo sapiens
ctttctgaagtgttgaaatcaggtggaggctaaagagggaattcaagaagcccagcaagcttgggtcagaaatcatacctgccaacacgggcacctgccccatagtgagtttttaaaagatgtttgagataatgtccaacagttaaagctcagatttctcattcagattcagattcctggcctctcatggtaaactaggaaatctggtcacaccaggcccctattgcttcattcattcgtactttcgtttaagcatggggctggtcccatcccaagtgctggaataccaaggtgaacaggacaatcgagtcccctgtttttgagaggcatctcttcaaggagcctctctgtgcagggcatattcactctagtttgccacagtctccaccattccctattatcacstagaccacttcccttgtttgtgatctttgcatgaccaccgtttataaccacctccaccagacctgctgctgagaaagggcagagagctaagccagtaaacaaaa

SEQ ID NO: 544039 - DNA, 614 bp, Homo sapiens
ttattataattcatgaagtttggtcaattgcgaccagaatgagggagtaacactaatcaagcatcagaagccttttcaaagtaaatattcagtgatctcccagccctagcccctactcaccagatattttgggttaactaagtcattgtgcatatcactgataaaagtataactggaattttgacttaatttaaaaagtttttaaagttagtaaaatcttgctatgatattacttatttttttcattatcccaaataaaacgctaaaagaaktaatagaacttgatcaggtttagataaattccacagattgggtaacacagaaagcaaaagcaaaatttgaggtagagttgagtgtgcggaatatttattaagaagtgtttttgggagaaagaagattgggcaaagggcaaagctgagctgtgatgcaggcttagagacagctttggctgaccctgcacagggcttcacattcctgctgggtaggtgatcagaagtgggccaccctgggagaggggtgtggccaggggtaagacagccctcagcagctacataattcctggagggggtgagagctgaaggctgaaggctatctggtaacagcattcctagcag

SEQ ID NO: 544040 - DNA, 588 bp, Homo sapiens
gacctttttgtctcagtcttgcaggagcctggagaccggaacctggacctagcatctcagctgggactgcccctggcctccagctctttcctgaaactgccattgttggtagtttcaggaaactgggggagccttgaccagttctgactgtttgcttttccttagattcacaaaatctgcatgctggcagggccctcaagtaactcattcctcctttgaatcattctgaccattggtttttctattgagcctgactctatctctctgtgcctaccgttctagctctgtctgttcttcggggccatacagaacaggcctggtgctcttccctgtgatggcccctctgagacctgcagcaatatcatttcatggctcccggcatcttctttcttccagagatgyaccattagtgcctttgatggttccttccatctcatggattggatccaattcatcaacctggtcaccctcctctaaatcagttttcttttttctccatcctaattaggatgtgatcccccaaatcagaagcaggcactcttttcacctgcttttcatccactataggtatctgctccagcctggtgg

SEQ ID NO: 544041 - DNA, 588 bp, Homo sapiens
gacctttttgtctcagtcttgcaggagcctggagaccggaacctggacctagcatctcagctgggactgcccctggcctccagctctttcctgaaactgccattgttggtagtttcaggaaactgggggagccttgaccagttctgactgtttgcttttccttagattcacaaaatctgcatgctggcagggccctcaagtaactcattcctcctttgaatcattctgaccattggtttttctattgagcctgactctatctctctgtgcctaccgttctagctctgtctgttcttcggggccatacagaacaggcctggtgctcttccctgtgatggcccctctgagacctgcagcaatatcatttcatggctcccggcatcttctttcttccagagatgcaccattagtgcctttgatggttccttccatctcatggattggatccaattcatcracctggtcaccctcctctaaatcagttttcttttttctccatcctaattaggatgtgatcccccaaatcagaagcaggcactcttttcacctgcttttcatccactataggtatctgctccagcctggtgg

SEQ ID NO: 544042 - DNA, 572 bp, Homo sapiens
gggtcccccatgtctccctctcctctcagtctcttccacctggactcacccaggttccttcagtggcttttcatatgattgaggaatggagtcagatgtgttgtggggaaacactggagttggctcccgggaggctctagcacagtgcacatattaacaccaggagcgtgggctctggaaccagactgctcggatatgaatctgagctccaccctttactagtgtatgactttgggcaagaacataatttctcagtgtctccatttcttcatctataacatgggctaatagtagtccctgttttatgcttttataagaattcaataagttcctgcatagaagcacttaggatggtgtcaggcatacagtaagtgctatgaaagtgacatctgtaattgataatagtactastgggccagcctgtttccatctctagcctttgcctgcccggatcacccttcctcatttctccaccaaatcttgtctcttctcttcttttaaaccctgctttaaattcaccttgttctgggagatgagaatccccaccttgtctagggaactttcccttccaa

SEQ ID NO: 544043 - DNA, 556 bp, Homo sapiens
aatcactaggctaagaggacacatttacaaaggctcttggggccagccccactggccacactctgtgtgtgtgtgcacgcatgtgtatttttcagggctaaatgctgtcatcagtaacacagtctctgcccctacccatactgagaggtgaccttggttgtgatcctcacccctctagggctttttcctcattgtggaggaagcagtgaccccccttctaagttgtgagactcacaagaatgatgcctttcaaagcactgtgtaggttgtgatgaagcatatgggtttttaactacggtgcaaacaactgtcagggcttgtgtctctgcagggcccagaaggtgccccagaagctgaccctgctacctcctgccctgctyctctgcccccagccccacccttctggaagcgcctgtgtctcctgaccttggatgctccttcttcaaggtggataggcctggctggctggcggcctgtggatacaaaagtgacctgccagcaggagcctttttttctttcctcttccattcagagctagtctgcaacccactggcag

SEQ ID NO: 544044 - DNA, 571 bp, Homo sapiens
cagagatcacaccactgcacttcaccctgggcaacagagcgagatactgtctcaactaataataataatgataataataataaatactaactcttcatggccacgcactcaycctgtaagatggcattgcatctccatttcacaaatgaggaagctgaggctcagaaaggctcagtaacttatccaagctcacgcaacaaaaacagcagtgctgggttcaaattgaagtatgtgtctaaccatatgcaatcacaaatcccaggcccctgctttgactacagttgaattcagcagtgttggcagaatttaggttgaaagcaggtatgtcagtacagcttccaacctcagagggtctctgacagtccccacctagacagagctgggcctcattcccgtactttaggtagtttggaagacagacagttcaaaaacagaaattccccatctatttgacaaccctgttctcgacacccaacaggtaggagccttgctgatcctgagtgcagagggaagggaaggcccagactagacagaagctgggctccatctggctctgggccttacaatgaat

SEQ ID NO: 544045 - DNA, 571 bp, Homo sapiens
cagagatcacaccactgcacttcaccctgggcaacagagcgagatactgtctcaactaataataataatgataataataataaatactaactcttcatggccacgcactcatcctgtaagatggcattgcatctccatttcacaaatgaggaagctgaggctcagaaaggctcagtaacttatccaagctcacgcaacaaaaacagcagtgctgggttcaaattgaagtatgtgtctaaccatatgcaatcacaaatccsaggcccctgctttgactacagttgaattcagcagtgttggcagaatttaggttgaaagcaggtatgtcagtacagcttccaacctcagagggtctctgacagtccccacctagacagagctgggcctcattcccgtactttaggtagtttggaagacagacagttcaaaaacagaaattccccatctatttgacaaccctgttctcgacacccaacaggtaggagccttgctgatcctgagtgcagagggaagggaaggcccagactagacagaagctgggctccatctggctctgggccttacaatgaat

SEQ ID NO: 544046 - DNA, 475 bp, Homo sapiens
gggtgcccacagaggaatcaaatgagcaggagagaagaccaacttggagagaacaacttttaaggacagcattttaatcacctccagataaatataaccctctctcctctgctaggcatctctctgggtgtttgggaggagatgagcagtcctgcagatgactgtctgtgtttgagtgagggtgtgtgtgctgcaaccttccctaaggaggactgagaagagctgggyttctcagcctggagaagagggtgggatgggtggcagctgtgtaatgacccatgcaggcacaatgccaccacctgaagccagcgagggctatgctggactcccaggtgacggtactcaggtcaaagccagaggaaagcactggaacggctgttcgtgacaaagaggaagtcctgaggctgacagctgctgggcacagacacagagctcctgtcccttggcctggctccatcatgcccaggtggagacc

SEQ ID NO: 544047 - DNA, 475 bp, Homo sapiens
gggtgcccacagaggaatcaaatgagcaggagagaagaccaacttggagagaacaacttttaaggacagcattttaatcacctccagataaatataaccctctctcctctgctaggcatctctctgggtgtttgggaggagatgagcagtcctgcagatgactgtctgtgtttgagtgagggtgtgtgtgctgcaaccttccctaaggaggactgagaagagctgggcttctcagcctggagaagagggtgggatgggtggcagctgtgtaatgacccatgcaggcacaatgccaccacctgaagccagcgagggctatgctggactcccaggtgacggtactcaggtcaaagccagaggaaagcactggaackgctgttcgtgacaaagaggaagtcctgaggctgacagctgctgggcacagacacagagctcctgtcccttggcctggctccatcatgcccaggtggagacc

SEQ ID NO: 544048 - DNA, 640 bp, Homo sapiens
taatatcaatgctagcaaaaaaaataattaggatggcaagctggagatgtccccccactccctccactcacaaaacttcacaaaactcccagaaggaggcagtacaagggagtggttatccgcacaagctctgcatctgttttaaacagagctcccagagcctgggtgccgctacctaccagtcatgtgacttgggacaagtgattaacctctcaaaacctcagtttccccattcacaaagtggagaaaatgctagacattcctaaggttgctgtcaaatattagctgcgatcttagcagtatgcctgcaaatagcaagtgctcaatgtttgacagctgttattgtgattattgctattattgtccaaagccaaatcaccatgatttggggagactggtatttaggtacagattttccattagtgtggatgattttgagtactttgtgacagccaatggattaagcctctcaaatgccttaatcgacaatcagttggacccccaaagtcaactaacatccctgctatggaayggcatctggggctgggggcactgaatggatcagtcgcccttctggtgctaacccagcgttaatggtgcaagtgaattacaaacaaggcccacctgctgtgctcagcaa

SEQ ID NO: 544049 - DNA, 526 bp, Homo sapiens
ctgcatgcagcaggatgccgtctggatggcatttttttttttttcagagacaggatcttgctctgtggcctaggaatttaggggtatgatcataactcactgcagcctcgcactcctgggctcgagtgatcctcctgcctcggtgtcccaaagcacggggattacgggcacatgctaccacgcctggcctkggatcgtcctcaagcgctccttgcgatccctccccaacaccagggggctttctgctgcttggttcataagcacaaggagaagagaggagggggccgccaacatctgtagggacgcccagcaggaagtcagagtgacctgtggtttctggagggagaatggggcaagagcaggagtcagttctacacttgtgcctgggtaggtatgtgaggcacatgccccaaacccacgcacacaccccaaacccacacccacactctaagtagcacaccccattcagcggcggccagcacctgcccagatgcacagtggaaagaaagctctttgcatttcttgc

SEQ ID NO: 544050 - DNA, 440 bp, Homo sapiens
  misc_feature (1)...(440): n = A,T,C or G
nnnnnnnnnggagcagaggcagaggtttgagggagcacttcccaatgggggacactcagcagggatgaagaggttagggtgaccaaccatcctggtttgcccagctctgcggaacttcctgagatacgagacttcagtgctaaacccaggatgatcccgggcaaacctgatggttggttgccctaggagagtttactccctgcagtaagctggccggtattcaacagcgggctctcctgggggaagccctgacttgtagggtttgctgatttccacggtgtaaataccatggtcaattttaagttgccaacgtgatgtcactaaatrcggagctgggaagaggtgtgtacggcccactcttgtgagcctgtctgagcaggctccagcacacccgggagagagcctggtgggtggcagatgggggtcctgaggaggtgggg

SEQ ID NO: 544051 - DNA, 658 bp, Homo sapiens
ctctttgtctgccaaggcctgggtccaggctatgagtgttcaaaaatagaacaggaagttcagaaaaaagcagaagccaagagaaggttacagcatgggagggcaggcttgggagagaggatttatcttgtggggaggacctcccagtttaggagagaagcacctgctctaggcacaggaagacatcacaaacaggtgatgaacagcagccgggaagcaaggggcctgttgtgtttccatgttacatcctgattccaggatgagcaagactaggaaacagaccagtttacagtggccaccagcctcacagactgtacctattaaaatggaatgattcttctgtccttttgtgagcaggagccgaagaacaggtaaatgaagggaagcaaaggaaagagaaagaggcctggatgggtgaggggagcatttgtgatcttggcccactcagcgcccatcccccttcttctcttcttccagtaacagcaccttgattttcctcctgggagcaycctcctccacattcagtctgggaggctcccacagagtagcccccgccctacagggtctagttcaaggaccctcatgaagtcctctcaaggggatgtgggtagttgataaaatcattatcccagatatttgtgtaaggccttatagtgta

SEQ ID NO: 544052 - DNA, 560 bp, Homo sapiens
tgggttgtcctgtacatctgagtggcattactagatgaagatctgcaaaaagaatattcraaagggaatgtgttctcatgttttgtagtattgaaagaagccagatgtttggataacttagatctcctccatctagaactaaagtaaggatatgattctttatgctgattttgtggtgttcttgtttattttgtttgatccaaagaaattttataaaatctcattagtctcatgacttccttgtcaattgtccccagtgacctctgggagttcctaaatagtgcctcctgtgtgtccacagccagatgcaatcacagcactgagccctctccatttttcttcctcccctggatcccactcatatatgcacactgccagtggctaaattctaactaaagaagtaatagttcacagaaatagactctgatgtctacagagagaacaatgaacaaaattaatcattatgatcctgtttttatgtttattgtggaagattatcctttgttagcttttatcttggctgctggtgccaatgtaggaacatggctgttataataaaa

SEQ ID NO: 544053 - DNA, 560 bp, Homo sapiens
tgggttgtcctgtacatctgagtggcattactagatgaagatctgcaaaaagaatattcgaaagggaatgtgttctcatgttttgtagtattgaaagaagccagatgtttggataacttagatctcctccatctagaactaaagtaaggatatgattctttatgctgattttgtggtgttcttgtttmttttgtttgatccaaagaaattttataaaatctcattagtctcatgacttccttgtcaattgtccccagtgacctctgggagttcctaaatagtgcctcctgtgtgtccacagccagatgcaatcacagcactgagccctctccatttttcttcctcccctggatcccactcatatatgcacactgccagtggctaaattctaactaaagaagtaatagttcacagaaatagactctgatgtctacagagagaacaatgaacaaaattaatcattatgatcctgtttttatgtttattgtggaagattatcctttgttagcttttatcttggctgctggtgccaatgtaggaacatggctgttataataaaa

SEQ ID NO: 544054 - DNA, 539 bp, Homo sapiens
catattctcagctctctgagctagatggtttattccatcttatggaagaggcattggaagttcaaaaagactaaaagtaaactgaagagatgatgtaacaatgtaaagaataacaatgacaaccatattgagtacttactatgcagggcaggaattatctaattcttttacaagctttatcctatttgattcttacagtaaacctgaatattatttattttattttgaggaaactgagtctaagtaacttgcttaaaatcacagagtccagaagtggcagatttttacctaggagttctaattcctagtagaaaccacattaacctaataggattaaccgaataggatcccctctacattacyctcaagcactgctctctgttaatttctttcattgattttaccataatttacaattatgattgtatttgtttgtcttgtttattgcatttcactcctcttctaaatgtcacaagggcatataccatgtttgttttattcaccaatacttttcacccacacagtaggtgctcaaaaac

SEQ ID NO: 544055 - DNA, 588 bp, Homo sapiens
tgtggagcatattctcagctctctgagctagatggtttattccatcttatggaagaggcattggaagttcaaaaagactaaaagtaaactgaagagatgatgtaacaatgtaaagaataacaatgacaaccatattgagtacttactatgcagggcaggaattatctaattcttttacaagctttatcctatttgattcttacagtaaacctgaatattatttattttattttgaggaaactgagtctaagtaacttgcttaaaatcacagagtccagaagtggcagatttttacctaggagttctaattcctagtagaaaccacattaacctaataggattaaccgaataggatcccctctacattactctcaagcactgctctctgttaatttctttcattgattttaccataatttacaattatgattgtatttgtttgtcttgtttattgcatttcactcctcttctaaatgtcacaagggcatataccatgtttgttttattcaccaatacttttcacccacayagtaggtgctcaaaaactatctgatgttgtgagtgaataagtgtctaatgtattttggc

SEQ ID NO: 544056 - DNA, 318 bp, Homo sapiens
cagtgatacaaactacttttctattgctcatttattgattgcttcttttttcaaaaaaattgagacatcttgttataaacacaatataaattagtatacctttccattgaaattgtgccctagaggaaatatctgtttcttacagtagaccmtgagggctgagaactcttcttgatcaattttcactaattcctgatacaatgtagctccatcatgaaagttatggcccaaagggtatgttaagataatccaggcccagggaattttgcttactttttaaaaaaaaaaaaaaaaaaagaaatagagaagaggaataaa

SEQ ID NO: 544057 - DNA, 536 bp, Homo sapiens
aggaaatcagcattattcttagcttactgaatgaatgatatggtgaagactcaaaagcagagtctccaagggaaatttaaaaaagcatggaagttttaggtgggagaatgaatgactcagcatgcatgttagaagactttcaagtatttggagggttctcatttggaaggtgtaaaaccaggacaacaactctgaagaagattagatttcctcttagggttcatatgtagaaatcaccaagaaacaagattcttcagaactgacatgagagaagaacttcctcaatcacatggtggaagrcaatgagctgcctgtaacgggaaatactccaataaaggtggtgtgaccacttggtggagatgttgtagagaaaattcaagaactgtaaaggcctttaaaatccctgacatcgcaggctcctctgattctgggagctgcactgaatccaaatgaataatactaaaaccatatttaccatagtcattatcatgtctctagacatctgaggagatggatgttgtctttactgtttagat

SEQ ID NO: 544058 - DNA, 536 bp, Homo sapiens
aggaaatcagcattattcttagcttactgaatgaatgatatggtgaagactcaaaagcagagtctccaagggaaatttaaaaaagcatggaagttttaggtgggagaatgaatgactcagcatgcatgttagaagactttcaagtatttggagggttctcatttggaaggtgtaaaaccaggacaacaactctgaagaagattagatttcctcttagggttcatatgtagaaatcaccaagaaacaagattcttcagaactgacatgagagaagaacttcctcaatcacatggtggaaggcaatgagctgcctgtaacgggaaatactccaataaaggtggtgtgaccacttggtggagatgttgtagagaaaattcaagaactgtaaaggcctttaaaatccctgacatcgcaggctcctctgattctgggagctgcactgaatccaaatgaataatactaaaaccatatttaccatagtcattatmatgtctctagacatctgaggagatggatgttgtctttactgtttagat

SEQ ID NO: 544059 - DNA, 554 bp, Homo sapiens
agtcatgcacctgacatagaagatgtttttctttgatacaaaagtcatgagcattctgggggtgcaaacaggacaatagagatcagggaaggactgggtgaaagaaaacagagcttgggggtgggaaggtatgaatttcagccaattagagcaatcaaggccaggttccccaccatggagacaacttgtcaacctagcaagagtaaatgcaggcccagaggagtcatttccagcaggcatcgcctttgggaatatataccccaagaaaacacagctcctttgttgcctgtaacagatctgctgattctcatgtgtgcctgccccacagagggctggagaaaaatgttgtccagtctctcttctgtttcagattttctccctgtttcctctgaggtggcttctgagtatttagggagttggggcctcatatctctgtagcagggagaagagatggaaccttggctttgacctccattctgatgtctactcctcctccacacttatttttttttttaattkgccattaaagaaactgagtcgtgtatcctataaag

SEQ ID NO: 544060 - DNA, 540 bp, Homo sapiens
tggaggcatgatgtttaagtgtaacgtggcaccttggatggaatcctgggacagaaaaaggacattaggtaaaaacgaaggaaatgtaaataaagtatggattttagttaataataatttactaatactggttcatttgccgtggccaatataagacgttagcagtagaggaaagtgggtgaggatatacgagaatcctctgtaccatctttgcaacttttctgtgcatcaaaaactattcttttaagaagtttgtctacttgttctaaaattttattttaaattattatccttaaaaattgcttccttaaaatggctgtaacaggctgttcagatagaggtgacaatggggacrtgaatggggtggagtgtgacctactaaacagtttgttgtgtaaggtatcatttgttctccaggtgctaactgactccagagtgaaacatagggccttgcctgatctccaccctccccttctagttcctgacctgcctctttttgataggcccctgacttggggacatccttatagacaccaatat

SEQ ID NO: 544061 - DNA, 635 bp, Homo sapiens
gctgcttacaaactgaaaagcttagagagtgcaacaggaatattatctagtattccgcttctgctagattcccactttctagggyctgcttttataaagcattacacaaaaacagggaccatttccttcagggacaggagtgaatgcaaagggtaaccggacctaactaaatggacttttccccagtggctcagcccatcacccacgacaaatggggcattgaaacagtcaaggactgccccttccaactggcaacagaaatacctggattccaatcaccatgctattacaccaggaaaacacaagctctccagggagatgaacctgcaaccccatctattatttcccctgctaaggtaatccggatccggatgcagatccagatggaaaaccactagaaattcaaagatgcttctccatttggggtggaggtgctggggggagggcagggaagtaagagggaaaaatccttaaacacccacaaatacaatgcaaaaaaaattttttttaacttgatacagaatgaatataagagcagagcttttatatttcccagcaacaagatatgacgcttttggtgtccctaccccctagcaaaaaaagggagctggggaaaaggaacgattgatggttat

SEQ ID NO: 544062 - DNA, 635 bp, Homo sapiens
gctgcttacaaactgaaaagcttagagagtgcaacaggaatattatctagtattccgcttctgctagattcccactttctagggtctgcttttataaagcattacacaaaaacagggaccatttccttcagggacaggagtgaatgcaaagggtaaccggacctaactaaatggacttttccccagtggctcagcccatcacccacgacaaatggggcattgaaacagtcaaggactgccccttccaactggcaacagaaatacctggattccaatcaccatgctattacaccaggaaaacacaagctctccagggagatgaacctgcaaccccatctattatttcccctgctaaggtaatccggatccggatgcagatccagatggaaaaccactagaaattcaaagatgcttctccatttggggtggaggtgctggggggagggcagggaagtaagagggaaaaatccttaaacacccacaaatacaatgcaaaaaaaawtttttttaacttgatacagaatgaatataagagcagagcttttatatttcccagcaacaagatatgacgcttttggtgtccctaccccctagcaaaaaaagggagctggggaaaaggaacgattgatggttat

SEQ ID NO: 544063 - DNA, 588 bp, Homo sapiens
gctaaatgtatctctacaatgagagtgtatttgttggcataaatcaatcattatacttgaacatacataagatttgtgttgctttagatgacacaattcagggacatgaaactaaaaacttgggataaattatgaaatttttaaggattacttgttttacaaacattcagtcacagtttaataaaaagcctcctttgtcatgaaatgtcactaaatttataaaaattcttcttatacataaaaaacattcaggctgggtgcagtggttcacgcctgtaatcccagcacttcgggaggccaaggtgggcatatgttgtaagactactaaactctcaggagttcaagaccagcctggccaacacggcgaaaccctgtctctactaaaaatacaaaaattagccrgacgtggcggtacatgcctgtagtcccagctactcaggaggctgaggcaggagaatcatatgaacctgggaggtagaggttgcagtgagctgcgatcgcaccactgcactccagcctgagtgacagagcgagactccatctcaaaaaataaataaaaacagaacaaaagaaacaaacaaaaacatt

SEQ ID NO: 544064 - DNA, 528 bp, Homo sapiens
tcccttccatcttcttcaacaaacactgtactctggagctgagcttctctttcagaagcccagattattggaggcagcagggaaaccctcagagacgttcaaagtggagagacctccagtgaaggtggaagcatttgcagggccattaaaagactgttaggagcgatttttctctctgctggcaagtggcaaaagcagagcccaaagaacaaaacccagacctgggaaagcagagcaggggaagagaaactgaacaagccttgctgaaccatgcagaagttgatggagggaaaaaacccaatacgcgcscgcacacacacacgcacacacacacatgcacacacacacacatacacacacgcataacaaagaggagaaattcttagcctgcagcagttggtagcattatgtaaaatcccaagcccacaaaaatatcatttggatgataaaaagttaaatttagctaagtacagagtgactaatactatgagggagaggcagcacccccagttgcctggagctgataca

SEQ ID NO: 544065 - DNA, 556 bp, Homo sapiens
gtgtgcctttgatcaaaacattgagaaacaaaccctcacgtctcccttagcacaaaaacagccaggaccctgttttcctggatcaaagagaggcatgtcagrtactctataggacttcatatgcattaaataccacattctcagaagagctgcagaggcccaggatgacaggggtcactacagaaagaggacctctgcaggaggtgaggaggggctccaccagggcggactctctttgtatctgttgtaccctcagcacctacaacagtacctggagcaatgtagaagctcaataaatattttttgaattaattattaaataagtgagctgcttctatctggcaagtcccttactttactcagattgacacatcattcctgctcatttttgaaaatccagctcatctctttctcagagtgctttctttgacctgtctaaacacttctctatatataaagctgtactttcaaatggatttctgttgcttgttcttataatacagtattgcagttacttgattgcatgtccctcctcccttcaagacctttaattcct

SEQ ID NO: 544066 - DNA, 666 bp, Homo sapiens
gtgcctttgatcaaaacattgagaaacaaaccctcacgtctcccttagcacaaaaacagccaggaccctgttttcctggatcaaagagaggcatgtcagatactctataggacttcatatgcattaaataccacattctcagaagagctgcagaggcccaggatgacaggggtcactacagaaagaggacctctgcaggaggtgaggaggggctccaccagggcggaytctctttgtatctgttgtaccctcagcacctacaacagtacctggagcaatgtagaagctcaataaatattttttgaattaattattaaataagtgagctgcttctatctggcaagtcccttactttactcagattgacacatcattcctgctcatttttgaaaatccagctcatctctttctcagagtgctttctttgacctgtctaaacacttctctatatataaagctgtactttcaaatggatttctgttgcttgttcttataatacagtattgcagttacttgattgcatgtccctcctcccttcaagacctttaattccttcatagctaaggacaattcttattcatctctgtactcatgctgcctagcatagttcctgtatatttactccttcatccaacgggatttgagcaccctgctttattcccagca

SEQ ID NO: 544067 - DNA, 666 bp, Homo sapiens
gtgcctttgatcaaaacattgagaaacaaaccctcacgtctcccttagcacaaaaacagccaggaccctgttttcctggatcaaagagaggcatgtcagatactctataggacttcatatgcattaaataccacattctcagaagagctgcagaggcccaggatgacaggggtcactacagaaagaggacctctgcaggaggtgaggaggggctccaccagggcggactcyctttgtatctgttgtaccctcagcacctacaacagtacctggagcaatgtagaagctcaataaatattttttgaattaattattaaataagtgagctgcttctatctggcaagtcccttactttactcagattgacacatcattcctgctcatttttgaaaatccagctcatctctttctcagagtgctttctttgacctgtctaaacacttctctatatataaagctgtactttcaaatggatttctgttgcttgttcttataatacagtattgcagttacttgattgcatgtccctcctcccttcaagacctttaattccttcatagctaaggacaattcttattcatctctgtactcatgctgcctagcatagttcctgtatatttactccttcatccaacgggatttgagcaccctgctttattcccagca

SEQ ID NO: 544068 - DNA, 556 bp, Homo sapiens
gtgtgcctttgatcaaaacattgagaaacaaaccctcacgtctcccttagcacaaaaacagccaggaccctgttttcctggatcaaagagaggcatgtcagatactctataggacttcatatgcattaaataccacattctcagaagagctgcagaggcccaggatgacaggggtcactacagaaagaggacctctgcaggaggtgaggaggggctccaccagggcggactctctttgtatctgttgtaccctcagcacctacaacagtacctggagcaatgtagaagctcaataaatattttttgaattaattattaaataagtgagctgcttctatctggcamgtcccttactttactcagattgacacatcattcctgctcatttttgaaaatccagctcatctctttctcagagtgctttctttgacctgtctaaacacttctctatatataaagctgtactttcaaatggatttctgttgcttgttcttataatacagtattgcagttacttgattgcatgtccctcctcccttcaagacctttaattcct

SEQ ID NO: 544069 - DNA, 611 bp, Homo sapiens
ctctggctgcagaggccagttgccctctgggggcrgtttgcaggcaaattatctcaggacgaggcctgtttcctctaatgaggcttccccgctttgcagctctgctcccaagagagttggaggggacaatgctcagagccaaccccagaggcctgcactgaggaagcatacatggctcaccattctacacagtgtgggcggcactaccactatccaaggcagggggatgctccccacgaccttctgggtgcaggaattctgagcaatgcagcacctcctccaaggcccctctggggaaacagggaggaaaggagcagggaggcatgctcagttatgtaaccagctgccttggagtcagagtccctggcatatctcagcccagcactacgaggagaggctgtgggggctgggggtctttcttctcttttgctgcctcctccagacctggcagaccctgtagcaggcgctgctttccaagtgcctgagctccaagcaggcacctcctacttggggttgggaaccaggaaagctgttgttttctgagtgtgtgaaacagtggcctgctggctcccttggcagaaagccaggctcggggctctgcacaggggtga

SEQ ID NO: 544070 - DNA, 591 bp, Homo sapiens
tgggttgtcctgtacatctgagtggcattactagatgaagatctgcaaaaagaataytcgaaagggaatgtgttctcatgttttgtagtattgaaagaagccagatgtttggataacttagatctcctccatctagaactaaagtaaggatatgattctttatgctgattttgtggtgttcttgtttcttttgtttgatccaaagaaattttataaaatctcattagtctcatgacttccttgtcaatggtccccagtgacctctgggagttcctaaatagtgcctcctgtgtgtccacagccagatgcaatcacagcactgagccctctccatttttcttcctcccctggatcccactcatatatgcacactgccagtggctaaattctaactaaagaagtaatagttcacagaaatagactctgatgtctacagagagaacaatgaacaaaattaatcattatgatcctgtttttatgtttattgtggaagattatcctttgttagcttttatcttggctgctggtgccaatgtaggaacatggctgttataataaaaaccaagccttcttgtaagacttcaagcacat

SEQ ID NO: 544071 - DNA, 591 bp, Homo sapiens
tgggttgtcctgtacatctgagtggcattactagatgaagatctgcaaaaagaatactcgaaagggaatgtgttctcatgttttgtagtattgaaagaagccagatgtttggataacttagatctcctccatctagaactaaagtaaggatatgattctttatgctgattttgtggtgttcttgtttmttttgtttgatccaaagaaattttataaaatctcattagtctcatgacttccttgtcaatggtccccagtgacctctgggagttcctaaatagtgcctcctgtgtgtccacagccagatgcaatcacagcactgagccctctccatttttcttcctcccctggatcccactcatatatgcacactgccagtggctaaattctaactaaagaagtaatagttcacagaaatagactctgatgtctacagagagaacaatgaacaaaattaatcattatgatcctgtttttatgtttattgtggaagattatcctttgttagcttttatcttggctgctggtgccaatgtaggaacatggctgttataataaaaaccaagccttcttgtaagacttcaagcacat

SEQ ID NO: 544072 - DNA, 591 bp, Homo sapiens
tgggttgtcctgtacatctgagtggcattactagatgaagatctgcaaaaagaatactcgaaagggaatgtgttctcatgttttgtagtattgaaagaagccagatgtttggataacttagatctcctccatctagaactaaagtaaggatatgattctttatgctgattttgtggtgttcttgtttcttttgtttgatccaaagaaattttataaaatctcattagtctcatgacttccttgtcaatkgtccccagtgacctctgggagttcctaaatagtgcctcctgtgtgtccacagccagatgcaatcacagcactgagccctctccatttttcttcctcccctggatcccactcatatatgcacactgccagtggctaaattctaactaaagaagtaatagttcacagaaatagactctgatgtctacagagagaacaatgaacaaaattaatcattatgatcctgtttttatgtttattgtggaagattatcctttgttagcttttatcttggctgctggtgccaatgtaggaacatggctgttataataaaaaccaagccttcttgtaagacttcaagcacat

SEQ ID NO: 544073 - DNA, 671 bp, Homo sapiens
tttgactggacagacccattataacagggttctctgttctggccgtgctcatgctgttttaattgcaaaggtctttcaaacttcaaaacttttgaaagtcagtagagaaactgtaataacagtttattaggctctccaaaatgaagagataaatataagtcttgctcaataaatgagtcctttattgcaatgcaggcaagcacctgtaagtctctgaacggtaagcagcagtaacttgctctcttgcacggaatcaactttttatttttaaaaagccctctaacaagcttgagttatatctgaattcactcacgtcaatctgaaacaaacaaacaaaattaaattagcaaacacaacagaaaaactttgtttcccttttaaaagaaccsctttaaaagaattctcatcttttatattaaagaattaataatacagctacacttagaccaaatcacgagccaagctaggatagacacaactttgaactatctcaaaaacacaatgaggccaatatcaaacatttaaaattgttaattcaaagcaatccagagattaagtagaaagagactagtaaattagcactactcgtcaatgataatctcttctcttcagtttcctccccatgaattctctaagtctctgacatctctaaaagtcagtgattcattata

SEQ ID NO: 544074 - DNA, 671 bp, Homo sapiens
tttgactggacagacccattataacagggttctctgttctggccgtgctcatgctgttttaattgcaaaggtctttcaaacttcaaaacttttgaaagtcagtagagaaactgtaataacagtttattaggctctccaaaatgaagagataaatataagtcttgctcaataaatgagtcctttattgcaatgcaggcaagcacctgtaagtctctgaacggtaagcagcagtaacttgctctcttgcacggaatcaactttttatttttaaaaagccctctaacaagcttgagttatatctgaattcactcacgtcaatctgaaacaaacaaacaaaattaaattagcaaacacaacagaaaaactttgtttcccttttaaaagaaccgctttaaaagaattmtcatcttttatattaaagaattaataatacagctacacttagaccaaatcacgagccaagctaggatagacacaactttgaactatctcaaaaacacaatgaggccaatatcaaacatttaaaattgttaattcaaagcaatccagagattaagtagaaagagactagtaaattagcactactcgtcaatgataatctcttctcttcagtttcctccccatgaattctctaagtctctgacatctctaaaagtcagtgattcattata

SEQ ID NO: 544075 - DNA, 627 bp, Homo sapiens
aaaattcatttgctatatcattagaagaatataattacatgagtttcttttcaagttccaatgccagctctattagagcccataatttaaaacaatggtgacaggtttgattgaaacccaactctgttaattctttgggacaattaggctatgtcttagtatgcttagtggtagccagggaatccagaggacttagtgaagctcccarttgcatccttaacattcccaagattataccatgaactagatacagtactgagactgaaaaagtcatgttgcaattcacaggtatcactacaccatcacctgtatgcatcctggaaggaaggttccaaggagttgaattcctctgttggttattaatgcagcaaagaagtgtttttagaaagaatgaggctagttatcttgcttcccaggctgggcttcaccagttattatcaaaaccatgatggtgttctataaatctagaaatactgcattccgggtatatttttttttccaagacagggtcttgcttattgcccaggcttgagtgcagtagctattcacaggcatggtcccactactaatcagcataggagttttgacctgctccatttccaacctggacccgtttagccctcctta

SEQ ID NO: 544076 - DNA, 545 bp, Homo sapiens
accccatctctactaaaaatacaaaaattagccgggygtggtggtgggcacctgtgatctcagctactcggtggtggtgggcgcctgcgatctcagctatttgggaggctgaggcaggagaatcactttaacctgggaggcagaggttgcagtgagctgagatcgcaccactgcactccagcctgggcgacagagcaagaccccgactcgaaaagaaaaaaaaaatcatcctaagatctccatttcctgcctgttttctttctgtccacatttgttaagtgcctaccatctacctggcatgaaaatacagtgatgaacaaaaataagcagggtcctggccctcagggagcctggatcccaatgagggaggctcatgttggcagagaaatgcccaggaaatagagacaaactgggacaagtatttgccacttctcacatggcattgatcacagattggcttccctgagaggcagctcctggctggctgatgaggggtgtccctggaatcatccctactaaagggaggggaggaagcaggaggctgt

SEQ ID NO: 544077 - DNA, 545 bp, Homo sapiens
accccatctctactaaaaatacaaaaattagccgggtrtggtggtgggcacctgtgatctcagctactcggtggtggtgggcgcctgcgatctcagctatttgggaggctgaggcaggagaatcactttaacctgggaggcagaggttgcagtgagctgagatcgcaccactgcactccagcctgggcgacagagcaagaccccgactcgaaaagaaaaaaaaaatcatcctaagatctccatttcctgcctgttttctttctgtccacatttgttaagtgcctaccatctacctggcatgaaaatacagtgatgaacaaaaataagcagggtcctggccctcagggagcctggatcccaatgagggaggctcatgttggcagagaaatgcccaggaaatagagacaaactgggacaagtatttgccacttctcacatggcattgatcacagattggcttccctgagaggcagctcctggctggctgatgaggggtgtccctggaatcatccctactaaagggaggggaggaagcaggaggctgt

SEQ ID NO: 544078 - DNA, 493 bp, Homo sapiens
acagttactctgaacatgtttgaaatcactttttcctttttttttttttttttttaacttatgcctgaaraaatttttacaacccaaagaaggagctgtatcaattgttttaaagttatttatttctgttaaaactaagtgagggatttctcaggtggtaaatgacctcctctggtagatttgactcaaaatgaaacttggctgcaaaggtgagttaagcagtggtgagcacaactgaggatactgcaggaacacgaccaaagatactaatggaaagatgtcatataaacatgtcttaagaacagcactaagggagagtctctgtaccttttgaattaaagttacataaaaagagtaaacataatatatatatatataaagtatgctgaatactgactacaagaatactgctaaaaaatttacagaaagaccaaaataaatggagaatgactgtgaattagaagactcaacacaataaacaattctccccaaa

SEQ ID NO: 544079 - DNA, 611 bp, Homo sapiens
aattcccaaggaatctccataaacaggcaccaaaattgtccactgttaaaatgaatgatgagaagctgtgtgttcttgaaaagcatctacatatgaaacataatgcacttcctttacccttctgtgaaaaaaatctacttcaatatatgaagcatggtcagaaaacagtttcagaatactttaaaaaaaaaaagaaaaaagaaaaaaaccagagtttcaggaataaataagaatttagggctggcaggtagggagcctatccactgaaaaattaactaaaaagagaagtaagatttccacagaatactgaaaagtaatcatcgtttattttcagtttttcctccccaagatggacatatggctatagaggcacaaaaatgtcttaccattctaatatttaaattgtcasacttacttaagtcacacttatttaagtcaagataccttgccatagttgacttaaaccaaattgtgaagcataagacctccatttctttatcttcccccagaccaagacctgaaaagttacaagaggtggctcaggactcagtttatagtcatttctagaaacatctgcattttaaaaagagcaaaccagaacatggccttgc

SEQ ID NO: 544080 - DNA, 640 bp, Homo sapiens
taaatattagaaagaaacatatttgcaagtaaggggtagttcttcgaatcctccctaaatcttaacatccctgagtgcatgatttcaccccaaactcgttttctctgcaccatgccaggacttcactgtgcacaccatgcatcctagagtttcttcagggtgtcaggcaccatctgccaagcgcttcattttggatggctgtcttatcttttcaagaagtctgtgaactactgagggttgattcaaaacttactttgtcttaaatacttttgcaaagggtagaaacatgcaagttcatggatttgtcagtagcaaactgtgggatttgggaaaagttctttatcacactacactgtcrctgtcataactagctgtcttcccctgtctctcctgctgagctctaaattatttgaagtcagatacctgctgtaacttatatcacatccccaaagcagaaagcccagcaaacgatttttctttttttaaaaatggcacaaaataaatttttgttcaagaaagtaattaatagcattgctatgtttgtaagtctgattttcttttttaaatttttatattttattttactttaagttctgggaaagaaaggtgccaatagccagtttgggtctgacagattaag

SEQ ID NO: 544081 - DNA, 640 bp, Homo sapiens
taaatattagaaagaaacatatttgcaagtaaggggtagttcttcgaatcctccctaaatcttaacatccctgagtgcatgatttcaccccaaactcgttttctctgcaccatgccaggacttcactgtgcacaccatgcatcctagagtttcttcagggtgtcaggcaccatctgccaagcgcttcattttggatggctgtcttatcttttcaagaagtctgtgaactactgagggttgattcaaaacttactttgtcttaaatacttttgcaaagggtagaaacatgcaagttcatggatttgtcagtagcaaactgtgggatttgggaaaagttctttatcacactacactgtcactgtcataactagctgtcttccccygtctctcctgctgagctctaaattatttgaagtcagatacctgctgtaacttatatcacatccccaaagcagaaagcccagcaaacgatttttctttttttaaaaatggcacaaaataaatttttgttcaagaaagtaattaatagcattgctatgtttgtaagtctgattttcttttttaaatttttatattttattttactttaagttctgggaaagaaaggtgccaatagccagtttgggtctgacagattaag

SEQ ID NO: 544082 - DNA, 640 bp, Homo sapiens
taaatattagaaagaaacatatttgcaagtaaggggtagttcttcgaatcctccctaaatcttaacatccctgagtgcatgatttcaccccaaactcgttttctctgcaccatgccaggacttcactgtgcacaccatgcatcctagagtttcttcagggtgtcaggcaccatctgccaagcgcttcattttggatggctgtcttatcttttcaagaagtctgtgaactactgagggttgattcaaaacttactttgtcttaaatacttttgcaaagggtagaaacatgcaagttcatggatttgtcagtagcaaactgtgggatttgggaaaagttctttatcacactacactgtcactgtcataactagctgtcttcccctgtctctcctgctgagctctaaattatttgaagtcagatacctgctgtaacttatatcacatccccaaagcagaaagcccagcaaacgatttttctttttttaaaaatggcacaaaataaatttttgttcaagaaagtaattaatarcattgctatgtttgtaagtctgattttcttttttaaatttttatattttattttactttaagttctgggaaagaaaggtgccaatagccagtttgggtctgacagattaag

SEQ ID NO: 544083 - DNA, 655 bp, Homo sapiens
gtggtgaccagcgtgcgcatagcaaggcaggagccggcagaggacctgtcagcacgtcccaggcgcctgcagaagacgggacaaagcacaggcaggagggctgaggacacccccggggagggcgctgaaagggaggagggagaggatcatcggagggtggaggccacttcctacgtgtgaccatggaggccatcctgcccctcggggctccacgtcctcagtgcgggctgggcatgcggcagcactcagggaatagcagagtcccatgggctggggacacagacacaaagcgtgggggcactggcacagagaagccagaggaggcctaggcttcgaggtggccccccatttcctaggactcctccctcccactttgtgcagaaaatcacaggaaacagaggctggcctcaggaggggatgctgggaaatcggcccaggcctcactgaaagctgagcaaagcccccgccaagctgaaatctgatcaaggtaaaaaacatcggtttcaagctgtcatgctgcacgcargcctttggatgtttggaacccgcaggccttccccatgactactgggctcacccgagtgacagggactgtgtggcataggggagggggcctgatcaaagacgagagttctagggtaataaaaggaagcag

SEQ ID NO: 544084 - DNA, 552 bp, Homo sapiens
tgactgcgtgggcgggaaaggcgggttcaggagacccagcctccctgggctgtcaccacctctgcacatccagccccattgatcaagggttcaatttttggggtcctgttgggaggccaggagactctctccaggcacttcttccaggtctttgtgttagggtgtgtgtgtgtgtgtgtgtgtgtgtgtgtgtgtgtgtgttgtttgttttattttatttatttatttatttatttatttatttatttatttatttattttgagacrcagtctcgctctgttgcccaggctggagggtggtggcatgatctcggctcactgcaagctccgcctcccgggttcacgccattctcctgcctcagtcttcctgagtagccggattacaggcgcacgcaccatgcctggctaattattttgtttttttagtagagacagggtttcgccacgttgcccaggctggtcttgaatccctggcctcaagcgatccgcccgcctcagcctcccaaagtgctgggattacaggcgtgagccaccgtgcccgcccagcctagg

SEQ ID NO: 544085 - DNA, 581 bp, Homo sapiens
caccagtagtcccaaggtattgaaaagcaagttgatggttctcgaagatattcagctattcaactagaaaaattttatttactttcacaggactgtaaactgcaccatatatttgttatacaacaaagatttttaaagttattttaggaaactttatttgttcacttaggctgttaaatatatttgttaaagaaattgattttgcttacaagccttaaatgcattcaccaagccttgagttaattaatccataagtctcttttactcacaagcctaatagtaattaactccctactttatacatactgagtgctttctttcattagcaagaaagcaccagattctagtgaagatttttctctctgcagtctgcttgaaataaaaagctcctctcgcagattcagatttaaacacaatatgaagatactttcttttctttgaaggtcaagtactattgaacacataggagatacagaatgaagaagacagaaagggcccctgatatcatggacttgacattctaaagaagaggctggyaaactataggctgcaggccaaatttactctctctgcctttgtca

SEQ ID NO: 544086 - DNA, 616 bp, Homo sapiens
aacacacacacacatcccccccacaaatagtgacagtgacttttaaatacattacagctcaaagaacaaaccaagtcagaggtggaactgtttgagataactcatataacacacatatacatgcattgagaaaagcakgtgtgatgaagaacagcctccaggagtatctgatcctcctttcctgcattgtgtgtaactagtaatgatgatatctgtaataagtatctattcttctcatcttgtaagatgaggaaggaaggtcctaatggagggactgctgtagccctgttaaatttcaataacccatctcctaactgtgttgaatctcaataacctatctcctatgttaaatttcaataacctgtctcctagctatgttaaatctcaataacctatctcctaactatgttaaatttcaataacccatctcctaactatgttaaatttcaataacccatctcctaactgtgttaaatttcaataacccatctcctaactatgttaaatttcaataacccatctcctaactaaatgtgagtctgtcctgtcagccagatcaacacttcccacccttaagggacatttatgagttgtcacttaattacagtgaccatat

SEQ ID NO: 544087 - DNA, 464 bp, Homo sapiens
tcacagggcaaaacacctaaacaataaagattcatagaattagtaatatacatcatacaaaggaaaaatataaaagtatctcatttctctaaaggttgaggtgtcagtgtaaagaaacatatcaattaactaaagctcaaaaatttagtaacaagctctcttaggtcctcattcactatccttagatttcagttctaacaaaatccctcratttagtaggttaaaatgtattagaaatattaaaaaaaaatgtgaaggagctgctagaaggagaaatactaacatcaaaaagacacaaattctgcttctgggaaaatggaggtagacatactttttctatttctcccgctaagtacaactaaaactcctgtgcatgatatatacagtttgccctccatatctgtgagttccatatctacagattcaaccaaccctggattgaaaatatttgggaaaaaacaata

SEQ ID NO: 544088 - DNA, 464 bp, Homo sapiens
tcacagggcaaaacacctaaacaataaagattcatagaattagtaatatacatcatacaaaggaaaaatataaaagtatctcatttctctaaaggttgaggtgtcagtgtaaagaaacatatcaattaactaaagctcaaaaatttagtaacaagctctcttaggtcctcattcactatccttagatttcagttctaacaaaatccctcaatttagtaggttaaaatgtattagaaatattaaaaaaaaatgtgaaggagctgctagaaggagaaatactaacatcaaaaagacacaaattctgcttctgggaaaatggaggtagacatactttttctatttctccygctaagtacaactaaaactcctgtgcatgatatatacagtttgccctccatatctgtgagttccatatctacagattcaaccaaccctggattgaaaatatttgggaaaaaacaata

SEQ ID NO: 544089 - DNA, 417 bp, Homo sapiens
tgctctgtatatcagtcccatttatgcattccaattccaaagaaatagccatcagatagggagccaacatgatgcttctggtctctatttacactgatgacatcatgttgataaagtgagatgagcaagatgtggatagcacagtggagtccatgataagaaatttgcattccagagcatgaaagataaacctktcaaagattcagtaaactaccactcaagtagaacttttaagggtccagtggtcagggtcatgctgggatgtaagtgtaagataattagctgcatattgcctccttaatcactaaaaagaagcacagtatctgttagccctctttgaattctagggcaacacatttcatacttagcagttatattttaagccaaatacagggtgacccagacatcttccagcat

SEQ ID NO: 544090 - DNA, 602 bp, Homo sapiens
gttaagaaagtattccaagacagaaaaaaataatttcaactgagtgtttttaggaaatktttcttcaggaaccgctgatttggaggttaaaccttctcatttactggtaaataacgttttgttacctgccataatatttcaattggttttatgttgaaatgccttaaggtaaaatttgactttctattttattctttaaatgaagactaatttaattttgggagataaaatttggggagatcattattatcttctctcctcaaattttacttaatttggggagataaaaatgaaaaagggtctgattttctcaagtctggtgaagtagaagtaggaattttgtttgttttatgaagtaggtaagcactgataatttgagctaggtcatccagtgcctttaattacttatctgagccatctcagagtttttgaaatgctaaacaagaccaaacattcaataataaaccattattctaatttgtattaaaatatattaaaacaaagcattttttttacaggagaattttggctaggactgaaaaagattttttatatagtaaatcagaaaaataccagttttatgctgtatgtggctttggaat

SEQ ID NO: 544091 - DNA, 649 bp, Homo sapiens
gcaagttttagagatcaggcacctaggttttacctataaatggctcatgactggtggtctttcttgacccttacatagatattcacctcaggttttcccctttcacaaagaatgagatctgccttttgtcatcaaccagaagtgatctagatggaaaaaatctggcaatggctgccycttactattcttattggaaaaactggctttgctgattgaggtaacccactcatccttgttccttcccttccctgaaaagatagcaatgagccttggagacttgaggaatgtggcatgatgtttgggctcatgggcagcaaaactagaaagaagagtggaaccaaatgaatcttggatggtggtgttcatcacttgtcctgagtactacacatgtacattttagttgctcttttcagtcctcatctttgtgtccttcttttttcaggatttgaagacctgttgtggcagcagcaagccagtctcatgctgcatggatgggtaaagactatatgtgaaagtccttctgctctagtattggttgattctcaggtagctttttttctttgctactagtatttggtatggtgaacagagaggtttataggaatgggtccactgttctcagcccactgaacttacatggattgttaca

SEQ ID NO: 544092 - DNA, 650 bp, Homo sapiens
tgcaagttttagagatcaggcacctaggttttacctataaatggctcatgactggtggtctttcttgacccttacatagatattcacctcaggttttcccctttcacaaagaatgagatctgccttttgtcatcaaccagaagtgatctagatggaaaaaatctggcaatggctgcctcttactattcttattggaaaaactggctttgctgattgaggtaacccmctcatccttgttccttcccttccctgaaaagatagcaatgagccttggagacttgaggaatgtggcatgatgtttgggctcatgggcagcaaaactagaaagaagagtggaaccaaatgaatcttggatggtggtgttcatcacttgtcctgagtactacacatgtacattttagttgctcttttcagtcctcatctttgtgtccttcttttttcaggatttgaagacctgttgtggcagcagcaagccagtctcatgctgcatggatgggtaaagactatatgtgaaagtccttctgctctagtattggttgattctcaggtagctttttttctttgctactagtatttggtatggtgaacagagaggtttataggaatgggtccactgttctcagcccactgaacttacatggattgttaca

SEQ ID NO: 544093 - DNA, 395 bp, Homo sapiens
tgtcaatatagatgaagcatcccaaatctgaaatctgaaatgctccaaaatatgaaactttttgagtgccaatacagatgtgacactcaggggaaaggctcattggagcactstggatttccggacctgggatgctcaactggcaagcattaatgcaaatattccagaacccaaaacacttctcaagcattttgaataagggatgctcaaacctgtacttctgagttgtctcaccaactatattcaattttttaaggctgtcttgtcctgtccctttacacaatacatgtatttagtttggttactttcagctcactgaaagtgaagtgaaaaagaagattcaccagaacttcacaagcttccctcaaaaagccattgaaaaagattattctgag

SEQ ID NO: 544094 - DNA, 494 bp, Homo sapiens
atgcatgcctattgccaaccacatcttgacattttctgtggcttttaggggttaagttttgaagcaaaaagggtgactcagaggcccagagaactccaaggttgtaaccctagagaccaggcgagcatcctaccaagatcaggtggatcatctcagttccccaacaggcagggagggagaatcacctggaacccttgtgttttttaaatttatgttttatagagataggatctgggtctcactctattgcccaggctggcctggaactccagggctcaaacaatcctcctatctcgtgggattacaggtgtgagccaccttacctgacctggaacccttgctaaaatgcagactcccagacccagcccaccctattgagtcgaaatctctctattttttgttttaggcaggtcctgacaaagttgtgtgtatgtgcatgccgtgcaggkgtctttcagcccagccctcacctctgctaggcacagccccttggc

SEQ ID NO: 544095 - DNA, 517 bp, Homo sapiens
gctgagagcaaacattcactgtccttggcctaataaatgacttgagtctctcgaccttctattgaaagtcaactcacttcattcacaccccagcattcttcctatcaaatctcatgcrtgttctagttcacttgtaattagcaaaatgtacgaccttctccagagacccccacagcctgtttacagtctcctcccagaggcctctcagaagctggcaatgttgttagtagccacttctcacacacttaaacttgctgagatttcaagcttctcaagactcctttctcccaagaatttcaatatttggtttcctttgaatatcttatggaagtgctaccttgattacttttccagttcccagaaccttccacaattacgtggagtaatagaatcaccaaactgacttctagcagtccttgtgtcttttctgcctctgggcaggacaataaaggcacaaagtatttttccaagaacaataggacacaaacctggcaaggcacaaaacgtgtatgcgcat

SEQ ID NO: 544096 - DNA, 517 bp, Homo sapiens
gctgagagcaaacattcactgtccttggcctaataaatgacttgagtctctcgaccttctattgaaagtcaactcacttcattcacaccccagcattcttcctatcaaatctcatgcgtgttctagttcacttgtaattagcaaaatgtacgaccttctccagagacccccacagcctgtttacagtctcctcccagaggcctctcagaagctggcaatgttgttagtagccacttctcacacacttaaacttgctgagatttcaagcttctcaagactcctttctcccaagaatttcaatatttggtttcctttgaatatcttatggaagtgctaccttgattacttttccagttcccagaaccttccacaattacgtggagtaatagaatcaccaaactgacttctagcagtccttgtgtcttttctgcctctgggcrggacaataaaggcacaaagtatttttccaagaacaataggacacaaacctggcaaggcacaaaacgtgtatgcgcat

SEQ ID NO: 544097 - DNA, 533 bp, Homo sapiens
tgccctttctcccaggcttctatttcaggagagtataaggtgactctgggtcattaggcttctatctaatttcttgctcagctattttgaggctttgagattttcctgtgtcaagtttcactccaaagaggctaaaacaagaaaaaatgcmctttttatttagatagaggtattcagatccaacattagagattttcgaaatcacagatttaagacatgtcaaagtggcttacaaagggaacttgcaaatcttttgtttggggtgtgaataatgataggagtagaagacgggcagcgtttcatcaatggtaagaacaatgaaggcaggagtcatttttatttggttcatcataatgtccttgaaacctagcaaagagagtaccatacagtaggtgctcagcagaaggagagtgaatggtgtcagtccttttccattccaggtctctagaatagatctgctgagaatgcttaaagtcaccatcttgttggtgaggcatttggagagagcatgagccagtgggtcttgtagaacg

SEQ ID NO: 544098 - DNA, 298 bp, Homo sapiens
aaaagcaattactaggaaatattctttcccaagttacatagatgtaatagagacacatgagaaatgtagtagagacactaatcaattcagacagtgcarttaagccccacaaagagtactactacttcattcatccatctgtccactcattcatccttccttccatccatctgtgcaatcgtgtttactctattgcatgcactaagtgctgtggttgccaaggtaaatatgtcacagttcttcctctcggggtgtgcacagtttcattgagagacatacaaatgggcaggcaattata

SEQ ID NO: 544099 - DNA, 298 bp, Homo sapiens
aaaagcaattactaggaaatattctttcccaagttacatagatgtaatagagacacatgagaaatgtagtagagacactaatcaattcagacagtgcaattaagccccacaaagagtactactmcttcattcatccatctgtccactcattcatccttccttccatccatctgtgcaatcgtgtttactctattgcatgcactaagtgctgtggttgccaaggtaaatatgtcacagttcttcctctcggggtgtgcacagtttcattgagagacatacaaatgggcaggcaattata

SEQ ID NO: 544100 - DNA, 298 bp, Homo sapiens
aaaagcaattactaggaaatattctttcccaagttacatagatgtaatagagacacatgagaaatgtagtagagacactaatcaattcagacagtgcaattaagccccacaaagagtactactacttcattcatccatctgtccactcattcatccttccttccatccatctgtgcaatcgtgtttactctattgcatgcactaagtgctgtggttgccaaggtaaatatrtcacagttcttcctctcggggtgtgcacagtttcattgagagacatacaaatgggcaggcaattata

SEQ ID NO: 544101 - DNA, 447 bp, Homo sapiens
gagctcacagtcttatgaaatagagaattactgaaaatgctacagcagtatacacagggtgctatggaaatagagtggtggcatttagcccccccattgctgggattcaccagttagggaaggctccctggatatttcccctactataggcggtgggaatacgtggacgtctcctgggttaaagtggcagttttgcaaactgtggggggaaattacattgaaggtaaaattgtgaggaaaagcaatatgtgtaggaaagtgacttcagcataaagttcaaggtgaggaatggtggaaaagaaagctaaaaaggaaaggagtggctaggctatgtatgaggccacccatgaagaaccrcacatagaatgtaaacttatttttaggaaaaaatacatgaaaaaattataaagatttataattcaggaaaaatctcagtagaagtgctaa

SEQ ID NO: 544102 - DNA, 482 bp, Homo sapiens
gcaaaatctcaataatggggaactagaaaagtcttgaatatgtgtgtgtaggtgttggtatgtctctgtaaaaatgtaggtgtatacgaatatttgattctttatataatacacatgcacagaggtaatctgaatatagatacataatgaggcaataccttgtgattaagwgaatggatatgtagctgtattacctcagacattatacattctgtttcgagcatttgtaattccagcaatgtattattctggaaactcttctactacttggtatttcaatttttatatctataaataaggatgataactatacttatctcataggtttgttgagtattatatgagtgaatgtacatatattatttagaacaataaattgcaatgcataaaacaaggaatagagattgccaagacatattaatgttgttaatattaacaataattataataatagctaccactggctgggctcttactgttat

SEQ ID NO: 544103 - DNA, 482 bp, Homo sapiens
gcaaaatctcaataatggggaactagaaaagtcttgaatatgtgtgtgtaggtgttggtatgtctctgtaaaaatgtaggtgtatacgaatatttgattctttatataatacacatgcacagaggtaatctgaatatagatacataatgaggcaataccttgtgattaagagaatggatatgtagctgtatkacctcagacattatacattctgtttcgagcatttgtaattccagcaatgtattattctggaaactcttctactacttggtatttcaatttttatatctataaataaggatgataactatacttatctcataggtttgttgagtattatatgagtgaatgtacatatattatttagaacaataaattgcaatgcataaaacaaggaatagagattgccaagacatattaatgttgttaatattaacaataattataataatagctaccactggctgggctcttactgttat

SEQ ID NO: 544104 - DNA, 529 bp, Homo sapiens
cctcttgaatctgatcttggctcatgggatttgctttgtccaatgaaatattagcaaatataacagaggcatgaaaagtgcttgtaaactggggattttcctgtttcttcctgtacctaaaaagcctacaacyacatgaaagagcctaagctagccttctggatgatcagagacatgaccaagtcattcccattgcctttgctaacaaggcatcaatcacaagcaatgtgagtaaggccaaataacaccatcaagtgcgtcatgggtactgcagagataaactgaggctgcccagaccagaagaaccaccgagctctaacccttggaattgtaggaaagaatacatgctattttattttaagtgaataaattgtgggctgatttgttatgctgcaaaagctaactaaggcaatatgcattcttcatgtacattgggcataaagtgaattgaatttccataaacagtttctccagccttaaaacacatatccacaaatggaaagacacacactcctcctcaaatttttgt

SEQ ID NO: 544105 - DNA, 529 bp, Homo sapiens
cctcttgaatctgatcttggctcatgggatttgctttgtccaatgaaatattagcaaatataacagaggcatgaaaagtgcttgtaaactggggattttcctgtttcttcctgtacctaaaaagcctacaactacatgaaagagcctaagctagccttctggatgatcagagacatgaccaagtcattcccattgcctttgctaacaaggcatcaatcacaagcaatgtgagtaaggccaaataacaccatcaagtgcgtcatgggtactgcagagataaactgaggctgcccagaccagaagaaccaccgagctctaacccttggaattgtargaaagaatacatgctattttattttaagtgaataaattgtgggctgatttgttatgctgcaaaagctaactaaggcaatatgcattcttcatgtacattgggcataaagtgaattgaatttccataaacagtttctccagccttaaaacacatatccacaaatggaaagacacacactcctcctcaaatttttgt

SEQ ID NO: 544106 - DNA, 569 bp, Homo sapiens
atgtgagctccttatttggtagattcataccagtactgactcataatgaagctaacaaatagccattgaaaacctacaggtctaaatacttcatgttaccttttctctcgcaactactacaatagcatcctacacatgtccaggccttctttcttactcaagctggacagttggttttccataaagcagaaagcaggctgcctttacrtgttattaacttatacctctcctctgctctggccattgtctatctcattatttcaccacctatcactcttcttgtcacagactctttgtctgtattgattcttctctcatctgtattagttattctttatgtacagtatctgtttccttttgagggttttgacatttgtctttccctgcctgcctgaaatactgtttcagatattcatgtggcttgtatttccatgttcattgcgtttttccttagagacctcttcagagtgaacttacttgatcattctatgtttaataacaccttgccaccccatctcccccaatattactcactatcattttattccatttaatttctttatgggaat

SEQ ID NO: 544107 - DNA, 549 bp, Homo sapiens
ttttgatctatgaattttatacgaggccatagggctgcgtgccaggcagtgtttgtgttttctaagctcattacatttaygtgtccaaatactccagtagatatttatctgaggtcaggagaatgggtggggaaaaacttcttgccaactgtctaaaaatgtcagttatgtgaaacttgttggccagaattcacaatctgtagacttaaactcaattagaagacacctccaagaaagcaattaatttggcactgggcacttttcctaattctaggggtgggtttattcatatccccttgttgctataacaaattaccacaaatctggcttgaaacacagttttatcaccttgcacttctggtgttcttcagtctaaatgcattcccagggctgtgttacttctggtggtgctgagattatctgtttctatggcttttcaagcttctagaggctgcctgcagtccttgaattatggttactaagacctctgtttctgttgtaccatctccttctctccactctgaccctcctgacgactcattcctataa

SEQ ID NO: 544108 - DNA, 575 bp, Homo sapiens
tggtaatccagtcaatggaatgttgttcagctcrcaaatgaaatgagctatcaagccattataagacatggaggaaacctacatgcatattgctgagtgacaaaagccagtctaaaaaggctacatattgtatgtttccaactaaatgacattctgggaaagacaaaaaactgttgagacagtaaaaagatcagtagttgataagagttgagagagaaaaatataaataggttatgtatgatgatttttaagacagcaaaattattttttatattacatggtgaatacatggcatcatttatttcacaaattgcataacaagaataaatcctgatgaaactgtacacttaggtgataatgatgtgtcaatgtaggttcatcaattgcaacaaatgtaccactctaaagggagatgttgatagtgaaggaagatgtgggtatatggaggtaagggcgatatggaaacagtaatttccattcaattttgctgtgaacctaaagctgctctaaaaaataaggcctattttaaaaagcaaaatgatatatatcactttgcaaggaaaaaaggaggaaac

SEQ ID NO: 544109 - DNA, 575 bp, Homo sapiens
tggtaatccagtcaatggaatgttgttcagctcacaaatgaaatgagctatcaagccattataagacatggaggaaacytacatgcatattgctgagtgacaaaagccagtctaaaaaggctacatattgtatgtttccaactaaatgacattctgggaaagacaaaaaactgttgagacagtaaaaagatcagtagttgataagagttgagagagaaaaatataaataggttatgtatgatgatttttaagacagcaaaattattttttatattacatggtgaatacatggcatcatttatttcacaaattgcataacaagaataaatcctgatgaaactgtacacttaggtgataatgatgtgtcaatgtaggttcatcaattgcaacaaatgtaccactctaaagggagatgttgatagtgaaggaagatgtgggtatatggaggtaagggcgatatggaaacagtaatttccattcaattttgctgtgaacctaaagctgctctaaaaaataaggcctattttaaaaagcaaaatgatatatatcactttgcaaggaaaaaaggaggaaac

SEQ ID NO: 544110 - DNA, 602 bp, Homo sapiens
agcaaaaaaagtatatttctttagttcacaaacctaagatattctgttgaattttattaaatrgacattaacaaattataatagttatgtatttaaatgtttgctttaatttacctatctcaggaaattgtgcattactttcacattcccttaggacttcttggcaaaatgaggtattcttctagtcatccagtttcaagtattttatttaaaagttggagacctggcttttcaaataatctttaaattggcttaatcttgggaactgaaatacttttgtttaatacaatagcttaaatcagactcccctgggctattctgctcttccatttgaattgcaagaaaagcacatttcagctaatctttctgcctccatttttggatgataggtttagatgccccactagaactcaacaataaaactacaccctgtgacttctttccttgaacttcttttgtttagaagcaaataaaaagaaacctgacattttattttataacattgctcagctttcctactgatgttttggtttatttttcccattttaatagtgaattcctgagccaaatacattttaactgtaacatttggattacttaga

SEQ ID NO: 544111 - DNA, 602 bp, Homo sapiens
agcaaaaaaagtatatttctttagttcacaaacctaagatattctgttgaattttattaaatggacattaacaaattataatagttatgtatttaaatgtttgctttaatttacctatctcaggaaattgtgcattactttcacattccsttaggacttcttggcaaaatgaggtattcttctagtcatccagtttcaagtattttatttaaaagttggagacctggcttttcaaataatctttaaattggcttaatcttgggaactgaaatacttttgtttaatacaatagcttaaatcagactcccctgggctattctgctcttccatttgaattgcaagaaaagcacatttcagctaatctttctgcctccatttttggatgataggtttagatgccccactagaactcaacaataaaactacaccctgtgacttctttccttgaacttcttttgtttagaagcaaataaaaagaaacctgacattttattttataacattgctcagctttcctactgatgttttggtttatttttcccattttaatagtgaattcctgagccaaatacattttaactgtaacatttggattacttaga

SEQ ID NO: 544112 - DNA, 602 bp, Homo sapiens
agcaaaaaaagtatatttctttagttcacaaacctaagatattctgttgaattttattaaatggacattaacaaattataatagttatgtatttaaatgtttgctttaatttacctatctcaggaaattgtgcattactttcacattcccttasgacttcttggcaaaatgaggtattcttctagtcatccagtttcaagtattttatttaaaagttggagacctggcttttcaaataatctttaaattggcttaatcttgggaactgaaatacttttgtttaatacaatagcttaaatcagactcccctgggctattctgctcttccatttgaattgcaagaaaagcacatttcagctaatctttctgcctccatttttggatgataggtttagatgccccactagaactcaacaataaaactacaccctgtgacttctttccttgaacttcttttgtttagaagcaaataaaaagaaacctgacattttattttataacattgctcagctttcctactgatgttttggtttatttttcccattttaatagtgaattcctgagccaaatacattttaactgtaacatttggattacttaga

SEQ ID NO: 544113 - DNA, 645 bp, Homo sapiens
ctatacagtggtttaagaccaaaggctcagaaattagcctagctgggtttaaatcctgccttcactagttactgaaattaaaattcagcaagttatttaactcatcaatgcctctttttcttcatttaaartaagaatcatatttgatatttaaggctgttgtgaagattaaaatgaaatagtgcatttaaagttttcagcataaggacaagcacatgagtaaatactgaaaatagttaaatagttttataaatatttaatgcagagaagagacgatggagacacagaagatcttgtaccctagaacatctgaatattcaaattttcaatgagttggaaccatgaattagccaaatttcctgtttacatgaggtcatctgacttttggtactagcctctctggtattagaataaaagttttgataatactcttttaagttcatgaaaatgaatatttgatattgtcttagtcctttggggatgctaaaataaaataccatagactgtgtggcttataagcaactgaaatttatttctcgcagttctagaggctgggaaattcaagataaaggtgccagtgcattcatggtctggtgagggcccatttcttacttcataaacagtaccttctcactgtattttcac

SEQ ID NO: 544114 - DNA, 645 bp, Homo sapiens
ctatacagtggtttaagaccaaaggctcagaaattagcctagctgggtttaaatcctgccttcactagttactgaaattaaaattcagcaagttatttaactcatcaatgcctctttttcttcatttaaaataagaatcatatttgatatttaaggctgttgtgaagattaaaatgaaatagtgcatttaaagttttcagcataaggacaagcacatgagtaaatactgaaaatagttaaatagttttataaatatttaatgcagagaagagacgatggagacacagaagatcttgtaccctagaacatctgaatattcaaattttcaatgagttggaaccatgaattagccaaatttcctgtttacatgaggtcatctgacttttggtactagcctctctggtattagaataaaagttttgataatactcttttaagttcatgaaaatgaatatttgatattgtcttagtcctttggggatgctaaaataaaataccatagactgtgtggcttataagcaactgaaatttatttctcgcagttctagaggctgggaaattcaagataaaggtgccartgcattcatggtctggtgagggcccatttcttacttcataaacagtaccttctcactgtattttcac

SEQ ID NO: 544115 - DNA, 565 bp, Homo sapiens
tgggactctatccagagtcttctgtcacatgggaaaatcatcctggctggggtatcatcctactgttaataaagctgcacagagagtcccagtacagtggctactgcctgtaattccagcactttgggagaccaaggtgggaggatcactgaggccaggagtttgagaccagcccaggcaacatagtgaaaccccatctctacaaaaaatttaaaaattagctgtgtgggggcactcatgcctgtaatcccagcacttkgggaggtcaaggcaggaggatcacttgagcccaggagtttgaggctatagtgagccatgattgtgccactgcacttcaacctaagcaacaaagagagatgtggtcttaaataaataaatatatatataaataaatagagctacaatggagaggcttctattaagatcagcaggcaagtgcctccaaggaatcagcccacagccagactgaagggagctgggcagggagctcctcagaagagctttacagtcttcataaaagcttttacaggtactttcagaagagtgaatagagaaccaagaccca

SEQ ID NO: 544116 - DNA, 521 bp, Homo sapiens
taggaggtgttcttcctcaccacccttagggtacacctggaagctataaaacgttagctgcagtgtcacactagggtgtccaatcattaagtcactgtcacttggtctcttttgtttctgtgttgccctacaccagggtcacagggactagcacctttggctactttcttctgagtctgacagtacccaacgatctaaatctaaaaggattttgttgtttccttattcactgaatctatcagccttgcttggccttgtgcttgacagtagcaacctattttctagcaaattgttggtaaattttcctgacactatttactaaatagttcattctcttttccattgtttttcttatttcttctccttttagaattttttttcctatrtactaaattattttgtagctgtgctagtatctgaccttttattatggtccatttttccttcatctctttattctggggacagaaccacactaatttttgtacatttataatgcatttaaaaattggtagagaaaa

SEQ ID NO: 544117 - DNA, 457 bp, Homo sapiens
gcaaggctacaccaccccgttcacccaggaagcagttcattcaggggacttgagattgtgatctgtgtttccaggggctgtggacaccctggtggccctggcttgggcactcctgcatactgtcacagccaggcctggagcctgttccaaagtgsgaaggcaaagaaagggaagtgggggacagcacatgaccttggcacctggacccctggagtcagggctggacccatgtccaggcctggtcagggattatggcatggccttgaattgactctgataccctctgaacctcagggacagctgggaaagagtctggatgaaacctcagaagcactgttgtggatttggtcaaagactccgcaggtttcaatgttcttaggaaacaaagccgccaacctgcaggcccctaggtcaggccagcctctgggtccctgttctttcttgcctgattgtgggt

SEQ ID NO: 544118 - DNA, 457 bp, Homo sapiens
gcaaggctacaccaccccgttcacccaggaagcagttcattcaggggacttgagattgtgatctgtgtttccaggggctgtggacaccctggtggccctggcttgggcactcctgcatactgtcacagccaggcctggagcctgttccaaagtgcgaaggcaaagaaagggaagtgggggacagcacatgaccytggcacctggacccctggagtcagggctggacccatgtccaggcctggtcagggattatggcatggccttgaattgactctgataccctctgaacctcagggacagctgggaaagagtctggatgaaacctcagaagcactgttgtggatttggtcaaagactccgcaggtttcaatgttcttaggaaacaaagccgccaacctgcaggcccctaggtcaggccagcctctgggtccctgttctttcttgcctgattgtgggt

SEQ ID NO: 544119 - DNA, 539 bp, Homo sapiens
tgtctcatacatacacaatgcgaacagatgagcacatcstctgtgcctggccctgctagggcctgtgcatgtattatctcatttaaacctatggggtaggcacagtttagctcatgctagcatactctcctgcctctgtgcctttccccacaatgtgcttcctgcctggaactcttggcctgcaccctcaccccttttcccatctgttaaacttctatgcctctttcaaatctcagagccctgtctcctcctctgggaagccccctgccctgagctcacactcccctgtagtctgtccctatgctatgggaaagacttctttctgcacttcccccatccccagatggagagcccccaaaaggcagaagctgggttctgctcttcctgggagtctgtccccagttccagcctggagccatatgtggcacctgcttagctggattggacatgtaaatgaaccaactttgctgagtgagcaaacaatagcgaagacaccccctgcccattcattcattaactcattcattcaccactcattt

SEQ ID NO: 544120 - DNA, 371 bp, Homo sapiens
cacaatgcgaacagatgagcacatcctctgtgcctggccctgctagggcctgtgcatgtattatctcatttaaacctatggggtaggcacagtttagctcatgctagcatactctcctgcctctgtgcctttccccacaatgtgcttcctgcctggaactcttggcctgcaccctcaccccttttcccatctgttaaacttctatgcctctttcaaatctcagagccctgtctcctcctctgggaagccccctgccctgagctcacactcccctgtagtctgtccctatgctatgggaaagacttctttctgcacytcccccatccccagatggagagcccccaaaaggcagaagctgggttctgctcttc

SEQ ID NO: 544121 - DNA, 593 bp, Homo sapiens
ggcttggcgcctggaacttagggtctctgagcctccggtgtccatggagactgagaggaaattgagactatctatgggctctggggccagggaaggtgctccctcagggacataggtggccttcctaactcgagttcttttatggcccaggaagagctcttcctgctgggatgctacggagctcacacttggaattctggtatattcctttctccctccccatcctcacctgtctgtgtttgacacatgytcctagacccaaatttaaggctctctcttacaggaagccccccaccgcagtccctcatctccccactgtgtgcaccccccgggcactgcccatggtctgccatagagaccccgtgcgcccgtctcctggctgcgtctgaggtcagggctgcccggaattcctctcagatcctggccctgcctgcagtaggtgctgcctgcagtaggtgctcagtagctgtgggtgggatttatctgaatacagcacatgcccctccccatcttgcccggtccagagtccagggcaagttagggtcggactgtgtaattaaacagggcttgagtgctactggcacgcccccagt

SEQ ID NO: 544122 - DNA, 568 bp, Homo sapiens
ctgctttggaaatttctatgcatttgtaataacaaaattaccataatttgctcgttaacgcagctagatcagtcaagcattgttccttcgcgggcgggaaggccgcggtgcctctctctgcacactctccacaccccagcccgcctgccagcccgttagagtgctggaaattagcatgcaaatggtcctaattcggtgggcgagctgtcaggcagcgcctctcyggcctcgtctctgtgaaggccctgacagcccggctccggcgccggcccaccctcctcactccagccaggaggggctccgaggggcacctctagactgacagcttggcggcctccctccctccgtcagcgccatcagccctggcggcaggctcccaggggagcaggcagggcctgccaccatgctggccaggccggaggaggcaggcaggccggtgggctgaggggggaggctggcccacgctcaggcccaccagccttagctggcctgggccgatgggggcaggtgagggtggagttggggtcccctgactcagggtccggctggggcacggggaccctcacag

SEQ ID NO: 544123 - DNA, 598 bp, Homo sapiens
tgctctggagtcctcattcaatatctactgtcctctctcccagtcttggaagattgtcttagtctgggcaggaagaaccatcccctcctccctcccaacccctgcagaacctccagcaacattccctagaagggagggcagctacgaggcaactgggaaggccagggtggctttctatcttaataagagctcccccaaagcctggcaactgctccaacagctagacttgggtgtaaggggacaacagagggcttcaatgtatatttctcctactactactatttttttactccagcagactttccactgcaactgggattctcttgcatagatggaagcctctggaataagtaggcctatttacaggcagatgagagcttcaggaagctactatttcctacagtcctaaacgttcattccgctactcaattattgttatttatcaaaggcatccaaacttactaggcattatggttcttagccctggctgcacctcagaatcccacsagggagctttaaaaagtgcccatgcctgggtccccatcctccagacattgactcagtttgaagtagggtccagtcacagatgaatttttgc

SEQ ID NO: 544124 - DNA, 524 bp, Homo sapiens
ttcaagagtgccaaagttcaaaaatcctctataccttgcatctctaaaccaaatcatgggactagtacaggagcctccgccaacaagaaaagtcagaagaggggctttgttttgtctcctgatttttctcaattttctaaaatgaacatgaagtgcttctttagacagaaaaatgaaaactaaaccaactttttttcccaatgaccaccsccccacctcctgcagtcttccttcaaacccttcccaggagcagtgcagctcagagctctctaccctacctgagcactcagcatgttcagcacagcctgcactgaattagctcctcaaaaacagaaacattgatgcaaccacagcaaggctgagtgccaggcaggccaccaggagactgggctggaatcagctgtcagctacctagtgatccaattaagaaatgttggttaatactgggggtacaattaaaaatacatcagccatatttttttaagcctcttgtgattttttcaagaacttccttgaaataaaaa

SEQ ID NO: 544125 - DNA, 662 bp, Homo sapiens
agacaaagcctttggataagaaggtgataacattctgtccggctagatgatgaggccctccagaaaatggatattccatgcrtatggtgtgcttggccctaagcaagacccctgtgagagcaacgaatagggcagaatgtgcttgcaggttgccagatggattaaggcaggtgcgtaggagacaggacaagcctgtacacaaattgtgtgttgcacgccatgttctgaccttctattgctgcctttcatggtgcccatccgaacaacatcctgtctatatagatagcctctaagatatttttttccttaacaaatgcctgccttctattccttctacctgtagtcatttgggggctttctaaatctctggctatgttatagaactttttattcttccttattcccagccttcatatatccagataaatattggtgtgattagtcactgagaagccttagacccatacagatcaaccgctctaatgccccatcctgtggctggtgtcagccggtgctgttcaacaactcctaaatacagaatgctgcggttgctgagcctgtgggatctcacattgttagaaggtggttctgctcttagtaactgaggggggcctcctgggtcctgcctactgactccactttctgcctttggagttaaaaga

SEQ ID NO: 544126 - DNA, 459 bp, Homo sapiens
cagcttgagcaggagtggcaaaatgcttgagtccgatgacaacttagatgtgtgaggatttttcagcctaatttatggagtaacacatgttaaaatagaaggagaccataaacttttagctagagcataaaaatgtaatcctaaatgatatgcctccccacactcccaggctggcaagggtgggcatgcaaagattactggaggcaccagcaggtgggtgcttatagatggctctggagcgggggcaccacctccgtctgtgtgggctctcttgggactaatcacgtagtgatgttatttgcttttcttcactagcctgggagcaccctggggtagaggtcctgcctatcatttttttttttttttttttgttctgcagtgcttarcaaatgcctggctctaggagtgtttgttgaataaatgggtgaagaaaggaaggaagactttgtgtcttatata

SEQ ID NO: 544127 - DNA, 633 bp, Homo sapiens
caattcactatagatttaattattctgtcagtgttttgaaggatgacctgggggagggtgggtgttgaggtagagagttacaggggatcagtgtggctcaggtaagagatgatgctggcatggacttcattggtgacagtagcgttggataaagttgaatggatttcatgtgtacattgaaggtcgaaatgatggcacttagtgtgatggctgggatgggagaggtgtcaagactgacttctagcttttagttctatcatcaaaatggaaaagttacatgtaagatacactgttaaaattctttcctagaatgtattgggctacctttatgcttttttgtacctaagaaagtggagctaaagaaaatarcttcctttggatgtgggtctgtattagtctgttctcacactgctaataaagacattcccgagactgggtaatttataaaggaaagaggttttttaattgactcacagttcagcatggctggggaggcctcaggaaatttacaatcatggctgaaggggaagcaaacacgtgctttgtcacataatggcaggaaggagaagtgctgagccaaagggggaaaagcctcttataaaaccatcagatctcatgagaactcactatcag

SEQ ID NO: 544128 - DNA, 527 bp, Homo sapiens
taatatccctattttacagatgagacactgaggctgaagaagatttacttgccaaagatgcatagatagtaatagatgacagaaccaggaacacaacacaagtctgtctgaggcaaagctcactttctaatcttctttctaatgcttctaatctgatctctctgctttccaatctcctgccrtattatactgtgcattacaaatttcttttgccaatattgtccatttcctattctgctagcttctccaccttcttaattctaattcatattcttcaaggaactcttgaaagagttgggccctatatttttcataataacccattgctttacatgcagtcctgaatgtgagtgtgtaatagtaaagtcgaaaggaaatcagtgccagggtgacatggaatttctaccaccgatgatgccagatgaaaggacatgtgaggaaacatacctgggaaatctaggttctttggagaaatctggagtcctttgaaacactgccaattgcaaatgccttatcttgcctcttga

SEQ ID NO: 544129 - DNA, 610 bp, Homo sapiens
aatttacggtataagcagcaaatatttatgtacatattttatttgtcagacgctttactagccattttggtattttgttctcacaatgatgtaggtattaatatccctattttacagatgagacactgaggctgaagaagatttacttgccaaagatgcatagatagtaatagatgacagaaccaggaacacaacacaagtctgtctgaggcaaagctcactttctaatcttctttctaatgcttctaatctgatctctctgctttccaatctcctgccatattatactgtgcattacaaatttcttttgccaatattgtccatttcctattctgctagcttctccaccttcttaattctaattcatattcttcaaggaactcttgaaagarttgggccctatatttttcataataacccattgctttacatgcagtcctgaatgtgagtgtgtaatagtaaagtcgaaaggaaatcagtgccagggtgacatggaatttctaccaccgatgatgccagatgaaaggacatgtgaggaaacatacctgggaaatctaggttctttggagaaatctggagtcctttgaaacactgccaattgcaaatgcct

SEQ ID NO: 544130 - DNA, 610 bp, Homo sapiens
aatttacggtataagcagcaaatatttatgtacatattttatttgtcagacgctttactagccattttggtattttgttctcacaatgatgtaggtattaatatccctattttacagatgagacactgaggctgaagaagatttacttgccaaagatgcatagatagtaatagatgacagaaccaggaacacaacacaagtctgtctgaggcaaagctcactttctaatcttctttctaatgcttctaatctgatctctctgctttccaatctcctgccatattatactgtgcattacaaatttcttttgccaatattgtccatttcctattctgctagcttctccaccttcttaattctaattcatattcttcaaggaactcttgaaagagttgggccctatatttttcataataacccattgctttacatgcagtcctgaatgtgagtgtgtaatagtaaagtcraaaggaaatcagtgccagggtgacatggaatttctaccaccgatgatgccagatgaaaggacatgtgaggaaacatacctgggaaatctaggttctttggagaaatctggagtcctttgaaacactgccaattgcaaatgcct

SEQ ID NO: 544131 - DNA, 647 bp, Homo sapiens
cgtggttgttaaaaactttgaagggtatgagatttgaccctacttataagctaacaagagacatgtgaatcttgagcaaaaggcaaacgtgagcttcatgtttgcattggttgcctttgtcacccaggtcccatggagactgtgtgcatgcagtaacacatctgggacacatctgaggaaccctcagattggaacatcccaatcttttattatgggctgcaagcaaacctgtccaagatttgccccagagggagatrgtatctttaatatctgggacaacaaacaaatctctgctcttctttggagggagacactggctctactcttgaagactgtttgctgtacagacattcttgaaaatatggactggaacaaaatgttgtcactgtgtctgttcacaagatgtgcggaaatctgagacacccatggagaattatctcccaacaatggtagcagtgtgtactgccaataagatatattgagagccaggtgaatctacctggtttcaaacccagctccacaattactgtttagcagctttcaaggaagttacttaaactctgaatttcagtttccctatgtataaaatagggaggatattacctattatatagaattactataaaaattaaataaaatgggctata

SEQ ID NO: 544132 - DNA, 647 bp, Homo sapiens
cgtggttgttaaaaactttgaagggtatgagatttgaccctacttataagctaacaagagacatgtgaatcttgagcaaaaggcaaacgtgagcttcatgtttgcattggttgcctttgtcacccaggtcccatggagactgtgtgcatgcagtaacacatctgggacacatctgaggaaccctcagattggaacatcccaatcttttattatgggctgcaagcaaacctgtccaagatttgccccagagggagataktatctttaatatctgggacaacaaacaaatctctgctcttctttggagggagacactggctctactcttgaagactgtttgctgtacagacattcttgaaaatatggactggaacaaaatgttgtcactgtgtctgttcacaagatgtgcggaaatctgagacacccatggagaattatctcccaacaatggtagcagtgtgtactgccaataagatatattgagagccaggtgaatctacctggtttcaaacccagctccacaattactgtttagcagctttcaaggaagttacttaaactctgaatttcagtttccctatgtataaaatagggaggatattacctattatatagaattactataaaaattaaataaaatgggctata

SEQ ID NO: 544133 - DNA, 446 bp, Homo sapiens
ggaaaaatggatggaaagtacagtggtaagggtaagagatatagrggattcattgaataggcataatacattgcagtgggtgttcctggaggagaagaaagacatggagcagaggtaacctttgagacaacttttaagaactgatgttaaggcatcaaggtaaaaattcacggatctacaaaaaatttaagaatgataaagaaaaagaaatccacacccaagaagcaaaagaaaaaaaaaaaagacagattgcttttgaaggtgaaacagactaagagctgagatctcaaaagaagcagtggataccaagaaacaaaggattgctatcttaaaagtattaaaagaaaataagtgtcaacctataactccaaatgcaacaaaaatatatttcaagaacaaagtattgatatttttagacaaacaaaacatgagaatttgttatcagc

SEQ ID NO: 544134 - DNA, 375 bp, Homo sapiens
gctggctttggaggcaggccagacatctctctcaggccctttagcccttgctgttmagttcccacacatggctgcatgcaacatggaaaactagcttccaacatgggttgatgaattatggcagtggggaaaagtctcctctagccaggccattactcttccctggtattccatagtttgggctatagcgaaatggatagaggatccgaggtcaggagatcagagcttaagtcttggctcaagtcacaaatcctggggctgtgagcacttgatctgtttgagcctgtttttattgctgaaaaggaaggactgatgacaatcccagcttcatgctgctgttctgagtcacgtaactcaatatatagtataaatggg

SEQ ID NO: 544135 - DNA, 492 bp, Homo sapiens
gttgcaaggtgttagctggggctcagtcatctgaaagcttgagagggattgtagaatctgcttccaagctctttcacaggtagttggcagaattcctttctttacaagatgttggactaagggcctcaatccctcactggctgttgggtggaagccttcctcaggcccttgctacatagatctgtccccagggcagctaacaatatgaagttgacttctctcaaaaaaagtgactgagagggggcattcaagatggaagccagtgtttttgtcatctagtcttggatgtgacatcccattacttttgccatattatatatttttgaaatgagtygctaggttcagcccacattccagtggagaggattgcaaatgggcaaaaataccaggaggtgcagataattggggtcaccttagaagctgcctaccacaggcatccttctcttctcactctcttccttctccttagaccatctcacacacacagagact

SEQ ID NO: 544136 - DNA, 647 bp, Homo sapiens
aaagtgaaatgaagtaactcatcaaaagtcaccacctagcatatggcagagctggtgctgattcatccatgttttttcaacattagcatgcagaaggggtaactggaaaaagatcccactaccccagagatcttagagcagagttctggaatgagtagcctcagcagtcacactgcttggtgggtgtagagatggagtttgaaaggttctgggtgtggtcagcagtatatamaaatggtgccatagattccttccctctctgctcttgctcacaactcctcacatcaagaagttaggtctttttttcctccccttcaacttggggtggccttttgatttgctctagtgactgaaatatgacagaagtgacactgtgaccattctgaacccagaccagagaggactagcagctctgcatactctttcttgaaagctagccaccatgtaaaagtctagttaccttgggtccaccatgctgcagaagcccaaggtagctatggacagggacatacggagagagagggaagccaagtggaagagtaccaaggataccagatacatgcatgaagccttcttaggctttccatcccaggcccagcttccagataaatgcaactgagtgagtgactagagcagaagaaccaccc

SEQ ID NO: 544137 - DNA, 547 bp, Homo sapiens
tgtagtaatgtagaggaagccctaggctttaattcaagagacatagtccctcaacaaacacttgccgaggccctggcgtgaggcaaggcaatgtttaggtacatgaagaattactaaaaaccaaagagatcagagattattgattcatgttttatccaccgtgcccagcatagggctggatgtgtagcaggttttcagtaaatgttgtttaaccaaattaataatgacactagttagcaaatcaatttccctctctggggttggtatttcacctcctattttaaaatttaaaaaatgtaagtgggttatrgcagcacttctcaaaattgaatgtgcataacaatttcccggggatcctgttaaggtacatattccaaaccagtaggctgggaaggaaggcctggaagttgcgtttctaacaaacctccagcattactggcccatggaccacactttgagtagcaatggggcaaatgatctctcagggagaaattttggatacaatgagggatcctccgattctgttttttaattatgaaaaaatagt

SEQ ID NO: 544138 - DNA, 580 bp, Homo sapiens
tgactggctgaggtcaagccacccgctctstgtgttcctgtcagggattgagaaaaaggaaaaacctttcctctaatcaacagggaccagtgggagataattgtttcaggggctggaatctgaggtcgaattggcactgtcgcattgatgctttgccaaaggtttagggagccccaaatgaagatctctatagggaagctcaagtaatggtatctggctgaagactatgaacaataacacaccctgaaaactaaaagtaagagcaaaattaaactgcaaagagagaaatcatggccaaaagccttgaaaggtttacaattttgatcttcttctcctctgatccagataatgcccttccttttccactgcccatttactgggtgagtcttgagtgaccaggactgttgtatttatgtctttatggatctttcagagagccccctgattcctatcctagaggactgcaggtggccaggtccaagtgctggttatcagtggagatcttcaattagtatgacctaggtaaaggctgtgggtaaaaggaacttcttagaaaaatatggagcagatgacaaatata

SEQ ID NO: 544139 - DNA, 565 bp, Homo sapiens
caccttcccctctcctgtcatcccactccgggaagagctgcctcactggtgtcatcatctgctccttcccttgcccttcactgccaggctctgatgcttatctcccttggaggccaatctctgaagacccaacccagtggtcttttcttagccttcatcctcttcaatctctttccctcttttgtattcctaaatgtacaggcctcccaaggttttggacttggccccacgcatgttggtcctgacttgtccttctttcgcaatcccgtctgtctccttgtttagatgtccctactatggccctcagatctgtctgttggtccctgacccatctccagccctgaattcrcagtggccctgaacgcagcctcacctgcatgcttcatcagcacctcaaactcaaactgcccagaaaacatctggatatcatcaggaaaaagacactggacccatcccttagaccctacaccagaatacattccaaaaggatgagagatctgtgtttgaatagtgtaaaagaaaaattggagacacaattacattttaaagagtttatttgaggaaa

SEQ ID NO: 544140 - DNA, 607 bp, Homo sapiens
tggaaccaggttcaaattctggatcttctgtttcaccagcaatttccttaaaccctccgggcttcagtgtccccaccccatgaaggtgctgtgaggccagatgtcaaggcgcatgcactgcacttggctgccatcagctccagggagtcccggagatcaggaccagcacacatactgatggcaggctctgggggcacaggttacatttggagcacagccagcagcacagatcaggcagacatttttggctgatcctgcagttaggagggccaatatgtagtgtgaaagcagcacaggcccaggattccccagaggtatgtttccttctcagccttgttctaaagagctgtgtgcctgccgctatgtgacctcctgctcttgtctctttcttcacctatagaacaagtaggctggacctcaggaggtccactaaatgctatcaccttgacccaaacaaccagccaccctcagccatatctgtacagcctgggcacagtgacagatggtcaaccacaggggctaccagccagactgcatgccaactgttccccgtgctctcgcacccackgtagctgaaaaacggttaagcatagacatgagcaggccc

SEQ ID NO: 544141 - DNA, 486 bp, Homo sapiens
actctccattgcttgcagaacaaagaccaaattatyttgcatggtattgaaggcttccacatttgagccccaacctgccaatctagtcttgcttacattcttatgttccaaattcctgctaacagaacaagctctaagatttcacatctacttctctgtctggaattcattttgacctatcagaactatggctatccttcaagactcagataaaatgacaaatgacatctactacacaagccttccttgatattccctacctgaaatgttttccccctattcctggcacttccacgaaactcccccttataagcatttgtcaccttttactttgtattacagtaacttgtgcacacagcccagttcttatcccaaattgcaaactccacaaggccaaggacagtgttattgaattttatattcttttcaatccctagtacactccctttcataaagttacttaatgaagtatttattaaatccatt

SEQ ID NO: 544142 - DNA, 668 bp, Homo sapiens
aaaaagtttagttgtagcattgtttctagttctcttggatattacaagctaacaaaaagcccattaactacgaaagagttaagcatcctatggtatattcataccatgaaataccattaaaaggggatagaagaaatgatgcttaagaaaaaattaatctatgtcataagaaaatctttttcaatttctggcatttgactatgggttaaattcttcgtatcaaagcaatgtcaatgaaaatgctggagcaaggcctttggaaaatcttttcctccataaaagcaacaagaacactggacaaataaccagaagcaacttcttcaacattctggaaatttaccaaagaaatgcagcaatcagggagcagttattcaggaaaaatggctggatttcagtaagcaacaagctttgtgagttttaaatcgaaaactaacacctcacaattactatgaaaatcagcagcctggaagccaccagggcaggaagaaggggctggagattcttctaagcccyattccaggaaaatgtcattatttgacctgtctggtggttccctggaagaccccacttgcaaggctatcttcatttgacctaacttggcgctcaccccatctgaaaagccatttccccagaagtgcttgttggaaacaatcagaggcaataattta

SEQ ID NO: 544143 - DNA, 459 bp, Homo sapiens
tgaccacacaacataagatttctgtaaattttttacaactacttacaaaattatttcaggtttttttcttccccaacttgttttatccatttagttttmtctatatcattttttccttcattatgaaacctttaaataacctctaaactagacagaattccttttttcaacaaaaaacacatcttttgtctttcttataaccttcctcaccaaaaagcatcctgcctttcttgtaaaagcattgtttttctttatatctagttgttttaattacatatattacaattttgactcttactaatttccagtataaaacctagtaggaagcaattttaattgctatgtaccaggtacagagttctggacagagctattacgactacgtctggaggacccaaccccttctagcatggccaggaggcactgctggaccaggagggcagggccatattgagcctg

SEQ ID NO: 544144 - DNA, 628 bp, Homo sapiens
gtgaggctacttcctgttcyctgccacctgcttctctgagtcactggtctttaagtttctccagtaaacccaggccacctaacagccttcattcttcattcaattaccatttattcttagcagaagcactaagaatgcaaaatggtagcatgtacatggcactagttaaggaatgtgcaaaaatctatgcctgtgcataatgctttaagtagaacaggaattctttgtttttatgctgtatttataatctcaaccaaacaattaagatgagataggattttatttcagtttttaccaaaaaaagaaagttaaaggaccaatgtcagcctatattaatgtgaaactgtcctttattattgactaaaaataaactcacacaaacccagcagcaattttaaccaggtacttcctagttagaatcagttcctgtaattttcagctttagagcaacagttcagaacaccaaaacttagcattttctaagtattcaaaactcagcaaagcaattacttctttttccctcttttgaaccttccattaggcaacagagtctctcttttacctaagaaagaactatgatctaaaaatattataattttgaattaggacttaaaataatcaagtttaa

SEQ ID NO: 544145 - DNA, 281 bp, Homo sapiens
tcaccaagttccactcatgccgatgactctatccttaaccaggccacactcattctttgctgcttgcatttgctgctcccatctgtctgggatgctcttcacctagctcttccaatagtcagatccttatgaaactgtaggcrttagtttaaatgtcacctatgcagacattgtcttcaaattacgcagccacctaatcaaccctgtcactctatatcctatccctctgtttattacctattagattctgtttattttccatcactcccactacaatatca

SEQ ID NO: 544146 - DNA, 588 bp, Homo sapiens
acagggggccccagaggccattgtaaagaatgtctcttcctcagaatgagatggaaaggcattggaggatctagagccaaagaggggcgtaatctgatttaggcctttatgggctcactatggagactgtgtaaatggatggaggggtatacgtggggatgcagatggtgagggtagatgcacgaaaaccattggaataatcctggcaagagatgtcccatggtggtgagtagtggaggtgttgataagtagtttgttcatataaatagaaaaaggaaagtgctcaagctagccagaattatatctgcaatacttcacttgaaaacccattctaaatatatcctcttgatgatgctaggttagcggtatcatctttaggcctgcatatcatacagaaatgcatatatttgcagtctctctgcactgcatgcttcattgtggctgcaaatatgttgcttttggatcataattagtaagacaaatggctaaatgcacttcacatagagtacctatccttttawttgcttatagtgtggtttccaagagaggactcttaacagaaaacaattttgtgaatacttacataca

SEQ ID NO: 544147 - DNA, 597 bp, Homo sapiens
tctttccaccatggaagaatttctcggtgctgcatgaggtcaacatttgccttcacagaatctaaagtagcatgaaagaaatgcaaaactaatacaagctcccagcatatagttggtgctcaatagatccttgtggggtaagtgacgcctggacacaattaagaattaggtaaaatctgtcttccactagaaccgtcagagcwgcttccgggaacttgagtctgctctcctggtctcccatcagactattctgtgtcctacccattctgaaagagtcttttgcacataacctaacttctctctctcctctcctccctcctaaaggtcataattacatgacttttagacatattcatgcaaaatcatgctttctctttaagagtcggtgatactggcttaattagataaaagagttccagaaaatttcttgcttgatagaccatagtgcccaagaacaacaatgcctaaaacaagttaaaataatcaggttttaaagactcccatacctttcccaagaaatgatattggtgttagacatgtcaagtagtatggcaagactttgatgtagatatttgagaatgattagattttttttgg

SEQ ID NO: 544148 - DNA, 528 bp, Homo sapiens
tacagtttgctttggaaatctagagctctgcggtattgaataatcacaaaattaacctctgttgggaagttttcgtaaagaatttcagtttgggcttttcaaagtgcctgttatttgttatgccaaagctaggaaactaagcccaaaaaactctcttgacctaattttacctgcagttcctacaaatgtgggcgaattccyctcttctcaatgtccctggtctagcagaaggtagcttttctcagtatgtgtcaggcagggcctctgtaagccaggttccaggccagtctttctgagaggcctttatgggcattggttccataagaaagtcataagtaaaatattcaattttattctcttaacagtggctgtcacacctgattaatgagaattattctcaaatatgacattccaggcaagaacttagttgcatacctgatttttctaattatatcatggtataaaggtggacagattcttattgagcctgttgaaataactatttttccatgaacaataaggagattg

SEQ ID NO: 544149 - DNA, 526 bp, Homo sapiens
gttcctagtagcagtgtgaaaatggactaatacaatagctacatgttctttcagtatcattgtttaattatagattatataaatatcaaggagaatgcacctatatttaattatgttatttaatatttttaattagagtccaagactctgaaattacacgataatttatagagttctgtggagtagaaaagataacccagttctttactttgtatgtcattaaccatttgtaaaatctattcacaaaaatttcttacagcgtttctttgactgcctgactatataaactttaatatacttaaattctccttcgaaccagacttgccatctaactggtttcctcatcaattaatgagttgcatgtcgtttttaggtttggttttaccacattattctgagcatattcagaataggtcaacrtgctaccaaattaattatgaaaaatttatcacttttcagcatttgttggattttggcgggcaaattaggggattgtgaacctataatttctattgccatcaaaaac

SEQ ID NO: 544150 - DNA, 526 bp, Homo sapiens
gttcctagtagcagtgtgaaaatggactaatacaatagctacatgttctttcagtatcattgtttaattatagattatataaatatcaaggagaatgcacctatatttaattatgttatttaatatttttaattagagtccaagactctgaaattacacgataatttatagagttctgtggagtagaaaagataacccagttctttactttgtatgtcattaaccatttgtaaaatctattcacaaaaatttcttacagcgtttctttgactgcctgactatataaactttaatatacttaaattctccttcgaaccagacttgccatctaactggtttcctcatcaattaatgagttgcatgtcgtttttaggtttggttttaccacattattctgagcatattcagaataggtcaacatgctaccaaattaattatgaaaaatttatcacttttcagcatttgttggattttggygggcaaattaggggattgtgaacctataatttctattgccatcaaaaac

SEQ ID NO: 544151 - DNA, 626 bp, Homo sapiens
tattccagaagggattgagcygaaataggccttttctttggagagggagcaattaatagcctgattcagctctcagtggaatgtttaaaatgcataagaactttacaaacgttttcgaactctttagagttactatataaacaattgatataggaattgaaaattatttttacttctaattgcaaataataaattatttttatttctcattgcaaataataattattatttaaagcaaattatacataaaatttaaattattatttaaagcaaattatttgagataccgcatgacagcccctggaattcccaaatatttaaaataatttaaaatttcactaacttcactatttagtgcaaatcattgaggtctccctgcatttattatctgatgtcatttgcatattgtgtattctgtttccaaagtgcatttagatttcctgcattgtcagcaccgtgtgagttttcactgtggtttccttttattcagtgacttgactataatttggaggtacttcctcaacacaggatctggtccaagatggaatgggttcttttggtggcgagccccctctggtagaaggggctgaaacaggagctaggtcatccgtcagcacagttacaca

SEQ ID NO: 544152 - DNA, 267 bp, Homo sapiens
gagcatatgtgctaagattaatctatgagatcaccagattgtcaccttgaaacacaccggaaggtctgtcccagaggggtgagagaacatatagattctgatgggaggcagacrgccacctgcagaataggtcgggggtggccaggaggaggaagttagagcaagaagccagtgctcctgttggaggctgggaagggggagggaggaatgccacaaagacaaactgcaccttcttgttgattttgctcagccaggcccgggagaaac

SEQ ID NO: 544153 - DNA, 590 bp, Homo sapiens
tgtgaaaaagcaagagatatgtttcttaccattgtgagggtaaatggatgattttctaatgcagatacactgggacaatgtagagtaatatactaaaaagcaacaaacagataagttttaaatgaccaattaagaatttcaactatttcaatgatgctatgtttgctaaattccaaaaattacataaggataaaggctatttaaaaagttgctgaccactgactcacctgaccaggtcttgctttaaaattttctttgaccattcggatttccatgacatctgagggatgactyatgaccgaaatgatggtgactggcttattgctccggatatacctgtaaagtctttcggcacagtacaggcacaaaggtccagaaatccaaagccaagtctaagacaaatttttgaaaatatacttcaagaaatactcatattgtagaaatctacaccctgcccaattgcttattgcatacattacagtaatagtattttaatttgtattttaaataagaaaacataacaaatgagtaaaaaataatagatgctcactatcattcaaacaaacaaaagtataaaataaaacagaaag

SEQ ID NO: 544154 - DNA, 608 bp, Homo sapiens
caattttaaaatcagttttatgataaacacaatgcttagcatgatagacatgaagaaacactgaccaggagttagaggacctacattccacattcagctttgcactgagtccataaagaaagcatttaactatatgaaattcatccatcaaacagggtaaatggactagaacagtccacagttctacaggctcctctccctccaggctgagcattgcccagaagaaagtatatacaactatgactaggactagggctacgacgactgctactattattggcctcagtggtgtgcaaggtaaagtagttcctcaatattccctacttccttttctgggagtcagttccctgaattcatactcttgatgccaagatctaaaaaatcaaaataaaatattgatgctactcctcagaggtgctaatttatctgattttcttctttgaggtaatggagggaataaagggttgtgtaagagcatgtttaaaatagttgtagggtagggctaagaataaagctcgacaaacctctaaggaggaayattacaataccttcctaaaaaggcctgggaaggacccttttgccatgtcattctggaatgctagtgctca

SEQ ID NO: 544155 - DNA, 530 bp, Homo sapiens
aaataacttcccggaagttacatccagcaagggtgagagacagaatttgagctcaatttattgaatgccaaagtgctgctctttaccactgtgctattttggagtcaccagtgctgctcracaaatattaaagttaaggagattggccacatgactttctctggccaatgatacatgaatagcagtgatgtgtaatttacaatgaatactttaggagtcaggacacaattcaccaccgaggtgatcatggaagtgtatctcaagtaaagctgccattgccagggttcctgagtaactacaatgagcagaaacctccagcaaaccaacactggatatgtagaacaggctgaaattaaagatttgttacgttaaatctactgagaatttgtgattatttattactaatagaaaactagcctatcttgacaaagatatgctacctacatattatgagggttcattcatggtcaatccagttttggaagggattcaggatgagtatgatttatccaggtaaagataggaaatag

SEQ ID NO: 544156 - DNA, 578 bp, Homo sapiens
aaaagtacaaaggctatttattacagatttcccttcttacctctgcccctcagctgcataattcttctcagtgcagttaactaatgttatcagtttcttgtgtatcctttatttcttcttgagcatcttagtcactttgagttgctgtaacaaattaccatagactagatggcttataaacaacagaaatgtatttctcacagttctggaagctagaagttmaagatcagggtgccagcatggttggttcaggttgaagactgccagcttctcattgtgtccttacagcgtggaaggaaagcaagcaagctctctggcttctgctttatgagagcactaatcctgttctcaagggctccctctcatgatcgattaataattacctctccaaagccccatctttaaataccatcacattggggtttaaattttaacatatggcttaaggggagacacattcagtccctaacattggataactttgttatcaaatgtatattttctctattttttaacacaaatattttcgtattatcattacacacattgcttcatactactctttttttttttttttt

SEQ ID NO: 544157 - DNA, 578 bp, Homo sapiens
aaaagtacaaaggctatttattacagatttcccttcttacctctgcccctcagctgcataattcttctcagtgcagttaactaatgttatcagtttcttgtgtatcctttatttcttcttgagcatcttagtcactttgagttgctgtaacaaattaccatagactagatggcttataaacaacagaaatgtatttctcacagttctggaagctagaagttaaagatcagggtgccagcatggttggttcaggttgaagactgccagcttctcattgtgtccttacagcgtggaaggaaagcaagcaagctctctggcttctgctttatgagagcactaatcctgttcycaagggctccctctcatgatcgattaataattacctctccaaagccccatctttaaataccatcacattggggtttaaattttaacatatggcttaaggggagacacattcagtccctaacattggataactttgttatcaaatgtatattttctctattttttaacacaaatattttcgtattatcattacacacattgcttcatactactctttttttttttttttt

SEQ ID NO: 544158 - DNA, 632 bp, Homo sapiens
agttcaagatcagactgacaagaaaagtcacacatattgagagtttacttacatattaggcattctgctaagagcttcagatagaaattatctgttttatcctcaaaacaacctcaggaatagaatattcttatatccatttttgagataaagaagtcaatactcaagaagccaatactagtaagtaactagtgggtggcaaagcccagaacagaatayacacctgcctgattcccaagaccacagctttttaaccattttatgcatgtgacagtgtaaatcgtgtaggcatagccgcaatacctttttattctgattttaagatgttaggcaaatcaatgcagtctgctgctttgtgttggctcagaccaatttcacctggttgccatctggacacctacacagggtgccgtgaaaaaatataatgcactacataaaactcaaggcatctctctaaagtgcgcagtgcagttttcaacccagaaatcagagagagaaaatgactgtccccaagattgctattctgaaagagatcattgctgttcatctcactctgctcacaaagtgctttgctacagtgacacttacacccttggaggtcaacccacatttcagtgacagctaccagttca

SEQ ID NO: 544159 - DNA, 632 bp, Homo sapiens
agttcaagatcagactgacaagaaaagtcacacatattgagagtttacttacatattaggcattctgctaagagcttcagatagaaattatctgttttatcctcaaaacaacctcaggaatagaatattcttatatccatttttgagataaagaagtcaatactcaagaagccaatactagtaagtaactagtgggtggcaaagcccagaacagaatatacacctgcctgattcccaagaccacagctttttaaccattttatgcatgtgacagtgtaaatcgtgtaggcatagccgcaatacctttttattctgattttaagatgttaggcaaatcaatgcagtctgctgctttgtgttggctcagaccaatttcacctggttgccatctggacacctacacagggtgccgtgaaaaaatataatgcactacataaaactcaaggcatctctctaaagtgcgcagtgcagttttcaacccagaaatcagagagagaaaatgactgtccccaagattgctattctgaaagagatmattgctgttcatctcactctgctcacaaagtgctttgctacagtgacacttacacccttggaggtcaacccacatttcagtgacagctaccagttca

SEQ ID NO: 544160 - DNA, 530 bp, Homo sapiens
gcttcaaaatatggcagtccctgtgtttattgccgactagtatttttcaagaaaatataaaaattgtcatcttctctgtcagcatgagacctctgaatcattaagactcaccagcacagactgtaacaaaaagatgttttcctttgctatggatttaaccattttatgggtaggtgttttcaaaaaactctgcatttaatgcaataaagatgacatttaatgcacaacaggtattagtggaagttatcacaactaaatcaaggtgagatgaatcgtggaaagtggcagtcacagtttgataactggaattaaacgcagaaatccaagttagagaaggcagtaacagctcctactgaccagcaggggtcacccaataaccagaaaacagatatgaggcttgtcggttctcagcactgaaacgcaggggaaacactccggtgcgaggtctcaggctgccctgcggagwcacacacagaactcactcataatcctaactcaaaaccaaaacacagcaattcacttcccagaaa

SEQ ID NO: 544161 - DNA, 633 bp, Homo sapiens
ctgtttataagagactagtcctttaaaaaactattaacatttccagtgattcaggacttctttgttgaagtggaatacttttgacatggacaaacgaaggggaattcaaagtcagaaagacttacttagttcaaatcttgactgtcatctatggcctctagaaccctggagcaagttatttagtcttcctagtgctcagtttcttcgtctgcaatatgcattaggtatcgattgctgtgtaactgactaccccaaaactcagtggctgaaaaccagcacccattatttgctcattgcactccatgtggcctaagctcagctgggcaacgcacgccttggccactcatggctgtaactggctcacagctggcctggggatggagggtataagatggcctcaattcacacaactggtaccttggtgccagctaccgtctggcccttctccatgggcctctcatcactcagtagtctggcctggacttcctcaaatgagggcagggacattccaaraagtggtaaggctctttgtggctcaggccctggacctcacacaacatcgcttcgggcacattctaccagtcaatgaaagccacaaggagttaagaaatggactctccctcttaaaggcct

SEQ ID NO: 544162 - DNA, 570 bp, Homo sapiens
gcattccctaaagcggtcatctcttgatctctctcccccactctgcccactatgaccccacagcagccctcactggtttgacagggctgccctgcactctgcagctctggagggttcttgagagcccatttccctctaacccagatcctcaggttgggatgccccaagaatatgctaagcaggaggaggccagagcgcccatcacataggatctgtaacttgttataggaccacagccgagctcagctactagagattctgtgatgccyttagactttcctcttgatcccaatatggccatggtagtaggattttttaaagtaacctaggtttaataatagtccccttggtaagtgtcctctttgctctatgagtgcttgcttactttcaaccttcttattctttccttctcttctgcaaatattaaatgcctaccatgtgcactgttctagctatgtccgtgaacaaaacaaaggtcccttgtaaatcttgccttctaaagtgactgggagtaggggggattagtggagagcagacaaaagaaataacctcataccttatggaacgagg

SEQ ID NO: 544163 - DNA, 623 bp, Homo sapiens
catagggaaaatcagctgctgtcatgcaaatgaaatcaccaactgaccaacccattgcagaaagcccttacaaccaagaacaccacaagcaaagaaatacactttgggccaggcacagtggctcatgcctgtaatcccagcactttgggaggctgaggcaggcagattacctgaggtgttcaaatagcctaccatacatgtaggctatatggtgtggcctatgctctcaggctacaaacctgtacatgtgactaatgaatactgtatgcaattgtaacacaatggtaagtatttgtgcatctaaacataggaaagttacacctgaggccaggagttcaagaccagcctggccaacatggcaaaacccccyatgtattaaaaatacaaaaattagccgggcatggtggcgcattcctgaaaccccaactactcgggaggctgaggcaggagaatcacttgaacctgggaggcagaggttgcagtgagccaagatcatgccactgcactccagcctgggcaacagaataagactccgtctcaaaaaaaaaaaaaaaaaaattcactttgcatggtgagggtcttcttttcacttggatatatagaccacaccgtgtttcacatgt

SEQ ID NO: 544164 - DNA, 643 bp, Homo sapiens
cagaaaggccgagcgccactggaactgcccacagtgtggtgggaggaaggatcacagccctgtccaagcagagcctcctttcacattgggtaatttacaaggaaggctctagacatttacacttcaagggtcagcattctgtaagggtcaagggctccatgcacagttgttactggggcaaaataaaggccacatcttctctgggcctctttaggtgcactgactctgcatttcagtggcctttcttccatttccttctgtcattttggctttggatgtgtattgggcttctgtaattgaaaccaaaaacaacagcttaaataagatggaaatatttttctcttatgcacaaccgagtggtgtcacggatacaggtttcttgtgtattgatcyacatcactagggcattgacgtcacattgtccaaaatggctcatcacctccgcaatcacattcacactcatgggaaggagaaggggaaggagggagggagggcatgtgtcccatctgtttaagggcactgcctggaagttgcccaccatcagtcactcacatcctgttggtcagtctaatccataagaccatacctggtgggatgagaggctgggaaatgttaccttaattctgggtggttatgtgcccag

SEQ ID NO: 544165 - DNA, 643 bp, Homo sapiens
cagaaaggccgagcgccactggaactgcccacagtgtggtgggaggaaggatcacagccctgtccaagcagagcctcctttcacattgggtaatttacaaggaaggctctagacatttacacttcaagggtcagcattctgtaagggtcaagggctccatgcacagttgttactggggcaaaataaaggccacatcttctctgggcctctttaggtgcactgactctgcatttcagtggcctttcttccatttccttctgtcattttggctttggatgtgtattgggcttctgtaattgaaaccaaaaacaacagcttaaataagatggaaatatttttctcttatgcacaaccgagtggtgtcacggatacaggtttcttgtgtattgatctacatcactagggcattgacgtcacattgtccaaawtggctcatcacctccgcaatcacattcacactcatgggaaggagaaggggaaggagggagggagggcatgtgtcccatctgtttaagggcactgcctggaagttgcccaccatcagtcactcacatcctgttggtcagtctaatccataagaccatacctggtgggatgagaggctgggaaatgttaccttaattctgggtggttatgtgcccag

SEQ ID NO: 544166 - DNA, 612 bp, Homo sapiens
ccgagttggagtcacactgtcctgctttagtttctgcagcagcccgccatgttccttccagccaaaaagccttcaacatgttccctcaatatggaatagccctggctcacccttcagatctcgtaagtgtcatctgttacaggcaaccccttctgatgccacctctactcccaaggtacccaggtctctctgttacaagccctcttatcccccatgtaatcaccttcatggcacttcaatgctatctgaaatcacaatggccattttacatttttggccattttacatttatttggtgaacatctgattattatctgcctctccaccaagactgcaggctcctgaaaataagaatcctgttgggctatcactgaattcccaaaatcaagctcaaggtttcacatgtcccagaaactcagaaaataactggtggatgagtgaatattcaatcaaatccattgggattttctgagaaccactttcaggtacctcaaattcyagcttctccagtcagaggtggaaaagtggcaaaatatcttattttgttaagtatcagcaaaacaactttttagccatcataaacccaagtggaaggaaaattacaaagagatg

SEQ ID NO: 544167 - DNA, 612 bp, Homo sapiens
ccgagttggagtcacactgtcctgctttagtttctgcagcagcccgccatgttccttccagccaaaaagccttcaacatgttccctcaatatggaatagccctggctcacccttcagatctcgtaagtgtcatctgttacaggcaaccccttctgatgccacctctactcccaaggtacccaggtctctctgttacaagccctcttatcccccatgtaatcaccttcatggcacttcaatgctatctgaaatcacaatggccattttacatttttggccattttacatttatttggtgaacatctgattattatctgcctctccaccaagactgcaggctcctgaaaataagaatcctgttgggctatcactgaattcccaaaatcaagctcaaggtttcacatgtcccagaaactcagaaaataactggtggatgagtgaatattcaatcaaatccattgggattttctgagaaccactttcaggtacctcaaattctrgcttctccagtcagaggtggaaaagtggcaaaatatcttattttgttaagtatcagcaaaacaactttttagccatcataaacccaagtggaaggaaaattacaaagagatg

SEQ ID NO: 544168 - DNA, 663 bp, Homo sapiens
tggtggtaaataatctcagaatttggaacacttttttcttgaaattacattttaaaaacactttgacaaggagaaacacagattgctcagtgctcaaatgactaaaagtttaaaagaccatatgggtccttagctctcttgggagggaaggagttgaatttgatggcacattttaatagatacattatagtcaaggctatgaaactgccccaagacctacatctttggcttttgctgtctcttccagttgtgtttgtgaacaggtgtcatgttccatctctgctccataagcccaggtccagtgtcataattcaggaatttggttgtgttagagccttagatttctatttcaggaaaattaagacaatgacttgaagaaagccatrcagtttccttagaaaaaaatggttatggagatattatacagtggaagtcttcagtgctgctcagaacgtgcagaagtttaaaataaatgctgccatatcacataagaatgccaacaaccctggggtctttacattgcataaaagagggtcaatgttacagtcacagttgaaacatcctgaagaaacagaccgattccatttcataaatctaagaggtttaaaataaatgctgccataccacataagaatgccaacagccctggggtctttatattgc

SEQ ID NO: 544169 - DNA, 663 bp, Homo sapiens
tggtggtaaataatctcagaatttggaacacttttttcttgaaattacattttaaaaacactttgacaaggagaaacacagattgctcagtgctcaaatgactaaaagtttaaaagaccatatgggtccttagctctcttgggagggaaggagttgaatttgatggcacattttaatagatacattatagtcaaggctatgaaactgccccaagacctacatctttggcttttgctgtctcttccagttgtgtttgtgaacaggtgtcatgttccatctctgctccataagcccaggtccagtgtcataattcaggaatttggttgtgttagagccttagatttctatttcaggaaaattaagacaatgacttgaagaaagccatgsagtttccttagaaaaaaatggttatggagatattatacagtggaagtcttcagtgctgctcagaacgtgcagaagtttaaaataaatgctgccatatcacataagaatgccaacaaccctggggtctttacattgcataaaagagggtcaatgttacagtcacagttgaaacatcctgaagaaacagaccgattccatttcataaatctaagaggtttaaaataaatgctgccataccacataagaatgccaacagccctggggtctttatattgc

SEQ ID NO: 544170 - DNA, 663 bp, Homo sapiens
tggtggtaaataatctcagaatttggaacacttttttcttgaaattacattttaaaaacactttgacaaggagaaacacagattgctcagtgctcaaatgactaaaagtttaaaagaccatatgggtccttagctctcttgggagggaaggagttgaatttgatggcacattttaatagatacattatagtcaaggctatgaaactgccccaagacctacatctttggcttttgctgtctcttccagttgtgtttgtgaacaggtgtcatgttccatctctgctccataagcccaggtccagtgtcataattcaggaatttggttgtgttagagccttagatttctatttcaggaaaattaagacaatgacttgaagaaagccatgcagtttccttagaaaaaaatggttatggagatattatacagtggaagtcttcagtgctgctcagaacgtgcagaagtttaaaataaatgctgccatatcacataagaatgccaacaaccctggggtctytacattgcataaaagagggtcaatgttacagtcacagttgaaacatcctgaagaaacagaccgattccatttcataaatctaagaggtttaaaataaatgctgccataccacataagaatgccaacagccctggggtctttatattgc

SEQ ID NO: 544171 - DNA, 611 bp, Homo sapiens
aggttaagtgacttgctcaagggcacactgctgggagaggacggagctgtgaaccagattctattgaggtatatcacgcattcaagtttgaatgagatggaaaaatgtgttaaacagaaggaggagtcaccaaattccttttgaggtgacacattgaaggctgtacactttatatacttgctgaagtaagaaacttgtcagccactgtattagtccattttcacactgctgatgaagacatacccaagactgggtaatttataaggaaaaagagwtttaatgaactcacagttccacgtggctgaagaggcctcacaatcatggtggaaggcaaaaggcacatcttacatggcagcagacaagaaaatgagagccaagcgaaagggttttcctcttataaaaccatcaggtctcatgagacttattcactacaatgggaacagtatgggggaaactgcccccgtgattcaattatctttcaccaggtccttcccacaacacgtgggaattatgagagctacaattcaagatgagttctgggtggggacacagccaaaccatatcagccacactttgagtatatgtcaccttgctttggctggcattattct

SEQ ID NO: 544172 - DNA, 663 bp, Homo sapiens
tggtggtaaataatctcagaatttggaacacttttttcttgaaattacattttaaaaacactttgacaaggagaaacacagattgctcagtgctcaaatgactaaaagtttaaaagaccatatgggtccttagctctcttgggagggaaggagttgaatttgatggcacattttaatagatacattatagtcaaggctatgaaactgccccaagacctacatctttggcttttgctgtctcttccagttgtgtttgtgaacaggtgtcatgttccatctctgctccataagcccaggtccagtgtcataattcaggaatttggttgtgttagagccttagatttctatttcaggaaaattaagacaatgacttgaagaaagccatgcagtttccttagaaaaaaatggttatggagatattatacagtggaagtcttcagtgctgctcagaacgtgcagaagtttaaaataaatgctgccatatcacataagaatgccaacaaccctggggtctttacattgcataaaagagggtcaatgttacagtcacagttgaaacatcctgaagaaacagaccgattccatttcataaatctaagaggtttaaaataaatgctgccataycacataagaatgccaacagccctggggtctttatattgc

SEQ ID NO: 544173 - DNA, 633 bp, Homo sapiens
ctgtttataagagactagtcctttaaaaaactattaacatttccagtgattcaggacttytttgttgaagtggaatacttttgacatggacaaacgaaggggaattcaaagtcagaaagacttacttagttcaaatcttgactgtcatctatggcctctagaaccctggagcaagttatttagtcttcctagtgctcagtttcttcgtctgcaatatgcattaggtatcgattgctgtgtaactgactaccccaaaactcagtggctgaaaaccagcacccattatttgctcattgcactccatgtggcctaagctcagctgggcaacgcacgccttggccactcatggctgtaactggctcacagctggcctggggatggagggtataagatggcctcaattcacacaactggtaccttggtgccagctaccgtctggcccttctccatgggcctctcatcactcagtagtctggcctggacttcctcaaatgagggcagggacattccaaaaagtggtaaggctctttgtggctcaggccctggacctcacacaacatcgcttcgggcacattctaccagtcaatgaaagccacaaggagttaagaaatggactctccctcttaaaggcct

SEQ ID NO: 544174 - DNA, 597 bp, Homo sapiens
agtgcaattattgtgacttttgtgggtttacccatcatgctataaccaacagaattgagaaattcagcagagagaaattcagcttagagaaacccaacaccacatcaaccatcacacgtggagcgattcccagccagccttcctatggcagctttctcaaaggtcacagctatggttcaatgaactgtcccaaccttccacagaaaacagcgataaatgggagggattcatctgtttctaactgatcaaaaatggtgctctatgagataatgcaacagaattagcttggctgggctctagatcttctatagagatctggcttcttgggcaaaggtgaagaaaactgtttcacattccccacccacctcaccctagccctgaacaagcttaaccycatgcccttcaaacaaatagtctttactgctttctgtgtcagggctctgcctggaaccctctgtagccctctactttctacttgtttaagtcctgggcagtcttccttgataacatggtctcacttctcccctcatttctgagaccctctttgactgccctgggcctctgtgtatatgtcccctctgaacactttctgctttg

SEQ ID NO: 544175 - DNA, 633 bp, Homo sapiens
ctgtttataagagactagtcctttaaaaaactattaacatttccagtgattcaggacttctttgttgaagtggaatacttttgacatggacaaacgaaggggaattcaaagtcagaaagacttacttagttcaaatcttgactgtcatctatggcctctagaaccctggagcaagttatttagtcttcctagtgctcagtttcttcgtctgcaatatgcattaggtatcgattgctgtgtaactgactaccccaaaactcagtggctgaawaccagcacccattatttgctcattgcactccatgtggcctaagctcagctgggcaacgcacgccttggccactcatggctgtaactggctcacagctggcctggggatggagggtataagatggcctcaattcacacaactggtaccttggtgccagctaccgtctggcccttctccatgggcctctcatcactcagtagtctggcctggacttcctcaaatgagggcagggacattccaaaaagtggtaaggctctttgtggctcaggccctggacctcacacaacatcgcttcgggcacattctaccagtcaatgaaagccacaaggagttaagaaatggactctccctcttaaaggcct

SEQ ID NO: 544176 - DNA, 615 bp, Homo sapiens
gataggctttggtatcagaattatacctaataaataggaggtcctctcaagattttctgtatcgggaatatttacgtcttgatgctttttacagaatttaccagtgatatagacttggatcttcttttggaagcaatttctttcaaagttttcatttatttgtgctttaaattcctctttgactcaatacaaattttctcttaaagttggtccattttagtaygactttcaagtcattatagagaagtaatacatagatttttaataatttcaaagcttttatcacgtgtcgtttcctgctttgcaacatatttttttcacaaatggatgatcaattgtgtcaaatgaaaagatcatacggttgtgagctctgagaagtttttaccttgtagctttccagctgttatttgctaggccttgtggagttctaccccaaacactggtgttcagtcaaacactgaaggtaacttcctatgagaatttatagagttctttctctatatgacgcccctcctctctgaagatgtgtaccaaatagtctaagtgccttcacctccccaaactctcctcagcacagtaagactactgtgctctgttaaggattcccttctctga

SEQ ID NO: 544177 - DNA, 624 bp, Homo sapiens
tgccacgtatccttctacatatcttggaagtctgtcctctggggtgggggattagagcaatggtgacccagcaactttctctgtcaccatctgtggcagacacactggttggcaaaatcaaacacccattagcaatktgagtttcccttgcccaccttctctatagaaactagaaagtataaatactcactctcccaatctcacttaggcaagaataggagagaagcaacagtgactgtgggaaactgtttacttctttatctaaaaaaaaaaaaaaaaaaggactgggcatagtggctcaggcctgtaatcccagcattttgggaggccgaagcgggtggatcacctgaggtcaggagttcaagaccagcctggcccacatggtgaaaccctgtatctactaaaaatacaaaaaattagccaagcatggtgaagggcgcctatagtcccagctactcaagaggctgaagcaggagaattgcttgaacttgggaggtggaggtcgcagtgagccgagatcatgccattgcactccagcctaggcaacaagagcgaaactccatctcaaaaaataaagaaagaaagaaagaaaagaaataaaaagatatgatcggcacccccctt

SEQ ID NO: 544178 - DNA, 590 bp, Homo sapiens
acatttcaaatgcgtcaccaggttggccagaacgcgtcggtttcttcctatcttgtttcttccacttttttaaataaaatagatttttctaggaggacactatttaacttttcagcacatatctccaagttttttttctaggtacatagaagccctgctttctgtatattgtaccattttcttattccttcaagacatttttttttcttttttttttaattatactctaagtttaagggtacatgtgcacattgtgcaggttagttacatatgtatacatgtgccatgctggtgcgctgcacccactaaagkgtcatctagcattaggtatatctccccatgctatccctccctccttcaagacattttaagggtgctttcctgcccgtatacacagagattccaaacagctttcctaaggtttactcattaatatgggcagccaggatctccaggcatttgaagaaagcctttaacatggaaaaacagctcaagaaaaaaaaaaaaaaaaaacacagcggaaaaaataactttggcagaaacagaggaaacaaagggaactgaagaagcttttaaaaaatctgatgata

SEQ ID NO: 544179 - DNA, 207 bp, Homo sapiens
ctgtgatatatagtcttgcatttaatggttccaatgtagacttaaaggtagaagctctcatggtaggacacctacatagtatacttggaggcatccccaagagcctagaatctgcccttcccacttttccaacaatgccctaagtacctaattagctgtaataaattyacccctttctgcctaaactacctagattgttctgcatta

SEQ ID NO: 544180 - DNA, 586 bp, Homo sapiens
aatgtagacagactattggatacccaattaggtaaagagtaacagttccatttgcagtaatttattttgaacatgtactaattcaacaaggagtattttcttcctaatttccgtcatgacaattaaatcaaatgagcaatttgttagacaaatttacccaaaaaggaaatcatccagaattggctttgagatagtttcctcaactatcaaaagaactggtgttgaagccaycaacattcctgtgatataactcagagaacctccgtcaacacatataaggacctggcagaatccctgctgattaattcagcattcattccaagatggaaaagaacttgtctctggagtaattttcttcctcaagggtaagaacaatccaatgagcaagttgattcctttcattgattttacattttgttttcttaaaaaataaagtttttaagaaacttcattcatattcatatgcaatcaaggcatatgaatacaactttgcaccactttttatctttgcaaaataattactttaagacccaagaagggctttcccattataaacctagctagacttacccatttaaaaaaactt

SEQ ID NO: 544181 - DNA, 586 bp, Homo sapiens
aatgtagacagactattggatacccaattaggtaaagagtaacagttccatttgcagtaatttattttgaacatgtactaattcaacaaggagtattttcttcctaatttccgtcatgacaattaaatcaaatgagcaatttgttagacaaatttacccaaaaaggaaatcatccagaattggctttgagatagtttcctcaactatcaaaagaactggtgttgaagccatcaacattcctgtgatataactcagagaacctccgtcaacacatataaggacctggcagaatccctgctgattaattcagcattcatyccaagatggaaaagaacttgtctctggagtaattttcttcctcaagggtaagaacaatccaatgagcaagttgattcctttcattgattttacattttgttttcttaaaaaataaagtttttaagaaacttcattcatattcatatgcaatcaaggcatatgaatacaactttgcaccactttttatctttgcaaaataattactttaagacccaagaagggctttcccattataaacctagctagacttacccatttaaaaaaactt

SEQ ID NO: 544182 - DNA, 608 bp, Homo sapiens
aaactcctgatacaggaacaactatataaatttgtgattgttgaggataggaaattattaaagtaacagtgatggaagaagcagaagaacccttgtatctcttttgcctcagactgtaaaataaaatggagtcgaaggaaagaatggctagctggcgctgtgtgtgagtagggtgagtgactgcaggtgtgtgcagggtttctgatctgtatgtaaagagtatcaactggggttataaatatatgagtagtacaagataaactgaaaaggaaatttaattttgtggtgctccttgtcattatacatgtatttctcaatattccatattccacagatgagtattatctgttttcgtcccatttctttgtttctcctcttcttgttagaaatttctcaaattgtggtttcagggctctaacagtttagagtaggtgtgcttctctaatgattctaggaggactaactgtatttagagaaaatggtttttggttgrttctaagtctgagaaaactgaagaagtgaaatttcctccaactttgctgtcgtgtgcaatgtggcactcaaatgtcttgagcagagccatgcagctcattgttggctgcatgcag

SEQ ID NO: 544183 - DNA, 614 bp, Homo sapiens
tctaggtccatggtccaattacataactgctctgtgcttcccatctataaagcaggtatggtaaagatactgactactgacttctcaggttgctatgaggagcaaatgacatgatgatttgaaaggaccgtataaactgttgcaaagaggttatcttcctatcctatcaggacattcagtagcatagcttggggtaaactatggtcagagctcattttaattcagacatcctttaaatgtattcattaattatattttgtaacctggtatatttgacttttacataaaagactgggaaacccaggctgggtaggtaagagtcacagacacaaatgggcaaaaactttacaaatggcaatattctgggaacatttattttgagaactagcttattaagaaagttattttgctatttagggtcttaaaggtgttcaasctaataacctaaatgataaataagacgatcggggttcaggagtgatcatttggtaataacacagtaatgatcacaataacaatcaacattaacttattccctcttctctgccatattttgctattaagcatttcatggacattatctcatttaatcctaacaatgtaagtatgaggta

SEQ ID NO: 544184 - DNA, 602 bp, Homo sapiens
gctgtatttattgtatagcatttgtgcattagatcatgttttcaaatctctgtgaaagtttaggttatctgaaatgccagaagttaatcttaccagatttggggagaaataaaaaaggtttttgttttctgttttatgttatttttagaatctcttaaataaactaaatcaattgtatcatatgttattttaaaattattattattatatatttagaaataaatgttctgcatattaccatttacaagtttttatgttatagagacaagcattttcacttcatgatctgttctttagcttcaacttattcctactgttatccttcatagcagagaggacggttttgagatgagaccaacttcattggaatcctctgtcaagtactagcaatacaactgcaggcaggacacttaacaactgtattgtctctgtttcttaatgtacaaaatagaactaaaaatcgttttagcaagtcactggattgtaaacagaatttaatataattattgaaaacatggaccctagtacataaaaaacttacattcagcattaactgtcatcatttttgctwttattattaccaagcattactattattacta

SEQ ID NO: 544185 - DNA, 364 bp, Homo sapiens
ggcctcttcgtggtgttcctgggcgtgtactctctcactgtggtaggaaatagcaccctcatcgtgttgatctgtaatgactccygcctccacacacccatgtattttgtcgttggaaatctgtcgtttctggatctctggtattcttctgtctacaccccaaagatcctagtgacctgcatctctgaagacaaaagcatctcctttgctggctgcctgtgtcagttcttcttctctgcagggctggcctatagtgagtgctacctgctggctgccgtggcttatgaccgctacgtggccatctccaagcccctgctttatgctcaggccatgtccataaagctgtgtgcattgctggtagcag

SEQ ID NO: 544186 - DNA, 364 bp, Homo sapiens
ggcctcttcgtggtgttcctgggcgtgtactctctcactgtggtaggaaatagcaccctcatcgtgttgatctgtaatgactcctrcctccacacacccatgtattttgtcgttggaaatctgtcgtttctggatctctggtattcttctgtctacaccccaaagatcctagtgacctgcatctctgaagacaaaagcatctcctttgctggctgcctgtgtcagttcttcttctctgcagggctggcctatagtgagtgctacctgctggctgccgtggcttatgaccgctacgtggccatctccaagcccctgctttatgctcaggccatgtccataaagctgtgtgcattgctggtagcag

SEQ ID NO: 544187 - DNA, 364 bp, Homo sapiens
ggcctcttcgtggtgttcctgggcgtgtactctctcactgtggtaggaaatagcaccctcatcgtgttgatctgtaatgactcctgcctccacacacccatgtattttgtcgttggaaatctgtcgtttctggatctctggtattcttctgtctacaccccaaagatcctagtgacctgcatctctgaagacaaaagcatctcctttgctggctgcctgtgtcagttcttcttctctgcagggctggcctatagtgagtgctacctgctggctgccrtggcttatgaccgctacgtggccatctccaagcccctgctttatgctcaggccatgtccataaagctgtgtgcattgctggtagcag

SEQ ID NO: 544188 - DNA, 364 bp, Homo sapiens
ggcctcttcgtggtgttcctgggcgtgtactctctcactgtggtaggaaatagcaccctcatcgtgttgatctgtaatgactcctgcctccacacacccatgtattttgtcgttggaaatctgtcgtttctggatctctggtattcttctgtctacaccccaaagatcctagtgacctgcatctctgaagacaaaagcatctcctttgctggctgcctgtgtcagttcttcttctctgcagggctggcctatagtgagtgctacctgctggctgccgtggcttatgaccgctacgtggccatctccaagcccctgctttatgcycaggccatgtccataaagctgtgtgcattgctggtagcag

SEQ ID NO: 544189 - DNA, 610 bp, Homo sapiens
tgaatatataagaattgaagtgtatttcctgtctcttttattaaaagcaaacataaaacttaagcccaaaacctctcctgtaccttcataaagygatgaacagcctacctcattagctgaagatttgcctaacagatatgtgtagaatagtatctatgttgttcctagaactaggaagaattgtgatcagtccagttttaatattttcctatgtttaataactagatgacattcatcactttccattcccttaacagaatatcttaaggattattataccttactttcctcccaagaagtattagcgcaaagatctagaggcacccaagaaataactcaatacaaacgagacccagaaaggtatgatcttgctaagttgtatgtctcttatacacgtttcttgattaagaaaaaattcattaagatcctatacatatgatttttgtaattcactgtataactctcagagctcctctttattttacaggggtgaacttacaaggacttttacattaaaattgtgaccttctgagcatcaaagagcaattattgtcatttaaaaaataataataattttggtgaagtgaaacaatttaaaaaataaaagtct

SEQ ID NO: 544190 - DNA, 621 bp, Homo sapiens
agtgttactacaaagaatcaaaaagtttaaaaatatttaaaagtttataaagttaaaaaagtacagtaaactaaggttaattaaacattgaagaaataaaaatgtttgtataaattgggcgtagcctaattgtctagtatttataaagtacacattagtgtacagtgatgtcataggctttcactttcactcatcactctcactgactcacccagagcaacttccagtctcgcaagctccattcatgccaagtgtgctacagtagttttactatgctttttctatgtttagatacacaaayatttatcattaagttacaattgtctacggtgtttaatgcagtaacctgccgtacaggttttagcatagaagcaatgggctataccatacagcctaagtgtgtagtaggttgcaccatctaggtttgtgtaattatactgtatgatgtttgcacaataattaaaccacctaacaatgcatttctcagaacattttcccatcattaagcaacatagactgtatacccgaggctaagcttcagagattttcacaaacggttctagcctctctttcagtctatggtttcagtggttgtgaaatagctgagcataggtgggagaa

SEQ ID NO: 544191 - DNA, 592 bp, Homo sapiens
ggtaggcagtaacactgccaggaaatgcacaaccttcctctcctcctgcaaagtcagaacactttacagatataacaagccaagaaagaaatagtccaagctcttctgttctccaagtagaaggcattaaattttgcagtgtgtgtgtgtgtgtgtgtgtgtgtgtgtgtgtgtgtgtatgtgtgtattttcaacctcttcaaaagaccctgaaaactagctgagcccaaaactagcgaaaagtcacctgtaccccaggcagctttgacttcagcttaaagggaaaccggccaaactttcaaaagtccagagggctcattccagccagagggccccaggcctcaggaatttactyccagccatggccaaggggcttcttggctctgtgaaccgctcctgccccaggagctcaggctgcatcagtctaacgcaaaggtgatctaagaggtgtggttgttgaaccaactgagccagaccctagccacccatgtttcttccgtggggtttccaaggcttgccgccaccctacctcactctgtatcccaccactcctcaaatatggacctttccagtttcggccctcctgatccct

SEQ ID NO: 544192 - DNA, 551 bp, Homo sapiens
gttgtatggcacagtagatacagaagtaaatacatatacgacaagagatcagtgtgtgagttagtgctgtttgaatcrggagttaggcaggggttttactttgttattgctatggttaccctgtgtgtgtgggactcttccaactcctggagtgagattttgtattctaggtgctggttaatatatcagagagtttatctcaatatctgcccatcctttggctttggatcaaccttttgcacagttccctggagagaatctatgtgttgccgcattccctgctgtatctcattgttaatgtttgtagtgtggtgttggggggcaggaagtagaatatcccccaatattctgattaagcctctgttgtaggcaggttccatgaaactgggtttttggagtagtagtcttctcaagagttttgccctttctgcagatatactgatgggcctagcatggattcctgcccctccctcctccagagagttcttttctgttttactgaacccttccccagctgtggtggaatctaccaatgcccataggctactgct

SEQ ID NO: 544193 - DNA, 421 bp, Homo sapiens
cccaggcgcacatcaccatgcctggctaatttttttttttytttttttttttttttttagagatttagagataaggtctccctatgttgcccaggctggtcgtaaactcctgggctcaagtgattctcccacctccgcttcccaaagtgctacgattacaggcatgaaccaccacacctggcctcattacttttatagaacagtaattatagactgaaattccatgtgtatctcttagtcctctcttctgttttgttgttgtttttaaataggcttacagggtctagcaaagattccaaagatatactcactggttattgtagtattttttctatcattgctatttttttattcttaaagttataagaattattttgccttataaatatacatatatatattttgacacagaaagatattg

SEQ ID NO: 544194 - DNA, 474 bp, Homo sapiens
gacatagtggctcatctctgtaatcccagcatttttggaggccgaggtggrtggatcacttgaggtcaggagtttgagaccagcctgaccaatatggtgaaaccccattcctactaaaaatgcaaaaattagccaggtgtggtgacatgcacctataatcccaagtacttgagaagctgaggtaggattgtcgcttgaacccagaagccagtggttgcagtgagtcaagatcacgccgctgcactccagcctgaacaacagcatgagcctgtctcagaaaaaaaaaaaaaaaaaaaaaaaagaattttatcatttccttccttgtttgtctttcctacgctagacaatatctacaataccacaagcaaaaagagctcttttatagctagtgattaaatgaaaacacagattgtaagttttgtgtagtttctcagttccaaagagttaactctaataatgctagagactaaatgt

SEQ ID NO: 544195 - DNA, 661 bp, Homo sapiens
ttcaaatattctggcatactagcattttcgaattgggtgatcatattcatatttattgtatttaatgtatgattttataaatgttgatactatccctccatgtattttcagactaaacaattctgattattctataacttttctctgtttgtaagcttgtgcttagattgatcataggagtcagttttctctaaaactgcatggttcacttagayatttctagacaaggtctccaaaactgcattctgacttttagttaaaacagaccattttcacagggctgagaaaatgtttgtattattctcagtgactttcataatcgtgcccagaatactggcaatcacatttaatcctagagaacatccgtacatatctttaagactacatctccaattagtgaaagacttattctttttgggctatgttctcttacatccatccatccataggatgacagcataacatttattaactcctatttgtcaggcactgtgcttggcattcgctgtgtattgagcttcacttcatcttcataacaatctggcatactgataacccattttacagatgaagaaattaggcttgccaagattaggaaatttgccaagcatcacacagctagtgaaacacagagtaaaattccacccagagtcccttattc

SEQ ID NO: 544196 - DNA, 607 bp, Homo sapiens
tttgtatttttagtagagacggagttccaccatgttggcgaggctggtcttgaattcctcatttcaagtgatctgcttgcctcggcctcccaaagtgctgggattatagacatgagccaccacaatgggcaggtattctaagagatttttaaagaaggaatatacatcaagcttcctaatttatctccaggtaccaaccacttgacagtttgcttgtgtggctactacgttaaattatggggtttccatagttgggtatgcaggattcacaaaatagatttagttcctgctctcagagagcttaccttctagcayacacacaaaaaaaggcattatccgcttgatgttgttctttttcataattttgtgttcctctctgtattatccctaatgcaaattgttttcatttcagtattctgcgaatggcttcacaacccaaactgtgggcgcttctgctcagggagtttgtggcaccgtgggatcaggaatcaaaaacggaggtcaggagaccatcgaaatggtgaaaggaggacaccagacctcggaatcctgccggggggctggccaccatcacaccctggactcctgcaggggaggacacacggag

SEQ ID NO: 544197 - DNA, 607 bp, Homo sapiens
tttgtatttttagtagagacggagttccaccatgttggcgaggctggtcttgaattcctcatttcaagtgatctgcttgcctcggcctcccaaagtgctgggattatagacatgagccaccacaatgggcaggtattctaagagatttttaaagaaggaatatacatcaagcttcctaatttatctccaggtaccaaccacttgacagtttgcttgtgtggctactacgttaaattatggggtttccatagttgggtatgcaggattcacaaaatagatttagttcctgctctcagagagcttaccttctagcatacacacaaaaaaaggcattatccgcttgatgttgttctttttcataatyttgtgttcctctctgtattatccctaatgcaaattgttttcatttcagtattctgcgaatggcttcacaacccaaactgtgggcgcttctgctcagggagtttgtggcaccgtgggatcaggaatcaaaaacggaggtcaggagaccatcgaaatggtgaaaggaggacaccagacctcggaatcctgccggggggctggccaccatcacaccctggactcctgcaggggaggacacacggag

SEQ ID NO: 544198 - DNA, 607 bp, Homo sapiens
tttgtatttttagtagagacggagttccaccatgttggcgaggctggtcttgaattcctcatttcaagtgatctgcttgcctcggcctcccaaagtgctgggattatagacatgagccaccacaatgggcaggtattctaagagatttttaaagaaggaatatacatcaagcttcctaatttatctccaggtaccaaccacttgacagtttgcttgtgtggctactacgttaaattatggggtttccatagttgggtatgcaggattcacaaaatagatttagttcctgctctcagagagcttaccttctagcatacacacaaaaaaaggcattatccgcttgatgttgttctttttcataattttgtgttcctctctgtattatccctaatgcaaattgttttcatttcagtattctgcgaatggcttcacaacccaaactgtgggcgcttctgctcagggagtttgtggcaccgtgggatcaggartcaaaaacggaggtcaggagaccatcgaaatggtgaaaggaggacaccagacctcggaatcctgccggggggctggccaccatcacaccctggactcctgcaggggaggacacacggag

SEQ ID NO: 544199 - DNA, 530 bp, Homo sapiens
agggaccaaccccaggaaaagggctggcattagaacacattactctcaaactttctaagagctcttcaggattactcctgtcatgacttgtacaaccaaaaatctaaacttctcaggttatccattgtctctgaaattcttattctctcgggtatggtgattatataatttaacttccaaggtagaacactttttagartgaaacaaggtgctattaagaaacagataccttggaatgacattaataagccatgactgtgcaggacaaactgagatttatgatctaatctttcatccatttctgtgccctcatatgcttccttctgccttctgaaattcatagtctgaatcccaaaaagtcaccctagacccttaatctcttttctgaccattttcttcaccttgttactcattattcttgagtgaaaaaaaacccctcaggccacccactttccccagagacctatcaagtggtggccaatttttccttcccacattcctgggacaggtagatgtcttcctccctcatc

SEQ ID NO: 544200 - DNA, 639 bp, Homo sapiens
ctacagtacattttgtgatgcctaccatgaaaggacctcattaagtatgcaaaagtagatccacgcctttcttgttaaaacacagattagacggattatataagtgctgcaaagaaggctaagaaatggtgaatggagacgttgcttctaaatcaaaataaaacaattctttaaaaagggttatttaagaaacatcttcttacaaaaacccagagaccagaattcttccaaaattggtctcatcatttcgtgggtcttatatctctgtcatcatattttagtcagtaaagaacattcaggttcccagtggtgcacatgctaatggttatggaaacacattttgagaataatttatctagaacaagaattgcctccctgacctgcacattagagtatccagggaagcttttaaataacataaagcatacaatatagagctcccatccccaaagattctgatgtaattggtttgaggtggattctgaggtggggcctggtggttggtgtttgttaaaagctccccaagagacaccaacakgcagccaaagttcaaaacgattcctcttgatgacaatgctcctaaatgtgtaacgtcacttgtggacgtaacaggccttagtcagttctggcccaggtgca

SEQ ID NO: 544201 - DNA, 588 bp, Homo sapiens
catgagttctggtggtgacaaaccatatgtatctaccattttactatttgttttgtcatttactccatatcttttcttcttctgaattattcttttttattatatgatcagcttattctgtgtacactattttactaagtgattgcaatagaaaactaaacagatgagtcttgacatatttcagtctaacttaaattgttgttttaataattcctcaactttactaccttcccattgtgtatattttcatgcgtttacttttctatatacttaatattgaccttataattattatttcctgcagccaatatctaatatatttatctacatatttatcttttcaggtatactgttttttttcctgtttcttgtgcttttgtctagaataattatctttatacctgaacaacactctttagtatttctttaagtgcaggtgtttttcagtttttgcttgtctgaaatcatttttatttggtcttctttagaataatatttttgctggatatagaattcttagaactttgttttcttagcatttgctartgatgtccactgttttctagtttccatggtttctgagaatag

SEQ ID NO: 544202 - DNA, 639 bp, Homo sapiens
ggtaggtccctgggcagacagacaggggtggctgggaacaggaacaggaaactgacctgtccactgatgtcaccctagggtgctgtgccttctctccagtgtttgtctgaagagacttccaaaagaggtaccaaaggaagccgaacccatcccctggcctcagaggggtcagaggttgggagggacacrctggtctgaggatggacgcaggagcgcactcccccggctccctctctggtgagacccctccccactggcaccccacccgcgggaagcagagccaacactatcacaccccactggtcccaggccagctgcccagcccgatgccctgcccttcctttctcagggctgacaggctttctgggctggagttcctcatctgtgaagtgggggttatgttaccaacctcagagggctgtgaaaatgggacggtgtctgtgaactccctcacatactgcctggcccttagcagagctcctcgaaatgtcagttctttgctgcccggagccaggctcctggtaatgaccagggagagagcctgcccttgaccaaggagtgaaaaactgacctcaaaatgtcagttctttgctgcccactccagcctccacccgcttctcacaatcattccctgagcgc

SEQ ID NO: 544203 - DNA, 644 bp, Homo sapiens
cacctagacgtaccgcacgggaaggaggagcagatctgctgacctcrgggcctgacagtgtgggacaggctcttctttcccaaaattagggagctcttgacagaaagcagttctgatgcttacatctggaatctgaggcatcctctgactccactcaaagagggtgagggccttcttaagatacaaatggtggaggattgctgccagagaagtctggtcagagccacagggtctgcctccagccaaacgggagcttttggtgagaaggtgttggacaggggattggcgcccccctttggtttggcctccatcctcatctctcttgggccaagccagctgcctaggtcccccaagcatgggggaccccttcccacatataagttgagaaggtgcctgccatagccaggagcgcatctcaatggaaacatcactggggtcacttgggaagaggacttcggggtagaggctgggaggagcccctggacatgcctgtcctgaaagcggctgcctccattatccattcccaagatgcctgatcagaaaccaaccatgaatgaacccctggctccttcaccacccccacgattggtatgatgctgccggcacagctgggatacacacggctcccccaggcctgagctgct

SEQ ID NO: 544204 - DNA, 644 bp, Homo sapiens
cacctagacgtaccgcacgggaaggaggagcagatctgctgacctcagggcctgacagtgtgggacaggctcttctttcccaaaattagggagctcttgacagaaagcagttctgatgcttacatctggaatctgaggcatcctctgactccactcaaagagggtgagggccttcttaagatacaaatggyggaggattgctgccagagaagtctggtcagagccacagggtctgcctccagccaaacgggagcttttggtgagaaggtgttggacaggggattggcgcccccctttggtttggcctccatcctcatctctcttgggccaagccagctgcctaggtcccccaagcatgggggaccccttcccacatataagttgagaaggtgcctgccatagccaggagcgcatctcaatggaaacatcactggggtcacttgggaagaggacttcggggtagaggctgggaggagcccctggacatgcctgtcctgaaagcggctgcctccattatccattcccaagatgcctgatcagaaaccaaccatgaatgaacccctggctccttcaccacccccacgattggtatgatgctgccggcacagctgggatacacacggctcccccaggcctgagctgct

SEQ ID NO: 544205 - DNA, 620 bp, Homo sapiens
atctctcaaaaattatctttcccttgaattgttaaaccatggggaaatcaaagcccagtctcataaatatttgatttaacaacaaaaaaaaaatgctatccctcttggtagccagtttttcttccaacttatctcaggcctccttcattatctcttggcatggagggattcaagcctcttatatttctgctatcacaccagagctgtattttataagctgacatctacacatctatctcctgacatctgagaggatcttaacttggtaaacaatacaaccggattcattaaaagtttctaactcacagcaactccatgaaaacttcctctagttttctgatgaattttgttcctgggctcctttgtcttgagtgtttcaatctggtaaagttgttttagtctctgggraaaaaaaaaaaagaaaagaaaacttatctacactctccagatatataggggtggctgtaatagaatcttgatcaatggactggaaatgttgaagacaatacaattgagctaatatagtgaatgaaaacaaatttgaacttgggttctgaaatcagagtcagttcaatctgagagtctaccactcactagttgcatgactattcaacaacttg

SEQ ID NO: 544206 - DNA, 262 bp, Homo sapiens
atatatttgtttaggtcattcaagactcagtctacccttcactattttatgaggtcttcccacccaatcccaaactaggatcaatgggccagtctctctgttcccatagaaacttgtaacattctcaattataacatacttcacattgttctgtggctattttctgatctgccctggacttacgactgattgactttggaaaatgatttgatctaaacytcagtcagtcatattggttccaatgaatttcagccagttttgt

SEQ ID NO: 544207 - DNA, 569 bp, Homo sapiens
aaaacttatttctctgtggaacaatactggttattgattcaaagctgatgagggtggaggaaaagtgtgtggaatacagaggtttgagaaagggaaaatggcctgtctacaaagctgatttgagaaaatcctgcaaatttaccattcatctattcaaaaaaaatcattgagcaccttctacgtgacaggtaccattctaagcactggagagacaagagagaacaaaacagtagattttgaaagtgttagaaaaagcattacatacatgtacataagagagagtgcctgggtagttactgtattttgggaagtccaatcaaacctcctgaaggtgataattaagggaaaatccaaataaattacagcatgagtgtgggagatactgaggaataaaatgaaaacagacattcttttcaattttttttttacttttattccaacattgctttattttattattattttttatttcaatagtcttkggggtacaggtggtttttggttccatggagaagttatttagtggtgatttctgagattttagtgcaaccgtcacatgagcagtgtac

SEQ ID NO: 544208 - DNA, 628 bp, Homo sapiens
gcatcttctctgtgcttggagagcaggcatattcctgcttcctcctaaccctctcctcctggagagactgggccctttgatgtgctaatcagagtrtggggttctctccagtcatggaagaatgaagacttaaaaatcctctaaatcctctgccgcatgcacgttaggatttcttaactcctcagcctcatctcaggtagatggtggacaggttccagactagaacacaaaggcaaataggacccaggtgtagagggaagagagaggggttagcgtgccaggaagaaggaggaaggccaagggagaagcgtggatggggagacaggtggacagacaagtgctcagacaggccaacaggtcaacagagaccggatgagcacagcatcggtcaaaaggaaggagaggcccgatatgctgaatggcccatacatctctggaggagctaatggacaagaggagatggcagggatgcagggagcctgcgtggaccacaggaccaaaatggggcccaggggcaaacagagggacccacaaaccctctctggcagccctggctctgcccatggcaggaatctgtgcccactcccttctgctggggccctcaccatcctccagagtggtggcattg

SEQ ID NO: 544209 - DNA, 628 bp, Homo sapiens
gcatcttctctgtgcttggagagcaggcatattcctgcttcctcctaaccctctcctcctggagagactgggccctttgatgtgctaatcagagtgtggggttctctccagtcatggaagaatgaagacttaaaaatcctctaaatcctctgccgcatgcacgttaggatttcttaactcctcagcctcatctcaggtagatggtggacaggttccagactagaacacaaaggcaaataggacccaggtgtagagggaagagagaggggttagcgtgccaggaagaaggaggaaggccaagggagaagcgtggatggggagacaggtggacagacaagtgctcagacaggccaacaggtcaacagagaccrgatgagcacagcatcggtcaaaaggaaggagaggcccgatatgctgaatggcccatacatctctggaggagctaatggacaagaggagatggcagggatgcagggagcctgcgtggaccacaggaccaaaatggggcccaggggcaaacagagggacccacaaaccctctctggcagccctggctctgcccatggcaggaatctgtgcccactcccttctgctggggccctcaccatcctccagagtggtggcattg

SEQ ID NO: 544210 - DNA, 628 bp, Homo sapiens
gcatcttctctgtgcttggagagcaggcatattcctgcttcctcctaaccctctcctcctggagagactgggccctttgatgtgctaatcagagtgtggggttctctccagtcatggaagaatgaagacttaaaaatcctctaaatcctctgccgcatgcacgttaggatttcttaactcctcagcctcatctcaggtagatggtggacaggttccagactagaacacaaaggcaaataggacccaggtgtagagggaagagagaggggttagcgtgccaggaagaaggaggaaggccaagggagaagcgtggatggggagacaggtggacagacaagtgctcagacaggccaacaggtcaacagagaccggatgagcacagcatcggtcaaaaggaaggagaggcccgatatgctgaatggcccatacatctctggaggagctaatggacaagaggagatggcrgggatgcagggagcctgcgtggaccacaggaccaaaatggggcccaggggcaaacagagggacccacaaaccctctctggcagccctggctctgcccatggcaggaatctgtgcccactcccttctgctggggccctcaccatcctccagagtggtggcattg

SEQ ID NO: 544211 - DNA, 463 bp, Homo sapiens
agcagacctgacgctgtactctgggagcatgtgccttaatggggagatgaatacataagtggcagttgcaatgccgttcatgcagtaagcccagggcattctggggctagtacgaggggcatcctgcccttcctgagtgacctccaaggrcttttcagtagaagtaaagctgagctagaacgtgaagataagttgttaacctaggggctgggtagagtaggaaacagacccagaccatcacaggcagagggacctgcacatgcaaaggcccagaggagaggagaggagaggagaacaaggggcgctataggaagaggttctgggtggatggagcaaggcaaggggcaggaggatgcttggagacatgactggagcagccccacagaactgtagcatgtgcagatttcatccccatagccgcacagagctgctgcaggattttaagtgcaggagtggcagaatc

SEQ ID NO: 544212 - DNA, 600 bp, Homo sapiens
ctggagtcaaagcagacctgacgctgtactctgggagcatgtgccttaatggggagatgaatacataagtggcagttgcaatgccgttcatgcagtaagcccagggcattctggggctagtacgaggggcatcctgcccttcctgagtgacctccaagggcttttcagtagaagtaaagctgagctagaacgtgaagataagttgttaacctaggggctgggtagagtaggaaacagacccagaccatcacaggcagagggacctgcacatgcaaaggcccagaggagaggagaggagaggagaacaaggggcgctataggaagaggttctgggtggatggagcaaggcaaggggcaggaggatgcttggagacatgactggagcagccccacagaactgtagcatgtgcagatttcatccccatagccgcacagagctgctgcaggattttaagtgcaggagtggcagaatcacagagcgaggtctgaagagtcatctggcacaacttctcattttggacaaagaggccaaaactcagagacaggaagcagcttgtgcrgtgtcactgtggaactggttagaactcaggtctccagact

SEQ ID NO: 544213 - DNA, 651 bp, Homo sapiens
tgtccaacatgcagccacggaagctgggttgaaattggtctggggtctattatgggcccccatgccccactgggaatcttcatctttgccttcattcagagactgatctaactgatctcttttattccccaaacataaagtccaaacatgtctttgctcttgtctgtataatttcagggtttgggctgggtggagaaggggttgaaggaggggaaaaagggagcagggaggcagtctgtgtggcaaggaggggcagcgccaactttcctgggcacaaagcgagtttgtcatgatctcaaaatcagggctgaatggctttggtttaaactgattaggagctctgggagttttgagaagcattctgactatcccattctggagcaggatttttagtggtatatttttttggggttgatgcctaaagttttgaaaggataaatgcactaaaaatttaaacattgggaaagcaatcactcagtgacatttaataacactaatgcagcggaattacagaattatcacagtaatacggatctcaacaccagtttcctatcaatgattagagaattcctgaccaattaacaatgaaacattccgttgcagcttgggtkaaatttcagggcagtagccgcaaaaccagaaatcttttct

SEQ ID NO: 544214 - DNA, 620 bp, Homo sapiens
tgtgtggctttaggaacacctgttaacctttctgggygtttgctcacccccaaattagggattctaaaccccgattttctctgttcgtggagttcttctgtggtgtccatgcaacaatacttatgaaaggctgttgtgatgtatatgcactgcatgcttatagggcagttttttttttttgtttgttttgttttttttaaagatcttaatactaaatgggaggcaggtctatgatgcgtatgtagtgcataggtattcacatggggttgggagctgcttttccactattggagtcagatgccttcctgaagcaggaaaaccagaagctgaggaaggggtttcctgctttgcctcccccatttcctctgcaaggaaggtcccagtaggcaatgggggatatggagtcagagggaggaggaagcgaatagggtgaggctttgcattgagaccaggctttggccacagggtcagaaaaaaatcgttgtctctcttggaagagaagagctacttagtctgtcacagctcaagtctgtttcctggggtagcttcaggatgccagggcctcgaagtacctcaactggcccccagggacctcccaattcaaaaagagaaattgcaat

SEQ ID NO: 544215 - DNA, 584 bp, Homo sapiens
tcctcatattgcaacaagattttatttctaattatgctgtaataaaactggagcgctcccaggcttcctttcaaatgacttgtacacacactgcagattgggccctcctcagccccattgtaatagcatttccctgacattcattagacatgcatgagaggggcgctttaagaatagaattgcatttaaatggatttgctgagagaggaagatgaaaaaaagagaggcgaggagtggggagagggagagggagagaggtttgttgaacaaactatgaaaacaagatgccataataacagggtgctgaaataagcctctttattcccggccctcgtccgctgcacatggcagagcccagccgggggcgacagcctccaaccctccccagagcccccacccccacttttatgtttcccgctgggggtgctttgtagctctcactccatgtgtcagatgctcacggtataatagaaatcactgttattacaattcgggaaagctacctccttgcaacagaaccccmgtagctgcacggcggcagggaaggggacccttgtgtgcctgggccttggggaggaggatgg

SEQ ID NO: 544216 - DNA, 370 bp, Homo sapiens
catattgaatagcctggctaaccattcttgctgtggctaaagtaaaaaagaaatgctcctactgtttgtggggccttcctggcagtcatatactgtatatttatgtataaataatctatatgtaaagcaaggacttttctatagttttgatgagagcagagaaaaaaaaatcctaaggcttgcataaacttcagaaatccaaggtagtttttcttgttcccagagccttcccttagggaggaatacaattttattttcactagatataaattaagttrtaaacaaagcatccaaagattagaaggaattggagagatgatttggtccaaatatctcagatgcctgaatctcctctataatattccatcaa

SEQ ID NO: 544217 - DNA, 607 bp, Homo sapiens
atgcaataagaaagtgtgtaaggcattacaagagcctggcgcacgcaggggcctggtgaactagcctttcttctccttcatccacatacaggatgtccctttagaggctggggatggatagaggaggcagtggggagagccaccacctggcccaggcatctgggatcttgtgacctgtctgggccgtagacacccaggtggcctaagaccaggaggccgcctctgtgccttgggggcctgcaggggacttcaaagtctgattctatttaaaagttcaattagcatccacctgctccccacctcccgtggagggctgcacaagattctttgtgggggctgcaggtacagagggccccgatcctgcctgaataacagcctccctctgtctgagcccaagtgcacagataggaagttgtccaagcacacagagctcagggcaccagtgggtctaggaagggcaaaggcaaagacggccgggcgcggtggctcacgcctgtaatcccagcactttgggaggccgaggcgggyggatcacaaggtcaaaagatcaagaccatcctggccaacatggtgaaaccccgtctctattaaaagtacaaaaattagc

SEQ ID NO: 544218 - DNA, 575 bp, Homo sapiens
ctacagctcttcctcctcggggaacagctccagtcctgcctcctccgggaggccctcctgattttctccaggcctcagtgacctctccccatcccgtgcgctaagatatctccctgctaggccacactttctggccagcatgaccactgtttggccattcttgttgcccattctccacccacatcaggagtgttcgggggtctccccagttaggctacaggtcacaggctgtctgtgccaaagcaggttctcagtaactgcttacacaattaagctgaaatatgcccagcccttccctgactgcccaagggyctgctttgcactcccctaagacccctaaaactgtcccaggcctgaacaagcagaggtgtgtttgcatgggggaagtggggtgtgtggtgggagttgggaaatggccatcttttctaaacacttcccaggatttcgggtgtctcgtactttatatgagtgagaactctctttcatcctcaccactctgtgacactggtatttacatcaattatttccatttttttagaagagactgaggctcagagagggccaaagtcccgcag

SEQ ID NO: 544219 - DNA, 445 bp, Homo sapiens
gaagccaaaaacagacccttcctcccacatctgttccttattttattttatgagacagggtctcaggtctcactctgtcacctgggcaggactgcagtggtgccrtcatggctcactgcagcctcgacttctcaggctcaagcaaaactcctgcctcagcctcctgagtagctgtgaccacaggcacacgcccccatgcccagtcgtcccctctcgatacaccccttgatagcacacccccacaccccactgtcccctctctctcagtacatcccctgaaagcacgtgcccccaggccccgctgtcccctctcagcaaacaccttgacagtgcatgccccccgggctcggctgtctcctctcggtatatcccttgacaacgtgtgcccccgtgcccggctgtcccctctcggcacactccttgacagcagatggggctacctggc

SEQ ID NO: 544220 - DNA, 533 bp, Homo sapiens
acgccgctgttcatggggatgcacaggctctgagaggcctttcatgatctaagcgaccgtgggccgcgccagcctgaccgccaacttcctctgcacggaaagtcatgtcttctttagatttttctttttccctctcagaatctggcccttatttattcccttccccactggagttgacaagtaggaatcgatttattccaacccctactctgcatggagacctaagcacatttcttcagacagaggccagtgcccgcacagcctgggaggacaggcagggaggggcagctttcccgcaacagacagcaacctcgtgcctaccctccctcccagagtctgatgaagtgaacacagttccctcaaacggcaagaacgaggacttgatttcactcctccaaggaaagtaagctgctgccactttcaccaagataatctgggccactgctccccaaatatccccaataccccaggcaatcaccaaaactaccctctatttttacttaaaaactarataattaacaaatacacttgaa

SEQ ID NO: 544221 - DNA, 648 bp, Homo sapiens
gagcacagaactgggtagaaatatgttccatttttccccmaaggtgaattgggctttcatatctcaagccaagaaaaaaaaaaaagttttctaatttagctcttctctataggcataaaagtacccaacaagctcatatccagcaatccacttccctcttgggtaattttcatagagtcagaaggatccttcctgcccacaacccaaagactaactcttactcaagaataacttaacgtttatcatctttgtcttccccttctcatttctattaaattggtttccataccattaatctatcacactgttttctgctacatttaccttttaaattttccacttgttttattcaatttgccttctaagatgtgttcatatttctattaaggtccagctagaaatgtctagatgcatagctaaagcatggagactgcaatctgaaggccgcatggctgccctgctggcacggaggttttggaatccgactgcccctagtgggctctgactcctaaatggctgctgcacatcataccttggtctcctctgtgagttccctccatctatggcgtgtagagacatattccaaaactccatttacaaggtctatttggactgcaaaagactgaatgataaggtcactggaacagt

SEQ ID NO: 544222 - DNA, 534 bp, Homo sapiens
ggtctgtggctgagcatagagacagacggccccataattttagcaatgactcatctctcttttactttgcaaagtatgacagtggccarctagcaaacttcatcacagtcttatttatgctttcttcactgaagctcccaaaagatggagtcggtgtttttgttcaactgtaaattaaagacagatgacactcctgaagatttcgtgttaagtgattagtcaagtaactggccatatagtactaaattctacttatatttacacacttatgaatccttgaacagttcaatgttctgcaatctacaaaatgcttttactccctttaacactgttagtcaccacaaatagtctaggcctcaaataatctctcatttcctcagtttatacacctatgcaatgagacaaatgagaaagtgaatatgatgtgatttaagtccctaggaactaaaccattatgcgtgctggaactgaacaattttacttttagaactcagaagactgacacaagagcatattcaaaacaactgctaaaca

SEQ ID NO: 544223 - DNA, 534 bp, Homo sapiens
ggtctgtggctgagcatagagacagacggccccataattttagcaatgactcatctctcttttactttgcaaagtatgacagtggccagctagcaaacttcatcacagtcttatttatgctttcttcactgaagctcccaaaagatggagtcggtgtttttgttcaactgtaaattaaagacagatgacactcctgaagatttcgtgttaagtgattagtcaagtaactggccatatagtactaaattctacttatatttacacacttatgaatccttgaacagttcaatgttctgcaatctacaaaatgcttttactccctttaacactgttagtcaccacaaatagtctaggcctcaaataatctctcatttcctcagtttatacacctatgcaatgagacaaatgagaaagtgaataygatgtgatttaagtccctaggaactaaaccattatgcgtgctggaactgaacaattttacttttagaactcagaagactgacacaagagcatattcaaaacaactgctaaaca

SEQ ID NO: 544224 - DNA, 497 bp, Homo sapiens
gctgtcactgcctgctccatacccccagcagcatccacaaagccctgctctggctttcctggttcttccacacccatgctgctggcctctctgattagattataccgcaaaacctctagggcaaggactgtcttttttccttttcaaccacaacgtctatcaccatgctacacatggtcctaattctatccaactgcatgtccttgcaggcccaccaatatctcccttttttttttttaagagacagagtctcactctgtcacccaggctggaggagggcagtggtgccatgatcatagctcacttcagcatcgacctcctgcctcaagtgatcctcccacctcagcctcctaagtgtctaggacaacaggtgtacaccaccacacccrgctaattttttttttttttttggtagagacagggtctcactatgttgcgcaggctgacctcaagctcctagcctcaagcaatccgatcccccaacctcagcctcccaa

SEQ ID NO: 544225 - DNA, 543 bp, Homo sapiens
ccaccaattaacataaataattgcttgttgtgtgctgttttgttctctgtatttttcttgcattcatcttgtctctttcatttcttctaatagttcaagggcaaggtgtttttatttgcattttcccttagaatttagcttagtgttcagcaaaagatactgctgacgagcaaatcctctcttcctctcaaaaggtaggtaaaagtaaggctaaccaggaaaaaaactacaccacctttacgtgtacccccaaggcaactgtggtagagaggaacaacctccaggtctgccctgcgaagaacaggtgcacaggggtgtggctgccagcacttcctgagggcagggacyggcctttctgatggcatgcctggcaagggcacacggcagtgcttggtgaattcgacaatagatcaagtgtgatgaaatatatggtaaactaaccttttacatttgagcagaattatggcattcaggaattaaaactgctcttaaatatcatcaactttaactcaccgtcccatgtaagtagaaaccatggcttga

SEQ ID NO: 544226 - DNA, 434 bp, Homo sapiens
agccttgatcagaagagaggctgacattcattcccctgtgctgataagctatggcctactyatgttgacagttagcaaggcagggcaaacccctgtggtgcttctctgttcttttctaacccactctgccctaggaagcaatgggagctggtgtaaagagggccaggctggtgacaggggacccaagttctaaacctgtcctcatatggaaaagaagggagttagattagttgagagctaagttgcttccagtttagtgatatatattgagtttgtactttgtgccaggcacagttacagacactggggagtgaaagcagagtgcctgccctcttgacagtgggtttgtgaatgggaggtaggtggtggaatacagcacttacaaaccgtttcccgaaactgcgatccaaacgtttgtcctcactccctgcttt

SEQ ID NO: 544227 - DNA, 589 bp, Homo sapiens
tgtctgtcccctgattaagacatgctctgtgctggttataacactctgagcagccacaaaactgactgggcttccygatacaaggtcccagatagagtcgacttacgaaaagtcgtgttttcagacttgggaagtgcaaaagcctctttctctgcttggcaacaaaagcctctttctaattctactcagggttcttcctggctataattcttcctttccatgttcatagccaagacttctctcaaacataacacttaatgacagctcaagggacagtctctgggatgacaaaatgctccatttgacagaagaaaccctcaggacttacataatttccaaagtactaatttgcacaaggcagaaaattaatgttttgagctcaaaccactgtagcatttatttacatgaccatgtaagattaagctggttcatgtacacactcctccttcagaccttagcaactgaagcacgttgagcatatgtctgtgtgtgcatgttgcttttcatctctgccatgtcaaagcaccctgcgttcccacagcctagcggcctactcaggctataatggatattccaaatgttagataag

SEQ ID NO: 544228 - DNA, 656 bp, Homo sapiens
agctgtgtgacctcaggcaagtgataccagctctctgtttccttatctgtagcatggggatgataataggactttattcctagggttgttctgatgatcaattgatatacagaaagtgcctacccggaagatgctatatgagagttagctattattattttcmtaaagcttgccttgaccatgttaatccagtttaaaagtcctcatgttgacattttaaagattgcgaaggcttctctagacagtttatagcatataaggaatgaacaattgaagaagttaagatcttaacatgtctttaaaaagaggtggagacatgcagaaaatatacatgcaaatgcaaagttctttataacataagttagactgtatcatcaagcaaaaaaaaaaatgggtatatgtatgagcaagcaaaaggatatgagtgactagctgggcatggtggcatgtacctgtaaccccaactactcaggaggctaaggtagcaggagattgcttgaagccaggagtgctaggctgtggtgagctatgaccacaactgtgaatagccatccagcctggacaagacagccagaccctgtctcttaaaaatatgtattaaaaatatttcttttgaaagggctgagtgactggagaaaaaaacacttaaaagagac

SEQ ID NO: 544229 - DNA, 656 bp, Homo sapiens
agctgtgtgacctcaggcaagtgataccagctctctgtttccttatctgtagcatggggatgataataggactttattcctagggttgttctgatgatcaattgatatacagaaagtgcctacccggaagatgctatatgagagttagctattattattttcataaagcttgccttgaccatgttaatccagtttaaaagtcctcatgttgacattttaaagattgcgaaggcttctctagacagtttatagcatataaggaatgaacaattkaagaagttaagatcttaacatgtctttaaaaagaggtggagacatgcagaaaatatacatgcaaatgcaaagttctttataacataagttagactgtatcatcaagcaaaaaaaaaaatgggtatatgtatgagcaagcaaaaggatatgagtgactagctgggcatggtggcatgtacctgtaaccccaactactcaggaggctaaggtagcaggagattgcttgaagccaggagtgctaggctgtggtgagctatgaccacaactgtgaatagccatccagcctggacaagacagccagaccctgtctcttaaaaatatgtattaaaaatatttcttttgaaagggctgagtgactggagaaaaaaacacttaaaagagac

SEQ ID NO: 544230 - DNA, 619 bp, Homo sapiens
cctttcagcctcagcgttaataagctttccagcaggcttgagcctgggctaccagctttcccaggtggattcagttgagggaatgaaaaacaggtgagagaatgaataacaacgatgagcaggttttctcagagtgccccaagtgggctgcaaggattatccaaggaatttgtacmttttggtgaaagaagacaagaccctgtgggaaatgtggctttccagtgactcaaatgtcaggtgatgtgattggtatttgggtaaatgagggtcaagactcacacatagtcagtagaggcagctggggtaggcaggagatacatcgggcaggaccgtggtagaagccttgtgctgggggtggggcgggggcctggttgagtagttgtacctctctggggctcagctcagctttttgcctgtaggaaaagaggcctaaactggaggaattccagtttctttccagctctgagcatgtgtgatattatcagtggaagtgttccagatgatcttcccaggtcaagatgtggtccaggggtttgccatgtatcttagctttccacgctgaggaactttgtttacatacttaaaacgcttgcttcttggggaaaaaaaagttcagttt

SEQ ID NO: 544231 - DNA, 635 bp, Homo sapiens
tgcaaagttagtaacttgaagaacaaaaggaggtaatgtaacgtatgatgaatttgacaaatggtgcttttaggccagtttgctgtttacaatggaggttatcactcataggtactgaaccatatgcaaatgcaatgcaggaccttgttttagtacatgataaataacttttaccatatcaggtaataggtgctttagtgaaatcacactgttagttatttatgcaggatgtgtgtgagtgtatgtgtgtgtgtccttgaaagtatatgctttttatctctttctcctatactaaaatgaaaaataatcacagacataaaaaatataactccagttaggagtggtagccatttcttaagaaggttagcatattgatacrcataagttattttattagagatgcaattggtctttatttcatttactgacttaaaaaataaataaaaccctcaactaccctctttgagtagaaaatgcaaattactggtttgtacatattgcatgaaaaatgcataatttttctatcttaaccggccagtctgttcccagaatgcaaaagccaagaagccatgtataaccacaatcataccataaagcatgtgcttttgttaaatcggccaattcaagttataaaa

SEQ ID NO: 544232 - DNA, 635 bp, Homo sapiens
tgcaaagttagtaacttgaagaacaaaaggaggtaatgtaacgtatgatgaatttgacaaatggtgcttttaggccagtttgctgtttacaatggaggttatcactcataggtactgaaccatatgcaaatgcaatgcaggaccttgttttagtacatgataaataacttttaccatatcaggtaataggtgctttagtgaaatcacactgttagttatttatgcaggatgtgtgtgagtgtatgtgtgtgtgtccttgaaagtatatgctttttatctctttctcctatactaaaatgaaaaataatcacagacataaaaaatataactccagttaggagtggtagccatttcttaagaaggttagcatattgatacacataagttattttattagagatgcaattggtctttatttcatttactgacttaaaaaataaataaaaccctcaactaccctctttgagtagaaaatgcaaattactggtttgtacatattgcatgaaaaatgcataatwtttctatcttaaccggccagtctgttcccagaatgcaaaagccaagaagccatgtataaccacaatcataccataaagcatgtgcttttgttaaatcggccaattcaagttataaaa

SEQ ID NO: 544233 - DNA, 508 bp, Homo sapiens
cccattcttagtcctatagtttttcttttttgtaaattttggaataactaattatttaatctcaggacaaaaatgtaccacttaagatttttttctcatacaaagttatttttccctaaattcatattttgattaatagacctaaacatatttagtatttttataaaatttaagaagccaagaaagaactttgatgtatttaccaatttggctcaattttggatataacttggtcatttaatgagtattattacttaatacaactttaaaattttaaattgcatagaagtttcatttataaatgttaatttcatttcygattacctaatttattttttagtaattacacctagattacttacgaaaattaaaatattagagcaagtcactattttattttttattaaccaatttcatagcctgttaatatccagtgtttacctaaggtgaaaccttaaagtttaatacatgggtatcctgttcttaacccagaaaatacagctgtttt

SEQ ID NO: 544234 - DNA, 526 bp, Homo sapiens
gtcttcctgggtgtggttccttgttatggcagccctggggaagaacatggtgccatccccgtcacgtgggcactgagagcaccatcatggccagggaggccagcccttccttctgtggccatgggaagaccgtactctgtgggccgtgctgtgactgggctggtgacctcgtgggcgtggctgtgactgggctggtgacccccaggctccacacatgtgcacatcagcttcctctagagccatcttccatgatctgattcaaacgctggacttctcttctactagaccagagcctcgaggccaactaatcttcaacgaaactgaaaaaatgatttccagcaactgagctactctcacaagtatagaggattgagtagrattgggcatcaagcataaatatggatttgagatgtccttttggaatagcacaactcatatggtatcactgcctcaggggctggtctcttgggattcctggatccccacattttggactcattgcgctactgaagtgagaggatggaga

SEQ ID NO: 544235 - DNA, 526 bp, Homo sapiens
gtcttcctgggtgtggttccttgttatggcagccctggggaagaacatggtgccatccccgtcacgtgggcactgagagcaccatcatggccagggaggccagcccttccttctgtggccatgggaagaccgtactctgtgggccgtgctgtgactgggctggtgacctcgtgggcgtggctgtgactgggctggtgacccccaggctccacacatgtgcacatcagcttcctctagagccatcttccatgatctgattcaaacgctggacttctcttctactagaccagagcctcgaggccaactaatcttcaacgaaactgaaaaaatgatttccagcaactgagctactctcacaagtatagaggattgagtaggaytgggcatcaagcataaatatggatttgagatgtccttttggaatagcacaactcatatggtatcactgcctcaggggctggtctcttgggattcctggatccccacattttggactcattgcgctactgaagtgagaggatggaga

SEQ ID NO: 544236 - DNA, 641 bp, Homo sapiens
cgcagagacaggttctggagcaaccagttccygggacatagggatacacacactccttcctcagggacaggattctaagttctgtgttatatttgttagaagtctttgagttgtagaaaaacccacccacctaaaattgtcttagaaaatcaaggaaatttataagtttcaacatttaagttgaaagagatttccattcttgtaggtcagcacttgccaaattatcagcaatatcatatgcttccaaccttcttattagaagtccacaataggtgtggcttcgagagaggcatgatccgcagctcagccagcatgtccaaggactcagagtttcccagtctttctaacccaccttccatgttgacaggctcagcctcaatctctgtgagtccccaccccagaaggacccaagatacctcatgacgtcaacatggccatggcagctccagacacatgcctttacatcccaccaccaggggaggaaagcagtctctcctgaacacacacacagcagggaagcaggtccacgttccaaggaacactggtgaaattccttctgcctccttggttctgatagagtggaatcatttcccactaggccagggatgggatgttctttaagctcaagtgaatcctaactc

SEQ ID NO: 544237 - DNA, 550 bp, Homo sapiens
tccacgagaacaggcacaatgtggctaaagacccagtgaccatgcaggacgataaggacaattccgaccctcccagaccgggcgtcccaaagaggacacacccatctcttttctggattcatgtcctagggctgccattagaaaacaccacaaatggggtggcttgaaaccatagacatgggttctctcatagttcaacggcccgaagtctgaaatccaggtgtcgtggggccgygctccctctgaggcctgtaggggagaatccttcttgcctcccggcttctggcatttgcagtcaatccttggcattccttagcttgcaggtcactccaatttctgccttgtcatttggaatgctctgtatgtctctgtcttcttataagggcaccagtcatattggatgaggggcccaccctaccctagtataacctcaacttatgaatttcaccagcggcgaccctagttccaagtaaggtcacattgccaggtactaggggttaggacttcaatgtagacataattccacccatatcatccccctttcataagc

SEQ ID NO: 544238 - DNA, 599 bp, Homo sapiens
caaatgtgatgtgaggttgctctcatgattacagtccattatctaaaaccctgtcttggacaggcatgggagctcacatttgtaatctcagtgctttgggaggccaaggtgggaggattgcttgagcctaggagttcaagaccagactgggcaacatagggagacctcatctctacaaaaaataaaaaataagttagctggttatggtggcatgtgctctagactactcagagaccctgttactaaaagaaaaaaaaacataatcttgctagcagacrtgttagagagcctctgctttctgacttgatgaaataagtgaatatgctgggtaaccccacatggcaaagaactgctggggcctgtaggaactgctgggggtctctgggaactgctgggacctctatgaactgctgggggcctctaggaactgctgggggcctctaggaactgctggggcctctagggactgcaggagacctctaggtactacagaagtgatgcaggatttttctcaaccactttgtcgaatttgcaatgggggttccacatttactcggcccacagcgctcaaccccctgtggaagggagcacgtgattaa

SEQ ID NO: 544239 - DNA, 599 bp, Homo sapiens
caaatgtgatgtgaggttgctctcatgattacagtccattatctaaaaccctgtcttggacaggcatgggagctcacatttgtaatctcagtgctttgggaggccaaggtgggaggattgcttgagcctaggagttcaagaccagactgggcaacatagggagacctcatctctacaaaaaataaaaaataagttagctggttatggtggcatgtgctctagactactcagagaccctgttactaaaagaaaaaaaaacataatcttgctagcagacatgttagagagcctctgctttctgacttgatgaaataagtgaatatgctgggtaaccccacatggcaaagaactgctggggcctgtaggaactgctgggggtctctgggaactgctgggacctctatgaactgctgggggcctctaggaactgctgggggcctctaggaactgctggggcctctaggkactgcaggagacctctaggtactacagaagtgatgcaggatttttctcaaccactttgtcgaatttgcaatgggggttccacatttactcggcccacagcgctcaaccccctgtggaagggagcacgtgattaa

SEQ ID NO: 544240 - DNA, 628 bp, Homo sapiens
ctataaaatcaatgcaaatgaaaacagtagttctcattaaattatcaaaggtttaaaaaatgatactatataattcttgtaacggttctaaaatactgccaccatcattcatttctggagataattgtaaattggtacaacactttaggaaagcaatttastgctatttttctgttagggctcttatgtatgacatcctttcactgtatttataactttatcgtattgcacaaaacagttcagcacaagttagcctttatgcacacacagtagtgaacatcctgtattcctattatcaaatgcattatttctttctgttatatcacacattcataccgtttatcctggttcctgtgagctttaactcactggccgtttttcatagcaacctttatttcccggtaatagtaagcagcataaaaagatttttgccctttaactctttgtttcaatttctagaataattaactgaaaaaataaagccaaaatattaaaaaatccatgtacatgaagatatttgtaacatgtttatagtataaaaatagaaataacctaacttgtataaagtggaggcttcagtaggtaattatgataaatcatttaacatagtatatgatccttaaatact

SEQ ID NO: 544241 - DNA, 578 bp, Homo sapiens
tagatttttctccctgctgaagttgtgagatcctagggaaccaggaatgccttagattcccagtagatgaaagtttaaaataattgtttgcttgaaaaattagctgagtctatgagagagtgtttcatactttttctttttttttttggcttgaaacagagtcttactctgtggcctaggcgggagtgtagcagcgtgatctcagctcactgcaacctctgtctcccaggttcaagcaatggtcctgcctcagcctcccraatagctgggattacaggaacctaccaccacacccggctaatttttgtatttttagtagagatggggttccatgatgttggccaggctggtctcaaacccctgacctcaagtgatccgcccacctcggcctctcaaagtgctggaattacgggcatgagccactgtacccagctgagagagtgttttatactttcttgtgaattatagaacaatctagttaagcaagatgcaagatcccagaaggaatataaatctgggtacaggctgaaggtctgacttcagaaggggatggtggtaatggtaatgataggattacc

SEQ ID NO: 544242 - DNA, 578 bp, Homo sapiens
tagatttttctccctgctgaagttgtgagatcctagggaaccaggaatgccttagattcccagtagatgaaagtttaaaataattgtttgcttgaaaaattagctgagtctatgagagagtgtttcatactttttctttttttttttggcttgaaacagagtcttactctgtggcctaggcgggagtgtagcagcgtgatctcagctcactgcaacctctgtctcccaggttcaagcaatggtcctgcctcagcctcccgartagctgggattacaggaacctaccaccacacccggctaatttttgtatttttagtagagatggggttccatgatgttggccaggctggtctcaaacccctgacctcaagtgatccgcccacctcggcctctcaaagtgctggaattacgggcatgagccactgtacccagctgagagagtgttttatactttcttgtgaattatagaacaatctagttaagcaagatgcaagatcccagaaggaatataaatctgggtacaggctgaaggtctgacttcagaaggggatggtggtaatggtaatgataggattacc

SEQ ID NO: 544243 - DNA, 578 bp, Homo sapiens
tagatttttctccctgctgaagttgtgagatcctagggaaccaggaatgccttagattcccagtagatgaaagtttaaaataattgtttgcttgaaaaattagctgagtctatgagagagtgtttcatactttttctttttttttttggcttgaaacagagtcttactctgtggcctaggcgggagtgtagcagcgtgatctcagctcactgcaacctctgtctcccaggttcaagcaatggtcctgcctcagcctcccgaatagctgggattacaggaacctaccaccacacccggctaatttttgtatttttagtagagrtggggttccatgatgttggccaggctggtctcaaacccctgacctcaagtgatccgcccacctcggcctctcaaagtgctggaattacgggcatgagccactgtacccagctgagagagtgttttatactttcttgtgaattatagaacaatctagttaagcaagatgcaagatcccagaaggaatataaatctgggtacaggctgaaggtctgacttcagaaggggatggtggtaatggtaatgataggattacc

SEQ ID NO: 544244 - DNA, 578 bp, Homo sapiens
tagatttttctccctgctgaagttgtgagatcctagggaaccaggaatgccttagattcccagtagatgaaagtttaaaataattgtttgcttgaaaaattagctgagtctatgagagagtgtttcatactttttctttttttttttggcttgaaacagagtcttactctgtggcctaggcgggagtgtagcagcgtgatctcagctcactgcaacctctgtctcccaggttcaagcaatggtcctgcctcagcctcccgaatagctgggattacaggaacctaccaccacacccggctaatttttgtatttttagtagagawggggttccatgatgttggccaggctggtctcaaacccctgacctcaagtgatccgcccacctcggcctctcaaagtgctggaattacgggcatgagccactgtacccagctgagagagtgttttatactttcttgtgaattatagaacaatctagttaagcaagatgcaagatcccagaaggaatataaatctgggtacaggctgaaggtctgacttcagaaggggatggtggtaatggtaatgataggattacc

SEQ ID NO: 544245 - DNA, 641 bp, Homo sapiens
ggtggttcttctcaaatcagaatccattgatttcatctttgtggagagggatgcttctgggcttaggaaccagtgagatcctcagagggagaaggaggaagggagctcatccacacctgtctgctaccacttccacctgttaccatttgaaggatgattgcatatattcctgggtgaaagagacacatttgctttttatcttgctgcagttggaggtaagtcatctctcagtagctgccaacacctcactattgccctataggtgagtttgccagaaggcgcttcaagactttgctgagctccatccaagcatcagtttctttctyattagcctggtgtacttttatagcacctggagcacaggtggcagttgggggacagttcttgatgcgcagataagtggagatggtgtgtaaggcaaagccccagcatagacattttagtggaatgcaacagagctaaaacataccctgttacatcatgtcagaggtaatgagacatttacagcacttgaagtcctcttccaatgtatttgaacacttcatttgacttggaatgatcttaattattcttcacacttggttaaaacagacccaaccatttgcagaagacaatgggccataaaatgtattaaacaagcc

SEQ ID NO: 544246 - DNA, 616 bp, Homo sapiens
gtagtcccattgaatgagcttccaaaccataaatctgatccaatcactcactttcttaaaatcattcaaagcttcctatcacctattagaaaaaattatccaatctgtttggtagagtataacaaactttccatgactgattccctctccattcccaatctcatctgctactacttgccatttggatttgggtataattcataatgatgaaacataaaaagttttaaagccatgaccatttggacattgtagccttataagagtgacaaagggaatatttacaaatatgaaagtcaaaattttgttcctgatgatcagaatgcttcccagatctctgaaaaattaatctaatcagttatcagaaagaaaagccctaggcaaacttcttctttggtaattcattttgataattacatatcaaacttctagaaagtawaatgaaaattcagatctttatcaagttaagcaaatttttttaacacatatcgtcgaagtcatttcaaaagcccttggactaaatgcaagcttaaccctgtatccaccacagaataaaattgtgctacattatatgaatgccagatagtaaattttaaataatttcatgatgtttcttata

SEQ ID NO: 544247 - DNA, 616 bp, Homo sapiens
gtagtcccattgaatgagcttccaaaccataaatctgatccaatcactcactttcttaaaatcattcaaagcttcctatcacctattagaaaaaattatccaatctgtttggtagagtataacaaactttccatgactgattccctctccattcccaatctcatctgctactacttgccatttggatttgggtataattcataatgatgaaacataaaaagttttaaagccatgaccatttggacattgtagccttataagagtgacaaagggaatatttacaaatatgaaagtcaaaattttgttcctgatgatcagaatgcttcccagatctctgaaaaattaatctaatcagttatcagaaagaaaagccctaggcaaacttcttctttggtaattcattttgataattacatatcaaacttctagaaagtatratgaaaattcagatctttatcaagttaagcaaatttttttaacacatatcgtcgaagtcatttcaaaagcccttggactaaatgcaagcttaaccctgtatccaccacagaataaaattgtgctacattatatgaatgccagatagtaaattttaaataatttcatgatgtttcttata

SEQ ID NO: 544248 - DNA, 624 bp, Homo sapiens
tacttgggcccatacatctgaatttaggggggttaaaattgttttttattttttatttttttgagatggagtctcgctctgtcgcccaggctggagtgcagtgrcgcaatctcggttcactgcaacctctgcctacctggttcaagcaattctcctgccttggcctccgagtagctgggattacaggcgcctgccaccatgcccagctgatttttgtacttttggtagagatggggtttcaccatgttggccaggctggtctccaactcctgacctcaagtgatctgcccacctcggcctcccaaagtgctgggattacaggcgtgagccactgtgcctggccatcacttcatctttttaagttcagtcacaataaatgcagcctaggttttcttatgaaattagatgcttaaatgattatattttgccatgaggtgttctcaggtttgaaactcgtagttcttcccaacattgtctgtaaaaatagattttaaaatgactttttaactacaaaagtaatgcacatcaattaaagaatgtttgaaaaatatttaaggatacataatctcatgactaaatgagaactactgttgacattttgttatagaaccttactctctttcc

SEQ ID NO: 544249 - DNA, 627 bp, Homo sapiens
ggatgaatgcctaaaggggctcacacaacctcttccgggacttggtgaccattgtttgtgttctcgttcaattgagttcaaatttaatatttaacttttcctacacaaacacacacacacaactgaaatataacccaaggtagtagttgtggttatggtaaaatataaataggaccctctgtgtataccgggattagcaaaagagagggtgtactagagaaggttgtgtaatttgaacaaggactttaaaagtgcatgcttattccttgtagaagcagacgtgttttctaggcgagagaaagatctttaggatggtgaagatgtgaagaagttcatgggggtgtgtgtgtgtgcgcgcacgcgtgtggtggggrgtggcagttaggaatggagaagatggacctcttgagaaaaaagagagatattctgcaattctggggcctatgaaaggtgggagccaggttgtaaaatcttaaaagtgagatagccctgaggtgatgcctccctagaggctaacagatccttatagctaaacttaataccagaaaatcttatgttacactctggggttactgagtcaggggttcacccataagcagaacagtctcaatctgaaattgaggggtg

SEQ ID NO: 544250 - DNA, 627 bp, Homo sapiens
ggatgaatgcctaaaggggctcacacaacctcttccgggacttggtgaccattgtttgtgttctcgttcaattgagttcaaatttaatatttaacttttcctacacaaacacacacacacaactgaaatataacccaaggtagtagttgtggttatggtaaaatataaataggaccctctgtgtataccgggattagcaaaagagagggtgtactagagaaggttgtgtaatttgaacaaggactttaaaagtgcatgcttattccttgtagaagcagacgtgttttctaggcgagagaaagatctttaggatggtgaagatgtgaagaagttcatgggggtgtgtgtgtgtgcgcgcacgcgtgtggtggggggtggcagttaggaatggagaagatggacctcttgagaaaaaagagagatattctgcaattctggggcctatgaaaggtgggagccaggttgtaaaatcttaaaagtgagatagccctgaggtgatgcctccctagaggctaacagatccttatagctaaacttaataccagaaaatcttatgttacactctggggttactgagtcagggrttcacccataagcagaacagtctcaatctgaaattgaggggtg

SEQ ID NO: 544251 - DNA, 627 bp, Homo sapiens
ggatgaatgcctaaaggggctcacacaacctcttccgggacttggtgaccattgtttgtgttctcgttcaattgagttcaaatttaatatttaacttttcctacacaaacacacacacacaactgaaatataacccaaggtagtagttgtggttatggtaaaatataaataggaccctctgtgtataccgggattagcaaaagagagggtgtactagagaaggttgtgtaatttgaacaaggactttaaaagtgcatgcttattccttgtagaagcagacgtgttttctaggcgagagaaagatctttaggatggtgaagatgtgaagaagttcatgggggtgtgtgtgtgtgcgcgcacgcgtgtggtggggggtggcagttaggaatggagaagatggacctcttgagaaaaaagagagatattctgcaattctggggcctatgaaaggtgggagccaggttgtaaaatcttaaaagtgagatagccctgaggtgatgcctccctagaggctaacagatccttatagctaaacttaataccagaaaatcttatgttacactctggggttactgagtcaggggttcaccmataagcagaacagtctcaatctgaaattgaggggtg

SEQ ID NO: 544252 - DNA, 626 bp, Homo sapiens
gctgataaataaatggctaacatgctgagggcaaatagggtgctgatgctgatgctcatcggattggrcatgtgtgctgtgtctcacaggggccttgatcctggccccagccttggccagagcagtttaagggaagcaggcaggaagagaaggtgggagaagaacaatgggacatctccctgggcggcacccaggacagctaccaccccctggcacatcctacttaacctggaaggaggctgaggctgaagccagaagacatatgtgttggcacagatcttcaaggaaagacccagccacaccacagagctgaaaatgggagggtaacactggataacatgggcgcctgctacatgggaatatgtgcccaaatacaagtgcatctgtgatttaatcactgcccctttccttctcatagaaatattaagggacctacttctgaccattacatgcccgagagttcccttctgccacttaaaagtgttaaaatattaaacaggaaaacccataaatcaaaaggtttggagaaatataccacagatttgaaggaaccaacaaatgcataatagtaataatagctaaggcacatatgctgtttaccatgtggcagacactattctaagtgc

SEQ ID NO: 544253 - DNA, 543 bp, Homo sapiens
gttttaagaagccgtggacaaggctcaccatgaasatttccaagaagcaggcctggaagacaggggccccattgcttcctcttaagccaaagattgccaacagtgccctcatctaccaggcccaggagaagaccacgactcctcaggagagatgggctcagccctggtacttggggactataaatgctctcaggattacctttgcttggattttcacaagggcctttgcctccccggccaacctctgtcccacaatcagagttggcacttggagcagggcatccttcacaggtctgtctggtacttgttgcttcccattatggtcagggaggggccctctcctgctaagagaccatgggttaattctggagtcttatatatcagtctcttaaccttcccaacaaaactgcctgagccacagagaaacatggacacttgcccaaggctgtgctgcaaatagatttgaactcagattcacctccaggaaccatcatccacttctattaattatgagcagtaaattagatagtaacaaagtaatgc

SEQ ID NO: 544254 - DNA, 543 bp, Homo sapiens
gttttaagaagccgtggacaaggctcaccatgaacatttccaagaagcaggcctggaagrcaggggccccattgcttcctcttaagccaaagattgccaacagtgccctcatctaccaggcccaggagaagaccacgactcctcaggagagatgggctcagccctggtacttggggactataaatgctctcaggattacctttgcttggattttcacaagggcctttgcctccccggccaacctctgtcccacaatcagagttggcacttggagcagggcatccttcacaggtctgtctggtacttgttgcttcccattatggtcagggaggggccctctcctgctaagagaccatgggttaattctggagtcttatatatcagtctcttaaccttcccaacaaaactgcctgagccacagagaaacatggacacttgcccaaggctgtgctgcaaatagatttgaactcagattcacctccaggaaccatcatccacttctattaattatgagcagtaaattagatagtaacaaagtaatgc

SEQ ID NO: 544255 - DNA, 543 bp, Homo sapiens
gttttaagaagccgtggacaaggctcaccatgaacatttccaagaagcaggcctggaagacaggggcyccattgcttcctcttaagccaaagattgccaacagtgccctcatctaccaggcccaggagaagaccacgactcctcaggagagatgggctcagccctggtacttggggactataaatgctctcaggattacctttgcttggattttcacaagggcctttgcctccccggccaacctctgtcccacaatcagagttggcacttggagcagggcatccttcacaggtctgtctggtacttgttgcttcccattatggtcagggaggggccctctcctgctaagagaccatgggttaattctggagtcttatatatcagtctcttaaccttcccaacaaaactgcctgagccacagagaaacatggacacttgcccaaggctgtgctgcaaatagatttgaactcagattcacctccaggaaccatcatccacttctattaattatgagcagtaaattagatagtaacaaagtaatgc

SEQ ID NO: 544256 - DNA, 543 bp, Homo sapiens
gttttaagaagccgtggacaaggctcaccatgaacatttccaagaagcaggcctggaagacaggggccccattgcttcctcttaagccaaagattgccaacagtgccctcatctaccaggcccaggagaagaccacgactcctcakgagagatgggctcagccctggtacttggggactataaatgctctcaggattacctttgcttggattttcacaagggcctttgcctccccggccaacctctgtcccacaatcagagttggcacttggagcagggcatccttcacaggtctgtctggtacttgttgcttcccattatggtcagggaggggccctctcctgctaagagaccatgggttaattctggagtcttatatatcagtctcttaaccttcccaacaaaactgcctgagccacagagaaacatggacacttgcccaaggctgtgctgcaaatagatttgaactcagattcacctccaggaaccatcatccacttctattaattatgagcagtaaattagatagtaacaaagtaatgc

SEQ ID NO: 544257 - DNA, 622 bp, Homo sapiens
accttaatataaataaataaggttctgtttcatacaatgaaattatatttatgagagcggttaaggttgagaatatgaaaacaaggtttccaggctctcatctatactcccaatttccaaatcaaaacaaccacgaagaaaaaagcctctgctctcttagcatggattttctctgtacaaagagaaaggataatttctagataaagagaagctatggaaatttttcttttttttttctgtagaaggcaggagatgccaccaaatttcaatggcactatatatgattgggaaacaacatacagacatttaaatattcgggatcctcgattgctcttattcctttcccttatccagctctgaaggtgataaaactattagggaatgtgccgcgtctgagttgaactaaatgagatkgtctttgcctgtgtggtgtgtgtttatacaagaatgtccaacagtattattaggaattccccttttacatccccacaggagtatttaatgagacataggcattgaaatgaattcaaaatactgaaccaaatgcctgactccctctgctcgcagacggctttcccctttctgtttgaaagcagatgcctcatctatcagatcatggtgt

SEQ ID NO: 544258 - DNA, 527 bp, Homo sapiens
cccagctacttggtgagctgaggtgggaggatcgcttgagcctgggaagtcgaggctgcaatgagctgtgttcatcccattgcacttcagctttattgacaatgcaagaccctgtttcaaaagaaaaaaaaagattggctgtaaagaagaaacttttggttataaagttggtgaggcattgtcagtagtactggagtgaatggaatcagcaagttctgtcagtgtcaaaggaggtgctgggctgtaaatgtcactgtcacaacatacacacataatgaccatcatccaattaccttcattatgttgtatgtattatagttttgcctagaggcagagrgcaggataagatgatgtctgctgggctacctaccctaagattccatgactccttcttaggggagccacaagagaagttgatgtcttgaggtgccagtcagatggagaaactgactttccttgcaggagcccttccttgctactcatctggcaatctatgtcctaagtggccaggctgtgggttcccccag

SEQ ID NO: 544259 - DNA, 460 bp, Homo sapiens
ttccttgccctttgagacactttctcatgtgagggcttctgtgaatctagtaagaatgggggcgcacatctgctggcctgggggagccaaaaaaacctggggttgcaaggttctcaggctggtccaagtccacccaggtatttctcaagtcaatgatttgaggacgagaccatttatggctatgcattcatgctcctttgcatctctgttttcctaataacacagtgctgtgcctgattttcatccacacattctacgaataaaatgagcgtcyccatgaatgcagttatggagccgctttgcttccacaacctgcctcaagctgacagttgcaggtggaaacctgtttgacttttttttcaagacgtccagagcatttaacaaagaccaggaacctccaaaatcgttatagttcccctcgccccaataccacttaggtgtcagagctgccacatgccca

SEQ ID NO: 544260 - DNA, 551 bp, Homo sapiens
aatcatgtctccatgtattttatattgcacgtgcatattttgggattcatataattttcttttttatgctcattaaatggatgtaaatacattttaaaaatgtaataaatctagttagagctcctccctattgtttaggaggcaatcagaaaatttgggggtttattgtgacgttagagagggagctcttgcttcctgaatttacttgagtttccacacaagctgggcctgtcttgccctccaacttgcaggaagaaaagtggtaagagcaggaggagttaatataatagtctgtctttctactgctatcaccacatactgcccaaatggtcacgctgatcttttcttgcagagccggttacatcagtttgggcaaaaacaatatacccttcatagtctatcttctccagatcaaagctggattgaaggcaaacttgtataaaaarcacattgtaagaaaagctgcataaataactttttaaagagattctaacttaccagataattaagtaattttttaataagctggctttgcagaactcttgcccaga

SEQ ID NO: 544261 - DNA, 670 bp, Homo sapiens
tgggatttagttttttgcattaaaatggggatagtcatagaactgttaaaaagattaaatggcatactgaatgcaaagtagtttgagaaatttaagaaagttttctattttttgctttacaaaatttcattgtgacttcaattaaaaataattttgtattaaataagtcatgtgcctttttagggggtagaaaagcatgtttaaaatgtttgaatctctgtttaagataattatgcctataagatgtctaactcttcagtcactaagccattatcmaaatgctataacttactggtggcagctaatgctaattacggacaaagatcccaacagtcaatagctttgtgggtgctggcactgccgaattaaggccacatacccaagcagcaagtgccaattttgtattcacagaagataactgcatatttcaaatcctaaatatcagctaaatatcgaacactaattttatttttgtcagactgttgtgaacatacatatctgactagtaaacagttttgaatctgtattttttgagtcacgatcaatgaattagaatagaataagaaatgaaaaatgttagctatatatgcagggttctaccttcaaaacaccctaataattttgggatctatattgttactttactctcaaactatttactaaagatatt

SEQ ID NO: 544262 - DNA, 588 bp, Homo sapiens
tactttgttactatctaatttactgctcataattaatagaagtggatgatggttcctggaggtgaatctgagttcaaatctatttgcagcacagccttgggcaagtgtccatgtttctctgtggctcargcagttttgttgggaaggttaagagactgatatataagactccagaattaacccatggtctcttagcaggagagggcccctccctgaccataatgggaagcaacaagtaccagacagacctgtgaaggatgccctgctccaagtgccaactctgattgtgggacagaggttggccggggaggcaaaggcccttgtgaaaatccaagcaaaggtaatcctgagagcatttatagtccccaagtaccagggctgagcccatctctcctgaggagtcgtggtcttctcctgggcctggtagatgagggcactgttggcaatctttggcttaagaggaagcaatggggcccctgtcttccaggcctgcttcttggaaatgttcatggtgagccttgtccacggcttcttaaaaccacaatctccccacttccatccctctccatgcccaactccactgtgtca

SEQ ID NO: 544263 - DNA, 373 bp, Homo sapiens
aatcagccctcatttccagggtttctcaagcaaccacagtatgactgtgtcccgtggagaagatgtgggccccaggagaggctgaggaggcatggggttctcttagttcatgcctgctagagtcagctccaggggtgaakaaacctgagtagaaagaggttgtgggtgaacccctggattcctagcacagagcaggggagagcacattatctgcatggaaagagctgctggggaacagtgccgggccacgggccatctcagcaaaccccagacgagcacacaagagaagaggcagatttaaacatctgccctacccagagagagtgatgccacctcacaaccattctagtcaagcaacagcttttctgcatgt

SEQ ID NO: 544264 - DNA, 464 bp, Homo sapiens
acccaacaacatgcctaactttttcatcagtatctaaaaacaaccacwctgtaagccttgtcatcattcttcaaactccactttctgttcattttgcctccatccaggaacatctccctctggattaggcacctctcatttccaaacagttctagggtcttccttaaatagagcaaaatgatctactttgaaaaaagtattaataaatcacaacaaccagtgatttaattaagaacttaaagcagcattttcatttgaaagagaattgggcaggaaaggggaggagagaagaaaaaaaagtaataggatttcaggccacatgttctgacattatggggcagacacatttgtgcgctgcatggcttttctgtccgtctcaaattaccccatcccttactacctttgcattagacctgggctcactcatgggcttttgtgtttttgtgtgtaaagaagttcattat

SEQ ID NO: 544265 - DNA, 464 bp, Homo sapiens
acccaacaacatgcctaactttttcatcagtatctaaaaacaaccacactgtaagccttgtcatcattcttcaaactccactttctgytcattttgcctccatccaggaacatctccctctggattaggcacctctcatttccaaacagttctagggtcttccttaaatagagcaaaatgatctactttgaaaaaagtattaataaatcacaacaaccagtgatttaattaagaacttaaagcagcattttcatttgaaagagaattgggcaggaaaggggaggagagaagaaaaaaaagtaataggatttcaggccacatgttctgacattatggggcagacacatttgtgcgctgcatggcttttctgtccgtctcaaattaccccatcccttactacctttgcattagacctgggctcactcatgggcttttgtgtttttgtgtgtaaagaagttcattat

SEQ ID NO: 544266 - DNA, 553 bp, Homo sapiens
tgatttttttattttaagagtgacctttctattgtcacagtctgatgtctgcaggagttaacaaagtcatttcactctggctggttcaaactttatcatctctcagcactacttaccttctagcatctctactcccatctacccctttagtaatcattctctggtgtgcctctcatagtctctgaatacacactgcccagctttcagatagaactcatgactgacaggttaatacacacaaagccttctgcatcctctcctctgtgcagattcctcttctctggaatcctatcttgtagattccagctgcttcagaaacmctgcaatctgatttctagaagctcagagagagcattctgtttcagctctagctccttatactagagtcaagaaattgcccacacagagagctatacattgaccctgggattcacttggtgagtttctctttaataacgtataacagtcttgctttgcctatgtccaaagcctgtaaactagtacctcatacaacttgcctgtattttttctttaaattatggcaagagggcta

SEQ ID NO: 544267 - DNA, 558 bp, Homo sapiens
taacataggcaaacagatatttacctatatctggcaaataatgagcaaatcaatgaatggtaattcaatgttctttcagttttcataaaaactttcatacatgcttggtaacctggaaatcatttcaggggctgagcattagaagatagtttccatcaggcttatgtatgtgtgagtgtgcactttgaaataaaaccattagaaactttggtggcttcaggactatgtacatctggataattttgcagggctgtgagagggggtaacaaaaccagcgttgttgtaagtataagctctgaaaatagaagcagacttcagaagtatgaaacttcatttttaatattgcatcctttattattatttttgtatgttgtagcaggagacttagtgctattgcagaaagaagtccgtaaatcatcatttgttttggagaacttctataacatattgcrtggtgtcctggctagaaaatgtatttggaaaagttggcatttgttacatcaatgaacttagcctgagtatgcagcagccctgtacccagttttactactgaggaaa

SEQ ID NO: 544268 - DNA, 558 bp, Homo sapiens
taacataggcaaacagatatttacctatatctggcaaataatgagcaaatcaatgaatggtaattcaatgttctttcagttttcataaaaactttcatacatgcttggtaacctggaaatcatttcaggggctgagcattagaagatagtttccatcaggcttatgtatgtgtgagtgtgcactttgaaataaaaccattagaaactttggtggcttcaggactatgtacatctggataattttgcagggctgtgagagggggtaacaaaaccagcgttgttgtaagtataagctctgaaaatagaagcagacttcagaagtatgaaacttcatttttaatattgcatcctttattattatttttgtatgttgtagcaggagacttagtgctattgcagaaagaagtccgtaaatcatcatttgttttggagaacttctataacatattgcatggtgtcctggctagaaaatgtatttggaaaagttggcatttgttacatcaatgaacwtagcctgagtatgcagcagccctgtacccagttttactactgaggaaa

SEQ ID NO: 544269 - DNA, 574 bp, Homo sapiens
taaaacaatgtttaatcaattaactcttataacacaccggggccaagcaacactgcctcaggacctttctgagtatccaaaggagattgaccccactttgaaacaaaccaattagaagtttcmccagcctgagaccagcttagagcagttacatctaaaaacttctaagcctgaaatagcactggtggagactggcaaaagctcagcaaagcaggaggagacactggtgaaggactattgtgcaagggtgaatagtgtggaggagggcaaggacatcagaagaatgaggataaaacaagaataaacttaaccatatgacatacaggctagactttcccagaagctgttaggtgttaagaaaggactacaggggatgagacatctagaagattctgcatggacagataaaagcaaaataaccactcatatttattaagcacttaataagtgttaggctgtgaaggaaaaggttaaaaaaacacaaaataaaacaaaacttttcccctctgcacgaaactgggcctttgcttaactttctagatctgtgtttcaatagaaacctgatgagaagaca

SEQ ID NO: 544270 - DNA, 568 bp, Homo sapiens
gacagttcaacgtgttgaactgcacagaagtatgcaggccacagaatccagactgggagaaattccattgggcaaacgaacaaataaattgtaaggaaaggaaagagatgaaggaggaatccgtaaattaaaagagagttagaagacataaagtttcaaaaactaggcaagactagtgtctaggaatgcacttgggtgataaatcataaaagaaaaaaaaccacaaggaagtgattactctaaaagtcagggaagttgttacttttggagaggaggtagaggctacggttgggatgaggacatggggggctttctgggtggttggcaaatttctatatcttaacctgcatagttattatgaggtgttcaccttataatgattcagtaaaccatttatattgtgtgtgtggttttctgtatctatgttttattttacaataaacaggtaaaaaaatcaaaaccagraaaagtgatgaaaacataagcggaatttaaagccttgggaatggataatttcatttgggagagaggatagatagggcagacagcccaggactgagccttgggg

SEQ ID NO: 544271 - DNA, 587 bp, Homo sapiens
gttcccctgattttcagccttcctggctgcttctgtgttgtcttctgtgattgcccttcatttccccactctctaagaccaggttctccccagggcctcttcttcttcctcttctgccctttctcaactcttccccttgacggtctcacatattccccagcttcagccttgatctctgtacatgtgcaatctctggcccctgtcttacccttgctccacattttaaacacccagtgggtcacttctgcctgcgtagcctgccagcacctcagattcaacctgttccaaatcctcctcccctccaggcattcgagcccatcatgacaccaccctctgttagtcatccaccgggctccaaggctctgaggacccacacccaaccaaccagttatcagacctgttcctttctgtgyctcttacatccttctggctttctccaatccaacctgcagcccaggattcagggtctcatctcaggagagggtctgtcctcacccctggatgcttcctctcctactacttagtattccttactcgcagccttgcgtctttaaaacgcttgatgcttcccccctataccttgtgta

SEQ ID NO: 544272 - DNA, 421 bp, Homo sapiens
gcatacaggaagtatgagagctgtcttaggccaggctccctagaaaacagagccgaaggtcaaatcttgcatgctaaatcagggagtgcaagtccacagacacagaggtgagggaaaggggaaggtggcaggcaggcggggagagtatgcagaaggggtgtgttagctgctrgtcatagctttgtattaagcacagatgactgttcagcctgcagaggccctatgaaatgattgcctcactaaacagtccaccgcaaggagggggaaacttgtatctgtgagtcccatctctcactgactgaagttcataccacaggaagtcacctccccaatacttctaggctgtgcgcccagaccctttggccaccttcaaagaagttggttcccaagacactggtaacagcactcgaggtgcaaagca

SEQ ID NO: 544273 - DNA, 421 bp, Homo sapiens
gcatacaggaagtatgagagctgtcttaggccaggctccctagaaaacagagccgaaggtcaaatcttgcatgctaaatcagggagtgcaagtccacagacacagaggtgagggaaaggggaaggtggcaggcaggcggggagagtatgcagaaggggtgtgttagctgctagtcatagctttgtattaagcacagatgactgttcagcctgcagaggccctatgaaatgattgcctcactaaacagtccaccgcaaggagggggaaacttgtatctgtgagtcccatctctcactgactgaagttcataccacaggaagtcacctccccaayacttctaggctgtgcgcccagaccctttggccaccttcaaagaagttggttcccaagacactggtaacagcactcgaggtgcaaagca

SEQ ID NO: 544274 - DNA, 553 bp, Homo sapiens
tgcattgccagtaatgcttatttgccagtcagggtgctagagctctgtgtgcaagtttaaagctgtgatccaggaacaaaaataaaccagcaaagcagaaaccgaggcaccataaacacgggtctaataaaaggtttttggagccaggaaaacttgggttagggacccagctctgccacttaatcatggtgcatgtttaataaactcagtttcctcatctgtaaaatgggtttattaatactaactgcaggccaggcacggtggcttatgcctgtaatcccagtactttgggagacgaaggtgggtggatcaccagaggtgaggagttcgagaccagcctggccaacatggtgaaaccctgtctctacwaaaaatacgaaaattagccgggtatgatggtgcacgcctgtaatcccagctcctcaggaggctgagacaggagaatcgcttgaacccaaaaggcggaggttgcagtgagctgcgattgtgccactgcactccagcctgggcctcagagcgagactccgcctcaaaaaaaaaaaaaaaaaaaaaa

SEQ ID NO: 544275 - DNA, 590 bp, Homo sapiens
tgtgtgtgtgtgtgtgtgtgtgtgtgtgtgtgtgtgtgtggttgtcgttgtcagtggtgatttaggagaggaataaacatttccgatcagttccgtcttctttccacacattgactttctgtacctctgaactgctgggttaggtccttgttaaatctttattaataaagatttatagtgaataataataattwaaaaaaaaaccggcaagcctacacacaacactcttggggaagttcatctctagactgagatgtaaaatacttctgctgaaaatattctttgggggaaaaaccctaaagacaagaagggacgtattctttgaaagatgaactggcgctgctttcccagggcagaggcagaggcggaggcagcagcagacggcgccagaagttacctgcagagctgccctgccatctggtggacaaaggggcacctgcagcttgcaaaccgaattgcagggctcccaagattttaacattttaaattttttccacacctcacctggatcaagatttttatgaattattaagcaaaacgagagaactatcaaactagcaagcaaaaaagccaataaaatccctgttata

SEQ ID NO: 544276 - DNA, 556 bp, Homo sapiens
gtcctcaggtggcacttcggtggagacagacagagcctgggacagaagccagcagcagaagcagcctcttgggctgactgaatgttcttcccagccttggcctttcaggctgctggcagtagttcaccagagcagtgggaggcagtggctgaaccactactgtccaatggttatcaagaggccagcagagaagtgtgacccagtccttgctcctgctctggtcctaggagtcaacctcatggcattttacttaattgatayagtttctgctatgtattggagcatctgtaatgtgtgctttcaaacccttaacgtttctaatgctcacaacaacccttcgggggcagtatttgtattcccattttacagatgaggacgctgaggcttacaaaactagtcagttctcataaacacaaaagccaaattcagtctaccaaaccatggtgcctttgcataaaacttaaacacctcctggaatgtctgtccatggctaaatgcaggaaaaaggtcctcagtgaagacagtagcatctgatgtctgaggcaggcaagcctac

SEQ ID NO: 544277 - DNA, 617 bp, Homo sapiens
tgattgatagagaaataatatgatggggaggaagcaataaaatagttgttgctgctgctgttcttattattatacctaaaatgtattaagcctytcctgtgggccagacattagactatgtgtttatatattccttttcctatttaaccctcatggaatctgtataagggaatataattatcttcatttgacagttgagggaactggactcacagaggttaagtgatttgcttacgatgaaaatgacaatgaccagccgagtggggtcactcacgcctgcaatcccagcactttgggaggccaaggtggatggatcacctgaggtcaggagttcaagaccagcctggccaatatggcaaaaccccatctctactaaaaatacaaaaattagtcaggcatcatggcagatgcctgtattcccagctactcaggaggctgaggcaggagaatagcttgaactcgggaggtggagggaggcggaggttgcagtgagccgagatcacaccactgcgctctaggcggacgacagagcgagactctgtctcaaaaaacaaacaacaacaaaaaccaaactggcagtcacccaaagaaccaagataaaatttgcccatttggct

SEQ ID NO: 544278 - DNA, 617 bp, Homo sapiens
tgattgatagagaaataatatgatggggaggaagcaataaaatagttgttgctgctgctgttcttattattatacctaaaatgtattaagcctttcctgtgggccagacattagactatgtgtttatatattccttttcctatttaaccctcatggaatctgtataagggaatataattatcttcatttgacagttgagggaactggactcacagaggttaagtgatttgcttacgatgaaaatgacaatgaccagccgagtggggtcactcacgcctgcaatcccagcactttgggaggccaaggtggatggatcacctgaggtcaggagttcaagaccagcctggccaatatggcaaaaccccatctctactaaaaatacaaaaattagtcaggcatcatggcagatgcctgtattcccagctactcaggaggctgaggcaggagaatagcttgaactcgggaggtggagggaggcggaggktgcagtgagccgagatcacaccactgcgctctaggcggacgacagagcgagactctgtctcaaaaaacaaacaacaacaaaaaccaaactggcagtcacccaaagaaccaagataaaatttgcccatttggct

SEQ ID NO: 544279 - DNA, 390 bp, Homo sapiens
catcatcatcaccatctcttcattgtcttcatcatcttcattttttacaaagttaatttttgtccttatttggtatatcagtttctgaaaaccaaaaatgctatcgtgtgtgtcttttaaaaaccttttatttggaaataattgcatttccagacaggaccctttattctgcagttggcagagtgattgccacagccactgccacactgaaaggtttccagggccrtgtgaattgaggaatgcatgagagtgcggactgctctcccctggtcctgggactcattatcttgtttgcctttaatcacaaatctgcacaaagatcctttgccgggactgtttactgcatagctgagactggtggcacatcctttgaaggtctgtggatgaaca

SEQ ID NO: 544280 - DNA, 634 bp, Homo sapiens
gttagggccgaacattatcatcatcataatacctatcacggagtgaacccctgctatgtgccaggcactgtccaggcatcttcactaagattacagcctttgacactcactacagtctaatacagtgtaatttcttgccttcattttctagtggaggagagaaaatgggatttccccaaagatgtactgctgtaagtggtagaatcaagatttattataaaatgaggttgatctgattctgcgtcagtggagatacttttggctgtaattagcagaaaacttaacaccaagtactgggacatatattgtgwcacataaaaggaagcccagaggtagggtgggcctcagggctggctgctccagagaccagcagtatcatcaaggacccagattctcatcctggttttgctctgccatactcaggccagtttccccttgttgtagggtggctgctagcagcactgtggaccatgtgcttgttcactgaatggtcaagacagactggcttccattgctcagtattaaaaacaaagaacaggctgggtatggtggctcacgcctgtaatcccagcactttgggaggccaaggcaggtggatcacctgaggtcaggagtttgagacaagcctggccaa

SEQ ID NO: 544281 - DNA, 593 bp, Homo sapiens
tagacacatgccactatgccaggctaattattttatttttttgtagagatggggtctcacttttttgctcaggttggtcccaaactcctggtctcaagtgatcctcctgcctcagcctcccmaagtgctgggattacccctgtgcctaaagtctatttttttttttctttaaggatctcttaccatctttgagaagagtatcttgtatgaattgtagagacgcatgatagaagtcaggaagagtggctgggttgagggaggctttttattgcaataatccaggtgtcaggggacaagaagcaggactaggacattaatagctgggatggagagattagggaactttcgaaagcaaatggaggaaagggtaaagtcagggtgtggtagctagtttctaaagattgttcccagtgaaccacacccagtagtgttgtctcacattgattctggactgggccattcaaactgagggaatgaggcaagatggtactacgttgacttctcatgacttccaaggctaggttggaggaaggtttgcctgggcctcttggaatgagaacccagctctcacgccgtgagaagcccaaaccacc

SEQ ID NO: 544282 - DNA, 593 bp, Homo sapiens
tagacacatgccactatgccaggctaattattttatttttttgtagagatggggtctcacttttttgctcaggttggtcccaaactcctggtctcaagtgatcctcctgcctcagcctccccaagtgctgggattaccmctgtgcctaaagtctatttttttttttctttaaggatctcttaccatctttgagaagagtatcttgtatgaattgtagagacgcatgatagaagtcaggaagagtggctgggttgagggaggctttttattgcaataatccaggtgtcaggggacaagaagcaggactaggacattaatagctgggatggagagattagggaactttcgaaagcaaatggaggaaagggtaaagtcagggtgtggtagctagtttctaaagattgttcccagtgaaccacacccagtagtgttgtctcacattgattctggactgggccattcaaactgagggaatgaggcaagatggtactacgttgacttctcatgacttccaaggctaggttggaggaaggtttgcctgggcctcttggaatgagaacccagctctcacgccgtgagaagcccaaaccacc

SEQ ID NO: 544283 - DNA, 629 bp, Homo sapiens
accaaatctgctgatttgataacaataaaaaaccaagaagcaaaaaaaattaggtacttaggaaactcccaagttctatacttcagcagtataggggtgctgagggayactaattcatcttcagtaggtccccgctttgcagccttagcctaaactggctattccatagtacggtggacagaaaggtgaagaatagtaagaatgactaactgatggaacaggtcttcatctcctaatctctattgacaaatattgttaaagctttcactttcaactaacattttttattgtaccctcacctctaggcaaaagtagttcaaaaaaactatttgttgaaaggctaatagtaaagtataaaaaaactgaagggaattcatctatagtttttatagacattgcactctatccaaaccagtttcttgcattacagtcacactaaatcactggaagtatctaagatctctaaacagaaatcagagcacaagcttttaaaataattttaaaagttttagaaaacatcttaaacgtagaaactacctttgctctcttacctaaatttatcccggtaaaatttaagttaaaattaaaaagaatgtctaataatacctaaaataaaaaggcaattttca

SEQ ID NO: 544284 - DNA, 589 bp, Homo sapiens
accaaatctgctgatttgataacaataaaaaaccaagaagcaaaaaaaattaggtacttaggaaactcccaagttctatacttcagcagtataggggtgctgagggacactaattcatcttcagtaggtcccygctttgcagccttagcctaaactggctattccatagtacggtggacagaaaggtgaagaatagtaagaatgactaactgatggaacaggtcttcatctcctaatctctattgacaaatattgttaaagctttcactttcaactaacattttttattgtaccctcacctctaggcaaaagtagttcaaaaaaactatttgttgaaaggctaatagtaaagtataaaaaaactgaagggaattcatctatagtttttatagacattgcactctatccaaaccagtttcttgcattacagtcacactaaatcactggaagtatctaagatctctaaacagaaatcagagcacaagcttttaaaataattttaaaagttttagaaaacatcttaaacgtagaaactacctttgctctcttacctaaatttatcccggtaaaatttaagttaaaattaaaa

SEQ ID NO: 544285 - DNA, 680 bp, Homo sapiens
ctgcacaaactgcctcactgttacttcatcaatcacagcttcaaatgtctcaatcagcagaagattgtaaattcgatctttcagggaaattaatctattctgaaaggcaataacatgaagcaaggcaaaggaggcactgatggtttagtatactacataagggatttttttgttctattattaagaaaatctagacctgaaatgttttctcaactcttattgtactgtgtatatttatattgttgtcgtggcggctgtttttaaagggaaagtgttggttctattaatttgttaagtgtccatccaggtgggcctacctgattccacatatataagtacatatctgcttataaagcgctgtaaatggcagcaaggctgtttttggagaagagtttgggttttcctaccatccctttgaatgctacacatccgtctattttaacccaagtagttcrtatttcagatatattttctcctttcatctcctctcactactgcagagtccagtaatacctagcataggattctgtcctgtgtcaaatggctaaaataaatttttgccccaatagacatgctgcctcattcaaaagagctgccgctgtcatcttgaggttccaggtagtgagagaagaaactcgacctgccagggtcaacagccatgaagaggtggggggagtcat

SEQ ID NO: 544286 - DNA, 599 bp, Homo sapiens
ttgcatttgcagtgtgcaaccttttccctctttctcacctttcaagcagtagaatgtggctacgagggggtgggacagcttagtccattgttttatatttaataaagaaatcggccaggcacagtggcttacgcctgtaatcccagcactttgggaggccaaggcgggtggatcacctgaggtcaggagctccacaccagcctgactgacatggtgaaaccccgtgtctactaaaaacacaaaaattagctgcgcatggtggcgcgcacctgtaatcccagttacttggcaggctgagtcaggagaattgcttgaacccaggaggtggaggttgtagtgagccaagatcataccattgcactccagcttgggtgacaagagcmaaaaatccatcttaaaaaaaaaaaaaaaagaaagaaagaaaagaaattgccgaataaattcagtgccaaagcatagtctttccaggtctgggccagagatattaaacagaccttagaaaatggcagcttctgtgtgaagtcctctgtgagctctttcacactgaggaagagtcgtcctaatgtgtgttaaaaggcacagagctgttggcttaaacg

SEQ ID NO: 544287 - DNA, 599 bp, Homo sapiens
gctagggatagaagaaaggagaatgtgctcaggctaaggtagcaatgaggtgagagatgatggtgacctgggccatcagatctacccaggtgacagggtagatcaggggctcccaaatttcccagctcaaaaaaccctgtttgtcatttaataaccttacaaacacttcccagcctaataacagttaccattttggcatttgtggattgggcaaacacttgatgtccacatttctaaacaaatccacaatgttcatagcccaacagggcttccatacrtttgaaaaagaattgtacatacaaatagttgattttcaggccccctatgtcactgtggccccaaagtaggccactgaagctttgcttccctcacttttcccattcccttgaccagcctaagccctgattcctccaacctctctgctagaaggggcttaatcagcttaagtgggcaatagtgttgatgggtgaggatgacaactgagcagggattcctaacttagcattgatccatagttgagatttgaagagtcaagaacagctggagattgtaagcaaaatgcctgtgagtggggtgagggtgtgctgtatgaggtcaac

SEQ ID NO: 544288 - DNA, 599 bp, Homo sapiens
gctagggatagaagaaaggagaatgtgctcaggctaaggtagcaatgaggtgagagatgatggtgacctgggccatcagatctacccaggtgacagggtagatcaggggctcccaaatttcccagctcaaaaaaccctgtttgtcatttaataaccttacaaacacttcccagcctaataacagttaccattttggcatttgtggattgggcaaacacttgatgtccacatttctaaacaaatccacaatgttcatagcccaacagggcttccatacatttgaaaaagaattgtacatacaaatagttgattttcaggccccctatgtcactgtggccccaaagtaggccactgaagctttgcttccctcacttttcccattcccttgaccagcctaagccctgattcctccaacctctctgctagaaggggcttaatcagcttaagtgggcaatagtgttgatgggtraggatgacaactgagcagggattcctaacttagcattgatccatagttgagatttgaagagtcaagaacagctggagattgtaagcaaaatgcctgtgagtggggtgagggtgtgctgtatgaggtcaac

SEQ ID NO: 544289 - DNA, 406 bp, Homo sapiens
ttgcccagccacatcctgttcctcgggtctgctcctgctgttctcagttactggaggaccttcgcattcctttccatccagccccacattcccacccccagtgcgcggggctgctgctgagccttactccaaattcaccctgttgtgggcagtcacacactgcttggrgagttagcaagctgctgctcacaggctttatcatcttccagagtgggccgggtgcggtggctcatacctgtaatcccagcactttgggaggccaagacgggcagattacttgaagtcaggagttcaacaccgacctggccaacattgtgagacctcatctctactaaaaatacaaaaaaattagccaggtgtggtggagggcgcctataatcccagctactcaggaggctaaggcagg

SEQ ID NO: 544290 - DNA, 522 bp, Homo sapiens
gctgttctgagaggggctttgggcatctctatgcctctctcggtgggtagaaacccaagtatggggagcatggctgaatgccttttgattctgcctctgggtggggcattggcttagatcactttcgggaggcaggaccctgatcagcaggcaaaggggaaggcaatattgtgacattccatgaaagattgggccaggctgtcctcctgtggrcaccactccactggtggcagggttggactgggggtactccctgcctccacagtaggagccgcatagaggggcctgggagtataggagagcctggtcttttgttctatatgccttctcattttccatcaaacctacgcttagtatggcttgggggcacagataaatcactataagttgcatgatcttaaggagtttactttatctcagacaggctcatttttttctcccctatcacatgggaattgtaatgaccactgtaaaacacaaatctattgtcacatttaagtgtgagaataattataaaaaaca

SEQ ID NO: 544291 - DNA, 601 bp, Homo sapiens
gtggtttccagtttaaactaatgaaataaaaatagttctgccacttctcctccctgaaattaaaaaaaaaaaaaaaatcttcaaagatgccagaaaaggcctaaaatcctgaataattatgtatgaagaaagcctgggaatatkgtccccacagtcagggagaatgccagatgaagattcctgctcagtacacttgggacacagcagaattctttgtagtggaacccccgagaggcaaaacagccactgcctcctgtaggagaggccatatctaggctgcctggacctctctgacctctttggaccatgcgggaagggaagaagttttcaaccaacaatgcatagacacaacatttctgtaagaagcaagctactgatgtgcaatgagaggcaaaaccttggatcatcttacagccctgagctgccaatttttgtaatctgaagagtagtgaaagctaaggcaaaggtaaacacactagaaaactatgtcatatggagattcatggaaaaaatagtgcaacttcttccaaccaggttagaatcatgccacaaggcaaaatgtcagtgagaaaactttcacaggcaacatcttgtaatccag

SEQ ID NO: 544292 - DNA, 601 bp, Homo sapiens
gtggtttccagtttaaactaatgaaataaaaatagttctgccacttctcctccctgaaattaaaaaaaaaaaaaaaatcttcaaagatgccagaaaaggcctaaaatcctgaataattatgtatgaagaaagcctgggaatatggtccccacagtcagggagaatgccagatgaagattcctgctcagtacacttgggacacagcagaattctttgtagtggaacccccgagaggcaaaacagccactgcctcctgtaggagaggccatatctaggctgcctggacctctctgacctctttkgaccatgcgggaagggaagaagttttcaaccaacaatgcatagacacaacatttctgtaagaagcaagctactgatgtgcaatgagaggcaaaaccttggatcatcttacagccctgagctgccaatttttgtaatctgaagagtagtgaaagctaaggcaaaggtaaacacactagaaaactatgtcatatggagattcatggaaaaaatagtgcaacttcttccaaccaggttagaatcatgccacaaggcaaaatgtcagtgagaaaactttcacaggcaacatcttgtaatccag

SEQ ID NO: 544293 - DNA, 623 bp, Homo sapiens
ttacttgtctttaaggctgatgagtcccaagcagacctgcatcactgaattctcaataaagggttagtgcttgtcctgcagaataataagaaccgctaatgacaccaattaagagctgtaaatgtcatttatacttgtytgttatttttcaaatcaataaggctggaaagacacagcagcctgagataatttagattggaacagtttgtggggacattttaatggatatattgcaatcgggattcttgttctccttttggagaaactgtgtttctcattgggttaattctaatacttatttaaagcagaactttcacttcaaataattaaatataggggagactatttaaggcaatgaaagacaagtatatacatgtctgcattctgttcattaaattccttgttggaaagtgcacccatctcacgtgagaaagtattgttaaatgggataaaaaataataaaaatttaaaaaaaaatgtataaagaaagaaaaaatagtagtgcagactacagcagtatattctgacactggaggaatgtcaggggcacatgtttttataaggttcttattcttttgccaaaagtaagtagtagacttgtaattggttcattcataagattg

SEQ ID NO: 544294 - DNA, 540 bp, Homo sapiens
agaataactttcatagaattaagattaacgttatgtccttaaatttggaggagaggaataaagcatcaatttgaagaatattttcatatcttttgctaaaatcatagttgtaaacattgtacaccatatattgcccatccttagagagtctgaaaaagacttttttctacagataaacttgtatgcttgattttataatgaaatgacaacttcataacscagtgccaagagtggatttagtgttcaacggcagtaatttaattcataccaaatgcttcaaaacagctctcttcttgtaaatatattaaaatttgtgtttatttaattatcttgtttcatatgtacaaatatatcatgtgctatcttagaacaggtgttttaaacaaataaaattgaatatattgttgaatcttggcataatgaagtatcaggaagtaaagcaaagtctgttacctgacagcggaaacaggtcctgggacatcaatataaaaatggcattcctcgaataaggcgctttaaaacattagatcatttgtttac

SEQ ID NO: 544295 - DNA, 597 bp, Homo sapiens
cattgaattcctgtaaacacaggcaaacacattagtttagaataggtaaaacacttagtgtaaccaaacccgaggttaatcattcaacttgccagtgaaacgcttccaacagaggagaggagtcagtgagagacgaataaaggacagagacacaaaagcagccacacagatccatagtcagaggacaaagctggaggcagcttggtggagcaggttgcttcatggtcagccagtgagccctttggggwcaatgagggaaggaagtaccttccttttagggacagggacagggacagagatggacctacagggatcaaaggctacaggcagctacaatgtaggaaaaaaacacagtccagggccgaccctgggggattgacttggagaggaaagtaggattccagttccctgaggaagagcctcatgggacttggcacatggagggtggttgagtaccctggtctctgagcgtatctgtttctatggttttatcgttgtctattccctctaaggttgtttatttatttacttatgtatttttgagtaacatttgtagcttgcacacaggagatgctaagtatatgcttactgtatagg

SEQ ID NO: 544296 - DNA, 550 bp, Homo sapiens
agaagtcaggagttaaagtgttttaagtaccytgtattttctaagaaaaggttaagggtattaagtctagatattagtaagttaaatatgtggattagaatttctagactaactcctaaagtcatataaaaagagtcagccaggcacggtggctcacacctgtaatgccagcactttggaaggccaaggtgggcagatcacctgaggtcaggagttcaaggctagcctgaccaacatggtgaaaccccatctctacttaaaaaaaaaaaaaaattaactgggcgtgctggcacatgcctgtagtcccagctacttgggaggctgagacaggagaattgcttgaacccagcaggcagaggatgcaatgagccgaaattgcaccactgcaccccagcctgggcgacagaaggagactcagtctcataaaaaaaataaaaataaaaaataaataaaaagattcaaaactgcatattagaaaggtgtcaattcacttaaaactgatctataaatttaatgcaatatcaacccaaaaacctgaattttgttgttg

SEQ ID NO: 544297 - DNA, 486 bp, Homo sapiens
ttgaccctctggtcctgcttcttgygtctgagcaggtggtttacattagcctcagccctggtaggaaatcatggctaggctttaactctttaaggtccagagagggtacaggcagagtggctgcgtgtctctttagtgtcactttccttatcttgatatttattttctggaaacaggggttactgtaaatgtgggaatttgtcctgatgtgggggagctgcattgtgtcagtttgggaaatgtaaaaaggatgcagggccttaagtttataacgcaactgcttctgtgtccttggttacttcttgagaccagggaaaagagagggtgccttaccagctcggtgaggcctctgttttagattctgggggaatttctttctcagagaatcaggtagatgggaactccaaaggtgccctcagagggcctggccttttgtttctttgtttattgagtgagggttgtgggggggacggggggtgcctgatc

SEQ ID NO: 544298 - DNA, 619 bp, Homo sapiens
aacagcagtccttccctttagcaccagcatttccttccagcctccccctctaacccttgagacactgccaacatccctcctagtacaagacttttcttggtgcttgctgtttttagaggagttttggcccttyagtgtttgtaaagctctcggatcctcagaaaaaaattctttagtgattaattttgaaattggagctgtttgattattttgattaagaagctgattttcggcctggcacggtggctcactcctgtaatcccagcactttgggaggcccaggcaggtggatcacctgaggtaaggagttcaagcccagcctggccaacatggtgaaacgccatctctactaaaaataaaaaaaattagaccggcatgttggcgagcgcctgtaatcccagctactcgggaggctgaggcaggagaatcgcttgaacctggcaggtggaggttgcagtgagctgaggtcgtgccattgtactccagcctgggcgacaaagcaaactctgtctcaaaaaataaaaaaaagttgattttcatgaggaaaagcacacggcttctttgatttgctgagaatgtgctagcttttattcattcactcaatgattgcctatttaac

SEQ ID NO: 544299 - DNA, 608 bp, Homo sapiens
aaaaaaatagctagcttttatctagtgtttattacctgctgggcaccgtgctgagctctttacatacattatcttaattaatcttcacatcaccttatgatgtaggcgctgtttccagagaaggaatctggagctacagattgcaagttatttgctcacaggctatgtactctattgcrcttggtaagtggtggagctggaatttaaatctggttctgtctgactcaagaaccagcttcagtttaattttgatagccttacaggttcttaaaaaaaaaagctaaataggtaataaggctggatttctttctccattgggaaagatcataggtatggtgaagaaaacattgaccagggagacagaaaaaatgcaggagtcttggctgagtcccctttctctgtctgggtctcagtttcctggtctgagagcattggaggagtagcacaacctacttaatatttggggctggaattgaatactagaagcttcactcaggtatttctacaagtccagagcagggaggttagacatttctctgtgagagcaacatgtgaggaaaatatggggggtgagtgtcttagagccctttgtgcttacacaaactgga

SEQ ID NO: 544300 - DNA, 463 bp, Homo sapiens
acttttttttttttttttttggcaaatccccctgtgtgtgcatagtttagtggtcagccaataatttgggtagattggggagtttatcctttcygcggcttattcccttccagaacccaccccctcttcatttcctggcttctcttctagccccaactctattatctgatacctcaagctattaagactttggcctcctgttgccccaagttgcctgcagattggactgccttcaggcaaaaagctgcaaacttgcaaatcccaaaaggtataattcctgctttcaaagcttgattcccctccaatatctgtctgctcttgaccaaaccccattgccttcgcacatgcgtgtgtgtgtgtgtgtgtgtgtgtgtgtgtgatgatggagtagctcaagactgtcactaacctctcttcccatccccagctccatcccccactgcaagaacctcatgcacatgtg

SEQ ID NO: 544301 - DNA, 561 bp, Homo sapiens
attcacaccaacgcacacacagataacccaatagcgtatgactgctgtgatggaaggagctgcaggaggtggggtggaggggccctraacacaggctaggtgttaaggtgagcatctctcttgaactgaaattcctggttgtttcattctatgcttgtatccccagggcccagcacaatgtgaggcacatggtaggtattcagtaagatttcaaggagggagggagagaagtaagagaggaagggggaggaaaagagaggaatggaaaggaaaggagggtgggttggttttctaacatgagtccagaccagggactctggatgcgacccaatacttcaatgaaattctgcctgaagtcagctacagtggttctcaaccggtgacagttttgtccctaagaagacctttggcaatgtctcaagacattcattttttcttctttttttttgagacagggtctcattctgttgcccagactagagtgcagtggcacaatcatggctcactgcagccttggcctcccaaggtcaagtgagcctcctgccgcagcctcctgagcag

SEQ ID NO: 544302 - DNA, 670 bp, Homo sapiens
ctgtttgaagctgagtgttacttgggcctttcaaactcaccactcagagtcagtcacccsctcaagtaaccaaacatcttttcatgagacacagttctctgtacagaaatgagaaacagaagcttgcccaagagaaagctgcaaaattgctctgagatcacccactgatactgacctattcagaggctccacatatagaagccttgtactttgccctcagagctggaaggatgcctttgatggctccaactcccacccctgttcctgccgctccttaaatgtgttgtctctgttacagaggcagagccttcgtgctcgctattttcccagccttgaatgtcctttcattttcagggctgtttccatctcatcattcaggcctgcagataggtccacagcaggcaaggtcaagtgtggaggtctgtacaagacaggatgttagaactgagcgtcctgccacaagcttagctgaggttctgtaggctccaagcttctcctgttggttttcacacaacatatacacagagatatccctaggcatatagcatccagactacaacaggaagttaatgaggagttttatgttaattttaaaagagtgtgagaagctgttaggtctaagccccgcgcgcaatgtttcacaggggtgttcacattctgagtccctctc

SEQ ID NO: 544303 - DNA, 670 bp, Homo sapiens
ctgtttgaagctgagtgttacttgggcctttcaaactcaccactcagagtcagtcaccccctcaagtaaccaaacatcttttcatgagacacagttctctgtacagaaatgagaaacagaagcttgcccaagagaaagctgcaaaattgctctgagatcacccactgatactgacctattcagaggctccacatatagaagccttgtactttgccctcagagctggaaggatgcctttgatggctccaactcccacccctgttcctgccgctccttaaatgtgttgtctctgttacagaggcagagccttcgtgctcgctattttcccagccttgaatgtcctttcattttcagggctgtttccatctcatcattcaggcctscagataggtccacagcaggcaaggtcaagtgtggaggtctgtacaagacaggatgttagaactgagcgtcctgccacaagcttagctgaggttctgtaggctccaagcttctcctgttggttttcacacaacatatacacagagatatccctaggcatatagcatccagactacaacaggaagttaatgaggagttttatgttaattttaaaagagtgtgagaagctgttaggtctaagccccgcgcgcaatgtttcacaggggtgttcacattctgagtccctctc

SEQ ID NO: 544304 - DNA, 670 bp, Homo sapiens
ctgtttgaagctgagtgttacttgggcctttcaaactcaccactcagagtcagtcaccccctcaagtaaccaaacatcttttcatgagacacagttctctgtacagaaatgagaaacagaagcttgcccaagagaaagctgcaaaattgctctgagatcacccactgatactgacctattcagaggctccacatatagaagccttgtactttgccctcagagctggaaggatgcctttgatggctccaactcccacccctgttcctgccgctccttaaatgtgttgtctctgttacagaggcagagccttcgtgctcgctattttcccagccttgaatgtcctttcattttcagggctgtttccatctcatcattcaggcctgcagataggtccacagcaggcaaggtcaagtgtggaggtctgtacaagacaggatgttagaactgagcgtcctgccacaagcttagctgaggttctgtaggctccaagcttctcctgttggttttmacacaacatatacacagagatatccctaggcatatagcatccagactacaacaggaagttaatgaggagttttatgttaattttaaaagagtgtgagaagctgttaggtctaagccccgcgcgcaatgtttcacaggggtgttcacattctgagtccctctc

SEQ ID NO: 544305 - DNA, 458 bp, Homo sapiens
ctcatcattttatacccagcagctagcacagggccttccatacagttcttgtcagatggaaggaaggatggatggaaggagtagtggatagatagaagaagttttatttttctgatgacttccaatagaatcctagaggagtgagcttctattatccatggctccctacttaaagacagagctctaactctataactttgtttaaaatgcattgcatgttaaatttttaaaacatgaatgtaaaaagtaaatgtaaaaagtttaaaaattcctttaaggatcttcagcaagaagacttgcatagggcttagtgggcactcagtaaatgtttctgaaacttaattggatttaaatgctaggatggygagataaaagtactttcaaaaagtttctgttaccaggataaaggatagactttatcccttatttgcaaagtaactttatccccaaatccagcc

SEQ ID NO: 544306 - DNA, 667 bp, Homo sapiens
ttccttctattccgccttttttccccctcctgattataaaatgttcagtcagctaatgatgtgatggaggttcaaggccttcttcatcagcttttccatgtactcacgatttttagtgaaaattgcatgtatacttcttcagctatttgcacaccttatcagcattcttcttattcaagaagaacagatggagaaactctttcaactcttggaactcaactggaacaattattttctgccaaaaataaaatctcataatcaamaaagaggatagagcaatatctgagatttgcaaattccaggaagaaaaaaaagagtacaaacaattagaaacctatttcagtttttctctgtgttaatagaagcctgtcttctatagggcttagtgttttacaatcatcacctgaaactccaacaagaaaggcaagaaggcacaatggtttcttacctgctttcccttactactttgccaacttacctcagtgatattacctcattttattgagcttcgttaatctcaggtgtaaatgaggacaacaacatatacctcccagacttgtggcagtaagtaaatggcatagcatttataaaatgttcccaatgggagctaaataaatgttggcttctttttttcttctttcttactttttacatatggcaactaagg

SEQ ID NO: 544307 - DNA, 579 bp, Homo sapiens
tcccaactgctgcctggtcaactggggaaccattgccttcggtgtgaatggggtgaagagctcagggccagacaggcagagcagtgtggttccaccagaactgtgggcaaggcctttggcctccctaatcttccttctcccagcgggaaaacagggatgacaccacctccctcagccagttttcttgtcatgatgtttagtaaggttttcataagatgatatgtgtgcaagagatcagtaatctgcaaatgggaaagatggctggttctgtgagaccrggctgttcctggtcccagctaagacattgcagtacccacctcccaaagggagtacacccttgctttgggcctgtgcctgcctgagtcctgatccgtcttccttcctaccctgcccccggcccccttctctttctgcagacaaactggtcaagtgtgagggcatcagcctgctggctcagaacacctcgtggctgctgctgctcctgctctccctctccctcctccaggccacggatttcatgtccctgtgactggtggggcccatggaggagacaggaagcctcaagttccagtgcagaga

SEQ ID NO: 544308 - DNA, 575 bp, Homo sapiens
caggattttcagacacacctaatgctaagatgcattttagcttgagccttagggctaacaataacctagtccctagagtccaccttaaacagaactctcaccagaatctagacttgaatccatatcaatctgaagtacagctcgaatcatcatcccttccttaatatgaatcttaaaccctattctcatttctagtctccaatcgagtactggtctgaagttcacctcttaccctaacttccgaatgaacctgagccctaaagacttgatcttgggcaaaggattggcccatcccctcttctctccctccttatgaatgtggcagagcctctgtggtgagcgctgtgggtagagagatgtgtcctgtgctgcccctgctctccaggaacttggctgtgtgcccctaccgccctcaccatcagacaaattcatgtcagtgtcagcattgacgatattctcccaagagggaaagtctttagagaagatgtcatcatcatttacaaggcaaaacatagaggtgggccatggagarctctgaattcttcccactgtgcaccacctgccgagaggctctg

SEQ ID NO: 544309 - DNA, 511 bp, Homo sapiens
aaaaactaataaaagagtttcttatggtgtatagtttaaagataaatttgcatatattagcagcttacttacatccttgcaataaccatatagtaaacactttgtccaatcaaaatgcactattgtaataagaaataaaattagaacatgacagtatcttccaaagttaagtacaggtggatccatatgctggcaattctattctttgatatatattttaaagaattgtgtatgtatttgttcaccaaaaaacatgcactagaatgttagtagcagtaaaattgcccaaaactgtaaatactcaaatgccctctaatagtagaacacagaaaggaactattgaatactacaaaacaatgagaataagcagtctacaactacaatcaacaacacgaacgcatgtcacaaatacaatcattgagcaaaagamacctgacaccaacagtaaaacataatttgattgaatttagagaaaatggaaaaataggcaaaactaatcaggaggaagtct

SEQ ID NO: 544310 - DNA, 646 bp, Homo sapiens
tggcaaaactgcaattacttttgcatcaacctataattgcattcacctatcaatttattcatcttagacacattatgtaaaagatagtaacataaacttttgtgatagatggctaagtagatagatagatagttgatagattctatccaatattcattaaaatgggtaaggaaggtgtattcttttctgtggctgttacaacgaattacctcctgtggcttaaaacaacgaaaatgtattctcattgttctataggccaaaatctatgttggcactgctccatatgctctaggagggattccattcctgcttttggcttcaccattccttggcttgtggctgcatcatttcagtccctctctccattttcacatggacttctctgtgaatgtttctctgttcctctcttttacaaggacacatgtgatcaactctctcatctctaaatcyttaccttaattatacatgcaaagactctttttccaaatgctattcacaagtcctaaggattaggacttaatatgtttcagtggccattattcaacctattatactaggtgttcaagtcagagtatttgcttgcaagcaacagcaaacaatagaaattgacctacgttgtcttagaagagcagaaatttattgtagt

SEQ ID NO: 544311 - DNA, 596 bp, Homo sapiens
agatctggactgttttttagctctattgctgctttctcactgtatacacagtcaccgccaggtgctgatataactaaagggtcagctttttctttttaattacaggctatttcctgctaatattttggaggaaagaggggagaggttttctgaaactctcttctgagttatccacttaatcactacttctgggaaatgcttggtttcagatctgggagaagaaatatagaagataaatctggaacaytgtgtgacacaaaataagaaaactgtgaaaggaaaacgagccattgtcaaaatgacacatgagccagcttgagtggactttcactatccaaaggtgagacaattaaagaatcaataataactatgattgattaaaacacatttaagatgtaaaaagccatgcattcttaatattttaaagagagagaaacaataaaaactcttgggatattggataacattagagcctgtctgggcaccaagtcaatattctgaaaattgtcactgaagggaaagaattaggcatttaccttgccattctgaagtaaattgtatttcagggtgtcccaaaagtcctgtagttatggaaa

SEQ ID NO: 544312 - DNA, 596 bp, Homo sapiens
agatctggactgttttttagctctattgctgctttctcactgtatacacagtcaccgccaggtgctgatataactaaagggtcagctttttctttttaattacaggctatttcctgctaatattttggaggaaagaggggagaggttttctgaaactctcttctgagttatccacttaatcactacttctgggaaatgcttggtttcagatctgggagaagaaatatagaagataaatctggaacactgtgtgacacaaaataagaaaactgtgaaaggaaaacgagccattgtcaaaatgacacatgagccagcttgagtggactttcactatccaaaggtgagacaattaaagaatcaataataactatgattgattaaaacacatttaagatgtaaaaagccatgcattcttaatattttaaagagagagaaacaataaaaactcttgggatattggrtaacattagagcctgtctgggcaccaagtcaatattctgaaaattgtcactgaagggaaagaattaggcatttaccttgccattctgaagtaaattgtatttcagggtgtcccaaaagtcctgtagttatggaaa

SEQ ID NO: 544313 - DNA, 468 bp, Homo sapiens
actttatgagcaattagtttagcttaatgaatgctttccttatcttaaaaaagagctatattctctattaatattggtcttagttgctgaactagatgcaaatagatgtttcagtgtaaagatgatgacctttctcatgttgaccttctgtggcaacagatcctggaacatgacctaggctgggtaaattatagttcttatcacctgaacacagtgattgattaaagagctgggtagatccatcacccgcatggggcaaatttgagctcttccttagatatgacaggatatatgatgtgatatgatattacatgatatgatatgatatgatagagagwagagctatgtctcctggaatcagagaaacttaaagtcatcctatcaggtcatggacaaaattcacgtggagtggaagagaacagagccagtaaactgagagaagcataagtggatgatagacagttttct

SEQ ID NO: 544314 - DNA, 617 bp, Homo sapiens
ctggaaaaacctttgaattacgtagatttatgccgctyctcatgctcttttccttagcttccctgtgatccacctggccttgccctcagcccagtgacagcctcagactgccagacctcttgctacctcagagcttttccttgtgctgtccccctgcctggattgatgtctctctccctgctctgtctacttaagaactcagtctctgggtccacttgacaaggcatattcttggggaagcttgaatgaagcccaaaggagaccaggtaccctgttagacattctcagcatgtgatttgtttaaagattatcttccctcctaggctgtaagcattttaaggatagggatcacaccagtcttcaccgttgtattaccagcaccctgcatagggtgggaggttaggacagccgagtagtaggaaatgctggctgcctggattcaaattccactgccactgctttctagtgttgtgattttgagcacgttgacttaagctctcaaatacctgcctctgaagagttactgtgaagaccaaatgataatgtgtgtaaagaatttactatggtccttggcacatagtattcagtaaatattagctgttaggattatcaggtgc

SEQ ID NO: 544315 - DNA, 580 bp, Homo sapiens
aatctcctacgtataaaaggacacctgcagtggcacttttgcctagagtcctgaaagcatcatcygcagcaccttgacaagggcccagacagcggagctgggaacttggactttagactgccaaagaagccatcctccaagaagccatctccttatctgtccttgtgagatgcactcatgaagattatcaaatggtccccgaacaaggacacatcaaaatgctgcctcaggacaactcctgaaatagagtgggagttagactgagagacaaaaggtttcattgaactatagggtgacaaaggacaggacagtgaacatgtactggagagattaccaagtaaagatacaccattgctagtggttggggtgggaagaaatagtgaaggctctctcagttagataaatggcagcatatcactggagtggacctgctacgatttgcctaatcatggagatgatatcagggatcaaataagaggtatgtgtattatacggggttttctagagaaacgggaccaatagtatgtgtttgttataaggaattggctcacatgattatgaaggctggcaagtcctgaga

SEQ ID NO: 544316 - DNA, 479 bp, Homo sapiens
cctccatccccatccccaagtcaggtcacaaccctcatctactcccctgcctcccattcctttgaagggttagggcttttgttccttaatggagaattacaactcatcctggaggaagaaacmaaatgacttaaattcaccctaagacacaaatgactaacaatagatccttgctcagagggaaagactttattgggaaagggaggagggagtaagaagacagggttcagaggaagggcagtcagaagtgagagtagagaaaggccttcaaaagggaggcctggatacaaagtcataacaaagacacgcttagccctgtgggtctgacaggacaggacaggccaagagagcccctccttcagagagtccttctcaaagacagcctccctcagcgagaacatccttcagagagctgctcccaaggacagctcctcacttagagagcccccctcagggagcacctccctcagacagcccct

SEQ ID NO: 544317 - DNA, 644 bp, Homo sapiens
ttgaattacagaatgatcaccaaatctctgatgtcaactggcttctcagggggagctggtccctctggaatgccttgtttcttcaggctttgcctccagtccaagacaagtccccatgaaaaggaggacactattttaatatctagaggtcatatatgccttaatgtaaataagtttatcagacttatcagattctttatagagaaccagttttaattatggaaaaatgctgaagagtttggggattctttatggtttaaggatctagtaaatattttatatatttttgtagagttaagctttgccagagtatctatgactattggttctattgacaatattaaccaacacttgaatgctttgcagctttccatatgctaatgacattactaagtacttttatgtatattgacttgtttaatcctcctaacatcctgtgagatagatcctattattttataaattaacaaactgagccacagaaaggttacataacttgcctaagatcacatagctcataaatggtggagctagtatttgaacccagcagttcggagccaaaggcctttcttataacatctttctaccatgtctyactaggggttcagcagtcaagactcctgatacagatgcctgaccattct

SEQ ID NO: 544318 - DNA, 634 bp, Homo sapiens
aataacgtttagaaagtgtcaaccacagtcctgacacagagtgaacagtcagtgtaggtcagatccctttctctccctgccccacccccaacattctctcttcttatcacttgatttcttgccactgacagtgatagtgccacatggagccatattgaagcctgaggtgaaagggaaaataaatgacagtaatctggtcctgtcttgattttgttcttcataaagtacttgcattgattttgactcttaaaatattgtattaacatattctttgccttgattactgagtatttggcaccctcttacattttgtgcccaagtcaagtgccttgctcacttcagcctggtaccagccccacttgtcagaggcagttgaaaagtaccccaggatacatttccttccacaacaaccagcccttcctgactctctgatttaaggtttaatttaatatggttttgaaaaataaaatttttttttyaattatgtgtacaggtggtgcaggatatttccctgacccctttgcaagacttgtgacaggggtaccttgtgtacttagcctgcagcattcaactcctcgtgggagggagtgcatgagtgaacaaggtgggaactagagtgcacaagcactggaac

SEQ ID NO: 544319 - DNA, 634 bp, Homo sapiens
aataacgtttagaaagtgtcaaccacagtcctgacacagagtgaacagtcagtgtaggtcagatccctttctctccctgccccacccccaacattctctcttcttatcacttgatttcttgccactgacagtgatagtgccacatggagccatattgaagcctgaggtgaaagggaaaataaatgacagtaatctggtcctgtcttgattttgttcttcataaagtacttgcattgattttgactcttaaaatattgtattaacatattctttgccttgattactgagtatttggcaccctcttacattttgtgcccaagtcaagtgccttgctcacttcagcctggtaccagccccacttgtcagaggcagttgaaaagtaccccaggatacatttccttccacaacaaccagcccttcctgactctctgatttaaggtttaatttaatatggttttgaaaaataaaattttttttttamttatgtgtacaggtggtgcaggatatttccctgacccctttgcaagacttgtgacaggggtaccttgtgtacttagcctgcagcattcaactcctcgtgggagggagtgcatgagtgaacaaggtgggaactagagtgcacaagcactggaac

SEQ ID NO: 544320 - DNA, 696 bp, Homo sapiens
tgttgaatcagcagaggatgtaaccacttagatagcactatgtgactcaaataaatgacagattgagtctttcaagtgtcacagtatataataaggatcacaaattttgtgtgtgtgtttttttattaagagaaaaaaaatggctttggagtcaagtacacttagtcttaaatcccggctccactgtttgctagcgatgtaactgggtgtattacctcatctgtacaatggggataataccaccaatctcatggttaaataaagtagtgtgtgtaattgctcagcatagtagcatagtacttgacacacagcaaatagtagcaggatcaaatgggagaatatataattgcccagtggctgtaagacaagaaactcttagtgttattacttctctatatttcttagagatgcctaatyccatttcttaaaactgagaaaatgatcttatcattaaccaagtttcagtaagtagtaggatcaaatggggtggtgtacaaatgggtttatacattatgaataactttactttgaaaggctaatttcttgtgtctttattcataaaagttttccattcatctctcacttgtctgtttttaaaaattcattcatcggtgttttaaacaaactggagactagggagtccctaaaggcctcactcagacttaccttctaaaagctgggaaaactgaatttttt

SEQ ID NO: 544321 - DNA, 519 bp, Homo sapiens
tcctccaattactgctgacggcacggcaatstaaatgtaaaatttatctgagagttctgcaagtccatccccaggctctgcccatcacagtcagattcaataaggcaactttctgtgtgcataagtaggatgaggtaggggggcagtgagtagaaatgtgattagtttttaatgaggctaatcgttctgaatatgaagttggtttgcattctcattagcaattttcataaattgtttgaaatgcttgcccataaagtcaggattgcaaacttacagatgaatcacttctaccttggcttcctgttgagtggagattattaattgcgtcctttctcatcagagctccccacacaactgcagcctttatttttagaacactatctcttgccagctcctatctgaaccaattctgctttagtctaatcagggaatatgaagttaaatctagggcaaagagaagggaaaacctagaaaactgagtcaagagtcctgttggatacagtttcaaaactccaactt

SEQ ID NO: 544322 - DNA, 452 bp, Homo sapiens
cagtcaatctaaccaacattatctttagccaagtcattgataatgtggattatggcaggaccaagctgaaaaattcatagtgccagccctggagcagttcacaggtggccaaggccccagggtgctctgtgggtccttaggaccaataactggccagaagcccagggatcctggcctcaggrgatgtgcaaggactctcgaggagaaatgagccctttgtggccatcttgcccagcgccttctctgcaggaatgtagcagctcctctcctgatagaaagatccctcctttccagagatgtcctcagactgaagagtggggcttctcatgatctgcttctagagaagccctttgagcaatgccaggctcctagtgtaggctttcttgattcgttgttgagaaagggagagaagaggcatggtcttgccaccaggagctgggagggggcaatca

SEQ ID NO: 544323 - DNA, 549 bp, Homo sapiens
tgtgagcaatggaaacaccttgctctcacagcrgctcacctcatcagcctttatccctgactcactcaccctggtcttttatttgtttctgtttgtctgtttttaatccttctgaaaacctattcccatctaccatcttgagacatgttttcaatagccaaaaatttacagatggaaaaagggcagcacagctaggacaagaatttggatctcccatcttgcagcaacacattgttcaagctctgtagcatgtgctgtgtggtcacaggctgcacaagagcactgaggccaggggccacagtggcgtgtggctgttggcaaggcaggcagaggtacttgcaacctcacatccactagcacatccaaatgcatctttgctgagtcctgagagaaatgtgagaagtcagagtcttcttgcagtcttgtacttatggacagagagaaagaacccacagactagacagaatccttaatctggtcggggaccatgggttggatttacctagacaggcaagaatggggagagtatcagaaggggggacctatgaa

SEQ ID NO: 544324 - DNA, 186 bp, Homo sapiens
taggcccattcacatactgccaagtgtctcacagttccctrtccgggtcatggggcagggctaaccccactctctcagtctgttgagatggaaactaaggttcagagagattgaacacgaagcatgttatgagtagggctgggattagaacacagggctcccagctccctggccaaagcatttcct

SEQ ID NO: 544325 - DNA, 186 bp, Homo sapiens
taggcccattcacatactgccaagtgtctcacagttccctayccgggtcatggggcagggctaaccccactctctcagtctgttgagatggaaactaaggttcagagagattgaacacgaagcatgttatgagtagggctgggattagaacacagggctcccagctccctggccaaagcatttcct

SEQ ID NO: 544326 - DNA, 587 bp, Homo sapiens
ctgggtgccaagggccggactaacagggcttggtatctgaygctggtgagctgatcgctttgttggggagacgggaagctgcacataaactctgaaacagaaaccataaaaagtaaattaatactccaagagttaactaatagttcagaataaaaagagaagcaatgtttcaaggccctacacgattagctgcccaatgaggagtacagacaatgagggtttgggttactctgaggagaaagcacccacctcaggctgctgggctcatggaaagccccggaggctggtttctggcatttttggtctattaactgctgttgtgaccactgaaatttgacttccaaggaccggaagcccagagctaattctgcggcttgttggtcaggggctggtaccagtcaccttcatggggcaaaagcgcttcagtggcccctgtctaaaacagggggctgtgccatcatttcccctgcccaacctcctctgggagtgaggtgcagccaccttattacaccagcgaagagcagcgaggagatggaagagagccgggggtttgctgtgccacccctccctggtggggtgaatgagca

SEQ ID NO: 544327 - DNA, 205 bp, Homo sapiens
ctcaggaggctgaagcaggagaatggcgtgaacacggaaggcagagcttgcagcgagcagagatcgctccactgcactccagcctgggcgacagagcmagactccatgctcaaaaaaaaaaaacctcgatgtatggtagtggttggggacaaggtgtgtgggggtaggggatggtggaagacagcctttcttggtattgaaaggt

SEQ ID NO: 544328 - DNA, 587 bp, Homo sapiens
ttttaaaacaacttctcaaatttatttaactcatgtggttaacatggtattgtataaaaagaaaaaaaaaacaccactcaatacttactaagccttgcagacagctcagagttgaggcagcatatkgggcatagagatcataggatttgtattatcccttgcaagatggaactccaaccaacaccagaattttccaattcaaattcagttttagtcgagaccccagcataatttttagaaaaaagattggattgttgcttttcttttaattttccattcctatttagacaaatgaccagaggcaatgacaaaagtaactgtttaaaagggatttctctccagaagttttttctaaaggtttaagtccaggctttccatccttctctccatcctttttccttttaaaaagaagggttttggaatatgtcaacctttactcagcttgctatacaaagccactgctttagtcctagacataatgccaggactcatctcccaaacttctggtcttaatcaagttcatgcttggttgctaaagaagctcatgttaatcccaaagtcagcacaatcccaaccttaaaaagcag

SEQ ID NO: 544329 - DNA, 587 bp, Homo sapiens
ttttaaaacaacttctcaaatttatttaactcatgtggttaacatggtattgtataaaaagaaaaaaaaaacaccactcaatacttactaagccttgcagacagctcagagttgaggcagcatatggggcatagagatcataggatttgtattatcccttgcaagatggaactccaaccaacaccagaattttccaattcaaattcagttttagtcgagaccccagcataatttttagaaaaaagattggattgttgcttttcttttaattttccattcctatttagacaaatgaccagaggcaatgacaaaagtaactgtttaaaagggatttctctccagaagttttttctaaaggtttaagtccaggctttccatccttctctccatcctttttcmttttaaaaagaagggttttggaatatgtcaacctttactcagcttgctatacaaagccactgctttagtcctagacataatgccaggactcatctcccaaacttctggtcttaatcaagttcatgcttggttgctaaagaagctcatgttaatcccaaagtcagcacaatcccaaccttaaaaagcag

SEQ ID NO: 544330 - DNA, 588 bp, Homo sapiens
ctcatctgtctgagctaagggccacctggggtggagyggaggtggacattgtcaggctcttctggttttccatgctcactggcaaagtgggctcaggcagcctaaggtcagtgttctgacaaagagaagcaggtgctggctgttgggaatgaaagctcactggagctggtatgtatgacaatggtaaagggataacaggcattgtgattgggtcaatggcagtgccgctacagtggcataaactgcaaggacatctgttattttcttaacaagaaatgtggaggtatgtggtctccagactgcttcagtgtaggtcatcaaggtcattgaggactcagctcaggacagccttcctcagcatcctggcttttatcattctcagcctcatggccacaagatggctgctgcagcaccagggctcatgtccttaactgatagcatttgagtctggaagaaaagggagggctgcagcaaaaaaacctttcgcctcacatgaccctcccctacagaaggaaaatcttccctgctcactccaccagcctggttcatgtcatcagtgcgtgtgaaagggctttatatcctgcgaaa

SEQ ID NO: 544331 - DNA, 588 bp, Homo sapiens
ctcatctgtctgagctaagggccacctggggtggagcggaggtggacattgtcaggctcttctggttttccatgctcactggcaaagtgggctcaggcagcctaaggtcagtgttctgacaaagagaagcaggtgctggctgttgggaatgaaagctcactggagctggtatgtatgacaatggtaaagggataacaggcattgtgattgggtcaatggcagtgccgctacagtggcataaactgcaaggacatctgttattttcttaacaagaaatgtggaggtatgtggtctccagactgcttcagtgtaggtcatcaaggtcattgaggactcagctcaggacagccttcctcagcatcctggcttttatcattctcagcctcawggccacaagatggctgctgcagcaccagggctcatgtccttaactgatagcatttgagtctggaagaaaagggagggctgcagcaaaaaaacctttcgcctcacatgaccctcccctacagaaggaaaatcttccctgctcactccaccagcctggttcatgtcatcagtgcgtgtgaaagggctttatatcctgcgaaa

SEQ ID NO: 544332 - DNA, 588 bp, Homo sapiens
ctcatctgtctgagctaagggccacctggggtggagcggaggtggacattgtcaggctcttctggttttccatgctcactggcaaagtgggctcaggcagcctaaggtcagtgttctgacaaagagaagcaggtgctggctgttgggaatgaaagctcactggagctggtatgtatgacaatggtaaagggataacaggcattgtgattgggtcaatggcagtgccgctacagtggcataaactgcaaggacatctgttattttcttaacaagaaatgtggaggtatgtggtctccagactgcttcagtgtaggtcatcaaggtcattgaggactcagctcaggacagccttcctcagcatcctggcttttatcattctcagcctcatggccacaagatggctgctgcagcaccagggctcatgtccttaactgatagcatytgagtctggaagaaaagggagggctgcagcaaaaaaacctttcgcctcacatgaccctcccctacagaaggaaaatcttccctgctcactccaccagcctggttcatgtcatcagtgcgtgtgaaagggctttatatcctgcgaaa

SEQ ID NO: 544333 - DNA, 590 bp, Homo sapiens
accatggtgccgggtggcagtttaaacttcatttcatgcacacaatcattaataatattgtataaaattatatgtgtaaggtgtatgtgaaacataaatgaattttstgtttaggcttctgcctcatcctgaagatatctcattatgtacatgcagatattccaaaatctgaaaaaatccaaaattcaaaatgcttcttgtcccaagcatttcaaataatgatattcaacctgtatatacttaaaggaccacaggaaggcatcattaacaaaacaagttgagggccaggcgcagtggctcacacatcaaaacttcaggatgctaaggcgggagtaccacttgaggccaggagtttgagatcagcctgggtaacataaagagaccccatccctacaaaatgtacagaaattagcctggtatgatgacatgtgtctgtagtcctagctactgaggaggctgaggcagaaggattgcttgagtctagaagttccagactgtagtgagctgtgatcgcaccaccgcactccagcctgggcaacagagtgagatcctgtctataaaaaaaaggaaagaaacaaaaatacacacaa

SEQ ID NO: 544334 - DNA, 494 bp, Homo sapiens
tcgtgctgtcacccagactggagagcagtggcacaatcgtagctaactgcagcctcaaactcttgcctcaggtccaccacacttggctaactctttttttttttttttaacttttggtaaagacagaggttttkgctatgttgaccaggctggtcttgaactccttggcttcaagcgaccgtaccaccttggcctcccaagttgctgatattacaggtgtgagccactgccccccgccgacttttaaactgaatgttgaaaatcattctgctctttgctgggtaacactgatcaagttgcttaacctttgtgaaaccactttccttatctgtaacaaaatggacaaacagaactttttcctttcctctcgatatcaaacaaaagcaaaaagacaatgaaaaaagtttcgtggaatttttgaactccattttccatggaactaggagacaggtataatctccagaattccaagtacctgtaaggtctgccagagg

SEQ ID NO: 544335 - DNA, 470 bp, Homo sapiens
gaactttttttttttttttttgccaatccccctgtgtgtgcatagtttagtggtcagccaataatttgggtagattggggagtttatcctttctgyggcttattcccttccagaacccaccccctcttcatttcctggcttctcttctagccccaactctattatctgatacctcaagctattaagactttggcctcctgttgccccaagttgcctgcagattggactgccttcaggcaaaaagctgcaaacttgcaaatcccaaaaggtataattcctgctttcaaagcttgattcccctccaatatctgtctgctcttgaccaaaccccattgccttcgcacatgcgtgtgtgtgtgtgtgtgtgtgtgtgtgatgatggagtagctcaagactgtcactaacctctcttcccatccccagctccatcccccactgcaagaacctcatgcacatgtgtctgaacatcc

SEQ ID NO: 544336 - DNA, 488 bp, Homo sapiens
ctctgaatgttatgacgaaggaatacaagttcagggacatgaactcgagatgctagacattctcatgacctggtgagaaagatagcagggctccagtttccaggcctgggttttctttccccaaaagacaaaccatcagtcagacccattgaattcactgtatcaccagttaggttttgcaggaacaaggggcacgcatgtagctcccaggcctctctttgcagaccctgtttaattggaattgttaatgcaagactgtgaggaagaagagcggactggttctatgctttgggagaatcagatgacaagcacagcactttctttatctttgatttttccatcccttgcttgtcaatactagatttagacgtttctctccatgtaacgtttctccttcctcatagacttttctgtaatgaggactatraaactgaggctcacaggccccataattgagtcaaggcctacccagtgcaggagttgcaact

SEQ ID NO: 544337 - DNA, 351 bp, Homo sapiens
tgctcatcaatctggtgcaagctgcaggttgcctgactaaattactgtcgaataggcagacgagcacaatttgtcagtcagcattgagtttaaatgagcagagatgcacataaagccagcaatgcaattgtaattaagaattataggcatcaagtttcaacgagtgctttcttaaggtagcagtgacccatctgtaaggagcatatgagaaatccagagcagaattaatctcagggaatggtctaccctctacattttaagcaattcttcatgtatgaargcgatgtgtaaatgatggagaatctatgagagctcaggctctagttttcctatttgcttaagaaaaaattt

SEQ ID NO: 544338 - DNA, 597 bp, Homo sapiens
gctgcagccatccattttgttttgaatattttccatccacggttggttgagtccatggatgcacactgtatccgtggaggctggctgtatcttgtttctgtgaatgatgtgctggttgggaatgttaattccatccacagtagagaagacaaaattcccctctgtcttgctatctggcttccacccagaagcacttttctgctgttttcggagtcacctttcccccactgtgaagctccatgaccaggtctttatgaaaactgtagctacacagcgctgccctgctttctgagtccaacaggaaaactctgctgacgaacatgcctacagaagtagaattttggaccccaaatcacaaagttccccctattttgcttttatcccttttctcatgctgcttttgcttctctttttaaatttactttaaaaaaaaataactttttttttttttttttttaaaaactgagtctctgtkgcccaggctggagtgcagtggcacgatatcagctcactgcaacctccgcttcccaggttcaagtgagtctcctgcctcagcttcctgaatagctggtataatttttgtatttttagtagaga

SEQ ID NO: 544339 - DNA, 475 bp, Homo sapiens
tctactcgcattacagaacagaaactgaatggaggagggaaaagcaaagagtgctttgggatgttcatgcagtcacaatcccgggaataaagtgaaactttctcaggagaagcagggctgtttgttctgacctcctctcctccctctcacaagmaccgctgggcttttctcaacagggctgggaagtgtgctttccttggggtgcaggagagagtgacatctgcttctcctacatgtcccaggaatttgctgaaggtccaggaaagaatttttattctgtatgtgagtcagttggattaacgttatggagtgtctgtgacaaaccacagatagtgggagaggtgatgggtttgtcagggatgtgttgctgaattctccttctgtcccttagtctcaccctccagaaagtccaggatccttgttctgttgctggtacccagaaaggctgctgcttcccatctcccacccgctgtgt

SEQ ID NO: 544340 - DNA, 599 bp, Homo sapiens
tctactcgcattacagaacagaaactgaatggaggagggaaaagcaaagagtgctttgggatgttcatgcagtcacaatcccgggaataaagtgaaactttctcaggagaagcagggctgtttgttctgacctcctctcctccctctcacaagaaccgctgggcttttctcaacagggctgggaagtgtgctttccttggggtgcaggagagagtgacatctgcttctcctacatstcccaggaatttgctgaaggtccaggaaagaatttttattctgtatgtgagtcagttggattaacgttatggagtgtctgtgacaaaccacagatagtgggagaggtgatgggtttgtcagggatgtgttgctgaattctccttctgtcccttagtctcaccctccagaaagtccaggatccttgttctgttgctggtacccagaaaggctgctgcttcccatctcccacccgctgtgtaaacatactacggaacaatggactttcctgaccttcactgtgctttactggttctactcagtttctccctgggagttgggttataaccctgaagaccacatggcacttgagcagtccagattct

SEQ ID NO: 544341 - DNA, 599 bp, Homo sapiens
tctactcgcattacagaacagaaactgaatggaggagggaaaagcaaagagtgctttgggatgttcatgcagtcacaatcccgggaataaagtgaaactttctcaggagaagcagggctgtttgttctgacctcctctcctccctctcacaagaaccgctgggcttttctcaacagggctgggaagtgtgctttccttggggtgcaggagagagtgacatctgcttctcctacatgtcccaggaatttgctgaaggtccaggaaagaatttttattctgtatgtgagtcagttggattaacgttatggagtgtctgtgacaaaccacagatagtgggagaggtgatgggtttgkcagggatgtgttgctgaattctccttctgtcccttagtctcaccctccagaaagtccaggatccttgttctgttgctggtacccagaaaggctgctgcttcccatctcccacccgctgtgtaaacatactacggaacaatggactttcctgaccttcactgtgctttactggttctactcagtttctccctgggagttgggttataaccctgaagaccacatggcacttgagcagtccagattct

SEQ ID NO: 544342 - DNA, 436 bp, Homo sapiens
gtgttgcatgtgaggagtcggggagtgcatcaggaagaatagctaatggatgctgtgcttaaaactggggtgccgggatgatctgtgcagtaaaccaccctggcacacatttacctatgtaaccaatctgcacatcttgcacatgtacccctgaacttgaaataaaaattgaagaagaaagaaaaataaataaataaataaayggatgttgtttcaagccactaaaactgtggtcattttttatgcagcaacagaaaatgaatacgttctgcgaaagtcacagtttttctggatgtgcgtattgctgttgaattactttcctccttatgagacaggtcggtggatgggtaacttttagagaagctccttatatgttatgactggggaacctgagaactgtggggtgccctttcccctttcacctctcttcacaaca

SEQ ID NO: 544343 - DNA, 436 bp, Homo sapiens
gtgttgcatgtgaggagtcggggagtgcatcaggaagaatagctaatggatgctgtgcttaaaactggggtgccgggatgatctgtgcagtaaaccaccctggcacacatttacctatgtaaccaatctgcacatcttgcacatgtacccctgaacttgaaataaaaattgaagaagaaagaaaaataaataaataaataaacggatgttgtttcaagccactaaaactgtggtcattttttatgcagcaacagaaaatgaatacgttctgcgaawgtcacagtttttctggatgtgcgtattgctgttgaattactttcctccttatgagacaggtcggtggatgggtaacttttagagaagctccttatatgttatgactggggaacctgagaactgtggggtgccctttcccctttcacctctcttcacaaca

SEQ ID NO: 544344 - DNA, 436 bp, Homo sapiens
gtgttgcatgtgaggagtcggggagtgcatcaggaagaatagctaatggatgctgtgcttaaaactggggtgccgggatgatctgtgcagtaaaccaccctggcacacatttacctatgtaaccaatctgcacatcttgcacatgtacccctgaacttgaaataaaaattgaagaagaaagaaaaataaataaataaataaacggatgttgtttcaagccactaaaactgtggtcattttttatgcagcaacagaaaatgaatacgttctgcgaaagtcacagtttttctggatgtgcgtattgctgttgaattactttcctccttatgagacaggtcrgtggatgggtaacttttagagaagctccttatatgttatgactggggaacctgagaactgtggggtgccctttcccctttcacctctcttcacaaca

SEQ ID NO: 544345 - DNA, 506 bp, Homo sapiens
gtctttttaaacacagaggcacccacccacgtagtgagatctctgaagtgctaaggacttcaatgcttggacttttaacatatatggaccatgttcaactgttttagcacaacagctttccctgtattaattttttctggtctttcttytggcctctccacattaattcaggtcacttgctgttaaaaaacgaaacaagatagtgtttcaaagaaaaatgttctgtatgaaatatttaaacctggttaaaactaccagcaagatggagttgaatgttttatgtgataactggtgctcaaatcttggttcccttcagggaggaagggaagagcaggggtggcaaacccaggcctggtgcttacgattcagttgcccagaggaattttccacccaaagccaaacacccatgctgagatgttgggttctcttggtttattcaacaagaggaatggaagttagtttctaatacccatcactctgaaaaaagaatcaagagaagaggggtg

SEQ ID NO: 544346 - DNA, 610 bp, Homo sapiens
gacttgccagccttcataatcacatgagccaattccttaaaatgaatctctttatatgtaaatagagagagaaagagagagagaggtgtatatatatacatgcacattgtcttggtgctgcttctctgcagaacctgactctatggaatcctggctctggcccttctcctctctgaggcccatgtttgcmatctgtaaagggaggaagtagaactgtatagcttctaaggccccttagaaattaaaaattgcaggatgcaaacacctgctagttttgacatgtacgatttttacaaagagtaataaaagcaaattccggagaagtactagataaaaatgtggaaacactcctcattccctgacttttgcttaacatttagagcagtttggtcagtctctgctatggtaaaatacacatgtctcggcattgtccccaaacacaaaatgtggctgggttctgctgccaagtctttcctcctctgtcatagtcctctcctccttcccaaacaccaccatcctgccggcattatcatccctgttatgggcaccggcatctttcaggtgagtcttggacctcctaattcctgtgccaggcaccaagacaagtgga

SEQ ID NO: 544347 - DNA, 610 bp, Homo sapiens
gacttgccagccttcataatcacatgagccaattccttaaaatgaatctctttatatgtaaatagagagagaaagagagagagaggtgtatatatatacatgcacattgtcttggtgctgcttctctgcagaacctgactctatggaatcctggctctggcccttctcctctctgaggcccatgtttgccatctgtaaagggaggaagtagaactgtatagcttctaaggccccttagaaattaaaaattgcaggatgcaaacacctgctagttttgacatgtaygatttttacaaagagtaataaaagcaaattccggagaagtactagataaaaatgtggaaacactcctcattccctgacttttgcttaacatttagagcagtttggtcagtctctgctatggtaaaatacacatgtctcggcattgtccccaaacacaaaatgtggctgggttctgctgccaagtctttcctcctctgtcatagtcctctcctccttcccaaacaccaccatcctgccggcattatcatccctgttatgggcaccggcatctttcaggtgagtcttggacctcctaattcctgtgccaggcaccaagacaagtgga

SEQ ID NO: 544348 - DNA, 522 bp, Homo sapiens
ctggctgttgaaccatgagcttagggactgtcgcttgtcacaagctcctgttccattctcccaggccactgcttagtgggtcagctacaaacaccacagactcagttggcaaattagataactcaacatgtagattttcagtgtacaaactacacagagatgggatttataccaatttagctcctaacactgcttaacccacacagttaccttgtgctgttccagcctattttattctgagacatttagatcattcagaaactatccttctttctgatctccagatgtgacctcaaggtgcaacctccagatccaaactaggctggacagacccaccaaatccttaactggcagatcctttggggtataatgcctaggaaatcctcaattcattcattcattcattcattcattcattcattcattcattcattcattcaaagagtcaaaaatatccgagcccttgctatgtgctgacattgtgctaagtgccaggggagaaaaagcaaataagcccrgggc

SEQ ID NO: 544349 - DNA, 405 bp, Homo sapiens
tgccttcaccacctccagaagccccaaacccctattcctttctgtacctcagaatgcttaaaagcctcagccaggcgcggtggctcacrcctgtattcccagcactttgggaggccaaggcgggtgaatcacatgaggccaggagttcaagaccagcctggccaacttggtgaaactccacctctactaaaaatacaaaaattagccaggtgtggtggtgtgtgcctgtagtcccagctacttgggaagctgaggcctgggaggtggaggttacagtgagccaagatcgcaccactgccctccagcttgggcgatagagtgagactttgtctcaaaaaaaaacaaaaacaaaaacaaaagaatgcttaaaagcctccatcatctggcctttctttgagtctcatg

SEQ ID NO: 544350 - DNA, 405 bp, Homo sapiens
tgccttcaccacctccagaagccccaaacccctattcctttctgtacctcagaatgcttaaaagcctcagccaggcgcggtggctcacacctgtattcccagcactttgggaggccaaggcsggtgaatcacatgaggccaggagttcaagaccagcctggccaacttggtgaaactccacctctactaaaaatacaaaaattagccaggtgtggtggtgtgtgcctgtagtcccagctacttgggaagctgaggcctgggaggtggaggttacagtgagccaagatcgcaccactgccctccagcttgggcgatagagtgagactttgtctcaaaaaaaaacaaaaacaaaaacaaaagaatgcttaaaagcctccatcatctggcctttctttgagtctcatg

SEQ ID NO: 544351 - DNA, 405 bp, Homo sapiens
tgccttcaccacctccagaagccccaaacccctattcctttctgtacctcagaatgcttaaaagcctcagccaggcgcggtggctcacacctgtattcccagcactttgggaggccaaggcgggtgaatcacatgaggccaggagttcaagaccagcctggccaacttggtgaaactccacctctactaaaaatacaaaaattagccaggtgtggtggtgtgtgcctgtagtcccagctacttgggaagctgaggcctgggaggtggaggttacagtgagccaagatcgcaccactgccctccagcttgggcgatagagtgagactttktctcaaaaaaaaacaaaaacaaaaacaaaagaatgcttaaaagcctccatcatctggcctttctttgagtctcatg

SEQ ID NO: 544352 - DNA, 652 bp, Homo sapiens
caactgcttctaggctaaacaagaacttaagaatcagatctggccatgagcaaatgccagttttttgtttaccttgtttcttttacaatcaatggtgcaattgaggactagtgctgcactagtgaacatttcctgatcagatgcagcaaagacatctttactggtctgaatcccactcccacgagcattcccttcatttaaagatgctctagattggacttaaaaggtcatagttctttactctacatttaaggcccagtcactgtgcctgaagttctcctctaggctaaggagtagttgataatgtcagccacatgcccattctcatgcctatttaggtcctattgttgagcctacctcgccagtcaggctctccttcccctcttggtacactccccttcagtcctttctgggtcagtggatcttttgtgaaaattaatcaattcatgagtaaaacttgaacctcaagaagaaaggagacagctcttaatccctccctctccagaggctcctaagtccctgtkcacacttttctgcatttttcctcataccacagttctgcttatccagggtattaggtgcctagctgctttacattggcctaaggaacctgttaagcaaatctctgcctcataaataggtctggtttatg

SEQ ID NO: 544353 - DNA, 624 bp, Homo sapiens
acaggcgagagccactgtgcttggctttcttcttctaaatataaaatggtcaatgcagtaaccatcctgtcctatatggtgcagaatttactggcaaaatctccactacttctgagaaacagtagaataaaatctaaaagataggggataggacaagcgcggtggctcatgcctgtaatcccagcactttgggaggcaaaggcaggcggatcacttgaggtcaggagtttgagaccagcctggccaatatgttgaaaccccctctccactaaaaatacaaaaattagccaggcgtggtggtgggtgcctgtaatcccagctactagggaggctgaggcaggagaatcacctgaacatgggaggcaaaggctgcagtgarccaagatcgcaccactgtactccagcctgggtgacagagggagactctgtctctaaataaataaagatgggggggatttcctatcacatgttatcaatagttttaatgaaaatgttattatcttaaataaacgtccttgacaatggatacatatgaatgtatccagagttaaaaatattgctcattagtcttccatgctgcagtagaaattatacatttaaccatgactatttaaaatataagct

SEQ ID NO: 544354 - DNA, 442 bp, Homo sapiens
ctggccatgcttcaacaaatgccattcatcaatttttttgtaataaaattaaggaaatgatgtcccatattaacttagggatcttttacaatgttattttaagtgataaaggaaaacttttttatttaagaggcctcatatgttttcttcctaaactggggagcttagaaggcaatccttcgggtaacattaattagtagagaataatcgattaatcaagagtttcttttaatagtttcatctgttcctattatcatccaatagataaaracattgcataaaagaaatgattaatagagtattattgattttatattccatttacttggtgaaagaatcaactttgctgaccagtgtgttggcctccagaacaattatttcaacatcataatgacactcaatggccacagggaatttactgctttgtaatgtgttgcttatg

SEQ ID NO: 544355 - DNA, 597 bp, Homo sapiens
tgcctactctttatatcagagcctcacacaagaacttcaggaaaaagttgattgaagaactgaagagacaagaggtagtcctaaagggtacttcatgaagcagagcattgggaacttctgtcacacaattagacttatayatgcagtggccgataaccaagacaaaccgaaatttgaggcaggtcaatcctgaaatattttatttctgaggtggagaaaaataccacttgtagacagcacaaaatcctttgaaaataataagacctttcaggcagtttatgaggctatcttatagcaaggccaatgtcaggcagatgacaaagtgaatttttgttttattctgtttagcaacatggatggccacctctctgaacttgatggatgaatgcctttcccagtgaactatggtgccagttcagaggactcactgctgcaggactgtagagattaggctgccaaggtctgtagaaaatttactgaggaggaaggagagaaaggcagcctctctgctgtaaccctctccaagacagtctcatgagagggacttagctgtttcttcctcttcctttcaatgtgaaaatttatatacctacctat

SEQ ID NO: 544356 - DNA, 597 bp, Homo sapiens
tgcctactctttatatcagagcctcacacaagaacttcaggaaaaagttgattgaagaactgaagagacaagaggtagtcctaaagggtacttcatgaagcagagcattgggaacttctgtcacacaattagacttatacawgcagtggccgataaccaagacaaaccgaaatttgaggcaggtcaatcctgaaatattttatttctgaggtggagaaaaataccacttgtagacagcacaaaatcctttgaaaataataagacctttcaggcagtttatgaggctatcttatagcaaggccaatgtcaggcagatgacaaagtgaatttttgttttattctgtttagcaacatggatggccacctctctgaacttgatggatgaatgcctttcccagtgaactatggtgccagttcagaggactcactgctgcaggactgtagagattaggctgccaaggtctgtagaaaatttactgaggaggaaggagagaaaggcagcctctctgctgtaaccctctccaagacagtctcatgagagggacttagctgtttcttcctcttcctttcaatgtgaaaatttatatacctacctat

SEQ ID NO: 544357 - DNA, 597 bp, Homo sapiens
tgcctactctttatatcagagcctcacacaagaacttcaggaaaaagttgattgaagaactgaagagacaagaggtagtcctaaagggtacttcatgaagcagagcattgggaacttctgtcacacaattagacttatacatgcagtggccgataaccaagacaaaccgaaatttgaggcaggtcaatcctraaatattttatttctgaggtggagaaaaataccacttgtagacagcacaaaatcctttgaaaataataagacctttcaggcagtttatgaggctatcttatagcaaggccaatgtcaggcagatgacaaagtgaatttttgttttattctgtttagcaacatggatggccacctctctgaacttgatggatgaatgcctttcccagtgaactatggtgccagttcagaggactcactgctgcaggactgtagagattaggctgccaaggtctgtagaaaatttactgaggaggaaggagagaaaggcagcctctctgctgtaaccctctccaagacagtctcatgagagggacttagctgtttcttcctcttcctttcaatgtgaaaatttatatacctacctat

SEQ ID NO: 544358 - DNA, 597 bp, Homo sapiens
tgcctactctttatatcagagcctcacacaagaacttcaggaaaaagttgattgaagaactgaagagacaagaggtagtcctaaagggtacttcatgaagcagagcattgggaacttctgtcacacaattagacttatacatgcagtggccgataaccaagacaaaccgaaatttgaggcaggtcaatcctgaaatattttatttctgaggtggagaaaaataccacttgtagacagcacaaaatcctttgaaaataataagacctttcaggcagtttatgakgctatcttatagcaaggccaatgtcaggcagatgacaaagtgaatttttgttttattctgtttagcaacatggatggccacctctctgaacttgatggatgaatgcctttcccagtgaactatggtgccagttcagaggactcactgctgcaggactgtagagattaggctgccaaggtctgtagaaaatttactgaggaggaaggagagaaaggcagcctctctgctgtaaccctctccaagacagtctcatgagagggacttagctgtttcttcctcttcctttcaatgtgaaaatttatatacctacctat

SEQ ID NO: 544359 - DNA, 476 bp, Homo sapiens
tacaaaaatattaaataaaaattttgtggaagtcaccatatttttctggatttttatgtctaactaatctgtgatgattatactactcattttccttggagtcttgaaagaaactcaaggaagcttgaaagacaattacatatacatgggtaagaacctctgagaatctgttcttcaactattttagaaagtttttaaattttttttacttctgtcaaaatcacaatatctaattttaggaattcttcttaaagttaatttaattaaaaatacaattatttatgtcatcattattggttcagccatctattgctaaataaaaatttagtccagactttagtgacctagascaatgatttgttatgtcttagaattccattgtgctaactagactgttctccatgtggtggcaactgagacggtgagaaagctgtaagttctaagatgacctcagtcacctgactgccttttggtga

SEQ ID NO: 544360 - DNA, 573 bp, Homo sapiens
tgggaagatgagtgaggtgagattgcatgtgtgataggctggcactcaggggaagacctcagggttctctcctccccactctgaggcccctctcctgcttcctgaagcccagagtctccacctctgtgagccaaacaccttcctgttatctgcctggtcctagggcagccttcgggttggggttagaaggaatgccaatggttaaccttgtggtattaagcttccagctcaggcagatactctctggactggttcaagctgactgcctgactgtccctccctgctggccctagcacccagactccagataggcgcaccacctcatccttcagagcagggctctgagactccacaagtggtgaggacttaccagaggaactgaacttgacctccaacccaaccttccatttgctggtattattctgaagccctcatggcctagggaactgcctcaggtagcaggtctcactcctgcagtggaggggccataaagttcagttcatgatcagcccccaagccatgggcagyggatgagagggcaggagctccatctagaggagctcccgtgttcag

SEQ ID NO: 544361 - DNA, 351 bp, Homo sapiens
tattccagtcagagttcttcagaaattacattcctttcagttacatcttcttaaaggacttactgggtcagggacacatgtggtagaatttagacaaattagatcatcttaattgttgggcagtgagttttagtagctcttaaaaaaayatttttaggcagtgagaaacaaagatccaacaataaagaagaaatcaatctgtgataaaaaagtaaagtcagcaagattcatgacagctattgggctttctattgagtagcacagtttggaatttactgaagactctgctttcactgggcttcaggcttcagaactctctcttttgtttaggcgagtagtgtagactatatt

SEQ ID NO: 544362 - DNA, 631 bp, Homo sapiens
aatttccctattatctgaagagtaaatattgaatctgatgcagaaaaacaaacctttcagagcaaatattaattctcagagctagtacattcaaaacagagattacaagatgccatgggtctgggtaggtcagtaattcagagaagcagcatgtgtgggagcggtggggatgtggacggggaggaacagtggattctacctgccccttctcctaaaraggcactgccagcagcaggtgtggaagcaggtaggcccagtatcagcaggaagtcttaatttgtttcccaaaaaaaaaatcacatttacattccacatctctctatattacatgttgacaactccatcattttttttaaaacactgtcagccaacgaacccctgttttgcaacagttgatagaaaggaagacttcttacttgcctcataatttgtaatcctctcagaatgaagtaagtaattcacatattttgtgggatgtaattagtttcttatcttcccttcacctcatgtctttaaaaatgtacccatcttttaaaatgtgcatataaaaataaataagaaatgagcctatggctgagtcttaagagactctgttgacattggaaattaccacatatgaagacttggttgg

SEQ ID NO: 544363 - DNA, 582 bp, Homo sapiens
tcatgcacactactatgggagcagttcaagaaagtaactaagccctactggagtcagggaaagcttctcagagaagcccttgaaagtgatgacacctgcctgtggttgtgtagtattttgccggatgaagagcaagaagaaaaacattcctttgcagaggtaggtacatgaacacagagatgggtgatgtctgacggacttaggaagccggttaaagttggaaccatggatttgacagtggagaaattagcaggaaaaaaacttagaacttgkctgggtcagatcctaaagggcctggcatgtttagactaaggacacttttctctactctgatgctaggaggggtgcactgaatgtttgaaaatggacttgcaatacagaaagacaaccttggcaaatgtgagaattggcaggtggcgaaattcaagggcctttgctagtgatccatgtggaaggcaatggtggcctgaattaaagtctaataaggtggtagagagaaataactccaaaaatagcaattagatacaatcagtgggaccatagactgctgggctgtggatttagagagagaggaaatgtcag

SEQ ID NO: 544364 - DNA, 277 bp, Homo sapiens
tctctcacactgagagggtggctattttgtttaaaagtgatctagctctagttttaytgctataaatttgaactttacagtgagttcctcagacttgtgtattctcccctgacccattcaggttattggtgaattataggcattgtcagcatggtttgattcttctctgtcaaaaagggtcaccatgacagtcttctcactgagtctctgatttgtcttttggatctttcagaatggagggtgatatggtttggctgtgtgttcccacccagatctc

SEQ ID NO: 544365 - DNA, 210 bp, Homo sapiens
tattgttatcctgatcattttaccaaacaaaaacatagrgaacataagtaatctactggaagtcacacatctaagaagtggtaacctgtgtcttcagactgtgtaccacgtgggcattccactgtgccttgttgcccacaacacagatctgccaaaaagatctcccttttgataatggactgcaaatttgaaagaattattaaacagtgc

SEQ ID NO: 544366 - DNA, 210 bp, Homo sapiens
tattgttatcctgatcattttaccaaacaaaaacatagggaacataagtaatctactggaagtcacacatctaagaagtggtaacctgtgtcttcagactgtgtaccacgtgggcattccactgtgccttgttgcccacaacacagatctgccaaaaagatytcccttttgataatggactgcaaatttgaaagaattattaaacagtgc

SEQ ID NO: 544367 - DNA, 652 bp, Homo sapiens
aatagccatgctttctgcctccatggtgttcatagacaggtctgaggcagtttgagatggattctcaagtttaaatacaatcatcaaatatatatacacatatgtaaagataaataatgataagtggtaarcacacgtcctagaaaagatatccagagaaacacgtagaagcctaattcagaaatgaggctcagagatctaatgctaattgccaagatctcataaataggaaatagcagagttaggttagcaatccaaaacacacattcttactcttacatctcagtgaccaggtctaaatccaagtttctggagtggtgacatccatgtgtgtctttataccctctcgtagtcagagaatcagcaagacagatagggtcttagagaccatggcatcacacctcctaggctcacagtgtgctggccacgtgcctgcagtccgctcatctgacttatttatagaacatctctaacctggtactcactcctgttgaaggaacccctgctcctatcctccattcagatgtagattctgatagaagatattttgtcagcagtggtttaatttttataactgatgattaaatttttattttcttttagctcttttttttttctgtcagtcgctaaaggcagttgctcattcccgttt

SEQ ID NO: 544368 - DNA, 586 bp, Homo sapiens
aatgtcaaaaatggaaaacaaaaaacaaagaaaccaacattgccaatctcattgttatatggacctgcctttttactcaaatttcgttggcaatatttttctgaaaatagacacttgacatggtatctcttcagaacagaaaggatgttaaaagagcattttaaatgtgtgttgaacacaatattcaatggtctacgctacttctgcctgctcaggagtctcactttgtgtggatttctctgtctcttgagcctgcctgsccatctagcctccatgcctttgctgatacgatgccctctgcttgaacggtcaccaccttctctattaagaaaaaattcccccatccttcaagacatacttcaaatattgcctcttctgtgaggatttccaccatcactcccagccaaaagtagccactgccctcagccctgggcccttatcattatttctgcccctctcccataaacactgccctcatggtatgcatacctgtgcttcctgtcccttgctgatttctctaccaggcttagtacccagtggaacagatctgtagagagacagtaaggctcccagctctggcccttac

SEQ ID NO: 544369 - DNA, 367 bp, Homo sapiens
caaatgaacatgataaaagtagctacctcatacttacattgttaggattaaatgagataatgtccatgaaatgcttaatagcaaaatatggcagagaagagggaataagttaatgttgattgttattgtgatcattactgtgttattaccaaatgatcactcctgaaccccgatcgtcttatttatcatttaggttattagsttgaacacctttaagaccctaaatagcaaaataactttcttaataagctagttctcaaaataaatgttcccagaatattgccatttgtaaagtttttgcccatttgtgtctgtgactcttacctacccagcctgggtttcccagtcttttatgtaaaagtcaaat

SEQ ID NO: 544370 - DNA, 623 bp, Homo sapiens
ccagctactcaggaggctgaggcggagaatctcttgaacccggatggcagaggttgcagtgagctgagatcgtgccactgtactccagcctgggcaacagagtgagactccatctcaaaaaaaaaaaaagaaaagaaaaaaagatttggcccattatatgagctcaatagttgttagctgttgttatgatgatgattaaaacactcattggtagagcacttgatattaacaaagacatttgattataagatggaagatgaaatccctttcagaaatatagattctaatttttaaatctctatcctataaatgactagaagggtctcatgattgccacaaggccaggaatataaaaggcagctttaaaagtattgtaatagtgaaaacaattggcgtttgttgagtgtcccatagcatacaaagatgtttcacatggcaacacacaccctgcgcaacagyagccctgtgaggttgggatgacaggtacggtattgcccctgttcctgtgatgaggctagaggagtggccgtgacttgcatgagccatgctggtgagggaggaagctgggagtcaaggcttggccccacgctggggcagcctgctttccagcactctccacaggc

SEQ ID NO: 544371 - DNA, 508 bp, Homo sapiens
tcacttcacctctggaagctggtttgaaggagaatgagggcatttcaactgttctctctcctcagcccctgctgtgcaggaactgctggcctgggttccaccctgcttctgccacatgttaaccatgcgaccttggcaagaaagctcacttttcttgacttcagtttccttatctgaaaaatggagatagtaatagtacctgcctcagcgggttatgtaatcattaaagtacatcgttttggtatgcacgtagaacagtgtccgtcatacagtaagcacttaatgtctttctaccacctcccttccaagggcactttcattgagtgaaagctgttttaaagctattgagtttttgcagtgaagctatgcaaggaatgcctcgttgcctggattcactagagccaagaaactatctttctgtttagggagttagctacagggcagcagaacaggcactgggytttttgggggaagagttgctccccactcgttgaatggcttcatcatg

SEQ ID NO: 544372 - DNA, 591 bp, Homo sapiens
agcctcagtaaatcaacaatccggtttgattttgatagggaaattttccaaactgtgggcaggagaatgctaaaattaagttttgctatgagtaatagaaaggtaaagacaaaatatcgaacacacccaccattcaaatgggttcatattcwtgtttaggggattgtttaccttgcagggcaataataggagctgtcatcttatttagatgcttaggaatgaatcctaagcttatatgctaaatcataatctgatgtttagatactgttcagtataaacataaatttactagttgattttagctgtaatccttatacattattctaaatgatgaagtaaatttaactactaaagaactgattatcattgactatgccacattctattaaaattgtattttaagtagactaaaaacatgattttttcatttcgaaatctgaaagctttagtgttttttcagtattactgaataatcattttcagacttttatttattgtgctacaggtgactttcagtcaatcatattctgaagtcaaaatactatcatacttaccaaaaacttgtgtagctatcattgaaaacagtaataa

SEQ ID NO: 544373 - DNA, 485 bp, Homo sapiens
aaacatcttttcttcataaattacccagttttgggtagttatttaaggcggtgtgaaaagggactaatacactgtcaatcttctttgttgaaaatacttgctttctttttccatttgatgcctgtcctcttgccaatcataacatgatggtctctgaaagctgcttaccattttctaaaaaccaaaaccaaaaaaaaaaagatagtcaaaactgaataatttatttatattcaaatgaagtatgcctttaaaaaaaatcatagcgtatttatcttkgtagaaagaacagtaagatttgaactctcttttatgcagtcaacttgaataaagagaaacccaaaatctatttcctacttgacctcctcaccaaattactatataacaaattgtacagttaatatggatcagttatcatttaagattcaaatgctctcttgcctgataataatctagtaccatgggagtgcttctaagtgagggaagat

SEQ ID NO: 544374 - DNA, 494 bp, Homo sapiens
atccaactgcctggaaattagcaatgacttttaaatagcccattggttttaaaaaaagaattcagagtagaaatttaaaaaatatttttaaggaaaaggaattgaagatatgatattttcatatcataacttagtggaaactttgtagcctcaatacatatattagaaaagaagaaagactgaaaatcattaatttagacttctagcttgagaatctagaaataggacagagcaaatattgcccaaagaaattagactaaaagacataaaagtaaaaccaaactgatgaaatacaaaacacaatwtagaaaattaaagaaagcaaaaattcgatctttaaaaatatatctcatattgacaaccccccaaattgcaaataaccaatgttaatattgcaaaagcaacagaagtatttgttgtacagattttaaaaagataaggcaatattagagataactttagacatgaatggactatttgaattgaatagataa

SEQ ID NO: 544375 - DNA, 273 bp, Homo sapiens
gtcactatattctatgcaacccttttcttcatgtatctcagacccccctcaaaggaatctgttgaacagggtaaaatggtagctgtattttataccacagtaatccctatgctgaaccttataatttatagccttagaaataaaaatgtaaaagaagcattaatcaaagagctgtcaatgaagatatacttttcttaaaaatcagtattcttttggtttctaaagcccttcctagactttyttctttagctgagaaatatagtgcatcaatgg

SEQ ID NO: 544376 - DNA, 578 bp, Homo sapiens
caacatttgaacagtaaataaacaattatagcacctgaaggaagagagtgaagtttttttgtctccatttatatgccactaaactacttattaaaatattgttagagaatcacagaacattgttaaaagcagtctttgctgccaactcaagccactctctctgagttcttcatgaaaataagctatgactgtaaaaattattgctcaaaaatttgcaccctaaagaaattgcttatttagctctcacatatacatcagaggagcttgcatataattgattttagagtcaatgaaatgttaacatatgaatagaaaagtccagtgaaattgatgaaaatatgggtttcctctattgattggatactaatctccacacacagaaaaagttgtatttttagtgaacaaatgtagcaaatgacctacctgttaatgttaactcaccatagtttgtaaagcaaggtggcaagatatatatttcttagctatattccctagagtatttttaaagtaattctaaagaaccaattataatatcmtttgttcctcaagggcttaacatttatttgatagtttgaaca

SEQ ID NO: 544377 - DNA, 496 bp, Homo sapiens
ctttagacattatgctaaaawgaattatttaaggaacaagtaaaaaatatatttttttaagatagagtttcactctgttgcccaggttggagaacagtggcatgatcatattaataacttcctccaactcctaggctcaagtgaccctcccgcctgagcctccctagtagctgggaccacaggtgtgtgctaccacactcggctaatttttaaatttttttgtagatctgatatctgtctatattgcccaggaaggtcttaaactcctgggctcaagtggctctcctgcctcagcctcccaaaatgctgggattataggcataaattactgtgcctggtcaagattcttctactctccaaactttctacttattgcctcaaaatactaaatattttctaaatatctttattggaaggcaaattctgccattacgccattagaaaataaaaagataaaatattttgtgtatatattaagttgtacattaagtaactg

SEQ ID NO: 544378 - DNA, 496 bp, Homo sapiens
ctttagacattatgctaaaatgaattatttaaggaacaagtaaaaaatatatttttttaagatagagtttcactctgttgcccaggttggagaacagtggcatgatcatattaataacttcctccaactcctaggctcaagtgaccctcccgcctgagcctccctagtagctgggaccacaggtgtgtgctaccacactcggctaatttttaaatttttttgtagatctgatatctgtctatattgcccaggmaggtcttaaactcctgggctcaagtggctctcctgcctcagcctcccaaaatgctgggattataggcataaattactgtgcctggtcaagattcttctactctccaaactttctacttattgcctcaaaatactaaatattttctaaatatctttattggaaggcaaattctgccattacgccattagaaaataaaaagataaaatattttgtgtatatattaagttgtacattaagtaactg

SEQ ID NO: 544379 - DNA, 496 bp, Homo sapiens
ctttagacattatgctaaaatgaattatttaaggaacaagtaaaaaatatatttttttaagatagagtttcactctgttgcccaggttggagaacagtggcatgatcatattaataacttcctccaactcctaggctcaagtgaccctcccgcctgagcctccctagtagctgggaccacaggtgtgtgctaccacactcggctaatttttaaatttttttgtagatctgatatctgtctatattgcccaggaaggtcttaaactcctgggctcaagtggctctcctgcctcagcctcccaaartgctgggattataggcataaattactgtgcctggtcaagattcttctactctccaaactttctacttattgcctcaaaatactaaatattttctaaatatctttattggaaggcaaattctgccattacgccattagaaaataaaaagataaaatattttgtgtatatattaagttgtacattaagtaactg

SEQ ID NO: 544380 - DNA, 636 bp, Homo sapiens
gcaagtaaaaggctaacccagcttctcaccagcagcttttggatgtcagtgcttgtcccttgcctcactgccatgctgctgtagccatccaagcctayagaacttggctgtgagtgtggctaatgctgacatcaccagatacaaccaaaatctgactaggtttttaaactgaggtaagaaacataaaggaattacttgaaaagaatttattaatcaccatccatgaaagtagactttgtatacttacaactaatggtcaagatcttacactaccacatctacatgtaaatttatgcaaatgaatctcatttgttcatgtaaattttaatttcttccaacacgagaaattggcaatagcctattagccagaggtagccacgcctgcaattcactgtctttctcatatccttatgcacttccatcttctgctgattgtctgacaatatccagtctgttccccaactgaccattcactcctggagcaacatttctctgctgctatgcatattgctgagaccccacagacttctttgcaagctgcataaaaagatgaatgtttgcaattatagtatctgcaaataaaaataggttttgttcttctattccaactttatgctttttatttatttttctgcc

SEQ ID NO: 544381 - DNA, 552 bp, Homo sapiens
tattgtaaatgtgctaaaacaaagcaattgtcaacttagaattctacaaccagaaaaagtctttgaagaattgggacaaaatagagaaagtagcgggcaaaactaaaagcttgccactagtacgtcctctctaaaggaagttctaaatgatgaatttcagacagaaggaatgtgaaccccagtggaaggtctgaaatgcaagaaggaatgaagaattaactgagaaggccaacatgtgggtgattctaatagacataaaaaataatgccwtgtgtggttaaaaataagaaagatggaattaaagtggctgagccctagttttccacattaatcccccctgcatcagattgcttgctttccctgtctcacttccccattccctcactggtgcttagtgggatccaaaataaaatacttacactccaattttagacaccacaaaataatataatcaaagtgtattaacttccaaattagtagagcagaagaactagaatgacaaaatactatcaattcgaaagaagataagaatggagagaaaaagaaacagct

SEQ ID NO: 544382 - DNA, 628 bp, Homo sapiens
acttctcattgtacctttatatggcagaaggagagctagagagctctatggggttccttttataagggcactaatcccattcatgaagtctccacctccatgacctaatgacctttcaaagccccgacctcttaataccatcataagggggttaggatttcaacacagaaattgggagggagggataaaaacattcagtccaaaattcctatgtttaatatatattgttatatacattgtttaaaactgtatactgacttatgtgactatacttaacactattcaactaacacttaaacatagtaaagatggtaaattttattttaaaaatcaaaattaaaaataagacaataaaaataaataaaatcactactaactaaagcaaaactaataacaatatatgtattatagtgttatacatagaaataaaatacatgacaagaacataagggccaggaaagtcggttaaggaaattacacttttggaatatcttacatccttcatgagacaatagatatgtcaaggatgcatattgcaattcctagaaaaaccacacaaactcacacaagacacagaagaggttaacaggggagakaaaaaataaatactaaaaatatgtacacttat

SEQ ID NO: 544383 - DNA, 525 bp, Homo sapiens
aagtaggcctagcatctgtcagtccagtccagagtgggtggggggagggggtaaagctttggctgctggaagccatgggctgctcagcatggaatcgggaagtgtctggtggaaggtagggggaagagaagggatggcacgaagaacctccctgccttcctggccatcaatggagatagcaagtgagaggtctggtcctcaccacctccgtcccactcatggctgggttaggatggactagtaggcaggcaaggcccacctctcactgtcccccacacttctgtgcccctcacacccaccctgatatcccttccctttgcagacactgaagtctaagcacctggagccacgccccatctcaccagcagtcaggaaggctgagcagggaaggagaaaaacagccagcacwggattttgctcctggccaacaaaaagcaggaaggaaggggagcgaatctaggcgttatgctaggtaccttatctatgttgtcagttcatttaaaacttgcaatcctacaaggcagg

SEQ ID NO: 544384 - DNA, 526 bp, Homo sapiens
cccatatgacttgctggttgcttatattcctaatggaaggagcyactgaatttcagttggaggttggtgaaaataaagatgtcacttttttcccctctctgagttcaccaatctcctgaattctgtccctggacagcttaggggttccgtggactccaggttaagaagccgtgcctagacctgagctcactccccttttctgcctagaggggcagtgcacagtgcacggggctgggagcgtgttgatacgtaggatgtcgtgagtgaagcagtccctttgcagggcatcacaggagcccagccaaggggaaaaggtgcccccactctccccaggccgccagcctgctgtctgaggtgggcggggccggtgccccctagaagtgtgccttctggcagcttcccccgcccccttccaccctcttgtccaagggctcaatgcagaagggagccatatggtcctttgtggacacattttccctagtacagtatcttcctggtgtgaatgcaggcctggcgggcgccctgg

SEQ ID NO: 544385 - DNA, 604 bp, Homo sapiens
agctgcagctgttggtctgaaggcaagtgacactgggaaaggaccctagtgagaggtttatcacataagaccccaggatggcggcatgctctgtttttgaacgactgcctcattcctgtaagacaaaggtggcaatggagggtggatgcagagttgatggctgcagcccargttttggtgcttggcctcatgtgttacatcctaggtaaggatgtctctgccatcttaacacccatacctgctcttgcgtctctctctcttatccttcaaagcatcatcattgtcttaccccagctacacagtgaaatcatttagaggaactttatgaaaaaaatgtattaatagcaagcaaaggttcccacctcaacccggatgagtcagaacctcctgcatggggctcagacatggatgtattttcaagctccccaggagattcctatggataaccagggttttgaatttccagatgggataagattagactctgctgcgtggcccagaaggttcctcacaatcagagtcacaggcctcatcttttgtcaccccctatgatgcgtgtacactgagccacttagaatttcccagactctcctggctgtttttc

SEQ ID NO: 544386 - DNA, 604 bp, Homo sapiens
agctgcagctgttggtctgaaggcaagtgacactgggaaaggaccctagtgagaggtttatcacataagaccccaggatggcggcatgctctgtttttgaacgactgcctcattcctgtaagacaaaggtggcaatggagggtggatgcagagttgatggctgcagcccaagttttggtgcttggcctcatgtgttacatcctaggtaaggatgtctctgccatcttaacacccatacctgctcttgcgtctctctctcttatccttcaaagcatcatcattgtcttaccccagctayacagtgaaatcatttagaggaactttatgaaaaaaatgtattaatagcaagcaaaggttcccacctcaacccggatgagtcagaacctcctgcatggggctcagacatggatgtattttcaagctccccaggagattcctatggataaccagggttttgaatttccagatgggataagattagactctgctgcgtggcccagaaggttcctcacaatcagagtcacaggcctcatcttttgtcaccccctatgatgcgtgtacactgagccacttagaatttcccagactctcctggctgtttttc

SEQ ID NO: 544387 - DNA, 459 bp, Homo sapiens
cagctccacggctcctgcttctgcccccagggttcgtgggctctgggcttgacggtctccagctcccctttctgccaggaagccaccccttagcactcccccgattattctgcctggccccatgtcctcttggaggatttttctgccatgtagatgctccattagcagttccagctaagctggcttctccctgcctcccaatttctgtcctttggatcactcctctccctgtcagcaacagcctggagaaatgcacattcygtgcaataacaacaatccacccagtgccctcaccacccgtggcttcgggttaatttggagaatggagttgaccgtccacactgcaggcatccttaactccacatccttcacttccttcttcttcctttctctggtaggagaagtttctttccttctctccctgatgaaggggatcccagtccttggtggccccaggct

SEQ ID NO: 544388 - DNA, 288 bp, Homo sapiens
tcaccctcctctccccagggccaagggcctgactgwccacaaaaaaaaaaggagcttcgagtgagaccaactgaccaactaggggaaagaaaccaagggcaaagaatgagctcacattctgggagtgttgtccttctgggagcaggagctgtatagctgccctccagctgtatcgctggcctccagccataggaaggctgagtgaccaatgggtcttctccactccccccacctctgaagcaagcaaacaagcaaaaatcctgaaagcaaggcataactgccccaagg

SEQ ID NO: 544389 - DNA, 459 bp, Homo sapiens
cagctccacggctcctgcttctgcccccagggttcgtgggctctgggcttgacggtctccagctcccctttctgccaggaagccaccccttagcactcccccgattattctgcctggccccatgtcctcttggaggatttttctgccatgtagatgctccattagcagttccagctaagctggcttctccctgcctcccaatttctgtcctttggatcactcctctccctgtcagcaacagcctggagaaatgcacattctgtgcaataacaacaatccacccagtgccctcaccacccgtggcttygggttaatttggagaatggagttgaccgtccacactgcaggcatccttaactccacatccttcacttccttcttcttcctttctctggtaggagaagtttctttccttctctccctgatgaaggggatcccagtccttggtggccccaggct

SEQ ID NO: 544390 - DNA, 583 bp, Homo sapiens
gctccacggctcctgcttctgcccccagggttcgtgggctctgggcttgacggtctccagctcccctttctgccaggaagccaccccttagcactcccccgattattctgcctggccccatgtcctcttggaggatttttctgccatgtagatgctccattagcagttccagctaagctggcttctccctgcctcccaatttctgtcctttggatcactcctctccctgtcagcaacagcctggagaaatgcacattctgtgcaataacaacaatccacccagtgccctcaccacccgtggcttcgggttaatttggagaatggagttgaccgtccacactgcaggcatccttaactccacatccttcacttccttcttcttcctttctctggtaggagaagtttctttccttctctccctgatgaaggggatcccagtccttggtggccccaggctccctaaaccccgagacggcttttctcccagtggcttctctccggctgtttctcttcctgggttgttggtgtaactccagcatgcragtccacgaggtggggtgcaggcggacaggtgggctttgca

SEQ ID NO: 544391 - DNA, 464 bp, Homo sapiens
gcgcggccaccacagtaagatccacaagtcatggtgctttttggggaagagaggaggttctgaggatggagacgtccgaatggagagcacagtggtcggggcrtcaggcgttcactacttgcacctctgtaggccttttatataagtggggagactgtgaccacgtgggtcggagcaattagaaggctttatgggcttgggttgtttagctgctgtcgctccccacttaatgtacttaattggtgcccagaagcagccagatgttatgatctctgccctaaactgcagttttcttcttcaaaggaccaactcacgtcccgcacacccacctcaacctcccaatacacagttgaggaaactgacgttggacgaaggagtgggcagtgactcaggttggaatggaagggaaggggcggggctgctgctctttctgtcctgcggggtttgacatggtcaatgccgct

SEQ ID NO: 544392 - DNA, 680 bp, Homo sapiens
aagagatcaaccagaccagcctggagtaaggaaggaagggccttgatcctgttcccagtcttattcttaccttgtccaaactcttcacctgtttctgggcctcagtcctgccctcctctagatctaaattgtgaagattctttttttccttcttatttaattttaaatttatttttgtagtgatgaagtcttgctctatcacccaggctagagtgcagtggcaggattatagctcactgcagcctcaacctcctgggctgaagcgatcctcctgcctcaacctcctcagtagctgggactacaggcacatgcctccacgctctgctaattaaaaaamaagttttgtagagatggggtctcaccatactgcccaggctggtctcaaactcttggcctcaagcaatcctcctgcctcagcctcccaaagtgctgggattacagatgtgagccactgtgcttggctttctttttccttgttttcttccctacttagtccctctgagccaaggttagctgccaaaatagaatagtaactatcagagggttgtttgagaaaagatattgctgcatgtaaagtgcttaaagcataggaagttatgtaagtgtaactattatttcacttactggaattctttagaaggtttttgagccccctgaaacaattttttttttttttgaga

SEQ ID NO: 544393 - DNA, 622 bp, Homo sapiens
tgtggggagggtgtcccctcagtttcccccaggcagtgctgcagtgcttcaacacccaggagcatgtctgcatattatttacttggaatgtgcatcaacgctaattggaggagagaatttgcaggttaaacagatttcaccagctttgctccccacaactaatttctgtctctttgctttccctataaggttgtgtgagggcgttggtgctgtaaatgtctgtaagtaatccattttgtgggtcctgaaataacagcttggggttctgggcaggcaarctttttcttagagcttcagatagtaaaaactttaggctcgtgggccatgtagtctctgcctcaactgctccactccgttgtcatgtaaagcagccacagccaaaggcaatacttgaaggaagcggtatgactgggttccaagaaaacttgattgacaaacaggaagcctgcatgtggccgtagtttgcagactctaaaaggaaagatggagtggggcagtgagtgcttatagtaacttaattagctacagtcatgtaccacataaggacttttaggtcaaggatggatggaatataggacagtagtcccattagattataccatatttttactctactttccta

SEQ ID NO: 544394 - DNA, 449 bp, Homo sapiens
gcttcatatcattgactggggctctggtactgctgaaaggtccaggatggcttcacttgtacggttggcatttggagctagctctggtcaagagctcaggagctgatggccagggcctcygttcttccctacgtgctccagtccctttgaggccatctgggcacggaagctgcagaaggtgctttccatcagattctattggtcaaagcagtcatggagccagcccaagatcaaggggaggaaaaacaggctccacttttgatatgagcagtgccatgcacagagagggaggagctgctaggggctcatctctgaagatagctaccacaggacgattaaatgagacaacacaaataagtttgaggtatagtgtggcatacaacagatactaaacaattagtgtttatgactgctcttgttgttattactattaccatgacatcataaca

SEQ ID NO: 544395 - DNA, 499 bp, Homo sapiens
attgaatttaacatggaggccactggtggtcttgacgagaagtatgcacttcttattgtttttctgcttcatttcccccttagacatacagctgatagctggaaaaagaaaataccgcacaaatgagctggatgcttctggtcaaaagcatacatccccttccaagtggaattgcaagcatcccaaagaatctcaagcgtctagtcaaacatgagttcccctgggcaaaggacgcactakaatagaaaaggtaaacaccagcctggctcagggtcctaaaagagctgcaatattgctaacaatgataatattcagctgctgagaacttttccttttctatccagatgtatattgctttgtgtctctctatcctaaccaaagattcatcaataattcaaggaacctaaatggacaggcccataaatcacacctatggtatatttgggggctaaaaatcatgtagttagctttctatacagaaactttccaatgctttggc

SEQ ID NO: 544396 - DNA, 513 bp, Homo sapiens
ccacaagctgtgtgacttggggatgttgctcttaactgctgtgcttcccattttcctgtctgtggcatagtaactayctcattgtgtggtcagagaattaaatgagaccatggatgtaaagagtacggagtggtcccaacacacaataaatgcccaataaatgtttattattgttattattattattattggtttgattttgacctggtgataagtctcagtgtggaagggaaaggccattcggccatggcaaaagtttcactgatgaaattgatggaaaagaggaggaaagagagtgaggcgggggcttcagacatctccaaagagctgtgtctgcgacctgagctggaaagaaaacctgaatcccacctccacctgaaaattcccaagggcaacaactctccccagagacatcctcaggccaaagctggctctgttgacctcagggacactcaggctgggctgggcaaaaggggaaaggaacagccacatggaagccgagacctgatgctg

SEQ ID NO: 544397 - DNA, 513 bp, Homo sapiens
ccacaagctgtgtgacttggggatgttgctcttaactgctgtgcttcccattttcctgtctgtggcatagtaactacctcattgtgtggtcagagaattaaatgagaccatggatgtaaagagtacggagtggtcccaacacacaataaatgcccaataaatgtttattattgttattattattattattggtttgattttgacctggtgataagtctcagtgtggaagggaaaggccattcggccatggcaaaagtttcactgatgaaattgatggaaaagaggaggaaagagagtgaggcgggggcttcagacatctccaaagagctgtgtctgcgacctgagctggaaagaaaacctgaatcccacctccacctgaaaattcccaagggcaacaactctccccagagacatcctcaggccaaagctggctctgttgacctcagggacactcaggctgggytgggcaaaaggggaaaggaacagccacatggaagccgagacctgatgctg

SEQ ID NO: 544398 - DNA, 535 bp, Homo sapiens
ttctggtgaccgtaaggtttaggggcaagagtcctgggccagaggtcaggagccctggccactggcattgactctactcctacacccggaatccccgggcaagccattcacctcttggcctttggacggtgctgcccagtgaggaaggggaggaatgacggtgggagattagaggaggtaatatatgccaaagtgcttcacagaggaacttgtttagtcaaacttacagttttatttctaaagcttattaagttctggctataaacttattccaaaaacatgggcccgaattagcaacaacatcacaccaccttctgttaggctgggagcctcctgttgatgcagccactgaccagaagtagggcaatgatacttctgtagttttcttgacagacaatgcacgatgtggaaaattccagagcaagggctggagaccaygttcccttagtcaatgtccagccgggtggccatggtgaacttactcaactcctaatctcagtttccactttacgaaaagggaggaggaggccagcag

SEQ ID NO: 544399 - DNA, 578 bp, Homo sapiens
gtgtcagtgccatggcccatcatggggtcagccctggggggctaggctccaggcgcctcggaggctttggcagtcagagcctgtgtacggtggggtctccccggatcgcggtgagttgtagatggcccctacacagcaggggcaggtttggctactgggcagggggcctttgcaggcccagcccaccccgcatcacatctgttaccatcaacgagagcctcctcatgcccctcaacctagagatcgaccccaatgcccagtgtgtgaagcatgaggagaaggagcacatcaggtgtctcaacaagtttgctgccttcattgacaaggtgggtctgtgagctgtttcctgggactgtggcttaggaaggggaaaggracttggaacccgatgatagggtggttctaattctcctgttactgactagcacgtggctgtgagaacgtggctgaatcagggtcttggttttcaaatgttgccatgtcagtcaaatgcaaaatgaatctgaaaccaccagacagaagaggggtgtttgctgctgctgctcacaggcaagcagcaagcatgatgtgtgtgcacc

SEQ ID NO: 544400 - DNA, 626 bp, Homo sapiens
aaacaggccgggcgcagtggctcatgcctgtaatcccagcactctgggaggccgaggtgggtggatcacctgaggtcaggagttcaaggccagcctggccaacatggtgaaaccgcgtctctactaataatacaaaaaaaatttagctgggtgtggtggtgggcgcctgtaatcccagctactcaggaggctgaggcaggagaatcgcttgaacccgggaggtggaggttgcagtgagccgagatcaygccactgcactccagcctgggcaacaagagcgaaactccgtttcaaaaaacaaaataataataaagttatgaaaaccatgctctgggctctgggaactctggtcttctttgtgggggcagggctgctcctgggctacaatctcacaggcaggaggaagagggctgggctgctggaggagggtgggggaatggcttgaagaaggggttgcttctaggaattcaagtccttggatattggggcagggggaataaaacctcatgggggtggcttcatagagctttgtgttttgtacagtgtagaatttaaaggctctgtggaatatctgtctgtttttaaatagttccacaaatatttattgagtgactcactgcacttca

SEQ ID NO: 544401 - DNA, 527 bp, Homo sapiens
gagctgggcccagagctcatctgcatagacctgccccactttttagcaccatcacttacccagccctcactactacttctgttttcatcttggaacccttttaggacctctactggtattgagcacagtccaaggagcggagtcttagttgagtccacaggccgatttccaataggctccttgcatgatctattagggacaatggtttgtctcagagaacttgttctctgagataaacaatgccctaatttataacacttaccgatttcagagttgtatatacttctgtcatggctgatttcaggctgttgctgtgacttcatgtagaattggctagaaatgtgcacaataggctcttgtgagctggtgggarctggttcaagaacaacattggttggggctaggatggaatggtgtctcacactgaaagacaaataggaagatatttgtctcttctcttagatgaaaaacctgaggcttagggagactgtgggggttggggagtccgcctggtgtggagttattgg

SEQ ID NO: 544402 - DNA, 388 bp, Homo sapiens
ctgccaggcactgcacagtgcacatcccaggcacttcctagtcaatcctcatcatactatgaaacagggaatattccatattaacatgaggaaactgaggcttagaggttaaacaatttccccaaggtcattggtataccataggggtggaagggactactaccattatttagaatggccaatgcatgctgaaaattgttaataagctgattggttggttttaaagttctctgcagaaaagttcccctagtgcctgcacctgcagcagaacctggccaccaccctgcccttggtatagcactatccaagatcatactgctagtcggtgacaaatctgagtttcaccsaggtccatctgactctaaaattgatatcatcttctgggtcc

SEQ ID NO: 544403 - DNA, 398 bp, Homo sapiens
aattccaaatgctttaatagcaaaattaaagacaaaaaatactactactaatgtggactgctcataaatatgttttctataaacagattcaaattttttttttaatttttttttttttttttgagatggagtctcactctgtcacccaggctggagtgcaatggcacagtcttggctcactgcagcctctgcctcctgggtccaagcgattctcctgcttcagcctcccgagtagctgggactacaggcacataccaccacacccagctaatttttttgtacttttagtagagacggggtttcactatgttggccaggctggtttcgaactcctgacctcgtgattccccaaccttggcytcccaaagtgctgggattacaggcgtcagccactgcac

SEQ ID NO: 544404 - DNA, 646 bp, Homo sapiens
gggcctgggggccaggcccaggctgaggcccctgatctctacacctacttcaccatgctcaaggccatctgtgtggatgtggaccatgggctgctgccgcgggaggagtggcaggccaaggtggcaggcagcgaagagaatggaaccgcagagacagaggaagtcgaggacgagagtgcctcaggagagctggacctggaagcccagttccacctgcacttctccagcctccatcacatcctcatgcacctcaccgagaaagcccaggaggtgacaaggaaataccaggaaatgacgggacaagtttggtagaccttggacactagggaaggtaatggtggccatgctggtgggtgtgagtctacaaagggacattccaggagaggagagggggcagtggtgcaacccastgggagaggaacagcctgactttcagacagagccactcttgggtcagggtattgggaccacaacctaggagggcctaagactaggcctgtgttactatccttctgacctcaaattggcaattgcaatgaagtgatatggaaacagagggaaaagtggcctgtgagggcatatctcatatgcacatatatgtgtttgtgcatgtgtgcatttattagtatgtgaatgcttgtaaatg

SEQ ID NO: 544405 - DNA, 646 bp, Homo sapiens
gggcctgggggccaggcccaggctgaggcccctgatctctacacctacttcaccatgctcaaggccatctgtgtggatgtggaccatgggctgctgccgcgggaggagtggcaggccaaggtggcaggcagcgaagagaatggaaccgcagagacagaggaagtcgaggacgagagtgcctcaggagagctggacctggaagcccagttccacctgcacttctccagcctccatcacatcctcatgcacctcaccgagaaagcccaggaggtgacaaggaaataccaggaaatgacgggacaagtttggtagaccttggacactagggaaggtaatggtggccatgctggtgggtgtgagtctacaaagggacattccaggagaggagagggggcagtggtgcaacccactgggagaggaacagcctgactttcagacagagccactcttgggtcagggtattgggaccacaacctaggagggcctaagactaggcctgtgttactatccttctgacctcaaattggcaattgcaatgaagtgatatggaaacagagggaaaagtggcctgtgagggcatatctcatatgcacatatatgtgtttgtgcaygtgtgcatttattagtatgtgaatgcttgtaaatg

SEQ ID NO: 544406 - DNA, 435 bp, Homo sapiens
accttacttacttaaatgtattgcatgaacttttcatggttattcacttttagatttcgactcaaaagtgcctggattatttctgcctatcattctactctataggcaagagtgatgctgagctggaataacaataaacacaagaaaattcttttctggactaaacatctttattattaaagtgagaatataagatgttgcggttatctcaaaaatgatttcagaaaaggtgataaatatttctgtcttgggacagaatctactcattttaagcactgcttaataatcacccytaatgattaacctgatacctttatgttggccttttatttgagaattttctatatctccacccataatttgtctgaacttttaagtgttaaagatctcaaaaaggtattttatttcatatattgagggcattgtagcaaagca

SEQ ID NO: 544407 - DNA, 542 bp, Homo sapiens
ttcatttgtattttatttttttaaatgttcaattatagaagaaacatgccaaaggaaaattattgaactataagaagttattattgataatagctgccatttattaagagcttaccctatgctacatttcttattaatgttttacacacagcagattgttttatcctcataacaaacctgtgagattgctgctgttattcgcattgcacaaaagaggtaacaggtgtgggatatggtaagcacctggccaagatcacttagcttgtaaatagtgaattgagtattcaaacaggtcggtttaatgccaaacctcaggctcttaaccattctgctgtatttcagagacttcttaatggtgatatttttaaaaagataaataatttggtgaatttgtggtactttacaatggattagagtaagtaaaaatatttatgtcattgaagtttgaataaatatttctatacartacctaaattatttttacttcacatcactgttttttaaagctgtttaaaaaaaaactctcttttaggtgtttcatt

SEQ ID NO: 544408 - DNA, 594 bp, Homo sapiens
ggttaatagcaccattatccaggctatcagaaatctgaatgttgagctatcctcgtgtcctaaatctgatccttgttctatcagatttacttcctgaacatctcacaagtggatacctcattctgcccccatgatctcctactgctactcgttgattccaggtctcataattgctcttggaacattgcaataacttaccaagttgtcttcttggctccagttttatctatatcccaaagccmattagaaaacaaaattgtctttataaaacctaagtattgtttttatttttctctttaacaaatgctgcaaagactctcaatttctcaggttacaaatcatactcttttctgtggtggggtgccgtttgtgttttggtctatctatctaatttcaatgctcttccacttactgctccaactacattcacctaatcacagctcctcaaacactccatgctgttttgaagctggttacttcctttctctataatgctctttcttctattctgaagaattcccattcatctttagaacaagctcagttaacattcttatctgagtaacattttctaacatcacctgataggtctga

SEQ ID NO: 544409 - DNA, 422 bp, Homo sapiens
aaacagtatatttctaccacttcctcataccacygctctttctcccatcataattatttctgagtttgcaatcattgtgataacactagtttttgttgttaatgttttactgtaagtgtgcgtaatacaatatgctataagcattttaaatacttgtgctaaactgaagccaaattcaatttatgattaaaaagaggggaacaaataaaagtagaataggaaatgctttgccatcacaaggccaaggttagttgttttgatttcttgcttaaagataaaaatgtattgtagatgtgtgttccttttagagtgactcaagcataaggggaagtagagactttctatgctgtagttcaaaacgtaccctgagttattgtgtttctcaaggcatctgtactattttctaccatagaaattatttt

SEQ ID NO: 544410 - DNA, 542 bp, Homo sapiens
attttgattttattggtctaccttctatcacaatgagcttgattttttaagctaaatgcctggattatgtgtgtgtgtatgtatgtgtgtgtatatatgtgtgtgtgtgtgtatatatatacatactatatatattatatatgtatgtagtatatgtgcatgtatatattatgtatatatttatgttatatatatgtatatatgtatattatacatattagcatatacatacacagtatatacacatatrtgtatatataattatatacacatatgtgtgtatgtatggatatatgtttttagctatttttattgcattttaattctatttaatgagtcactgagaacatattatctgctcttgagtgttgcaatttattaatgctttcattgtattctttacaaggtctatttttgttaagtttacttatgctataaaattatttttggttattttgggtaatgtacattaacatattgaatacaataatcaaatatttgtacacttctttattgattccttcataattattcagtcactg

SEQ ID NO: 544411 - DNA, 638 bp, Homo sapiens
tttatatatttttaagagacggaatctttctgtgacttagactagggttcagtggcataatcatagttcattgcagccttgaagcccttggctcaagcagtccttctgcctcagccttgtgggtagacatgctaacatccctagctaattatttattattattattattattttagatatgtggtcttgctatgttgctcatgctagtctcaaacttttggactccagggatcctcctgccttagcctctggagtaactgggattatcgacatgagccactgtgcctggcttcaaatacacttgaaaaaataaattttgtggaaactcatagtttgatacattttaaaatgttaataatatatgtcctactacagaaaaaatatggaagcaaacaatctattttgtttttcctttatrtactaataatctactctttcagtcctagcagattttccattgggctgatcatcttttgagtttttatgatgattggtgattgatgacttgaaattttttggttagctataaaaagttgataacttttgaaagttatcaaactgatttgaatctaaattaggatgctattttatcatatcagtttgctgcattcataatcttctgtaggggcaggttgaaa

SEQ ID NO: 544412 - DNA, 520 bp, Homo sapiens
ttagctatttatcctgatgctctcccttccccygcccctcaaccataggccccagtatgtgttatttccctccctgtgtccatgtattctcattgttcagctctgacttataagtgagaacatgcgggacatgacttatacgagagcagttcacgtgagcaccttagagagacgtccatgcatgtctagcatttgacccatttccagcccaagtggatggactcactgtcagaaagaatcgatatgtgagctgaaatggggagaaagctgatgggctttgtgaaaacctacatgaaggcattgtcacacttttctctataacccaaactgtattcatatactgaggaaatatttaccaaattcacattatattccagaagcaaacctgtttctaatgtatctgaaagattctgccattctaatattctgtcctctattctttatatcttcttctcttttagctttcagaaataggaatgtgtagcagcataaaaaagaatacttttcttcaacttcagaa

SEQ ID NO: 544413 - DNA, 520 bp, Homo sapiens
ttagctatttatcctgatgctctcccttcccctgcccctcaaccataggccccagtatgtgttatttccctccctgtgtccatgtattctcattgttcagctctgacttataagtgagaacatgcgggacatgacttatacgagagcagttcacgtgagcaccttagagagacgtccatgcatgtctagcatttgacccatttccagcccaagtggatggactcactgtcagaaagaatcgatatgtgagctgaaatggggagaaagctgatgggctttgtgaaaacctacatgaaggcattgtcacayttttctctataacccaaactgtattcatatactgaggaaatatttaccaaattcacattatattccagaagcaaacctgtttctaatgtatctgaaagattctgccattctaatattctgtcctctattctttatatcttcttctcttttagctttcagaaataggaatgtgtagcagcataaaaaagaatacttttcttcaacttcagaa

SEQ ID NO: 544414 - DNA, 520 bp, Homo sapiens
ttagctatttatcctgatgctctcccttcccctgcccctcaaccataggccccagtatgtgttatttccctccctgtgtccatgtattctcattgttcagctctgacttataagtgagaacatgcgggacatgacttatacgagagcagttcacgtgagcaccttagagagacgtccatgcatgtctagcatttgacccatttccagcccaagtggatggactcactgtcagaaagaatcgatatgtgagctgaaatggggagaaagctgatgggctttgtgaaaacctacatgaaggcattgtcacacttttctctataacccaaactgtattcatatactgaggaaatatttaccaaattcacattatattccagaagcaaacctgtttctaatgtatctgaaagattctgccattctartattctgtcctctattctttatatcttcttctcttttagctttcagaaataggaatgtgtagcagcataaaaaagaatacttttcttcaacttcagaa

SEQ ID NO: 544415 - DNA, 660 bp, Homo sapiens
atttccatttcttcccataaaggagttattactatgagagttgctcttccaccctaaacaactagaaaacaggaaaagctgtaagataaaatgattttcagacaatggagagaggactctgattcctgagagaagggaaataaatgagatatattttataattgccaagcttatgcctcaggaggtttctgggctgtaggcctgggkagctaacccagatagaaccaccagtcacactgaattgaggacacagagatcaacatttgggaaagacaagagaactagaacttgtgaggttgagtgtcaaagagaagggtgttacagagagatagaccttttcagagaagttccctagagtatttgtctgattactcatatgcacacatgtataaggaaatcctggagggtgagaaaagagtgacttaaaagcagtggacaaacaacttctaggcctcaattaagaatgaaaatagttaacattccacccatcaaagtggaaaaatattgtaatacatgagatagggtcctcagaagagtaacatatctcaatattactttcatctctaaatcagtcccctaataaaccctgccccaggagtaccataacaaaacagatccaaggagctcaacaatcaccgagctgaataaacaaggaaaact

SEQ ID NO: 544416 - DNA, 526 bp, Homo sapiens
ctgcagatggagaaggtctaagagcttcttctttckggtggccagtggctctttcagagcttcaaatcggcataccaaggactcttgccttgcccttatatccttagaatcaggatggcctatttcttcaaaatatgcagccaggtctgtaaggatatccacctgatcctaagggagaaatagaatgaatgcgaagaaatcccatcatttagtaggaagtaataggagtttgtcatggtggaaacggggtcatgggaaaatcagttcccatatgcattgtgttctgatctctaattaaatcagtgaaatggagttggaagggttgctacactggggaccaccacatcaggtaagggctattcatacgaaagtagttctcaaaacatattttagaaacatcaaaatatttatagaatgcttcaaggaaatcagaaaaattagaattgcagagtttgattgtttaagagtattgacaaactgggcctcaaggaaaaaactggaagtgtttttctatctcagttcacct

SEQ ID NO: 544417 - DNA, 526 bp, Homo sapiens
ctgcagatggagaaggtctaagagcttcttctttcgggtggccagtggctctttcagagcttcaaatcggcataccaaggactcttgccttgcccttatatccttagaatcaggatggcctatttcttcaaaatatgcagccaggtctgtaaggatatccacctgatcctaagggagaaatagaatgaatgcgaagaaatcccatcatttagtaggaagtaataggagtttgtcatggtggaaayggggtcatgggaaaatcagttcccatatgcattgtgttctgatctctaattaaatcagtgaaatggagttggaagggttgctacactggggaccaccacatcaggtaagggctattcatacgaaagtagttctcaaaacatattttagaaacatcaaaatatttatagaatgcttcaaggaaatcagaaaaattagaattgcagagtttgattgtttaagagtattgacaaactgggcctcaaggaaaaaactggaagtgtttttctatctcagttcacct

SEQ ID NO: 544418 - DNA, 659 bp, Homo sapiens
atgtgaaggtttgtaaacatacaagtgtgtacataatagtttatattatataacatttttgagtrcaatatatgtgttagtacaaccctaaggaagagtaatctatggcacagagataattcaggaatttccataaacaaactaaagcaaaaattcaagcccaggtttacctgctccagagttcatgcttctaactttttgttaaaccaccttctaaataactgcataactttgggcaactcacttctcaacttagatcctggtttctttaactataaaataaggggctgttctcttccagctataaaattttataagtttatattataccaaatatttaggttacttttgagttcctagtagttttcacacactttaaatgtattgatgggattagacacaacatttacctactatacggatgcagaggggagcagaaaaggtgagaaaaggtcaataagcagctcaataaggaacattccctaccttcccccatttggctaagaatcaccagaaattgtgccagaggaaagaggtgaagaacatcagaatataggaaaaccaaaatctagatccttgatatttaactgtataaatagccttcagggattcattgcccttttctgagcctctgttttgtcatctataaaatgaggatc

SEQ ID NO: 544419 - DNA, 650 bp, Homo sapiens
attctatctccttcctttccttctcttctacgtcttcttggtaaggagatcttaaaggggttttgtaccagaagcctttggtcaaatgtagtaacttatgaaaactaactatattaataaataaatgcttaatatagttgtacacttgctctggtacaattgaatggtggtagttagaaggaagggcagagctgcagtgccctgtagaatacaatttaaactacacacattataggaaattgtcctattaatttattctcttttcagaatgttttgttttactttatttgtctcttctgcaatcaaacatgcacatttcttcttatcttgggagaaaatactgtttctattcaggttatttccctcctttgtaacaactgcattatttttccaatgtgtaaaaggtatttattctattcattcttctttgaatctctgaataatgtayccaccctcaacttcccatatctcttttcttaaggtatactagcgactttctcattgaaatttaatggcctccctctgtcttcattgccactaacttccaaaggtcaattgcccaatgtttgaaattcctttttttgcctatttgacaccacactatcctggttttcctcactgattattcaattttttatatcccaagtgta

SEQ ID NO: 544420 - DNA, 549 bp, Homo sapiens
gccatggtggtcaacaaaatcccctctgaatttcccagtgaatggaagaagtacatctgcaagaggcarccaaccatggagatggtcctctgcctgctgatgaggatggagagcatcttgggaattgtggcagttgtgtaccagatctccagaaatgagaaaatgctgataaaattatacatggggttgtggagacgggtatccaccctgactgcaaaaaatacaataagattcccaatgacaatgaatatgtagataacaaacaatggaatgaagaagaggaggctaccatcttcaaactgtgggaatccagagaagagaaactctgttacttactgtagcagtttggttaatactcaccatggtctcagcaaccttaacagctatggatagaaagacacagctcatttcctagaagaaattgacaaagtcagatgtgttagcttatataaaagtcaaatgaaaaatatgctttaggtggatcatgtacttctctttatttatgaattaaacagatattcatttagtgcctactatgtaccaaacaca

SEQ ID NO: 544421 - DNA, 613 bp, Homo sapiens
ccattcccacagctcaggaaagctgcccaggctgaatgaactctcactacacatgccccacattgtaccacagcggagggacccaaaaagcactagtctttggaaaacagttagacagctaattataaacatacatttatcgtgtgacctagcaatcctatacttatgcattttcccaaatgacatgaaaatttatgtttacgcataaccatatcatgttaaaaatgaatattatctagggatagcttacatgcccaccaaagtttgtgagtgaaaaaaaaaatacagatccagaaaattaacctagtatgatgcacagtagctaagcaaggactagttaccagtattatccaaggaaattcaaaaggcagatgtgagacaagttgaggtgggatgtgcagaaaactggtgagtacaaatagggaagaccgatgcattctatagaacagtgggtttcagtaatgattagaatcattatgtcattgttaaaggccaaatatattattgaccaggtgtgggtaaaattcatcacatgtttcattcattacrattgcattgaatactcatcctatttaggtgctgtgttagtttctggacacacaacaaataaaaa

SEQ ID NO: 544422 - DNA, 564 bp, Homo sapiens
aggagactcctatagctcaggtaagcttgagtaagaggagcaggcttcaattcccacagaagaaactgccatggctcttccactctgtctctccagcaggcagtttttcttcattagtttctcatcaagcttcagatttatcaaattgcataataattaatcttgtttgtaaaaagcaatgagctaaacactttagtaaatatatatcgcacaaatatagtatcttcaccccccaatagagaagagtgttaacttcaggttcagaggggaaaatgctttgtccatatttataaaaacctagttttttaattgcaagtcagtacatccccaaacactagtacttagaggaatgatgtgtataactttcyagtgtctctttttttttttttttttaatgaagccatctatgccctgtcttacaataggccaggaaatgtgcaccaatcctttgtttccagaaagacaattgacatataacaaacctactacccagtaatgaaaatgtgctctacttcatttgtcactgaaaacaaataacaggaaaatcaaaccactttcagaaaa

SEQ ID NO: 544423 - DNA, 603 bp, Homo sapiens
gaagaaggagaggagactcctatagctcaggtaagcttgagtaagaggagcaggcttcaattcccacagaagaaactgccatggctcttccactctgtctctccagcaggcagtttttcttcattagtttctcatcaagcttcagatttatcaaattgcataataattaatcttgtttgtaaaaagcaatgagctaaacactttagtaaatatatatcgcacaaatatagtatcttcaccccccaatagagaagagtgttaacttcaggttcagaggggaaaatgctttgtccatatttataaaaacctagttttttaattgcaagtcagtacatccccaaacactagtacttagaggaatgatgtgtataactttccagtgtctctttttttttttttttttaatkaagccatctatgccctgtcttacaataggccaggaaatgtgcaccaatcctttgtttccagaaagacaattgacatataacaaacctactacccagtaatgaaaatgtgctctacttcatttgtcactgaaaacaaataacaggaaaatcaaaccactttcagaaaagaaaaaacccaaccaaagaaaaggctgga

SEQ ID NO: 544424 - DNA, 619 bp, Homo sapiens
ggagctcataattttactttggattttgatatatttactttgtataatgaattgtactaccaaggttgaattctagttgtgacgtgcaataagtataataaatggattggctaattttctcctaagtgcaaatactttcagcagctatgcatatgatctaaacatttgtgctgtctcccttctgtcttatttacttatttatttatgaagatagtattgaataaaaattttgaattccatgatacttagaagataaggtaatcgaatcctctcatttacaaaataataataataataataattaaaaggcacagttttactgatatgtccatgtccaaattcaaggtgacagcatgacacattcaattcctccctaacagtcctcaraaaaattacaaactgctatgaattcaactaacatttcacatgattgactgctttgtaaccctacatacataccttctaagttagccccttaaatttacctccagattttcctacacactctataagagatctcgcaaagaaatggaattatacagttgatgaataatagcttctgtgtgtaagatactacaatacaggaaccatggatgtagtcaggaatgaaaaatggcac

SEQ ID NO: 544425 - DNA, 640 bp, Homo sapiens
ctaattgatgagaaaggcctagttaataaatgtccataaatgtagccaactttattgcaagccatgctgcccccaaaatagccctaagagttgtacctgaccaaataactcagtccagttttacaggacgtgaagactgagtattccatccccagacaatgcaatttcagttatctgagtttttaatcctgactgggatgagagaaggctgagtgatagaagtatctgaatatgtggtattattcctcctgcaactcagggaaraacagagaaactggcaaagtgaacatcctatttaaaaaagaaaaaaggaaaagatgtgtttcatctgatcttgaaaaacattaactagaaaaaaagaacaaacatctattttcctttagaaaagtgaagacacaatctccaaaatgaatgacttcatgaggatgcagatactgaaggaagggagtcattttccaggaccgttcatgaccagcataggcccagctgagagccatccccacactcctcagatgcctccatcaacaccaagcagcagtttcttaaccacggtacaagttccctcttcccaatacattcccctcactacaatgtaatgacaaggattaacacaaccttgaaagcacctcaccaatcccct

SEQ ID NO: 544426 - DNA, 635 bp, Homo sapiens
ctaattgatgagaaaggcctagttaataaatgtccataaatgtagccaactttattgcaagccatgctgcccccaaaatagccctaagagttgtacctgaccaaataactcagtccagttttacaggaygtgaagactgagtattccatccccagacaatgcaatttcagttatctgagtttttaatcctgactgggatgagagaaggctgagtgatagaagtatctgaatatgtggtattattcctcctgcaactcagggaaaaacagagaaactggcaaagtgaacatcctatttaaaaaagaaaaaaggaaaagatgtgtttcatctgatcttgaaaaacattaactagaaaaaaagaacaaacatctattttcctttagaaaagtgaagacacaatctccaaaatgaatgacttcatgaggatgcagatactgaaggaagggagtcattttccaggaccgttcatgaccagcataggcccagctgagagccatccccacactcctcagatgcctccatcaacaccaagcagcagtttcttaaccacggtacaagttccctcttcccaatacattcccctcgctactatataatgacaaggattaacacaaccgtgaaagcacctcaccaat

SEQ ID NO: 544427 - DNA, 635 bp, Homo sapiens
ctaattgatgagaaaggcctagttaataaatgtccataaatgtagccaactttattgcaagccatgctgcccccaaaatagccctaagagttgtacctgaccaaataactcagtccagttttacaggatgtgaagactgagtattccatccccagacaatgcaatttcagttatctgagtttttaatcctgactgggatgagagaaggctgagtgatagaagtatctgaatatgtggtattattcctcctgcaactcagggaaaaacagagaaactggcaaagtgaacatcctatttaaaaaagaaaaaaggaaaagatgtgtttcatctgatcttgaaaaacattaactagaaaaaaagaacaaacatctattttcctttagaaaagtgaagacacaatctccaaaatgaatgacttcatgaggatgcagatactgaaggaagggagtcattttccaggaccgttcatgaccagcataggcccagctgagagccatccccacactcctcagatgcctccatcaacaccaagcagcagtttcttaaccacggtacaagttccctcttcccaatacattcccctcrctactatataatgacaaggattaacacaaccgtgaaagcacctcaccaat

SEQ ID NO: 544428 - DNA, 635 bp, Homo sapiens
ctaattgatgagaaaggcctagttaataaatgtccataaatgtagccaactttattgcaagccatgctgcccccaaaatagccctaagagttgtacctgaccaaataactcagtccagttttacaggatgtgaagactgagtattccatccccagacaatgcaatttcagttatctgagtttttaatcctgactgggatgagagaaggctgagtgatagaagtatctgaatatgtggtattattcctcctgcaactcagggaaaaacagagaaactggcaaagtgaacatcctatttaaaaaagaaaaaaggaaaagatgtgtttcatctgatcttgaaaaacattaactagaaaaaaagaacaaacatctattttcctttagaaaagtgaagacacaatctccaaaatgaatgacttcatgaggatgcagatactgaaggaagggagtcattttccaggaccgttcatgaccagcataggcccagctgagagccatccccacactcctcagatgcctccatcaacaccaagcagcagtttcttaaccacggtacaagttccctcttcccaatacattcccctcgctactatrtaatgacaaggattaacacaaccgtgaaagcacctcaccaat

SEQ ID NO: 544429 - DNA, 628 bp, Homo sapiens
ctctggagaaagttcaagaaagtcagactgttggggtcttgtaacagtagaatggtgggtccatagaattaagagtatggcaagggttattaatgctcaggaccatgaaatccaactttaacagaaaaggcagtgaagacaggtggactaatacacactgagaaaataggtcgaaaattgcagatctgaatggggcaagaggagacaaagggcagggacaactggccacaggattgaaaggacagtcagagagccaggtaggcaatggttagagagcgaaatgttcaaattttattgttcagagaagaaaagttccagggagcggccatagaactgggtggacaaaagaaactagaggtgaaagcaatgcaggtgaaaatgcayagatgtgagattctgacttgccccttaaggcacgactcaggattcattccacaaggtcaccatagacctactttgttttttttccctcccaaagactactagacctatcacatcactctgtgcccatttcagggaacaacttttcttttttcaagtcacctacttggattgaaagtaggaacataactacatctgttaatgggctggtgtctgctcagatcagcaaccaagtacccaaattccc

SEQ ID NO: 544430 - DNA, 640 bp, Homo sapiens
gctgtacagcattgtttaacacatacctgtgtctcctgtactccttatgtattgggaatctgaacaaaagtcttgattacacacagataaaacatttgaggtaagggtaattcaaaggcagtgatgttacttcataatgcattacctcaggaggcacacaatgtcaagctgtccactgtcagtgaggtgtagtttcatgatgacasttttattttaaagggtacttcacccattataaagagcaaatatctgtagggtggtacttaggactcattctaatagaatattagcaaatattctatttcctaaaatgtttttacctaatggttccaaaattcattgataattctttcctgaaccaattatttcaggatatcaaaatggtgacttctactggtattattccttctacacttatttgctgggaatcttctgcaatactcacagagctcgtcctttaaaacacaatacggttgtcatttgggctattcaccaatagtctggtgtttgtgtttttttttccttctgcatacataacgggtgtattaatcagtttttgcatcggtaacaaacaatccggaatcttagttgcatataatgacacagatttcttgctcacaggtctgtgatttggctgagg

SEQ ID NO: 544431 - DNA, 585 bp, Homo sapiens
gcccccagcttcttgtatttggtgcctacctccctgcttggaggcctcaggctgtggcatctgcctctcctgcaggccaggccttctctgccctcctggtttgccaccttggacaaaccctcccttgccctcatatcctcctccagcgcttgccctgctctaagcttcccaagggacttgcccaggctcatggctgctcattccctgcctgctccagcctggcttctgccaccaccactcactcagtggatctgtctccacacactccargaccctttcttgctttatgagaccttttagactcatgacactgctggcccccagcccccgtgaagcgttctccgcctggcatcaccgatggctgtgaccttggtgcgttcaccttcctttgtggttgccctttctcatcttttatctgatccccaagaaccgatttccccgtgctcctgtctaggtgccattcccccctcactctacacactttggcaggtctagctgcgcccacagtctcagggttgccttgcaccccctactcgcagaactgtttgtccagcctgggcttctcccctgtgcttgcagacctgc

SEQ ID NO: 544432 - DNA, 606 bp, Homo sapiens
tatttgactcgtgcaatattttagcgtcagtatactttgagtatgacataagtgatgttagggtgaggaatggactcacctttgaacacctgacacatataaaataaaatgctaaattgaattaatcagagcagatctacagaagaccagagcagggctggggggtgagggggaaggctgagtttatagaaaacaggcgggtgtgcggtggctcattcctgtaatcccagcactttgggaggctgaggtgggtggatcactcgagtccaggagtttgagaccagcctgggcaacaaagtgagaacccatctctacaaaaagtacaaaaagttactgggcgtggtggtgcacgcctgtggtcccagctacttgggtggctgaggcaggaggatcgcttgagcctgggaggcagagattgtagtgagccgagattgtactagcctgggcaatagagcaagactctgtctcaaaaaacaaaacaaactgtggtccacagaggggcagyggccaaaagagaggcctaggttgcaccacagcaagtcagggtgggactagaaatccagtctctggctttcctgcagagcacctacccttgtcctgtgcatt

SEQ ID NO: 544433 - DNA, 445 bp, Homo sapiens
ttgtgctatacatgcccagctggttgtcagatgaagagataacgtgcacatagtgggaaagttatttttcatcttacataggccaatgggtctttarcaggtttcccattaaagtgttatactgctcagtgtaggcaatcaactgaaattgcaaatcccattatttgaaaactctccttcctaatgcttttgtgaaaagcaactacataggatattttttaaatgaatgtagtttaaaaggccatatgtttatataattttcacccaagttgctatttacttgacataaaataagtggagatatttcagatttccagttaatttgatccattgagacaacaaaactatctaattgagtcctctaccatagagtcactgctgtttttaaattgatatctgaatcatctataattatgccagacaaaatgaggaagaataatatccc

SEQ ID NO: 544434 - DNA, 512 bp, Homo sapiens
tggagcgtaaacttttaagggaccgttggactttaggtagctggccctttgggctagttggcttgagtcatctctatccacacattcagagatccatctgtacctcaggatttgtaatcagtgtgaatgctcaacttccttcagcacaccctgaccttcaaaagtagtgctaagtagtgttggggacagggaggagttgacatgctgataaatatactgaattatggaagtgctctttgaaacttggaagagattttttttttaagctgttagttgctagggtcgctggtcgaaaatctgagccttkgcttatcacagatatttaagtgactctatcaaaacagagaagcaagtggggtaaagggcaaaggattttggtctatttttagaatgtattaaaataatattcattttattttatgtgtatgtttatatgtgtatttatgtatatgtatatatacacacacatatgtatatatgtatttatatgtatgtgtcattctctttatttt

SEQ ID NO: 544435 - DNA, 512 bp, Homo sapiens
tggagcgtaaacttttaagggaccgttggactttaggtagctggccctttgggctagttggcttgagtcatctctatccacacattcagagatccatctgtacctcaggatttgtaatcagtgtgaatgctcaacttccttcagcacaccctgaccttcaaaagtagtgctaagtagtgttggggacagggaggagttgacatgctgataaatatactgaattatggaagtgctctttgaaacttggaagagattttttttttaagctgttagttgctagggtcgctggtcgaaaatctgagccttggcttatcacagatatttaagtgactctatcaaaacagagaagcaagtkgggtaaagggcaaaggattttggtctatttttagaatgtattaaaataatattcattttattttatgtgtatgtttatatgtgtatttatgtatatgtatatatacacacacatatgtatatatgtatttatatgtatgtgtcattctctttatttt

SEQ ID NO: 544436 - DNA, 472 bp, Homo sapiens
acctgtactactgattattaagcaggacagactgagctttctgttgcaaatcccttggaggagaaagtaatttctaaatatacagaaaggtaacttgactatatatgttgcatcctgtgcctcccttcatattaatatttgataaagattttaatttatataaaacttctaaagcagaatcaaagctcctcttagggaaatggcacgtctctaggacaggcgagaccctgtataaatagtaccaaagcattaccgcacagtrgaaaacacactctattaaaaatgttaagctatctgaaaaaatgtgcaagtcttcgggatggcacaaaacaaaggttaatgcttcttggggcacatttcttagagggcttgctgagtgtgtaaatgtaatcgatttttgtgttacatgactttgatgacttcattgaaaatctgcacaattcagttccagctccggattacttcagttgac

SEQ ID NO: 544437 - DNA, 595 bp, Homo sapiens
attaacatacagatcgcattgtgttgataactatttataattatcaaagatgaaaatgctacataactagatttatggaatataactaatttagtattttggcatacacattagaaaaaaatataaagttaatgaaccaatgatttaacctgagaagtcaaaacagagaaaacccaaagacaatagaataagtgaaaaaatgattaaatacaaatcaaagaagcaatagggaagactaacaaaggcaaaagcagcattcttgaaagggcttttttaaaaatatgacaagatgaataaagacagatkaaacataatagaaattttaaaaaataaaagtttaaacagtataaaattaatatttttataccattatacttgaaagtttagagatattagaccatgttttacaaaagcataattggccaatattaattcaaaaatggatattccaaatgaacttgtaaccattacacaaactgaatcagtattataaaaatctgcccattaaaaaatatcagactctgatggttttacaaatttttaccaaggcttcaaaggctagataatcttcactttagacaaacaattctaaaag

SEQ ID NO: 544438 - DNA, 595 bp, Homo sapiens
attaacatacagatcgcattgtgttgataactatttataattatcaaagatgaaaatgctacataactagatttatggaatataactaatttagtattttggcatacacattagaaaaaaatataaagttaatgaaccaatgatttaacctgagaagtcaaaacagagaaaacccaaagacaatagaataagtgaaaaaatgattaaatacaaatcaaagaagcaatagggaagactaacaaaggcaaaagcagcattcttgaaagggcttttttaaaaatatgacaagatgaataaagacagatgaaacataatagaaattttaaaaaataaaagtttaaacagtataaaattaatatttttataccattatacttgaaagtttagagatattagaccatgttttacaaaagcataattggccaatattaattcaaaaatggatattccaaatgaacttgtaaccattayacaaactgaatcagtattataaaaatctgcccattaaaaaatatcagactctgatggttttacaaatttttaccaaggcttcaaaggctagataatcttcactttagacaaacaattctaaaag

SEQ ID NO: 544439 - DNA, 592 bp, Homo sapiens
ccatcttgaactatgaagattcttggctaatttaatgatcaaggaaaaaaaaagtagtaaatrtgagaaaataatttcaaaaaaaattagcctattactcatcataaagttatttgttttcccttaaaacattaataatggatgaatatctatggttgttttatttctttcttggagaagtatgtagcgggcatcactgggggcatctcaaaataatcctaagacaagaaacaagagatcccaaataggaaacccatagcaatttattcatgatttgtttaattattccaaaagtaatcaaaggaacagtatgttgttttgggaatattgtgaattgcccatctggttcagctaaactacagaactagactcatttttaacacaaacacacagaacatattcctcaagaccaaatctgtaatggatatttcagcaaaaatttactgtgtctgtctgacacaggccttgtggtaggttttgcagataaacaattaattaacaatggttgctgtgctttaatatcctttagtttcaatgggaagatgacctctaaatagaaatttcaaaataatgtgacaaatgttacgatgta

SEQ ID NO: 544440 - DNA, 536 bp, Homo sapiens
ccatcttgaactatgaagattcttggctaatttaatgatcaaggaaaaaaaaagtagtaaatatgagaaaataatttcaaaaaaaattagcctattactcatcataaagttatttgttttcccttaaaacattaataatggatgaatatctatggttgttttatttctytcttggagaagtatgtagcgggcatcactgggggcatctcaaaataatcctaagacaagaaacaagagatcccaaataggaaacccatagcaatttattcatgatttgtttaattattccaaaagtaatcaaaggaacagtatgttgttttgggaatattgtgaattgcccatctggttcagctaaactacagaactagactcatttttaacacaaacacacagaacatattcctcaagaccaaatctgtaatggatatttcagcaaaaatttactgtgtctgtctgacacaggccttgtggtaggttttgcagataaacaattaattaacaatggttgctgtgctttaatatcctttagtttcaat

SEQ ID NO: 544441 - DNA, 423 bp, Homo sapiens
cagcaacaggccatgagggaccgcccctgtgatccaaacacctcccatcaggccccagctctagcattgscaattacaattcaacaggagatttgggtggggccaaatatctaaactatttaaactatacatatgtttgtctctttttctgtgtaatttttttcatcatgaattttcctccctagcctacaagatgatgcacagttctgtgctttgttttaaaagtttctcaaaccaccgtaagttagggcttccaaaataagctgattaaaatctagctgtgttaaaagctcctgttcctggattatcagaaaacagatggggtaggaggcctttcacatacagagggatcccttttcatagcaatataaagcaccaacccttggagagaacaaacagattttaagtattggcttctttttc

SEQ ID NO: 544442 - DNA, 635 bp, Homo sapiens
ggcaaaaggaagagaaagaatgaaaaataaagtaatattttaaaaaatggataaaatttaaattgatttaaaaagaaagcagcaaatcatgtattcagaataaataaaaaaaaatctaggcacatcctaatgatactgctgaaaaaccaacaatatagagagaaatcttaaaaggggccagaggaaaattaccacaatacacacaagagaacaacaagaagaagacataatttcttactagaaacaatgaatgttagaagatgatataatggcatttttaagtgcccaaattaaaacaggggaaaaaaagcaaaacaaaacaacaaacaaatcttgccaatctaaaagttctatacatcagaaaacctatttctgcttgggatgcagaaagccagaaaggggaatttgaacacacttgtgaactcttcatgggcttcactgagtccycacaagaacaattggcaagagtcttgagaacgtgtccctcctggtacagaccaggatgaggggaacaggcgctgctacaagaaactcacaacatgcagttcagatccttctctccactctccccttttaaaccaagactttaaaataggccagggcaaactgaatccagcagcacatcaaaaagctta

SEQ ID NO: 544443 - DNA, 635 bp, Homo sapiens
ggcaaaaggaagagaaagaatgaaaaataaagtaatattttaaaaaatggataaaatttaaattgatttaaaaagaaagcagcaaatcatgtattcagaataaataaaaaaaaatctaggcacatcctaatgatactgctgaaaaaccaacaatatagagagaaatcttaaaaggggccagaggaaaattaccacaatacacacaagagaacaacaagaagaagacataatttcttactagaaacaatgaatgttagaagatgatataatggcatttttaagtgcccaaattaaaacaggggaaaaaaagcaaaacaaaacaacaaacaaatcttgccaatctaaaagttctatacatcagaaaacctatttctgcttgggatgcagaaagccagaaaggggaatttgaacacacttgtgaactcttcatgggcttcactgagtccccacaagaacaattggcaagagtcttgagaaygtgtccctcctggtacagaccaggatgaggggaacaggcgctgctacaagaaactcacaacatgcagttcagatccttctctccactctccccttttaaaccaagactttaaaataggccagggcaaactgaatccagcagcacatcaaaaagctta

SEQ ID NO: 544444 - DNA, 635 bp, Homo sapiens
ggcaaaaggaagagaaagaatgaaaaataaagtaatattttaaaaaatggataaaatttaaattgatttaaaaagaaagcagcaaatcatgtattcagaataaataaaaaaaaatctaggcacatcctaatgatactgctgaaaaaccaacaatatagagagaaatcttaaaaggggccagaggaaaattaccacaatacacacaagagaacaacaagaagaagacataatttcttactagaaacaatgaatgttagaagatgatataatggcatttttaagtgcccaaattaaaacaggggaaaaaaagcaaaacaaaacaacaaacaaatcttgccaatctaaaagttctatacatcagaaaacctatttctgcttgggatgcagaaagccagaaaggggaatttgaacacacttgtgaactcttcatgggcttcactgagtccccacaagaacaattggcaagagtcttgagaacgtgtccctcctggtacagaccaggatgaggggaacaggygctgctacaagaaactcacaacatgcagttcagatccttctctccactctccccttttaaaccaagactttaaaataggccagggcaaactgaatccagcagcacatcaaaaagctta

SEQ ID NO: 544445 - DNA, 635 bp, Homo sapiens
ggcaaaaggaagagaaagaatgaaaaataaagtaatattttaaaaaatggataaaatttaaattgatttaaaaagaaagcagcaaatcatgtattcagaataaataaaaaaaaatctaggcacatcctaatgatactgctgaaaaaccaacaatatagagagaaatcttaaaaggggccagaggaaaattaccacaatacacacaagagaacaacaagaagaagacataatttcttactagaaacaatgaatgttagaagatgatataatggcatttttaagtgcccaaattaaaacaggggaaaaaaagcaaaacaaaacaacaaacaaatcttgccaatctaaaagttctatacatcagaaaacctatttctgcttgggatgcagaaagccagaaaggggaatttgaacacacttgtgaactcttcatgggcttcactgagtccccacaagaacaattggcaagagtcttgagaacgtgtccctcctggtacagaccaggatgaggggaacaggcgctgctacaagaaactcacracatgcagttcagatccttctctccactctccccttttaaaccaagactttaaaataggccagggcaaactgaatccagcagcacatcaaaaagctta

SEQ ID NO: 544446 - DNA, 544 bp, Homo sapiens
agttggagaagggtctggtaggctgagatgaggactttaggttgttttctaacctactgtttccttttcaataggaagccattggagggccttgagcaggcaactaacaaaactgccttacttttcaaaagcaccttcccagctactgtgtgcaaacagactgttgagggtcaaaatcaggccaacccaatctcttcacgcactgttgtatgtagctctcttccaatcctggcagcctatggccagatctcaaactaaaattgctttcaatatgtgtatgaacaaatgtctgtctctctctctctctctctttctctctgtccttgcaagaacttttataaacatatgtatatgaattttatgtgtatgttacagcttcagatgatacactaaagatctggaagctgttgaaaatgcataaagcacttaacctgcatatragtgtgtcatgtactttgagggttaaaaattaattacactttattctaaaaacagaggcattagcacatgaaaatatttcactaattgaaggtatgagcttgtg

SEQ ID NO: 544447 - DNA, 241 bp, Homo sapiens
ttttgtccaaagtcacatatggtggcacataggaaattgttctttcagtgcacagatttttctcatggaaaatatacaacrttataagggtataagaaagtgaatgtggatgacctcatgtagctaatttctagactatagtaccaatttgcatgcatatcacagagaaaaggtctcaaccacaggaaagagtagggcttaggacagtgtccagcacacggaaagcattcaagaaatgttt

SEQ ID NO: 544448 - DNA, 661 bp, Homo sapiens
agcccctctctgcttatagggtatctgcagcagttctgacaccagtgggaagctgtcagtaccttgggtggaggagcaacaagcatttttgaaaaggtcccagaatcacagaccaggctcctccagggtactctccattccttctcggaaaaggtcatctgaactaatggagactttcaaaggcagtccttcccttcagaccttgaaatcctggtgccgcccatacgcacataccactcccctgccctccaccccttgcacacattctctctcggatgcagtttttaccttcctccatgaagtggtcagctctcgcgtggcctccacttctgaacctgatttgcccgaatacactgggcctttcaggtgttttgaccttcccctaatttatcagatttctgcttctatttcctctgctactttttttggattctgttccgtcttccaaaatgtgtgatgcatgatttttcaggtttcttgtcaagcttactattctaccttcctcttcctatgctgggacttwcaaggacatcccatagattaaatatatcagtaccataaaaccccatgtgtcttcacatagacaccagaatggaagccttcaactaacatctcaccttgttctgcttgaaggtgtttcttgactttccttccaattagg

SEQ ID NO: 544449 - DNA, 619 bp, Homo sapiens
ttactcagtcaaattaatcggtcaattacaagttattttttgagaagctctgacatcctctgtcctagttgagatactacgaggtgctttctgcttatagagtatctgcagcagctctgataccagtgggaagctgccaataccttgggtgaagcaacaaacatttgtgaaaagccccagagccagaactacagacagctttctgtctgcagcttatgagtcaaatagacaacggtaccccacttgcaacatctgagggacaatacccacttacatctccatagtactgcctggcatgcaataaagtgttactgaagaaaatatatttggttgaatgagtgaataaatgaatgaatgactcagttatgctaaggaagagagcagtttaagtggataagcagcatcagcagggccatcctggttccattcagcttagctctctctctctctctctttgctactaggacatctttctcagactcagtagagcccactgttctgaaatcaaattttgtttttgacacttctcccgctcctcctgctctcacagctctgggatctgcagcttttggtgaccctgggctctgaagagggaccctggytaacccaaggtgcagca

SEQ ID NO: 544450 - DNA, 564 bp, Homo sapiens
taatatctcctttgtgaagtgggtaatcttgccttatccttctccttctcttactctcacttacttttatatgagacaaactctggctataaagaaagttgctgctttcatctcttcagaagtcctctttttaatactgtcaggcggtattctccatagctatttgagaggtcacactgttttttatggcttgatggatacacacaaagaatgttaaagcagaaagagaccttgaagatcatcagagctgtcttcccttcacagatgaggacatagagcccagatcagtgatgtctcgtgatttgttcaagatcacatggcaatcagcgacagtcggcggggggaaaaaaaacaacaccctttttagtcatcacaaagctgagtgctaaaaatgagacaggagactgaatkgctgtggccggtcattgccactgcatgggagtctgccccaactatttgcttggcccatcttattacagtttggcacttctctcttgaaccttcctgaacctaccacgcctttgcccaggataatcagataaaggggccttttatttcccagct

SEQ ID NO: 544451 - DNA, 482 bp, Homo sapiens
gcagattatatcatgttcaagacaaatctataggcagaagaataaaagagcataccttagcagcatttgaatttgatttaaatattttggagttctcatgttcaaatctttgtaactttaagagaagcgaagttggataaggcagaatcaatgacatcaagtaaacaaaaagagatatattcttcctcttcttgtctatatgtcaaaatcctttaggactctgattaaatactycgttattctacctcatcatccttccactctttggaagattgatcactcccctgcatgtgtctttattctaatacctatcttattgaattgagagatacattttcaagaaaatttcccattatacatatgcattccttgaaagcagaaacttcatcttgttcactgttatatccctctaagtaaggtcagacatatagcaagtgctcaataatatttgcttaataagtgaatatttagaaaaaatagaa

SEQ ID NO: 544452 - DNA, 590 bp, Homo sapiens
agtgcccgcctcctagagttatttttgaggatagataacaggatacacatgaagtgcttactgtggggtttggtgcttactaagtgttgagccagtrctaactactgttaccacagttgttaccattgtcatcagtatcatccttattgattcttcgtcacttccccaggtcctggttggctcccttccccctcccccgcattggggtgttattggcgacccgccccatttcctgcttgtcctctgccctcaccttctttgcagtgattttcagagtccccgtttgcgttcgcagtggggagtttgacttcatttcataccaggaaggccagcttgcagtgggggattgggagggcagagcgctttataagctcgcgatgaaagctgtaaaacgagatggtcaaggatctggccaggcctggttcgggattatggccggcccctggaatgctgaggggggcctcttttaagaagccagtgtctatttacagtgtatctctcataaaccccaacgctggggcgagggcagggggactcgccctcctggcatgtgattgattatctggtatttatgccattgaggacttgtc

SEQ ID NO: 544453 - DNA, 546 bp, Homo sapiens
cagaggtatgccgtttctggactgcaagactcttgcagccgacaacacagtggatgagaaccagcatctcaacatttgcatctggttgagtggcttcaccctgtgacgcagtaatgtggaaactaagcaaccttttctaggccagtaaaagaaagtacttattttgtagtcacagtggagagaaccttgggctgaactcgtgggccctaattctagtttggattgtgtgttcttaactgaccccctttttcaaatagggkctttgatccattgatccgcacatgagagctgatgcccaggcccccacagggagggaagacaatgctaaaatgtgggctctggggtacagaagcccaagggcacacattcaagtcctgccccagattggtcttccttaacctttctgggactcagttttctctggcaaagattagggaggaaaaaaggtctatatttttggactatagtgaagacttaataaaaataataactcaaaagtatccaaaagagtacagctattgaattatctgtacctaaggcaagttc

SEQ ID NO: 544454 - DNA, 543 bp, Homo sapiens
ggatgcagtgtcaagtgtagtcatggatgggtgggaagaccagacaaaggcatccaatgggactgacttacctaaacaaaccagaaggaagtcagaacagtgggaagatctgatagataagcagtattctgcaggcagatgaaggagcaagctttgggcccccaaatcttcaccagtgcatccacattacagaggataatgcctgagggaggggaagatcatctcaggattctggaacactgggccctccctttcttattccaaaaggctggagcagttctgcatgtaggcttctctggaaatggtctaggaaccagctcrtccaggccaggagcacctgatcattctcagagttacgtacatatgcgataagattgcagggaacagtatagttctatagacttaagtgtgaacatagtcctcatttatagtccctagtctcccatggctcatgcagcttggtctttatgtgtttctgaatttagtgctgcagaggcacaatggggtctggtttctggatcttatacagacaagcacttaggt

SEQ ID NO: 544455 - DNA, 600 bp, Homo sapiens
gcagcggacagcaagatgtacaagccgtccactgcaggaatgacgtgctgtaaaagggatgcagtgtcaagtgtagtcatggatgggtgggaagaccagacaaaggcatccaatgggactgacttacctaaacaaaccagaaggaagtcagaacagtgggaagatctgatagataagcagtattctgcaggcagatgaaggagcaagctttgggcccccaaatcttcaccagtgcatccacattacagaggataatgcctgagggaggggaagatcatctcaggattctggaacactgggccctccctttcttattccaaaaggctggagcagttctgcatgtaggcttctctggaaatggtctaggaaccagctcgtccaggccaggagcacctgatcattctcagagttacgtacatatgcgataagattgcagggaacagtatagttctatagacttaagtgtgaacatagtcctcatttatagtccctagtctcccatggctcaygcagcttggtctttatgtgtttctgaatttagtgctgcagaggcacaatggggtctggtttctggatcttatacagacaagcacttaggtc

SEQ ID NO: 544456 - DNA, 376 bp, Homo sapiens
gtgcagctgcttctccctcacccaactctctctctctagctcctgctctggccacktgacatgcctgcaccccctttgccttccaccatgattgtaagcttcctgaggcctccccagagcctgagcagatgccagcatcatgcttcctggaaagcctgcagaactgtgagccaattaaacctctttgtaaattacccagtctcatgcatttctttacagcaatgcaagaacggcttaatacatggcacgtcactctgtttgtgtgtgtatgtatacacatgtgtgtatatatatatgtgtgtgtgtgtgtgtgtgtgtgtgtatgagagagaggtggcatgagtgatgccagtgactcttactgacactggcagag

SEQ ID NO: 544457 - DNA, 376 bp, Homo sapiens
gtgcagctgcttctccctcacccaactctctctctctagctcctgctctggccacgtgacatgcctgcaccccctttgccttccaccatgattgtaagcttcctgaggcctccccagagcctgagcagatgccagcatcatgcttcctggaaagcctgcagaactgtgagccaattaaacctctttgtaaattacccagtctcatgcatttctttacagcaatgcaagaacggcttaatacatggcacgtcactctgtttgtgtgtgtatgtatacacatgtgtgtatatatrtatgtgtgtgtgtgtgtgtgtgtgtgtgtatgagagagaggtggcatgagtgatgccagtgactcttactgacactggcagag

SEQ ID NO: 544458 - DNA, 376 bp, Homo sapiens
gtgcagctgcttctccctcacccaactctctctctctagctcctgctctggccacgtgacatgcctgcaccccctttgccttccaccatgattgtaagcttcctgaggcctccccagagcctgagcagatgccagcatcatgcttcctggaaagcctgcagaactgtgagccaattaaacctctttgtaaattacccagtctcatgcatttctttacagcaatgcaagaacggcttaatacatggcacgtcactctgtttgtgtgtgtatgtatacacatgtgtgtatatatatrtgtgtgtgtgtgtgtgtgtgtgtgtgtatgagagagaggtggcatgagtgatgccagtgactcttactgacactggcagag

SEQ ID NO: 544459 - DNA, 624 bp, Homo sapiens
gacagacattgtaaggcaaaaggctaaaataaaacttgagagatgaagtgtgtttgggctgcatggctgccctttgtgagtgattcagaaaatcaatcagtcttgcaggcatagttttttcctttttagtttatatgaaataatgagcccctgccagaggttaccatgataggtaacctgcacaaataaatcaagtattgaatggtgtatctctaactactcatatgcattcaccagacacacacagacttcatttaacccgtcttgtacagcattctagacctatacctatacctaataggtataggttaacaaaatgatgtgtgacagttccagaacatttgacattaaagtttcatttgaaattaagtttaaaagattttttttttactgtcataaaggaggtccttcagtcttcctaacttccgccgctccccctttcacacacacccagttagattctgcataaggctttttkggtatgtgaactcattgactcccaagtattttctcaaagaaagtcaaagatacagagcatgcaaaatctccccattttccccaagatacatatatcataccaaaaccagacagattctgccgaagactcacttagagccattcaaa

SEQ ID NO: 544460 - DNA, 526 bp, Homo sapiens
cctgccttgtaggattgcaagttttaaatgaactgacaacatagataaggtacctagcataacgcctagattcgctccccttccttcctgctttttgttggccaggagcaaaatccagtgctggctgtttttctccttccctgctcagccttcctgactgctggtgagatggggcgtggctccaggtgcttagacttcagtgtctgcaaagggaagggatatcagggtgggtgtgaggggcacagaagtgtgggggacagtgagaggtgggccttgcctgcctactagtccatcctaacccagccatgagtgggacggaggtggtgaggaccagacctctcacttgctatctccattgatggccaggaaggcagggaggttcttcgtgccatcccttctcttccccctaccttccaccagacacttcccgattccatgctgagcagcccatggcttccagcagccaaagctttaccccctccccccaccyactctggactggactgacagatgctaggcctactta

SEQ ID NO: 544461 - DNA, 598 bp, Homo sapiens
ctgcactgcaccattcctctgtctgatcctcccaccggccatgtttcctcctggcccagagtgttcacagacactattccatcttccggattccgccattcacctggtgttctgggtaacgtcggtcatgagagcagggactttgcatgctcttccttggttatatccccagtgccmaaaagacagccttgcttgtagaaggcatcaaataatacttgttgagtgaatggacctaagattcatgctttagtgagtggagaagtagttaaaaaaaaaaaacaaaacaggatctgtagctagtcttgggaaagcattaaaatctagggtgtgtgagtgtgaaccccagccctgccacttacgaactctatggcaggagtccccaacccccgggccatggtctgtgaggagctgggctgcacagcaggaggcgagcgagtgaaactgagctccgcctcctgtcatattagtggcgacattagattctcacaggagcatgaaccctattgggaactgtgcattcaagggatccaggctgcacactccttatgagagtctaatgataaatgtaatgtgcttgaatcatcccaaagccatcccc

SEQ ID NO: 544462 - DNA, 547 bp, Homo sapiens
ctgaattaggacatgcttgttggggctgcatcctgaactcctagagggctccattcaggtgaacaggattttatacacactattttatgatgctgttgatggggatgcactacaggaaaaaatcattttctctgaaagtacagattaatttagaaaagcaccaaggtgattctatggaaatagcatatttacatacatttctcagcaactgcagaatacctactagtctcttatcagttaatcatagtaatcaaagatgcagagagagaccgtgtcattatatgacaattttcccatgamgatctgcataaaaacaagcactgctagttctttctctccaatccatcctctctatactgttaaattcatttttctaaaatacagcccaaatccaggaagttcgtggtttaaacttcaaagtcttctcttcccaacaaaggccagatcttgctctagcatttgaaagcctctaggatctggttcctatgctattttttctcagacttatctctgtctattccatttatgtacatgattcccctccccc

SEQ ID NO: 544463 - DNA, 579 bp, Homo sapiens
ttgataaatgtatcctctgcagaatggtgagtatggaagtctgactggagagaggtgaggagcatatgtgagctgaataaatgtaaggtgaggacaataaccacaggcaaattaagaagttttgttgtgaggaaaagcagaaaaatagggaagcaggttgaaagaaatctgggatcaaaggaaggctttttaaagaaaaaaaaacctcacctatttkgtgacctatgaaaatccacagtcctcatcaagatttctgaaattcctgagaggaggcagtgatgataatgatgtgtgtgtatattagtaagtgtatgttggtgggggcagcagaaagaactgtaacaatggttacttgataatggttacctctgtggtccccacatcctaaatgcactggtatcctttctgttgtccaccatgtgaacttacattctaataggggagggagggcggttctcatgaggcattcagggtgggaagactttattgaagatttgagggtaagaaggaaaactcacatagcatactgtatggcaaaacaataaaaaaaaactcacataaaatatttcttctcttaaa

SEQ ID NO: 544464 - DNA, 628 bp, Homo sapiens
gctgtgtttcatctttaaaacacacatcttctggttcgactagaattcgatgtctgtttytaattttttttttttttttgcctaattgtgtcatttacagctagacgtttacttccaaggacatgtgtgttacaccttgtcctgtgagaataaaccagtcaaatgacctattgtttcacatttccttgtctgtgaatagatatgatggcattttcaaatttttttctcactctcagctcctaagtgagaaaatgtttacggtaaaatgatgaacacatgagaaactgcttgttaaagataagtaaatgatggtagatgctgtaacagataaactccaaaacttcagtgggtccaacacaatattatttatttctcattaacagctaatggtgagagtggttgtgtgtcacagtgattcaggaatacagtcactttctatcttgtgtctctaacctcttggttttcagaatccttaccactccgtcagaagatgggaaaagaataaaaggtcaaacacgagaggtttttagggaccattatgaaagcagcacctatcacttttgtcttgcattgaattggccagaactcagtccatggccacaccgaacaataaaacagaagctatgtg

SEQ ID NO: 544465 - DNA, 618 bp, Homo sapiens
cctacttgttacctccactctttctgctttaaaaaccctagccagcttagctactgcagactccacaagaaaccagcttatcctttaattcacaagcagggcagggtgggggcctgygtgaaccaaaactgatttttttcccattaaattgaaatgccataaaaattttttgtttaaattgaggacaattttatctaaatgaattgaggacattcttatctattttagtccacaattctcccttctctacgatattatatactgaataaatcagagctgtttgtggagtcctggggctttcccagagcttggcacactgattttctctttatcttggtcattaacattcagcaaaccagcctgcagagaagcctggcttctctctagaggtcgttaatgagttaattagtgcaataaactttgcctaaaaaatatacattgtaacttttctaataaataggacaacatacagcagagctgacatagaatgcttccactccttcctagatagcccatctttcctatggtcttatttatgacctttacgttaggaattttctccagtgttctgtttcacacatgaacatttttaggcactgcagctcttctggaaagggg

SEQ ID NO: 544466 - DNA, 546 bp, Homo sapiens
accagcttatcctttaattcacaagcagggcagggtgggggcctgtgtgaaccaaaactgatttttttcccattaaattgaaatgccataaaaattttttgtttaaattgaggacaattttatctaaatgaattgaggacattcttatctattttartccacaattctcccttctctacgatattatatactgaataaatcagagctgtttgtggagtcctggggctttcccagagcttggcacactgattttctctttatcttggtcattaacattcagcaaaccagcctgcagagaagcctggcttctctctagaggtcgttaatgagttaattagtgcaataaactttgcctaaaaaatatacattgtaacttttctaataaataggacaacatacagcagagctgacatagaatgcttccactccttcctagatagcccatctttcctatggtcttatttatgacctttacgttaggaattttctccagtgttctgtttcacacatgaacatttttaggcactgcagctcttctggaaaggg

SEQ ID NO: 544467 - DNA, 636 bp, Homo sapiens
aggcatgggggtggcagaagccatggagccagcactgagaggggctggggctgaagatggtggccgagacaaaagctgatggagagagagagagtaaagccatatctatctacctatggtccctcaagtgttctttcagctacccgccaccttccaacccctccagttgaacyccagcttgggttggaacctgacagcaggggttaacagtttggtccaaaattgaaaagcattaaatattaacatatctttttagcctttagcttacatagagttttatgaaaatatgcacaaagaagggggaattatgactctgggccaaatttgtaattgaaacagtggctgaatttcaagccttctaataagccctggcttctcatgctcatgtatttgtttcacctgcaattttccctgagactcttcagtcatattaacatcacaaggaaagttaaagttttaaagctggttctctcgaggacatctatcttttgatctcccagagagatcagagctttaatctgaaaaggaatgattatgattggacatttgactattgtgcagagaaagccctccagggaaacacaccagaagtaactattgctttatgggtaagcatgaggagtgtcatggctaaac

SEQ ID NO: 544468 - DNA, 636 bp, Homo sapiens
aggcatgggggtggcagaagccatggagccagcactgagaggggctggggctgaagatggtggccgagacaaaagctgatggagagagagagagtaaagccatatctatctacctatggtccctcaagtgttctttcagctacccgccaccttccaacccctccagttgaaccccagcttgggttggaacctgacagcaggkgttaacagtttggtccaaaattgaaaagcattaaatattaacatatctttttagcctttagcttacatagagttttatgaaaatatgcacaaagaagggggaattatgactctgggccaaatttgtaattgaaacagtggctgaatttcaagccttctaataagccctggcttctcatgctcatgtatttgtttcacctgcaattttccctgagactcttcagtcatattaacatcacaaggaaagttaaagttttaaagctggttctctcgaggacatctatcttttgatctcccagagagatcagagctttaatctgaaaaggaatgattatgattggacatttgactattgtgcagagaaagccctccagggaaacacaccagaagtaactattgctttatgggtaagcatgaggagtgtcatggctaaac

SEQ ID NO: 544469 - DNA, 647 bp, Homo sapiens
cattgacagtgtagtttgagtacctaatgtatatatwaaaaaaatgccctactggtaggcaatacaggttttaagattcatggaaaagattgtaaccttgcctccatgccattcaaatattttaatgttagagggatttaccttttactcacaataattaattcattaatttatttatccatctgaaaatatgtatttagccctcactaactgtaaaacatcttgccaagcactgaattaaatttgtctatgctttccagatggactatctctggtgctttaattttgcaaagagtttctatcatcacccttgttacccatttcatagggcctgccttaaaccagtacattaaatgttcatttcatgcttgcctcacagaagcccagataaacgtttggaattgcaatggtgtaattatctttgattagtgactgaactaactaacacccctccatgcccatcctttattttaaacaacagaaaaataagtagatgttgatattaggcactaatgtagagcattcatgcataactacaattctactcatgaatatgcataggttatacgttatttgttattctcaagagtgtggaatgtacctcaaccagtgctacactcatttagggttagaaaatagacggggat

SEQ ID NO: 544470 - DNA, 647 bp, Homo sapiens
cattgacagtgtagtttgagtacctaatgtatatatawaaaaaatgccctactggtaggcaatacaggttttaagattcatggaaaagattgtaaccttgcctccatgccattcaaatattttaatgttagagggatttaccttttactcacaataattaattcattaatttatttatccatctgaaaatatgtatttagccctcactaactgtaaaacatcttgccaagcactgaattaaatttgtctatgctttccagatggactatctctggtgctttaattttgcaaagagtttctatcatcacccttgttacccatttcatagggcctgccttaaaccagtacattaaatgttcatttcatgcttgcctcacagaagcccagataaacgtttggaattgcaatggtgtaattatctttgattagtgactgaactaactaacacccctccatgcccatcctttattttaaacaacagaaaaataagtagatgttgatattaggcactaatgtagagcattcatgcataactacaattctactcatgaatatgcataggttatacgttatttgttattctcaagagtgtggaatgtacctcaaccagtgctacactcatttagggttagaaaatagacggggat

SEQ ID NO: 544471 - DNA, 647 bp, Homo sapiens
cattgacagtgtagtttgagtacctaatgtatatataaaaaaaatgccctactggtaggcaatacaggttttaagattcatggaaaagattgtaaccttgcctccatgccattcaaatattttaatgttagagggatttaccttttactcacaataattaattcattaatttatttatccatctgaaaatatgtatttagccctcactaactrtaaaacatcttgccaagcactgaattaaatttgtctatgctttccagatggactatctctggtgctttaattttgcaaagagtttctatcatcacccttgttacccatttcatagggcctgccttaaaccagtacattaaatgttcatttcatgcttgcctcacagaagcccagataaacgtttggaattgcaatggtgtaattatctttgattagtgactgaactaactaacacccctccatgcccatcctttattttaaacaacagaaaaataagtagatgttgatattaggcactaatgtagagcattcatgcataactacaattctactcatgaatatgcataggttatacgttatttgttattctcaagagtgtggaatgtacctcaaccagtgctacactcatttagggttagaaaatagacggggat

SEQ ID NO: 544472 - DNA, 647 bp, Homo sapiens
cattgacagtgtagtttgagtacctaatgtatatataaaaaaaatgccctactggtaggcaatacaggttttaagattcatggaaaagattgtaaccttgcctccatgccattcaaatattttaatgttagagggatttaccttttactcacaataattaattcattaatttatttatccatctgaaaatatgtatttagccctcactaactgtaaaacatcttgccaagcactgaattaaatttgtctatgctttccagatggactatctctggtgctttaattttgcaaagagtttctatcatcacccttgttacmcatttcatagggcctgccttaaaccagtacattaaatgttcatttcatgcttgcctcacagaagcccagataaacgtttggaattgcaatggtgtaattatctttgattagtgactgaactaactaacacccctccatgcccatcctttattttaaacaacagaaaaataagtagatgttgatattaggcactaatgtagagcattcatgcataactacaattctactcatgaatatgcataggttatacgttatttgttattctcaagagtgtggaatgtacctcaaccagtgctacactcatttagggttagaaaatagacggggat

SEQ ID NO: 544473 - DNA, 536 bp, Homo sapiens
ctccctggcatgctttctcccagtttctggtgttctgatttagtttccagaaagaatacagacgctttaactttgaatctggatcattaatttcactaagtcatttggacagcagggcacttaaagcttcctcagcaatttgaatgaaagaaaactttgaaaatgcctcagtcgaatgcttcttattytaaactgaaagctttcattagaaatagactacactgttcatggaagatttatgagtatatgactgaatcattaatgacagatatgatgatgatatgtgcagctttccaaaaggtacaagtgaaaagcatcgtttttattttcaatgtgccatgcatatatcatcaatttaattaaaattaaaaaacatgcttgtgaaggaattgctatagtattcaagttgggtgttcctatgaatacttagaggaattaaaagttataaaaaataaagcagtgactgaaaactatttgggttatcatttttaaaaataattaaaataaaataatttttctattaaaaataaatatta

SEQ ID NO: 544474 - DNA, 505 bp, Homo sapiens
atcattaatttcactaagtcatttggacagcagggcacttaaagcttcctcagcaatttgaatgaaagaaaactttgaaaatgcctcagtcgaatgcttcttattctaaactgaaagctttcattagaaatagactacactgttcatggaagatttatgagtatatgaytgaatcattaatgacagatatgatgatgatatgtgcagctttccaaaaggtacaagtgaaaagcatcgtttttattttcaatgtgccatgcatatatcatcaatttaattaaaattaaaaaacatgcttgtgaaggaattgctatagtattcaagttgggtgttcctatgaatacttagaggaattaaaagttataaaaaataaagcagtgactgaaaactatttgggttatcatttttaaaaataattaaaataaaataatttttctattaaaaataaatattatttcattgtttaaaatatttagaaaatactgattgacagaaaaagaagaaa

SEQ ID NO: 544475 - DNA, 505 bp, Homo sapiens
atcattaatttcactaagtcatttggacagcagggcacttaaagcttcctcagcaatttgaatgaaagaaaactttgaaaatgcctcagtcgaatgcttcttattctaaactgaaagctttcattagaaatagactacactgttcatggaagatttatgagtatatgactgaatcattaatgacagatatgatgatgatatgtgcagctttccaaaakgtacaagtgaaaagcatcgtttttattttcaatgtgccatgcatatatcatcaatttaattaaaattaaaaaacatgcttgtgaaggaattgctatagtattcaagttgggtgttcctatgaatacttagaggaattaaaagttataaaaaataaagcagtgactgaaaactatttgggttatcatttttaaaaataattaaaataaaataatttttctattaaaaataaatattatttcattgtttaaaatatttagaaaatactgattgacagaaaaagaagaaa

SEQ ID NO: 544476 - DNA, 609 bp, Homo sapiens
gtgaaaccttaatatatatttacagggctactgttaaatatatttaaatattttatatcaaaatgttgaaatttggcatgcttatgcatattataaaatgaataaatgaatgaatgagcctatgagtactttgagattatttaaaataatcttaccaatgtatacctaatggtggtgggggtttttttgttttttgttgttgttgttgttktttgttcttttttttttttctggagtgcagtggtatgatctcagcaacctctggctcccgggttcaagtgattttcctgcctcagcctcccgagtggctgggactacaggcgtgcaccaccatgcctggctaatttttgtatttttagtagaggcagtgttttgccatgttggccaggctggtctcaaactcctgacctcaggtgatccacctgcccgggactccaaaagtgctgaggttacaggcatgagtcactgcatctggcagtgtttttatttcagagctaattaatttattactcacattaattctaattatacttcaatttgctagagcataggatcactattgtttagtgctaatggtcttttaaaattactagaaaacaacaacataat

SEQ ID NO: 544477 - DNA, 445 bp, Homo sapiens
acacttaaaaatactttttgataaatgatcgaaaatatttgaataaaatgttttatgggtttgatgtttgctatagtgattgattcctttatagtttctgtctgctgtcacaaattacttttagtttttggatggactagaagatattttaggaactctatgtacatcagcagaaaagagatgacatattaaaactgggtaaatttgaagatattttaataagaaaggatttacacagtagtgagacgagtatagagaaatcacaagagatagtaatatcagtgagagtggacgggagatcattgtcttccctcccgtcagtttgctaactgtgatcttcatttactaaacccmatcagaagacagagaaaagagagcctgttgttacagactgtacagacaatttcctgggcaaaaagaaagactgagagaatggattttaagg

SEQ ID NO: 544478 - DNA, 722 bp, Homo sapiens
ctgacctatgcctatttggggtttaagttgaggaacattttagttaatttaaatgtcttatattaatctgygtttgtgtgcatagtgtgtctgcgttcatgtacgtgtttatgcacattcatttattctttcttccaagttgcctagaagttctaatatattcttcagcatgctgtaaataaatctatgtgaggaagagaaagagattatgtttggaaattaggagatgtggtcttcatatttatctattttctctctcttggattaattttcttaaagtataagaaaactggatatctagggccttttcagactcaaatatatcataattctaagtttaaaaatgataaaatttatttcaagaagaaatcgtcgttacattatgaatgtttctgtcttccgtatctagatctgagttctgaagtcttgcccaaacgtgattgtggacattttccttttcagatgttaactccagaaatgtgttcatttgtgcctcatcaccaaaagtcccaaccgctgggatcacatttgatgaaggggaactttgttacttaattgaatgagttaaattctaatatcttccaaaacactctcacagacatacccagaaataatgttttaccagctatatgggcatttttaaccccagtcatgttgacagataaaattaaccatcaaagggatcctgaaaacacatatttaaaatgtatatggaacacacc

SEQ ID NO: 544479 - DNA, 594 bp, Homo sapiens
catctggaaaaccagggttcttgataaacacayggatccccaagcccaaagccagactaaaagaaaaatcagtatctaggtggtggggtaagacccacagacttatattttctaccaagcatctcaggaaattctgaggaacaaccaggtctgggaattgttgggttagatgtcctgggtgccatgttagagtagcctagtgacatttagaccactagttgatgctgatattgctgcaaaagcactggtgtagggagcagaagatgttggttcacacctggcagccaactgtgtgttcttaggtgaggcattcaccctgtctggcctgggtattagtgggggaatttaaatgggtgcaagagcacattggagatgtccttgagatgaagaggaccttcctcctggcccctcagcctcctctacctatatggggatgaagttcaagaagcaaaaggcacctggatacaggtccagcaaatgcatcacataccaagcctcctgaaagagtggaaggacccagaccccgatcccagttccctgcccctctgatagtcacctaggtctcccggaaatggcaccgaggcgaagctctaa

SEQ ID NO: 544480 - DNA, 594 bp, Homo sapiens
catctggaaaaccagggttcttgataaacacatggatccccaagcccaaagccagactaaaagaaaaatcagtatctaggtggtggggtaagacccacagacttatattttctaccaagcatctcaggaaattctgaggaacaaccaggtctgggaattgttgggttagatgtcctgggtgccatgttagagtagcctagtgacatttagaccamtagttgatgctgatattgctgcaaaagcactggtgtagggagcagaagatgttggttcacacctggcagccaactgtgtgttcttaggtgaggcattcaccctgtctggcctgggtattagtgggggaatttaaatgggtgcaagagcacattggagatgtccttgagatgaagaggaccttcctcctggcccctcagcctcctctacctatatggggatgaagttcaagaagcaaaaggcacctggatacaggtccagcaaatgcatcacataccaagcctcctgaaagagtggaaggacccagaccccgatcccagttccctgcccctctgatagtcacctaggtctcccggaaatggcaccgaggcgaagctctaa

SEQ ID NO: 544481 - DNA, 594 bp, Homo sapiens
catctggaaaaccagggttcttgataaacacatggatccccaagcccaaagccagactaaaagaaaaatcagtatctaggtggtggggtaagacccacagacttatattttctaccaagcatctcaggaaattctgaggaacaaccaggtctgggaattgttgggttagatgtcctgggtgccatgttagagtagcctagtgacatttagaccactagttgatgctgatattgctgcaaaagcactggtgtagggagcagaagatgttggttcacacctggcagccaactgtgtgttcttaggtgaggcattcaccctgtctggcctgggtattagtgggggaatttaaatgggtgcaagagcacattggagatgtccttgagatgaagaggaccttcctcctggcccytcagcctcctctacctatatggggatgaagttcaagaagcaaaaggcacctggatacaggtccagcaaatgcatcacataccaagcctcctgaaagagtggaaggacccagaccccgatcccagttccctgcccctctgatagtcacctaggtctcccggaaatggcaccgaggcgaagctctaa

SEQ ID NO: 544482 - DNA, 594 bp, Homo sapiens
catctggaaaaccagggttcttgataaacacatggatccccaagcccaaagccagactaaaagaaaaatcagtatctaggtggtggggtaagacccacagacttatattttctaccaagcatctcaggaaattctgaggaacaaccaggtctgggaattgttgggttagatgtcctgggtgccatgttagagtagcctagtgacatttagaccactagttgatgctgatattgctgcaaaagcactggtgtagggagcagaagatgttggttcacacctggcagccaactgtgtgttcttaggtgaggcattcaccctgtctggcctgggtattagtgggggaatttaaatgggtgcaagagcacattggagatgtccttgagatgaagaggaccttcctcctggcccctcagcctcctctacctatatggggatgaagttcaagaagcaamaggcacctggatacaggtccagcaaatgcatcacataccaagcctcctgaaagagtggaaggacccagaccccgatcccagttccctgcccctctgatagtcacctaggtctcccggaaatggcaccgaggcgaagctctaa

SEQ ID NO: 544483 - DNA, 644 bp, Homo sapiens
ctcccataacccccagagcaaaggagttgggcagtagggtcttgtgaccgtggcttgagtgcgtcagcatctcacagggtcaggtttgggaatagtccccattgtggtcttgtcatagaggacagattcccaaggaggaacaaaggggcctgaaaatcaggccagggagaaaaagaccattttggggttatttagcgcttattaattggtcacctcgttagcagcccatctgcagtctgactccagcaagtgagtgggtgaaagggaggggstgccctgaccaaaactggcttcacagattcaataataaggacagagcaattaccggaacttctagagccaattcccgttaggagcatgccaggccgggctttgtcctacggagaagaggaaaaggtcagtgtgctctgtaggaggagaaaaaaagagcccttcacagggaaagagcctgcctgagggagggagacaaagaaaaggagggctctgtggaggtgaaaaactaaagaaagaatgacatttggaagttcctcagaatgaggagaggagaataataaaataaaaattacaagggagaaggcgccagtggacaaacaaggagaggccaagggaaagagcgctggaggatcactactgccctggaaagc

SEQ ID NO: 544484 - DNA, 737 bp, Homo sapiens
tggggtctttgcatccctcatactgtcatgcacagtgatattcattcattcattcattcattcattcattcacttattcctaggtcttggaaaaattaaaaagacatggcctaatggaaagtgatcattctgcagacttcctgaacccctcctcactgctccaccctgctaggtaataaatgctaaagaagagcgcagcagcttccatctatcaagttcttacaatatacttctcaccatgatcctaagaggtgtgcactctcattatctgcactttatagttaaggaaactgaggcacagggaggttagggaacttgtctaaggtcacacagtaagtggtggaatccagattcaaacctacacagtctgacttcagagctcaggccctcagcctccgcattaaacagtcttttgacccaaaggctaaaagaagagagagaagggagggctcactttttccaaggaggtttgggaagggttttctacacgaggagctgttatgctagagctctaatacatgaactgttattcaaaacttcgagtttgaagttttcttctacttctgaccttgtctctgctttttccaagttccttttctcctcctrttaggttgtatgtcttattggcagaggctttctggaaatgtctggtgatccttagttgtccatagctctggagtaggaagacattctgcactctgcacatagacgtgactagggaccttacctctggccag

SEQ ID NO: 544485 - DNA, 493 bp, Homo sapiens
tgggtgggtaatgagcaagcgtacccttgcrgccatcaggcattcttgagggtcgcacctgccgtggcaccctggctggctccctccttaggacacggcacctcccagcaggacaattccccagaaagagtcagcagtgagctcggccctttagaagcagcgagttctcaagatgaatgggatccatcttaccaagagaaaaaccaaaactctgacacaggaagagtccttactcttactttgactctgcctctgtctctgggctcctgaggaacagagctgggaactaatgatgtgtctcccaacctaagtgcagcactttcacaggccaccaatgctcaggccggaaagcagatttcaccacagatcctgcctgccacactgctctcaaagtcattcttaggaatcctgcagaccccacgcccaggtggggccaccgccgctgactggggcagatactatcacctccatgctgggctcgcatcccgtgaag

SEQ ID NO: 544486 - DNA, 461 bp, Homo sapiens
agctgggcagcaccctcgttagcaccaggaggcaaccctgctaattaccaaacccaaactcgggatttgcatttttatgaaatgctcgcacaggaggcaaatattttgccttaaaaaaaaaaaaaaaaaagtcaagatggatgagggagaaaaactcataccagtacatactaattcaatctaatcttggtcatttcagtttctataagagagtgctttcataaagctacaaagctaacatccataactctccagtttccccagacaggatatctctgcattaagtttcccatttatcttcagagatggcaaatcatccrtttataatgggatctaataaagcaagctcccgttgcagtcccagccgcaggaatgcacctcagatccagagacactgcttggggcctgtgatggctttaccttctagatgcctgagtgtgcggctggggcatcagcacatg

SEQ ID NO: 544487 - DNA, 450 bp, Homo sapiens
gagctgggctgggctcgagacttgctctttaaggtaggcagagcttgctgtagggataacaatttggaaaggaatagggtttggcaggctgatgcagaggcttagctgagtaggtggggatgatgttccactatcacaggtcagggtgcctgggagcagcccctgagatggatggagttttgccagcagggtatttaataagaagtggcatggggcccacagcaatggtcaagcagggtaagaagtgagcctgggcagatcgaggaatccagcttttatgcagcccaggcagccttggcaccycacaaggagttctggagccgataagggcctttggaaaccatgctgaatccagccaagatggccaggccttcctattcccacatcaatctgtcagtggatgtgggccaccccagaagggcacaaccccaggcatgaggctgtctgcag

SEQ ID NO: 544488 - DNA, 525 bp, Homo sapiens
tcaacatgttcttcattgacaggagatctgggctgggcwgcatattacagtgtccgccacacctgctaaacaatgtgtgtccctctcccctccacccaaacatgtagttttatcatccgtacctgtgtcctatggtgccaggccttgggggttggcagacattgagcccagcttgccgttcactcagttctatgccctgaactttctctggacagatgtcataataaagcctgtagaccaggcctgattggcccctggctcaacatctgtgggaagcagaaggaccttgggagtgaaggggttgggggcccagccctagctagagctggcacaggctgaggggatgcaaagatcaggcagagccacgtgaacaaaccttaatggagggttctaggttcagaagctacagctctgctctgatggagcacagaagtcatggggcttatcccaaaagggacttagcggactgctgtcaaagcacctcctgacctggtagggaggcaggtttggcagcctctgatgtct

SEQ ID NO: 544489 - DNA, 622 bp, Homo sapiens
caatggagcactgggaggaagtcctgacccaagtggaaagctctaggtccaayactgtgcactgggatggggaccaggcacttggcctgctgggtctgaaatgacatagagtcagggccttccagttcagcccaggtggacacaggactggaggccagcctgacaggcactggccaccgagaatagatgctgggtctaagtcccaccagaacacagatagaagaaaaatgttgggttggtgagcagtaaagaggaaactggctatgtgtctgggtctcatgcaagaagccaagagtctgaaagccaggagaaggcgtaactcatcttgctgaactgtcacagctctttggataaatgtctatcacagtgctcagcaggtggtttcactttttcatagaacatgaacatgatgcctctggagccagagtacctgggttccaatccccagtctgccacttagttcactgtgaccttggagaagttattctctatgcctgaatttccttgtctttaaaatgcatataacaatagtacttacttcatagggttattgtgagggttaaatgagataatacatgcaaagcatttaaaacagtgtctggcaataagaaactctcagtgt

SEQ ID NO: 544490 - DNA, 622 bp, Homo sapiens
caatggagcactgggaggaagtcctgacccaagtggaaagctctaggtccaatactgtgcactgggatggggaccaggcacttggcctgctgggtctgaaatgacatagagtcagggccttccagttcagcccaggtggacacaggactggaggccagcctgacaggcactggccaccgagaatagatgctgggtctaagtcccaccagaacacagatagaagaaaaatgttgggttggtgagcagtaaagaggaaactggctatgtgtctgggtctcatgcaagaagccaagagtctgaaagccaggagaaggcgtaactcatcttgctgaactgtcacagctctttggataaatgtctatcacagtgctcagcaggtggtttcactttttcatagaacatgaacatgatgcctctggagccagagtacctrggttccaatccccagtctgccacttagttcactgtgaccttggagaagttattctctatgcctgaatttccttgtctttaaaatgcatataacaatagtacttacttcatagggttattgtgagggttaaatgagataatacatgcaaagcatttaaaacagtgtctggcaataagaaactctcagtgt

SEQ ID NO: 544491 - DNA, 607 bp, Homo sapiens
cgaacctatgatctgtccatctggagccttcttcccagcgggagctgagcactgtgcaggccaagatgctcctgctggggtrgagggagagcccctaccctgagctcctgaccagagctggccctccacacaccctctgtcaactgcccctctcagcagaacacaccacagcccaagaaggagcctcgagtgtcagggaggctccaagctggtatcaagaggattttcataaacacaactgtctgtgtctgggcagccatgtggaaagttgcaatataacccactgatgtcatgtggcaggggaaacaagatttccagaggcagcgtgctgctctcccaacctccaaatggagcagaatcccagacaggcttctgaaagaaagggaagaaaaaacccaagcaacaaattgcaaaacaaaaccttgtgttccaatgtcttgaggggaagggagggaagaagatggggaagatctggagtctccaggagtatgctgggctggggcccctggatctccctccagggctccattagaaaggcatgggcagtctggggtggaggagctggtgtgcactcaccttctttgccatctaatacctcagatccctg

SEQ ID NO: 544492 - DNA, 584 bp, Homo sapiens
agggttggtgataaaccccagggacttagggtactgccatatcattgaagtttttaaggagctaatagcctagggatagcccctccccaggacaagttattactccgtgtacctcctatcattaagaaataagcataacagttatttggcttctttgtgttttggaggcagcatattccagtcttagaaattctgcctcaatccctttatcaggtgacactggaaggctccttacatggacagcgcaagctaggtcaacccgctaggcaagwcccttagaccagcagaagcgctagctaaatgtgaggggaatctagagtgggtggaagtagaagatcatgaacagcagtcatggccttgggcacatgcagcagggctgtggttcaatctattaaccttccttttgcaccaacctaatatgtctccaaggaaattgtgatctttcagaattctgaggttgctgtatctgggtggagtgaacttagtgaaagaagaaagtggattggagctgtgcaaagggtgaactgcagtagacactattggtgcccaacccagatgctctttagcccctgcagatattggcc

SEQ ID NO: 544493 - DNA, 567 bp, Homo sapiens
tctgctcctacctgcaccagaccctgagctaggctctgggctccagcaccctgggcccctcagcccatccagcctctcctttccagccctggttgagtgaaaagtgtgcgagagaattttcttagaaacaaagaaggctgggagkccaggttagtggaagagtggggtagggaggaggtctacagcccctcctgggcagcgaggggaacagagctgagcaagctctcaattctcagccctgcaggaggccaaaggagaagcagctcccagcatggcggggctgccgggttagtaacaagcccctgacacaaggggtttgcacaggcgcacaaatgaaagaaaatcggaggagatgaaaccatacaaatttcaggtaatagaaagagaggaaagagatgtgcgtgtggcctgggtctcggctcagaaaggtcgattccaagaagaggctgcccaactttatattacttttcagaaagccagtgagctgaaaaataactctcaccttttttttatattattattcgttttttttcagagctgcttcttcacattgttttgtgcatctca

SEQ ID NO: 544494 - DNA, 465 bp, Homo sapiens
agccctggttgagtgaaaagtgtgcgagagaattttcttagaaacaaagaaggctgggagtccaggttagtggaagagtggggtagggaggaggtctacagcccctcctgggcagcgaggggaacagagctgagcaagctctcaattctsagccctgcaggaggccaaaggagaagcagctcccagcatggcggggctgccgggttagtaacaagcccctgacacaaggggtttgcacaggcgcacaaatgaaagaaaatcggaggagatgaaaccatacaaatttcaggtaatagaaagagaggaaagagatgtgcgtgtggcctgggtctcggctcagaaaggtcgattccaagaagaggctgcccaactttatattacttttcagaaagccagtgagctgaaaaataactctcaccttttttttatattattattcgttttttttcagagctgcttcttcac

SEQ ID NO: 544495 - DNA, 567 bp, Homo sapiens
tctgctcctacctgcaccagaccctgagctaggctctgggctccagcaccctgggcccctcagcccatccagcctctcctttccagccctggttgagtgaaaagtgtgcgagagaattttcttagaaacaaagaaggctgggagtccaggttagtggaagagtggggtagggaggaggtctacagcccctcctgggcagcgaggggaacagagctgagcaagctctcaattctcagccctgcaggaggccaaaggagaagcagctcccagcatggcggggctgccgggttagtaacaagcccctgacacaaggggtttgcacaggcgcacaaatgaaagaaaatcggaggagatgaaaccatacaaatytcaggtaatagaaagagaggaaagagatgtgcgtgtggcctgggtctcggctcagaaaggtcgattccaagaagaggctgcccaactttatattacttttcagaaagccagtgagctgaaaaataactctcaccttttttttatattattattcgttttttttcagagctgcttcttcacattgttttgtgcatctca

SEQ ID NO: 544496 - DNA, 639 bp, Homo sapiens
caaagaaaatgaacaacatgagagtaattggatgttgggttcaaggagaaagctcttttgaagctttttcaatctattcttagtgtgtgcatcttcctgggtgataaggggacaaggggaagaggctattcaagttgtagcagacaaaaggaaaaatagccacaaattctttttctctagcttctgatgcagtggtggagttcagaagtcaatttctccactccttgacttgagttggccatcattaacgcaaaagacagagcaggggcttgaaaagctcgtgtgcttttggtgttgccctcttgctggttttggaacttggccacccggctagcttgctacattatgagagtcacatgacccagccaccccattagcttcagcctgcaccagacgtgtgagtrgagccacctgggcaggccagtcagccccacagacaaccctcctgtacgtcagtgagcccagagatcagcctagcccagcccagatggaattacccagaagaatcatgatctaaataactgggggttgttttaagccagtaagttttggggtagcttactacacagccaacactgactgataaccctggttgggaaggcaatgtgtttagagacatgaaaattagaaccagcaaat

SEQ ID NO: 544497 - DNA, 554 bp, Homo sapiens
ggttgcctgtgtgttgagatggtgagtctcttggcccttcagatgcctgggtgggtcaggacagggtctcctctaactgcaagtagcctgtgctattgacttcagcatgcaaatattaccattttccctgtgtgacacaatgtaaaaaaggaaaagttgagaagccctagaaatcattcctgttatgctaatattctgagtcatctcctagcttcraaactggcctcttccaagaagtctgcctgcccccacaacatcgttcaatgatatttcttcatcacagtcttctcagcagttatgagctgcattcacttggaatgaatgaatgaatttgtacttcttaatatgtgacctgtgggttatttcctgtaacaacaatgacaataacaacaactcctctcacttattgagcacgtgggtgccagacagctcatgaagtactttgctattcactctcacaatagtgctgtgagggacgcgtgcaccgttgtgtatgcacacatgggaaacctgagacttcaatggttgaacacaattgcccaaataggaagcag

SEQ ID NO: 544498 - DNA, 554 bp, Homo sapiens
ggttgcctgtgtgttgagatggtgagtctcttggcccttcagatgcctgggtgggtcaggacagggtctcctctaactgcaagtagcctgtgctattgacttcagcatgcaaatattaccattttccctgtgtgacacaatgtaaaaaaggaaaagttgagaagccctagaaatcattcctgttatgctaatattctgagtcatctcctagcttcgaaactggcctcttccaagaagtctgcctgcccccacaacatcgttcaatgatatttcttcatcacagtcttctcagcagttatgagctgcattcacttggaatgaatgaatgaatttgtacttcttaatatgtgacctgtgggttatttcctgtaacaacaatgacaataacaacaactcctctcacttattgagcacgtgggtgccagacagctcatgaagtactttgctattcactctcacaatagtgctgtgagggacgcgtgcaccrttgtgtatgcacacatgggaaacctgagacttcaatggttgaacacaattgcccaaataggaagcag

SEQ ID NO: 544499 - DNA, 594 bp, Homo sapiens
ggactacaggctggtgccaccacactcagctgattttttatatttttagtagagatggggtttcaccatattgcccaggctggtcttgaactcctaggcttaagcaatctgcttgcctcagcctcctaaagtgctgggattataggcatgagtcactgcgtccagcctcagtatttctttttcacttatataacccagcaggctgaaaatgatgtgtctcccactacttttttgtttatatcaacctctccttctattgctatttcatctattttgatcctctgttattcaatatataaaagtacatcctcactatggcttacatatttttatagataaaagtgtcccctttttgtcccatctaatgcttttagccatattttaaaatatttcttacatcactactaccatcccctgctttatttcatttgcatttagccarcatagctttgtctgtgcttccaaatgtaaacttgttgtgtcatttaacttttctatttaaaatttggaatgagtaatatatggttcaaaaatgttatagtataggaaaaaaagatattcagagaaatgtctccctccatcccccatcattca

SEQ ID NO: 544500 - DNA, 498 bp, Homo sapiens
atccctggggtctgctcagtggatgggcaactcacgtgccctttcacagtggccttcatgagtcaacagcccaggaagtgatgtcaggttagggaggtgtgaagggggcagggaataytggagggtaataggagatattttgagggcaggcagatcccctcacgtcactgctggacaatggtctggggccaggagtggaaaattatggtcttacttgggctgaaaatagcatgaggcatcagggcaggaacttcacccacaaggcaagtggcctgggcactgagcagcaaggtgggacgtgcataccaaggggccaggcagtccaactgggttccagaggtgcccctggttcacccagggtctccagtatccacccccacctgtgcctgccacaggattagatggtgaacgagcccctcctgtgtccttgtggagtggctcgggcctgtgggaaaggctcaagggtggtttgtaacaggcaatcattaagaaagctca

SEQ ID NO: 544501 - DNA, 433 bp, Homo sapiens
ctctggcacagttcagccatcaccaattctgggactgcaaattcagtttcttcatctggaaaattgaactggtaataccaatacctcttttcccggtttactagacagaagacaatgcagtgagtcacaaacatgcaactgtaagattatcctcccacccatgctcactgcacagtgacgtgatgattttcctttcccatccataaactgcgcatttggaaaactccaaacttttgagtcacttttgggtaacaaagtcaggtttaagatttccatcgcctgcttaattgaatgctcacctgtcctcttcccccatgctgtgaggaccttcatcactcctcttctgggtccctctctcctctaggtgttggggcaggktggggaggaaagggaccaatgtgtctttcctggtgatgctacagccctctcttgc

SEQ ID NO: 544502 - DNA, 500 bp, Homo sapiens
gacgacacatacggtggtgccatgagaggagcaggtcccttggccctggatttcctgcaacagcccagccatggcaagagtccccctcctacaagccagggctgggtggctgggcactcaccaggaagccaggtcgacacccagaggctctcctcagacctggggagggagaggccacataaagccccagaagtctgagggaggtccctttccctcrctccagcacccaggcctctcattcaggagctacaatgacagtgacaaggtaccagggcagagggtcaaggagttgttccacggggcccaggctgctcaccctcctaccagaaactcccgctactcatcttggaccaggaaagactcaggcctaggagatggggtgatggggtggaggaactcctctgctccagaaccaactatggcactccgtggagcaaagcctccccttctactccatgcctactcccgcctggccactcatttcccaaagacccactggc

SEQ ID NO: 544503 - DNA, 644 bp, Homo sapiens
ctggcagatggcaggttcacagcatcacacccattacgtgggctgcaaaggtcacctagggtggtgcatgrcatcatacccactggcagtgaggcctgtgagcagcgtcactgtggggctgtgcccagatactgccctctagccggaagagggcttccagggtggaaaggcccagttcaccctgccagacctggcaggggcccgccccatcctggatctgattctcctagagaggcagccaggggtggaactcagagttctcctccccactgggactgctgttggctgccctgcccaccaggaagcagtgggaggaggctagggaggtcttgccaaggagtatccctagaggataggggtctcctctgggcaccactagtttggaccctgtttataatggactaggtcaccacatcatgcatggtggtcagcatactccccagcttgaatgcacttagggaaagggactgggtcatcctgagccccagggcccatttagggcttggcacaaaatagatgcataaaagctactcccatctatgccctgttttgagtcttcccagcacggacccataaaggccctagcaagggacctccttccaacagaaacaaagaggccttagagtgggtagaccttagttctg

SEQ ID NO: 544504 - DNA, 610 bp, Homo sapiens
ctgggtagaggatgagtcagcattggtgtaaaggactggagcttcagggttctcgggattcgagtcctggccctgctgcttgccagctctgtgctgtggcaagttacttcctctccccaggtctctcrgtttcctcatctgctgcctctccagacttctgccagaacattgcacgcgacagtttcaggcacagaactgactggcagcaggggctgctccacgagtgggaatttgctccagcacttcacggactgcaagcgaggcacttgctaactcttgggtgagttttctgggtccatgcctggaagggcttgcgcccctcagctcccctaggagcttcctgagtaactgcagtccacttgcagccaccgaggctcatcacaggcaagagtggcagtagggcaggcactggggtcctcctccttcctccgcctggctatgcctggagcctgcagactgcacagcatggagggacgaggcaccgcaggacggggtcagtgggggcggggaggagatggacacattggtgctgcgccgtgccttgctggagaagtggaatagctcagtcaggattcggagccacaaaggtcttggttggagtgcaaatggc

SEQ ID NO: 544505 - DNA, 607 bp, Homo sapiens
tgtagggttgccttttccaatgcagccttccctcactcccactgagagtaactgctccttttctgcacatcctcatgccccagaatcaatggcctgactcttctgcttctccaaccatactcagacatcctcctccaagtgcccaggccgtggtcctgcacatggatccttaatcagctttgttcaatgtattttaatatttattttaatttgcttgcattatctytctttctattaatattcattatttttctttaccttcttttataatgttggttttttatcccattgatacatgtccaaattgtaaaaaatttaggaaagaataaaaatcaccccaaattgttatagataatcatattaacattttggtagattattattttttgggtctggtttctgtagatgtatgcattttacagagttgagattacattgtatgaatagttctaaagactgcttttaaaaatctaacattataccatggatattttccccatgtcattaaaaagtacatgtgccacacccactgggaaggctctgataaagaagacagataataacaaaatgtggcgaatcggaaccttcatacaatgctggtgggaat

SEQ ID NO: 544506 - DNA, 594 bp, Homo sapiens
ggactacaggctggtgccaccacactcagctrattttttatatttttagtagagatggggtttcaccatattgcccaggctggtcttgaactcctaggcttaagcaatctgcttgcctcagcctcctaaagtgctgggattataggcatgagtcactgcgtccagcctcagtatttctttttcacttatataacccagcaggctgaaaatgatgtgtctcccactacttttttgtttatatcaacctctccttctattgctatttcatctattttgatcctctgttattcaatatataaaagtacatcctcactatggcttacatatttttatagataaaagtgtcccctttttgtcccatctaatgcttttagccatattttaaaatatttcttacatcactactaccatcccctgctttatttcatttgcatttagccagcatagctttgtctgtgcttccaaatgtaaacttgttgtgtcatttaacttttctatttaaaatttggaatgagtaatatatggttcaaaaatgttatagtataggaaaaaaagatattcagagaaatgtctccctccatcccccatcattca

SEQ ID NO: 544507 - DNA, 609 bp, Homo sapiens
ttcccaagctggaagtgcagtacaaggctggggggatgtgggagaggagatgggggcactgcaggaatagcttgggtacggggggcgtgggtgcacaygggaaatgcctctgggccactgcttactgagtgcaccttgccctggtggtctcagattgacaaggccggtgggctggtagctccccactgatctactctagagactatgacaaggtgagggatggtcagccttttcaccctgctgcacccaggtgcacaccctgtctcctcctccttagaaaatgccttgactcaacaggctaaaatggagaatatcactttccacaagtggttctcatttctgagaagggcccccaccatccttccaggtttcaaacctctgatacagcctggacaacctccctcttccccaccctgctggaagcccaccactcaccaagccctgttagtccaaccagtgaaattcctcggacatgcactacgcggtccccacactgcagcccgaggcctgtgcttccacagtccacagcagcagcctcctcactggcctccgtgcctccacccctgccccgtctgtccacctttcacactgcagtcatgtagtttcctg

SEQ ID NO: 544508 - DNA, 609 bp, Homo sapiens
ttcccaagctggaagtgcagtacaaggctggggggatgtgggagaggagatgggggcactgcaggaatagcttgggtacggggggcgtgggtgcacacgggaaatgcctctgggccactgcttactgagtgcaccttgccctggtggtctcagattgacaaggccggtgggctggtagctccccactgatctactctagagactatgacaaggtgagggatggtcagccttttcaccctgctgcacccaggtgcacaccctgtctcctcctccttagaaaatgccttgactcaacaggctaaaatggagaatatcactttccacaagtggttctcatttctgagaagggcccccaccatccttcyaggtttcaaacctctgatacagcctggacaacctccctcttccccaccctgctggaagcccaccactcaccaagccctgttagtccaaccagtgaaattcctcggacatgcactacgcggtccccacactgcagcccgaggcctgtgcttccacagtccacagcagcagcctcctcactggcctccgtgcctccacccctgccccgtctgtccacctttcacactgcagtcatgtagtttcctg

SEQ ID NO: 544509 - DNA, 609 bp, Homo sapiens
ttcccaagctggaagtgcagtacaaggctggggggatgtgggagaggagatgggggcactgcaggaatagcttgggtacggggggcgtgggtgcacacgggaaatgcctctgggccactgcttactgagtgcaccttgccctggtggtctcagattgacaaggccggtgggctggtagctccccactgatctactctagagactatgacaaggtgagggatggtcagccttttcaccctgctgcacccaggtgcacaccctgtctcctcctccttagaaaatgccttgactcaacaggctaaaatggagaatatcactttccacaagtggttctcatttctgagaagggcccccaccatccttccaggtttcaaacctctgatacagcctggacaacctccctcttccccaccctgctggaagcccaccactcaccaagycctgttagtccaaccagtgaaattcctcggacatgcactacgcggtccccacactgcagcccgaggcctgtgcttccacagtccacagcagcagcctcctcactggcctccgtgcctccacccctgccccgtctgtccacctttcacactgcagtcatgtagtttcctg

SEQ ID NO: 544510 - DNA, 609 bp, Homo sapiens
ttcccaagctggaagtgcagtacaaggctggggggatgtgggagaggagatgggggcactgcaggaatagcttgggtacggggggcgtgggtgcacacgggaaatgcctctgggccactgcttactgagtgcaccttgccctggtggtctcagattgacaaggccggtgggctggtagctccccactgatctactctagagactatgacaaggtgagggatggtcagccttttcaccctgctgcacccaggtgcacaccctgtctcctcctccttagaaaatgccttgactcaacaggctaaaatggagaatatcactttccacaagtggttctcatttctgagaagggcccccaccatccttccaggtttcaaacctctgatacagcctggacaacctccctcttccccaccctgctggaagcccaccactcaccaagccctgttagtycaaccagtgaaattcctcggacatgcactacgcggtccccacactgcagcccgaggcctgtgcttccacagtccacagcagcagcctcctcactggcctccgtgcctccacccctgccccgtctgtccacctttcacactgcagtcatgtagtttcctg

SEQ ID NO: 544511 - DNA, 552 bp, Homo sapiens
tgtcctcctcctgcctcccccacattatttatttaataaacgtgtacccaggctccacctcgtgccaggaacaggagggcttggcatgggtggatccacccgaccagaatcaagcattgggtcacrgggcaaactgggggctcccacccacatctccacatcccagagccttagaggtctgttacctccgaagcagagaggagctgcaatcactgtgtatcctgggacagaggcggttcctgacacctgggctgggaagctgagggggactctgccctacacggccgttttcctaagaccagtccctggccaggggtctctgtctggctctctaaagggaggcagggtgacacagatggtcagaggagatgagagacaggaagaggagcaagacccagggaggagaacagggagaaggacagaggacagaaggagagaagaaagcagggagcctccatgagaggaagtcctggtgcgagtggctggaacaaagacacagatgcccaggggaccagcagagaccctccactgcccaggcaccacgtccaggtg

SEQ ID NO: 544512 - DNA, 537 bp, Homo sapiens
ccttgtccctgactgaagacaatgactttgtttccaaacgaaagagggttagcatcccccagccaaattcaccaggtggggcatggggcatcaatatggttgtggcttccaccatctttgcagtgggagtagttttgtccagcctatgatacaattcacttattattgtgcagtggtgattcggtccgtctttgaatccttttattgacaggatatccactccctaatgaaataagcccgttcccttttgaacacctcttataattaggaagtatgttttctctgttccttcttcctctaccctcctakcccttccttcttctcctcctccttcctcctttctttttcccttccctcttctttctgccctgtccctcttttcttgtcccctcccaggtcctgccacctctgagaacctgaggtccttctccccaacccctctgccccaccgggaaggcactattcagtcactgaccataaccttgtagagcgcagtaggtctttagtgcagccacttggccggctgattgggaactc

SEQ ID NO: 544513 - DNA, 537 bp, Homo sapiens
ccttgtccctgactgaagacaatgactttgtttccaaacgaaagagggttagcatcccccagccaaattcaccaggtggggcatggggcatcaatatggttgtggcttccaccatctttgcagtgggagtagttttgtccagcctatgatacaattcacttattattgtgcagtggtgattcggtccgtctttgaatccttttattgacaggatatccactccctaatgaaataagcccgttcccttttgaacacctcttataattaggaagtatgttttctctgttccttcttcctctaccctcctagcccttcmttcttctcctcctccttcctcctttctttttcccttccctcttctttctgccctgtccctcttttcttgtcccctcccaggtcctgccacctctgagaacctgaggtccttctccccaacccctctgccccaccgggaaggcactattcagtcactgaccataaccttgtagagcgcagtaggtctttagtgcagccacttggccggctgattgggaactc

SEQ ID NO: 544514 - DNA, 644 bp, Homo sapiens
aggctgaggtgggaggatcgcttgagcccagaatgtctagctgacagtgagccatgacagtactccagcctgggcaacaaagcgagactcaaacaaacaaaaacccaaaatactcattataccagggagccatatttgggggtgaagctccctgttttccttcacatgacacaaaagccttcataaggaaatgaagatttgaagaaaactagttaaacctgaatatttcaatgcaaaatttgatgaagaatagatagtcatggagaaacgtgatagaactaagagtatgatctaatggtaataaactgggaggacttaatgaggcctgtgtgttcagattcccctgggtgtccctctgtcttcagagatgagggtgctcattttctcccgctctagggaaggcacctttcacatgaagttctcaggacctgcgtcaggaaaggttagagtccttcctaggttttatcacctgattcaggggagargggtggggcgggggagaacagtcaaagtgacctttctgctcctgtttttttctcagattccttcatcttaaactattcaataggctgagatgcaatattttcgggtatagtgccctgaactccatgtcaccttcatggtttactactacccaccatcta

SEQ ID NO: 544515 - DNA, 574 bp, Homo sapiens
tgggccagatggcagcagtggcccagtccctatcctgaaggctccttacctagaggaagtccacctcactggggaccttctcctgccctgtagttttagcccatcttatcattattattattattattatttttagagatgaggtctcctgtgttgcccaggctggtctcaaactacggggctcaagcagtcttcctgcctcagcttcccaaggtgctggtattacaggcgtgagctaccacacccggccttagcccatcttgaggtgaaactatgcagttgttctgggaggatctacatgcctgtcctccatgaggatgcagagtcgttgagtttacatggggaatatttagccrtccacgtcatttctgtgggcttccctaggctgaccctggaaagaattccggatgctacttgggagatactcctttttgcaagttggcacagacatccttctgccttttctttgtcctaggaccactctttatggtgttcctgttgaagcaggtcgggggattgggaattaagcgtagctgacagggtaaaatttgaggagcaggaagctcatagatgg

SEQ ID NO: 544516 - DNA, 574 bp, Homo sapiens
tgggccagatggcagcagtggcccagtccctatcctgaaggctccttacctagaggaagtccacctcactggggaccttctcctgccctgtagttttagcccatcttatcattattattattattattatttttagagatgaggtctcctgtgttgcccaggctggtctcaaactacggggctcaagcagtcttcctgcctcagcttcccaaggtgctggtattacaggcgtgagctaccacacccggccttagcccatcttgaggtgaaactatgcagttgttctgggaggatctacatgcctgtcctccatgaggatgcagagtcgttgagtttacatggggaatatttagccgtccacgtcatttctgtgggcttccctaggctgaccctggaaagaattccggatgctacttgggagatactcctttttgcaagttggcacagacatcyttctgccttttctttgtcctaggaccactctttatggtgttcctgttgaagcaggtcgggggattgggaattaagcgtagctgacagggtaaaatttgaggagcaggaagctcatagatgg

SEQ ID NO: 544517 - DNA, 605 bp, Homo sapiens
gaatgcgctttgcactgtgctggagtctggtgatgacaaaatctgatagagcccctccccttaaacagtttatcatctaagaagagagacatctgtgtacttcyaacatctagcacaggggcagaaacaaagtcatttggtggcttttgagcttagagtcataaaatgtcagagctagagggtcttagggattgttaaatccctccctctcactttggaagtaaagaaactgattggtcagagacttgctcaaggccacccggtcagacggggacagagagtgctcagcctgccgtccctgctttcggctctatcaccccatgcagcttgtctttggcctttaactagaaagatcaaatcatgaaaagtagagggagtaccagagagagcaggaacccactttcattgcaggtctactgtggctcagtgacctaaatcctgggaggactgggaggctctggacagtggctctctgactaggactgcggagtgagtactccaacgccacaggggccagctccctgcagttcccactgagacttatttctccagaggccagaaagcccagaagatgaagccttgtcacttttggtcttgtggcccag

SEQ ID NO: 544518 - DNA, 516 bp, Homo sapiens
acctatgtattcatgggactgtgatcatgctccccagtgctgtacactccctgagatcagagactttgttatgatctgtgttgccacatggtaagcaccccataaatacttgctgaatgartgcactgacccctgccagctaccaggaactgtgctaagtactgggaataggaaaatggactagacgtgctgcctgcccatccagctaggaaggctgacagtctaatctgtttgttacgtgatccagtttctcaggaatgcatttttggagtggtaagaaattatttgttttaaagtttgagagaaaaaaaagatacaagctgagaggtgagtctttcagtgtggatggaaggcctcaggcagcttccaggacgtgcttgcagatgccagtgttaccctgctccttgcttttgccactcaggcagacgggctccctgggaggaccaccgctcctcaacaccctctccccagaccccagaccaggctggtcccctgcaaggaaagtcctctgcctca

SEQ ID NO: 544519 - DNA, 516 bp, Homo sapiens
acctatgtattcatgggactgtgatcatgctccccagtgctgtacactccctgagatcagagactttgttatgatctgtgttgccacatggtaagcaccccataaatacttgctgaatgaatgcactgacccctgccagctaccaggaactgtgctaagtactgggaataggaaaatggactagacgtgctgcctgcccatccagctaggaaggctgacagtctaatctgtttgttacgtgatccagtttctcaggaatgcatttttggagtggyaagaaattatttgttttaaagtttgagagaaaaaaaagatacaagctgagaggtgagtctttcagtgtggatggaaggcctcaggcagcttccaggacgtgcttgcagatgccagtgttaccctgctccttgcttttgccactcaggcagacgggctccctgggaggaccaccgctcctcaacaccctctccccagaccccagaccaggctggtcccctgcaaggaaagtcctctgcctca

SEQ ID NO: 544520 - DNA, 561 bp, Homo sapiens
gctgcctcccacacacttcccttcaggcaaattacatacttcctttctctgccgccagagaacctggttcaaactcaattgcaatcttttttcacatttttgaaaagtttatttatgcatctgtcctcatttgtaagtgctggaagacagagaattttgtcttgtttgtaaatgcagctctggacacagacaaaaataagttttaaaattgctgtgacaactgaagtgagggagagcacagcttcagctttgaatgttgcagagactcgtaaggagaaaaaaaaaacgggtgaaacaaattttttcaaattgaaaaatattttccatkgggtccaagtataatttcagaaatgtttgagctgactttttcttttcttttttcttttttttttgagacagagccttgctctgtcacccaggctagagcacaggggcgtaatctcggttcactttaacctcggcctccgggattcaagcgattctcctgattcagcctcccacgtagctgggattacaggcacatgccaccacgcccagctaattttttgtatttttagtata

SEQ ID NO: 544521 - DNA, 645 bp, Homo sapiens
tgccttcattgatgtattcattccacacatgtgttgagtagccctggaatttttgctttacagacacccatggatatgtcaacagattattattgtaatgataagagtatatgataatagaggtatgtatagcactgcatgaactcagaagaagtaatgtcttgtcttattgaagaactagaatatcttagaggatgacagttgacttgtatcttgaatgatgcacaagagaatttacagcagatttgarcagtcaaaatttaatgtctcctctctttttttttgtttggtttttgagacagagtctcactctgtcgcccaggctggagtgcagtggcatgatctcagctcactgtaacctccgcctcctgtgtccaagcaattctcatgcctcagcctctttagtagctgagactacaagtgtgcaccaccacacctcattaattttttgtgttttaagtaaagatggggttttgccatcttggccaggctggtcttgaactcctgacttcaggtgatctgcctgcctcagcctccaaagtgctgggattacaggcttgagccaccacgcccagccaaaattgaatgtctcctcccttaagatttgtacttcaaaagcttttggttttcatgagcacagaaaag

SEQ ID NO: 544522 - DNA, 645 bp, Homo sapiens
tgccttcattgatgtattcattccacacatgtgttgagtagccctggaatttttgctttacagacacccatggatatgtcaacagattattattgtaatgataagagtatatgataatagaggtatgtatagcactgcatgaactcagaagaagtaatgtcttgtcttattgaagaactagaatatcttagaggatgacagttgacttgtatcttgaatgatgcacaagagaatttacagcagatttgagcagtcaaaatttaatgtctcctctctttttttttgtttkgtttttgagacagagtctcactctgtcgcccaggctggagtgcagtggcatgatctcagctcactgtaacctccgcctcctgtgtccaagcaattctcatgcctcagcctctttagtagctgagactacaagtgtgcaccaccacacctcattaattttttgtgttttaagtaaagatggggttttgccatcttggccaggctggtcttgaactcctgacttcaggtgatctgcctgcctcagcctccaaagtgctgggattacaggcttgagccaccacgcccagccaaaattgaatgtctcctcccttaagatttgtacttcaaaagcttttggttttcatgagcacagaaaag

SEQ ID NO: 544523 - DNA, 631 bp, Homo sapiens
gggatttacctacaagatggataacacatccttcagacagatggcacagccctgaagccattgcctaatttcttcttcagtgttctccttttatcctgtcttctatgatagctgatttccttacattcatgtccacccagaaataactagtttctagaaaagctgtaatatggattgtatttctgtaaagccatatgttccatacgtcctgacatcctcgcagatgccatttgattccatttggtcwtattcatttaataaatattgagtgtctgcttggtgcctggcatctgcagtgcaaagaggaataatattcagttctacacgctgaaggatcccatattttgtggcaaagcaagatctaaagacataatttaagtagactgtgaataggttaatttggagctactaactggctatcatgcaggtgggaattgggaggtcacaagaaactttcagcaaatctggcatttgaactgcaccttgaattgtgaactgaatcttcccaggtgaagaaaaggggatgggctttcctgacatgtttcctgatgaaagagcatgtacttgaaagagaatggctggctctgtaaagggtgaaccgtgtgttgtcccaggattaggatgccagcag

SEQ ID NO: 544524 - DNA, 631 bp, Homo sapiens
gggatttacctacaagatggataacacatccttcagacagatggcacagccctgaagccattgcctaatttcttcttcagtgttctccttttatcctgtcttctatgatagctgatttccttacattcatgtccacccagaaataactagtttctagaaaagctgtaatatggattgtatttctgtaaagccatatgttccatacgtcctgacatcctcgcagatgccatttgattccatttggtcatattcatttaataaatattgagtgtctgcttggtgcctggcatctgcagtgcaaagaggaataatattcagttctacacrctgaaggatcccatattttgtggcaaagcaagatctaaagacataatttaagtagactgtgaataggttaatttggagctactaactggctatcatgcaggtgggaattgggaggtcacaagaaactttcagcaaatctggcatttgaactgcaccttgaattgtgaactgaatcttcccaggtgaagaaaaggggatgggctttcctgacatgtttcctgatgaaagagcatgtacttgaaagagaatggctggctctgtaaagggtgaaccgtgtgttgtcccaggattaggatgccagcag

SEQ ID NO: 544525 - DNA, 614 bp, Homo sapiens
acaatatgtgttgtgtgcatggtgctaagtacttgttttatttcacttgatgcacacggcaaccatatgaggcagtcctattattattcccattgtacatgggatatcactgatgcttagagaggttggataacttgcccataacagagtgataagctataatttgaatataaaccatcctgtacactcctgagtctgtacttgcaagcgaccctgccataccagatgtgtgcaggccatctgtgtacatgtgtgtggggcaagggggcaagctgaaggcagaaaggtcagttgaggccagctttgagatactgaacaccaagatagaggttgttgtagacaaacatctctgcatgttcattttttataaaaattcactatattacttttaaagtgaaacagaacccactctttagagcattttttagcaaaagtcctgctttagtgggacataatgtgtacataaaatggggactgaggttagtaatctaattaaaaacaaatcgttcgcagggattttgattccttcttacttcaaagcgcatattracatataaatgaattctgtcctcaaggtaagccccaattacgtaaaagtatttccaggttattcg

SEQ ID NO: 544526 - DNA, 577 bp, Homo sapiens
agtgtagagaaggagccttggacagtgtctgacctatcataggtgatcaataggtgctcactcttgtcccttcacactacgttgattcaggatccttgggagagagaagagatgagtgggaatccaagttacactgacactctgcaagcatcctttccccaactggctgctaaactcaccccctccttccttgtcctacccttctatggagcaattagaatgaccgatgctgtgagaattgcagggttggattggaagggacctcagaggtcatctgtgaacccaacttcttcatttgacacaaagaaaaactcaggtggaaagaagtgatgaaatgcgcttaaagcagcctggctggggtgatggctgagcaaaggccagcctctgttgttctgctccacagaaagacaagttaaagactatccccttcccctatgaaagtctgcgcacagataccmaatgatcaggataaggaagtctgcacagctaatgagaacagcactgtaaaaggcaagcctacttacaggttgatgaagttacggagaagcaagacagacccctctgctccgcttggaac

SEQ ID NO: 544527 - DNA, 556 bp, Homo sapiens
ccaagaacaggatagggtgttttgtttatttgttagcaacctacatggcaattgaatggcattcaattagagatgctgagatgcaatgcctttcaaattttaaggtgcattttgagtcacctggggtcttataaaatgctgttggccaccaaacatagtttgagtaccaagtatataaagaattytccttcgctatgtggacaattttggataagagaaattttaaattttccctcatcttgaaaagtctattatattctatgtttatttgagtaccaatgcaaggtatttgctggatgctgtggaaataaacaaaagtcagggtccctgagataaagtagcatatttcagaaacaagagaatgcatagcacatttgaagaatattgacctgattgagagaaatttttctggtaggagaagtgttgtagaaataggctttgaaaaggcagagtttccattgtgaatataaaattaagtacttcagacatcatcctggggggaaaggtatgccagttcagatttgccttcttctataagtaatatacccccaggata

SEQ ID NO: 544528 - DNA, 551 bp, Homo sapiens
aagcaacaggtgtctctgacacacacacttacrccaatgtcttccatgaccataatgaccttgtgacactgatgctcttgctactaccaataacagagaaaccatttatcatttcccagttctgtattagcaatgaactcctgaaacctcgttttactcatctagaaactgaggctcaaggagagtagtgtgtcacttcaggtcatcctggaatcaggagccacggtacagttagaagtagcagagatttgatagggccaacctctctgaaaaacacaggggagagagcaaagtaagacacagaaagccttcagcccatggtgtaactctggcagtgtgagaggatggaggaaaagaagagccagcctcgggtgatgagcagccctgagagttgcagctagcccaacaggagctcccaaggacagatggacagttggaggagtctcacattgcatagaaatggccaggccctaggacccctgccacgctcaggcactgactgggagccacgtttttagctctcatcttgaggcaggtcccagagatgctgc

SEQ ID NO: 544529 - DNA, 608 bp, Homo sapiens
tttgtcacatggctccacctgggctggaggcatgggtggtcacttggatattccataagcaacaggtgtctctgacacacacacttacaccaatgtcttccatsaccataatgaccttgtgacactgatgctcttgctactaccaataacagagaaaccatttatcatttcccagttctgtattagcaatgaactcctgaaacctcgttttactcatctagaaactgaggctcaaggagagtagtgtgtcacttcaggtcatcctggaatcaggagccacggtacagttagaagtagcagagatttgatagggccaacctctctgaaaaacacaggggagagagcaaagtaagacacagaaagccttcagcccatggtgtaactctggcagtgtgagaggatggaggaaaagaagagccagcctcgggtgatgagcagccctgagagttgcagctagcccaacaggagctcccaaggacagatggacagttggaggagtctcacattgcatagaaatggccaggccctaggacccctgccacgctcaggcactgactgggagccacgtttttagctctcatcttgaggcaggtcccagagatgctgca

SEQ ID NO: 544530 - DNA, 533 bp, Homo sapiens
ggctgggtctggaagaaaaaggtcattttgatagttactatccctccctttggcggtcccacctgagttctaggtgagactgccagggctctaattaaaccagaaccagagctcttatcttgtccttaagttctgcctgtgttaccaagtggtagmaaaagataatgtcctctgctatggcccattgtggatgtacagcatgatttagatttagatttaagtgaagcgaacttaagaaattagtgactcctgataacaaatctctacatatatgacatcatgaagaaaccatttctttgaaaattttaaaaagaatgtgacctaaacattaatctgcagggaactagcagatgaatgaaaatctattcacgcatccatccaacacaggaaaagctatggagtcacagcttgaaagaaggtgtgatggtcagaagtgtctgttctacatagtattccaaggacatttgctacacaaatgggggatatccaatttcaaggctaccaggtcaatagtggcaagattaattgcttta

SEQ ID NO: 544531 - DNA, 656 bp, Homo sapiens
ctggggtggatttcttttttttttcctggcatttgcaatttaggacctaccttctctaagtatcctccctgagtgggtttttctgcactccacatgtatattttcacatttkgctgatgggtaatatttaatgtgtgggtagaagtgctgtggcgatgagtgcttcctatagtcagacaaatcaaagcaagaatgattgtgccattttagtgaacaaattgctttgtccattctacctcttgcagagctaagaggatgcagtgcgtgcacgcgtgcacacacacacgcaaacacacgctctgttctttgccctcaaggatttttttttaatagcacaccagagctctggaattggcagggactttataaatgataaaatttatccccattctttatagacaaggaaattgagacctagacaggaaagaggcatgtatgccaaatgccacagagcgagcagggggtgcagagattagagtacagattcatgctgtggcctagggttctctgtatacttcaccacctaaaattaccacacttttaaaaaggaggaaacctggacttgcaagattgataacttgtagtgttgtattttaaaagcaatgaatttagaagagtttcacagatatatttctttttttttttttttttttttt

SEQ ID NO: 544532 - DNA, 656 bp, Homo sapiens
ctggggtggatttcttttttttttcctggcatttgcaatttaggacctaccttctctaagtatcctccctgagtgggtttttctgcactccacatgtatattttcacatttggctgatkggtaatatttaatgtgtgggtagaagtgctgtggcgatgagtgcttcctatagtcagacaaatcaaagcaagaatgattgtgccattttagtgaacaaattgctttgtccattctacctcttgcagagctaagaggatgcagtgcgtgcacgcgtgcacacacacacgcaaacacacgctctgttctttgccctcaaggatttttttttaatagcacaccagagctctggaattggcagggactttataaatgataaaatttatccccattctttatagacaaggaaattgagacctagacaggaaagaggcatgtatgccaaatgccacagagcgagcagggggtgcagagattagagtacagattcatgctgtggcctagggttctctgtatacttcaccacctaaaattaccacacttttaaaaaggaggaaacctggacttgcaagattgataacttgtagtgttgtattttaaaagcaatgaatttagaagagtttcacagatatatttctttttttttttttttttttttt

SEQ ID NO: 544533 - DNA, 677 bp, Homo sapiens
tgttctacctgttaactctgtgttttggctgtgaatcaagtgatagccaacgcatcggtttttctatctttacaatggggattatacctgcctgccttattagtgtttcagtgracttcaaagcaatttttggctgtgaaaatgctctgcaatgatagttgttgttttatgagcaccttaattattctgcttctccaggaaaaaaaaaaatgtgtcaacactaagtgaattttccttgtaatttaatcctttaattttaataatttttattgaagtctttcccaaagaatgcacaataaactaactgctttattaaactgaatagtttatgcaaattgaacccatttatggctcagagttaacactgggatttctgcttctgtgattcatgttgtagctgtaggtgctgctgactgtgggatttacctgtgattgagcccagaagtagcttggtttagccttctggaaaaattccaattagtcactttgttaatttgggctatttgcctcttctgcaaaggaagatttagggaatgactgaaataatgttatagtttgaaggaacactgaacaccattaagtccaatcccttcttagaaggaaataaactgaaatcccaagggtttaatgagttgctcaatgtcacacacaaaatgagtgtttaagtgtaccctatc

SEQ ID NO: 544534 - DNA, 522 bp, Homo sapiens
ttactatatctcccccccacccccagcacccttgagtgtcatttttccacgatgcagttgcaaaactaccataagaggaggtccagattgtccatccagatttgacatcctgggttatggtttatctcgcatctccatcatccctcagaattctggatgactcagcagggctgaacatctgtcacatcrtgatactgatactgagaaccgtggcagtgagccacagaaaaggtatcaggtgccttctgaattggcaatcaagggttttttgttgttgttgtttaataaagtttctcatatgttttgctactgtatgaatttcctattagccaaagtgttggaatacctaacaccacattccatacatgtcgttgagactagagagtgtgccataatcaggggccagaattacttcccaggatgactgcagaactggaggctttcttcagataccctgggatacctctggttggctaagggttgcaatgtgagggttgcaaatgggactcatgagactttctg

SEQ ID NO: 544535 - DNA, 546 bp, Homo sapiens
tgtgaactgaaaactcaaacctgccagtagagactaaaacacataatcattttactattactgatggcaagtgaaggcagaggaccacagctcaaataagttatcaggagtgatactaggggtacagactctcagaagagaagaaactctaaataataaatccactcaattttcttatgcagccatttgtttgggctagagtcaaggccaatatatgtatatatttaaatacacccatgtcaatcatacacacacacacacacacacacacacacacataaaaattamtcctgggggaaacattatgtgtgtgtgtcggtgcgttttctcctacatctctttctctggcttggagacagtttctcaacatccaactgcatctgagtgggaactttttttttttttaattgaaacagggtcttgctctgtcatccaggctggaatgcagtggcgcaatcacagctcactgcatgaaggggtggcttcatctgtgtctcttcatagtttcatttaaacactcaactagtcaattcgtggtggctgtgt

SEQ ID NO: 544536 - DNA, 375 bp, Homo sapiens
gggcagatggggctggaatctccaacatgacttcacctacacatctgatgtcttagtcggatggctggaaaactgctcagccaggaaactggggtggctgaacgtttgtttttctccaggtagtctgagggtctctctccttgtgacctcttygataggatcagtctctccatgtagtttctcagcagaccacctgaacttcttacatggcaactcagggcttctgaaagcagaaaggcagagcagctaggtattcctcagacttaggacaaagtctggcatagaatctcttctgtctcattccattacttagagtgagtcacagggccgaaccagatttcatgtgggaggggactgcatgagagtgtgagtgtt

SEQ ID NO: 544537 - DNA, 375 bp, Homo sapiens
gggcagatggggctggaatctccaacatgacttcacctacacatctgatgtcttagtcggatggctggaaaactgctcagccaggaaactggggtggctgaacgtttgtttttctccaggtagtctgagggtctctctccttgtgacctcttcgataggatcagtctctccatgtagtttctcagcagaccacctgaacttcttacrtggcaactcagggcttctgaaagcagaaaggcagagcagctaggtattcctcagacttaggacaaagtctggcatagaatctcttctgtctcattccattacttagagtgagtcacagggccgaaccagatttcatgtgggaggggactgcatgagagtgtgagtgtt

SEQ ID NO: 544538 - DNA, 547 bp, Homo sapiens
taatgaaatgcaaaatcccagagcttaacatcacgcctcactcctgatacatgtaggatgatcaaattcctgaagaaagtccaactcaataggttgcttaggctggtctcaaactcctgggctctagtgatcctcccactaaaactgggattacaggtccatgtcaccaagcccagctaatgcagataatttttgatattcccacagactaccaaaataggtggtctttgactaaatgatagtagtattttaaagataatcacaccgttagaatctaagagggcagtttctcacattccccccacccccaacaaaatgtatccagactaaatatattattttcaattactaatgttccatagagatatttaaaatctttatagtgtggaaaaatttctctagattgtcaaacctaaaaaaaaaaaggaagtgggaggaagaggaagaaacaaaaataggaacckgtaaattaaaccagacagcaaggggtctggtagttagatcagagtacagtcctaagaatgcatcaaaagcagggaggagcagg

SEQ ID NO: 544539 - DNA, 594 bp, Homo sapiens
atcatcagacacccatagattctgtttatgtttccacagagggtagctgtttctgacccttttgttattttccttgagcaaaagttgtgggatcttagtgaaattataaccacagtctcatccaaggacaccctctgctcaaggagaaccattagaactttcttctgctttatttgaattttaaggggaaaaattgttcttttatctgcttaagaaactataaattaagagggcaaaccagcagaattactagataagggaacatacaatttagaaattttaagttctaaaatcatattgtaccttctgcctctgtgtagatatacagatatcctgggagaaaggactggtttatctcattgaagctaatgrcatgtcggttaggggattttaggctatttgtgggatttctccccctaggtttccccataataagtgaaagcgtaatctagtctctcagaataatgatatacatttgttcaacaatgcttggcgagttgggagcagcaggagtgggaaagctaaaaatttacatggtccggagcttgagattggcaagacagaacagtggaagacctggagggggctgagggg

SEQ ID NO: 544540 - DNA, 521 bp, Homo sapiens
aatcactgctcaccacctcagtcttcccaggctcaggtggtcctcccgcctcagcctctcgcatagctgagactataggtgtgtgccaccatgctcagctagctttttgtatttttgtacagaaagggttttgccgtgttacctaggctggtcttgagctactgagctcaagcaatccacctacttcagcctcccaaaatgttgggattacaggtgtgagccactgcacctggctttgtggctaagtttttaagaaatttaccaaatttatgtgtctaagagagttcctcgcctcctccctacttcaaagtagttgacatgagcaactgtctgcttgaatgtcatcttttttcattgcctaaagtatcctgaatatgctagcgctaaactcattaaggarcctgctttgaagatgatcaaattcatttggatatagaaattctgtgatgttacaaaattagtcttattttttggtagtcatgcccacagtacagtttttgttgtacaagaagcagaggcag

SEQ ID NO: 544541 - DNA, 482 bp, Homo sapiens
aaagcctcctttgtcagagttgcaggaaggtgtgatatttgtgggggaatagccaaagctctttaaaaacattaatgcttattaacagcattgaagcagataatggaaaggagtttattacatatctgggtgggatagaagatgcttcttagaattaacaagttacaaggaaattgcccagacataattaggcacagtggaagcagggagatacaaaccagatgacctcatatccaagagtgagggacacaggtggcagagcattcctccttgtgcccttgggcttggtttctactaaatggacaagctgaatcttgtattggctccgagttttgagaggaatgaagacctgcatcttttgggaggcacctgctgcctccaatggcttcctcccacccagcccctgagctctgttgcagactgcacagttrtgcatgaaggatggagctggccctgccctcctcccagcttggcgtgaatgt

SEQ ID NO: 544542 - DNA, 566 bp, Homo sapiens
actactgacttctcaggttgctatgaggagcaaatgacatgatgatttgaaaggaccgtataaactgttgcaaagaggttatcttcctatcctatcaggacattcagtagcatagcttggggtaaactatggtcagagctcattttaattcagacatcctttaaatgtattcattaattatattttgtaacctggtatatttgacttttacataaaagactgggaaacccaggctgggtaggtaagagtcacagacacaaatgggcaaaaactttacaaatggcaatattctgggaacatttattttgagaactagcttattaagaaagttattttgctatttagggtcttaaaggtgttcaasctaataacctaaatgataaataagacgatcggggttcaggagtgatcatttggtaataacacagtaatgatcacaataacaatcaacattaacttattccctcttctctgccatattttgctattaagcatttcatggacattatctcatttaatcctaacaatgtaagtatgaggtagctacttttatcatgttcatttga

SEQ ID NO: 544543 - DNA, 545 bp, Homo sapiens
tgaatactaaagtactacttggcaaattatttttgctataaattagcatgccttcagaattgtccytgtaacgtgatctttctctttcttgcttgcattctgagatgctttatgagtgggggaaaaagaagaggtgttcctgcgtgctgggatttgcagatcaccgccacccacgtcatcgcaaatctaggcatacctatgggagtgggtcctacatcaaacatcaaccattgtgggttttgcagtgtgaaaaaagtggagacatgctggattggagccccaggaaattttggcttcatgcttactggacttggtttccagaagtgaggctcggaggcccaggctcccccaggtccacatgaaaaacacactttcctctcacctgatcttttctcactaaatccacctcttccaggaaattttctcgggttccttcctctcttcactcagccctccctgagttctcctttggtaccgtggaaagcaggttttgttggagctactttcttagcacttgggtactccccctctctccacccccaagc

SEQ ID NO: 544544 - DNA, 636 bp, Homo sapiens
gataatgaagtagaggctcatctgtttgtagacatgtgtgcctcttagatggggttggcaagcttggcatggggtgccccctccccacctctcactccatgtgaataggaagaggcccagctggaagacattagtggccagtcttcagggataaactggccaggccaggccactgttccctaccctatacaccttcccacccaggaaggccctcatgaagactcccactacagcatgaaggatgctgcctgctgtatgaaagtggcagatgtgagcctcctaggcaacaggtattctgaccacattattacctgctgtgaaacattcatccaaaaggagtctttcaggactgacttttgccwtgaaacttgccagtcactcctgtgagatggcaaatcgtcagtccttatgccctgttgtggttggttagagtagattcataaaacacaccgagtctggcataagttcagtggcctttggggaaagctcagtctctgacacttcctgattcctcctgtttgtgcttcctctacaatttctactgcccactgagagcatggagctaaatatcagccctgtttcctgcatcatcctcctaaattacatcacgtagccagaattgctgcaacagagctt

SEQ ID NO: 544545 - DNA, 564 bp, Homo sapiens
aggtactgcttaatgtaaaatgctgaaaatatgctttgcagttaataagtgctccaaaaatgttagctatcatcatcgttaggattatatgtgctcagtaaatttttgctggatgaaactagttatgttccaggctatgtcaagaactaaagatagttattaagcaatagttttcatgggaaaccctcactgaatmttttctgctagaatggcttcaaacaggccccccccactccctcctctctccatctttctctctcacacatgcaaaaattctaaaatctgcctcaaacttgctatgcattattcactgacaatctatatttttctgcctttgaacagtgaaaaagcctgtgtcaatttatcctttaaagctgctccttgctgaatccacatatgtccattaatggtgacttggagggaacagcatctgtagaggcccatctcagatgatcccatttaatgtgggctgtgacttcccaaggccgctgctcattagcagctacttcttattactttccacagtttaaacagaagatgaaaccgaaagagcttttcacagag

SEQ ID NO: 544546 - DNA, 625 bp, Homo sapiens
aggtgattacacatttgggtggatggacagatagatgggctgatggatgagcagacagttggatggaggatgaacagacggataaacagacaaacaaaaggaaaagtgcttaacacagtcagcattgggttgaggtgaggaaggaaactgaaaacactgattccagagatcttatagtctagctggggctatgatctaagatgtaattaacaatcaggggatacactcatatggcatctgaggtattgtctaaacctgatcccacaactcataggccaaaaatcatgtgaatcacagtcacctttcatttctagctaagtacctttgagcacttaatgtctccaagctgtttcctcaactatgatatgggagtgaaagcatcattgcaggactattgmgagaatttaatgagttaatatttgtgttccaacaacaacagttgcagttctggaacattgaaggtacttcattttcttatttttgcctcaaatgctgactattaatggtttggcttggactttaagtatgccagaatttctgataaactcccccacttgtgcagtaactcagatgagctagtgataaaacaaaaaatcgtggcaggaatcatttaaaattaaccctc

SEQ ID NO: 544547 - DNA, 594 bp, Homo sapiens
tgggatcctccagtgaaaagtttgctcagcgcgagagatgtcaagaggctgggattgtcgcctatcgggaggtggggagctctctcactcacacttcctgggaaatgaaggagaactaataggcagcccgcatttgcagccagccarcctgggtggtattccttgaagtgaagcgctcataaatcccttctggggccagagccggtttcacaagctgcaggatttgggtggcctgcctgctctttgggagcgggcttgggaagctgaagaaattgaatcaggacctcaggccctttacagactcccttctacacttggttgctgattaagaacattatgtggcatttaaaatggcacaattatcttccgttggccgttcctagctaaaagtagactcctatcagcccgtgactgacgacaagaaggctcttcgtccctgtttttgaaataaacatgggtataatctgaatgtgtcaactgcttatttcctaagggagtctaatggataatttttaaaatctaacttggacgtattcataataagcatcgtccattttgctaagttctttcctaaggcaaataaatagagtcttg

SEQ ID NO: 544548 - DNA, 648 bp, Homo sapiens
aaaagtttgctcagcgcgagagatgtcaagaggctgggattgtcgcctatcgggaggtggggagctctctcactcacacttcctgggaaatgaaggagaactaataggcagcccgcatttgcagccagccaacctgggtggtattccttgaagtgaagcgctcataaatcccttctggggccagagccggtttcacaagctgcaggatttgggtggcctgcctgctctttgggagcgggcttgggaagctgaagaaattgaatcaggacctcaggccctttacagactcccttctacacttggttgctgattaagaacattatgtggcatttaaaatggcacaattatcttccgttggccgttcctagctaaaagtagactcctatcagcccgtgactgacgacaagaaggctcttcgtccctgtttttgaaataaacatgggtataatctgaatgtgtcaactgcttatttcctaagggagtctaatggataatttttaaaatctaacttggacgtattcataataagcatcrtccattttgctaagttctttcctaaggcaaataaatagagtcttgcaattgctttctttgttcttgtcagaatgtttcaggtttagatttctcaccccaggggaagaagaatgt

SEQ ID NO: 544549 - DNA, 621 bp, Homo sapiens
ggcacagtggcttacatctgtattsccagcacttttagtggctgtggcagaggatcccttgaggccaggagttcaagaccagcctgagcaacatagtgagaaccacccccaccccgcgccatccctatttaaaaatattataaataaataaaacgttgatgatcttaaatagtccacttaacctctaaccaacacttaccctatttttctgcgattgtttacacctaaacttctcaaaagttgcctatattcatggtttccattccaattaattaatcaactgaaagactcctcttgccataagggtcaaggaattttccaaggttgaggacaagggtcaagattacagtaggctggtacagtgagttggaatcactttttctgaaagtttactcacaataaagtggactggagaaaagaacggaagatgaacagctttgtcagatttctcttctgctggattttctgaatttctcatgtttgctctggatagtttttattttgtgcttgagtgaatctgctgtttccttcctcatatgcgtattttagttcagagtttgtttttctttttttaagtgctcttatcctaacagatgtttttaatatatcatgtcttggttt

SEQ ID NO: 544550 - DNA, 621 bp, Homo sapiens
ggcacagtggcttacatctgtattcccagcacttttagtggctgtggcagaggatcccttgaggccaggagttcaagaccagcctgagcaacatagtgagaaccacccccaccccrcgccatccctatttaaaaatattataaataaataaaacgttgatgatcttaaatagtccacttaacctctaaccaacacttaccctatttttctgcgattgtttacacctaaacttctcaaaagttgcctatattcatggtttccattccaattaattaatcaactgaaagactcctcttgccataagggtcaaggaattttccaaggttgaggacaagggtcaagattacagtaggctggtacagtgagttggaatcactttttctgaaagtttactcacaataaagtggactggagaaaagaacggaagatgaacagctttgtcagatttctcttctgctggattttctgaatttctcatgtttgctctggatagtttttattttgtgcttgagtgaatctgctgtttccttcctcatatgcgtattttagttcagagtttgtttttctttttttaagtgctcttatcctaacagatgtttttaatatatcatgtcttggttt

SEQ ID NO: 544551 - DNA, 655 bp, Homo sapiens
ctggggatggtaacaaagctctggcaatgggtggtggtgatggttgcatgactatgtgaatgtacttaatgctactggagtatgcacctaaaatgattaaaatagtaaattttatgttatatgcattttaccataacaaaaaaaattctagagtcagcgaagacaatgttatttcctgtataatccatataaacctacagcctactacttttgaaacayagaaacttctccatgtttccaaaattacattaccgagggatgccaaaaagaaaaagactttaagggatgggagatgcacctgtatccattctacccagagcactcacatgaaacatttcccagagaacatggcagcccaggtccctgtttcgtttgcctcggtgccctgtgccccgtgccctccccatatccaggcaaagctgctgaagacccagagcggccttctggtcaccaaccacctgctcttctgattttctttctgaaacatcattctctctttctttcccaatttcaggagagaatctaatatactcattcacactgaggtgtaaggctctaagaagatgtacactgcctgcccagggatatatccagttcacctggaagctaagcaagaagaattaaaatacagaaatgggaataaagtttgcaacct

SEQ ID NO: 544552 - DNA, 665 bp, Homo sapiens
ctgggcgcggtggctcacgtctgtaatcccagcactttgggaggccgaggcggtagaatcgcttgagcccaggagttcgagaccaggctgggcaacaaagcaagacactatctctacaaaaaataaaatagccgaatatcgtggtgtgctcctgtagttccggctactcaggagcctgaagcagaaggattgcttgagtccaggagttggaggctgaggtatggcaccactacactgaaatctgggtgacagaacaagtccctgtcttaaaaaaaaaaaaaaaaaacaaaaaaactttctaagtgaataataaaaaatatgtccttacatttgtgtctatacacaaatgtatatcatttgtgtatatcattcacaaaacatttatgtacwttttctcattattggggagttatttgcttagctgtagaaatgacaggattgaaaaagtgccttctcaggcccagggatgaattgctgacctagaataaattacagggaagaaccaaagttcttaaaatatcatctattctggcctatcaagacaacagctatatcctcaaaccatctctatcaaaatttactcccttctggttcctctcccagccatgtgcaggtagaacatgcatctaaaataaaatggtaaaaacctggcttgtagcatggac

SEQ ID NO: 544553 - DNA, 665 bp, Homo sapiens
ctgggcgcggtggctcacgtctgtaatcccagcactttgggaggccgaggcggtagaatcgcttgagcccaggagttcgagaccaggctgggcaacaaagcaagacactatctctacaaaaaataaaatagccgaatatcgtggtgtgctcctgtagttccggctactcaggagcctgaagcagaaggattgcttgagtccaggagttggaggctgaggtatggcaccactacactgaaatctgggtgacagaacaagtccctgtcttaaaaaaaaaaaaaaaaaacaaaaaaactttctaagtgaataataaaaaatatgtccttacatttgtgtctatacacaaatgtatatcatttgtgtatatcattcacaaaacatttatgtactttttctcattattggggagttatttgcttagctgtagaaatgacaggattgaaaawgtgccttctcaggcccagggatgaattgctgacctagaataaattacagggaagaaccaaagttcttaaaatatcatctattctggcctatcaagacaacagctatatcctcaaaccatctctatcaaaatttactcccttctggttcctctcccagccatgtgcaggtagaacatgcatctaaaataaaatggtaaaaacctggcttgtagcatggac

SEQ ID NO: 544554 - DNA, 532 bp, Homo sapiens
catgcctggctaatttttattttttgtagagacagggtctcctatgttgcccaggctgacctcaaactcctgggctcaagtgatcctcccgcctcagcctcccaaaatgctgggattataggcatgagccactgtgcccagcctacttgttttttaaattaaaaaaatatataaaaaatattatattttggagtgactttaggtttacagaaaagttagttaaagataatacagaaggttcccatatgcccttaatcagtttcaggttttcccaaatgttatcaccttacatttgtcaaaactaagatgccaatattggtacactactaccacctaaacagcatgctttttttttttcaccagtctttccttaacatcckggatccaatccagaataccactgacttagttgtcaagtttccttagtctctttggttgactttattttcaaatcactaaattaatataatctgaaatggactctggacttcttgttaagtgaagcagtatcctttcctaactgtttaaacca

SEQ ID NO: 544555 - DNA, 565 bp, Homo sapiens
cataatggacttggtggcacagagcactacctaattaaaggctttactaaaccctactttttccttctagataattctaccagtccaccttattctcattccaaataagcacatgggtcctccactgtggcatcaatttacctggtttggtggggcaggtggaggcacatacacaaaggctgtattgtcatttcctgtggcagatgctttgaggcccattaaagttgactttgcagcagaaagctaccccagagctgccgttgagtaacaggccatcatatagtgtaagctccgagtcactaaacactccaataatgctgcttcagaaatttgtcaataatgatmaaaaattattcatttgctagataataggctagagcaaaggcagaggagttgatttccagcaaattgctcattaaccagagtgacagtggggtgtgagacccccttgattcccagcagggtttagcatctgcagtgcagagagggaggggctgctccccaggctgcccccatccccattcctggcatcctctgggtcccctttagggattgacagtgagca

SEQ ID NO: 544556 - DNA, 521 bp, Homo sapiens
accatggggagatggcaagtcagacacagcccgttatacccrttcctttacgcagtttagacatgagtgaccagcattaatgttaaaatagagatcatgagactgatggaacagactctttgtggtaataagagaccaaattataaacatattatggctccccttgtaacctgttaaatatgtataccgggccaacccattcagcttaaattctcatccaactcctcctcctctgaagtgccagtttccagtctctaccagaggccaagcttcccagcctctccaaaggagcaccctgcaggctgcagtcctttacaagacatggaagggtctcctttgctaaatttacagattgtgtgatttttaagttaacagagctctggccaacagcccagctaaggtcccagtcagcagacagtgccaccatcagacgagggaggaagccttcaaatgaccccagagcagccaccatctgagcagcgcaaacacactagccccccgcagatatgcccaggtccctc

SEQ ID NO: 544557 - DNA, 590 bp, Homo sapiens
aaggactcagacaagtgcccagtcctcaaatccttgcagatcttctgaggccacactgtcttctgaaactctaaggaggtaaatgcctatggttggtctgctatgccatcccgtaacccacttgcagagtgtttgcttcccacttttgcaattttgagtgttgctggtttgcacaggatgtttccacctggagacacaacattggttccagtgaagtggaaaacgagatgattacatggccattttgggctccatacaccactgaacctgcaggaaaagaggaaggtcactataccggccagagtgatggatcccaattgccaaggggaaatttagttgctgctacatgatgtgggatggtggggaggaaggagactagttctagacccaaaggattctctggggtgcctgttggttcttgcataattaatagtacaagtgagtggtgaactatcccccaaaaagacagaccattgaggattcagacccttcagraatgagtgtctggttcccccacccaggtaagacaccccacccaactgaggtcaaaggggacatgaaatgatggtggaagagggctcatgatggca

SEQ ID NO: 544558 - DNA, 510 bp, Homo sapiens
gtcaggacatccaggcatggattgggctgtaactgaggttgcgtaarccttcacctttgatcctttgagttctcagcatggcaagggccttgaaggctggaaggggatttagggatccttcaatctgagcctgtagccaagacttggaaccacttgtcacatttcttagggggccatcccagcaccacttcttgtctgtggcaacgggccactctctggtccaaggcagccgtgccatcttaggagaggtggctgggaggctcaagtgaaggaaatgaagtgttctgggagggaggtagacatttctcatgatccgttcaacactaggaaagaagacactttacatttttctgagcatacttataaatttataagaaaattctgcatttttattttattcaatgacttagaagccaactagtctcctttgaagattctggaaggaggcctttaaacttgagtctggccctatgaaacctggtgaacgctgaaggcatcctgggccccttg

SEQ ID NO: 544559 - DNA, 510 bp, Homo sapiens
gtcaggacatccaggcatggattgggctgtaactgaggttgcgtaagccttcacctttgatcctttgagttctcagcatggcaagggccttgaaggctggaaggggatttagggatccttcaatctgagcctgtagccaagacttggaaccacttgtcacatttcttagggggccatcccagcaccacttcttgtctgtggcaacgggccactctctggtccaaggcagccgtgccatcttaggagaggtggctgggaggctcaagtgaaggaaatraagtgttctgggagggaggtagacatttctcatgatccgttcaacactaggaaagaagacactttacatttttctgagcatacttataaatttataagaaaattctgcatttttattttattcaatgacttagaagccaactagtctcctttgaagattctggaaggaggcctttaaacttgagtctggccctatgaaacctggtgaacgctgaaggcatcctgggccccttg

SEQ ID NO: 544560 - DNA, 544 bp, Homo sapiens
tgctccagggctacgtggctggatgcrgtgctatgcagaaagcatgctccttcatctttaaaaaaccctgcagggtagggatccttgttccattgtgaagataactgtgtaaggctcagagaatggcaagaactgctctagctcatgcagcacattagccagggttctttagttgtaagcaagagaaaaacaggttctgtcttgcataagcagaacagaaatgtattagaaaaataaagggcagcacaaacatggccagaaggaagggaaaacgctgcggaactggtgacaggaggtgtgcgtggacatatgccctgccggccccagacacgggccaccaggtcacactggcctctcccagtctcagcctccttttcccatggttccgatccacagttcagggcagacatctgattggacacaatttacagtggctgcatctgactgtccctgtttaggacaggtgcatctgattgggcaagactttcagggaaaggacacctgattggacaaatgactcagggcaggctcatctgattggctg

SEQ ID NO: 544561 - DNA, 544 bp, Homo sapiens
tgctccagggctacgtggctggatgcggtgctatgcagaaagcatgctccttcatctttaaaaaaccctgcagggtagggatccttgttccattgtgaagataactgtgtaaggctcagagaatggcaagaactgctctagctcatgcagcacattagccagggttctttagttgtaagcaagagaaaaacaggttctgtcttgcataagcagaacagaaatgtattagaaaaataaagggcagcacaaacatggccagaaggaagggaaaacgctgcggaactggtgacaggaggtgtgcgtggacatatgccctgccggccccagacacrggccaccaggtcacactggcctctcccagtctcagcctccttttcccatggttccgatccacagttcagggcagacatctgattggacacaatttacagtggctgcatctgactgtccctgtttaggacaggtgcatctgattgggcaagactttcagggaaaggacacctgattggacaaatgactcagggcaggctcatctgattggctg

SEQ ID NO: 544562 - DNA, 600 bp, Homo sapiens
ggaagctgcagtgggctatgatcacgccattgcattccagtccagcctagtgacatagcaaggctctgtctgttagaaaaaaataaggccaggtgtgatggttcaggcctgtaatcccagcactgtgggaagctaaggctgaggtttgagaccagctcgcgcaacatggcgaaatcctgtttctactaaaaatacaaaatattagccaggtgtggtggtgcatgcttgtagttmcagctactcaggatactaaggtgggaggattgcttgagcctggaaggtcaaggctacggcgagctttgatggttccactgcactccagcctgggcaacgcagccagactctgtctcaaaaaaaaaaaaaagtcatccctaacatttatatacattacatatatcttgttttatatcataataacatagtataaaataaaaatagaaataatcctttctgcatgtgtatctcagggtgcagccctggggagacagagaagcttagatctggggaagctctcatctggccgatagggtttgcagtgtggctttctagaagctgtaagggtgaatgaaccgcagatgctcagccccacccagagaactg

SEQ ID NO: 544563 - DNA, 518 bp, Homo sapiens
gggggctggcatcccagctccaactcgaggagcctcagtttcctcatctgtaaactggagagagcccagcacttggcaggtgtccagtacctaatcacgcttttgccttcaagggaattccgagtgtccagcactgccgtattgccagcacagacggattttctctaatcagtgtccctggggcaggaggatgacccagtcacctttactagtcctttggagacaatttacctgtattaggagcccaggccacgctacactctgcccacactggtgagcaggaggtcttcccacgccctgtcattaggctgcatttactcttgctaaataaaagtgggagtggggcgtgcgcgttatccatgtattgcctttcagctctagatccccctcccctgcctgctctgcagtygtgggtggggcccgtgcgccgtttctccttggtagcgtgcacggtgttgaactgggacactggggagaaaggggctttcatgtcgtttccttcctgctcctgctgcaca

SEQ ID NO: 544564 - DNA, 580 bp, Homo sapiens
gggaggctaagggatttgctgcagtcaggataccctgcggtggaagcaggaaggggcaaaccaaggaatcccaaactcccaaatcctagctcctcgaattctcttcccagcgtgttcattcatgaacgtgggcctagtgatacctaatgcttcygtgtctctcctcacttgttctgctttctgataactcctcatagaataagagagggaggaaccagaggacaacagcaaatgggtacagggatggtccctgccctcacggagctcggagccagggtaagaagaggggtcaggtattagagaaatgtatgtacaggatcgggtacatatatttcaggatcaggggtcagatattagagaaatgtatgtacaggatcagtgtggtggctggcttatactgagctcccaatatttttaagttaagaacattgttagcatctatcatatacatcttaatgtatgttgaggagcatgttttggataataatatttatgggacacttatgtgcacaggaccaggcttaggaggttcagtttgaagactgtttctcctgcagtgacccttccagggctgattaag

SEQ ID NO: 544565 - DNA, 580 bp, Homo sapiens
gggaggctaagggatttgctgcagtcaggataccctgcggtggaagcaggaaggggcaaaccaaggaatcccaaactcccaaatcctagctcctcgaattctcttcccagcgtgttcattcatgaacgtgggcctagtgatacctaatgcttctgtgtctctcctcacttgttctgctttctgataactcctcatagaataagagagggaggaaccagaggacaacagcaaatgggtacagggatggtccctgccctcacggagctcggagccagggtaagaagaggggtcaggtattagagaaatgtatgtacaggatcgggtacatatatttcaggatcaggggtcagatattagagaaatgtatgtacaggatcagtgtggtggctggcttatactgagctcccaatatttttaagttaagaacattgttagcatctatcatatacatcttaatgtatgttgaggagcatgttttggataataatatttatggracacttatgtgcacaggaccaggcttaggaggttcagtttgaagactgtttctcctgcagtgacccttccagggctgattaag

SEQ ID NO: 544566 - DNA, 509 bp, Homo sapiens
ctggggaggcgcacaccttytggggcttagctgcttcatcgttgacggtcacgaatggatgcagccatggggacccgagtcatagaaagcggaagcccagagaaggagagagatttgctcggggccccattctcaagctgactctgcatggcatcacctcgtcacttggtggcactgaccaccgccagtggcacgttcatctcaggagcccggtgtgcacagccctgttcccctgtctgcaggaagatcctgctcatcagacccaagatggccttggccaatgaaggcaactaccgcgagctgcgctggttcaccccgtggtcgaggagtcggtgagtcgggtgcctgaccactcctgggatgtgcgttaagcacctccgctgtgtgtagccttgggtcctgatcatgggagtgttaccggtggagggtgtccaggtttttgacattttgaacaaagaatgggacaaaaagcacaaagaaagccaaaaaagaatgaagcaaccaaagga

SEQ ID NO: 544567 - DNA, 532 bp, Homo sapiens
tgggaactagagtgcacaggtgtgttggtgccagcarggatggactccattcacttggtcctgcttcattccacccctcgcaggagcaggagcacatgcgagtgggtgcaggagccgaggtgagtgcttttgggtgctggcaggagtaaaactccatgtggccccgtggcagcatctagggggatgcccacgactcctgaaggcccagaaaatgtgtcacagtcactgctctttcaacttggtcatccatggatggcttaagtattaacagctcagtggagcatcagtgtgactgccctttgcacccatacccaagttcttgtctggcattcaggaggaatgaggtcacgtgaacaaattggagatggtaaatgtgggggttttattgctgatgaaagtggtactcagcaggaaggggagctgaaaggggaatggagtggggaagtaatcttcccctggagcaatgccatcaaaccgtccctctgaagtcaagcctcttctctctaatgtccaaccataggtctccaatatc

SEQ ID NO: 544568 - DNA, 532 bp, Homo sapiens
tgggaactagagtgcacaggtgtgttggtgccagcagggatggactccattcacttggtcctgcttcattccacccctcgcaggagcaggagcacatgcgagtgggtgcaggagccgaggtgagtgcttttgggtgctggcaggagtaaaactccatgtggccccgtggcagcatctagrgggatgcccacgactcctgaaggcccagaaaatgtgtcacagtcactgctctttcaacttggtcatccatggatggcttaagtattaacagctcagtggagcatcagtgtgactgccctttgcacccatacccaagttcttgtctggcattcaggaggaatgaggtcacgtgaacaaattggagatggtaaatgtgggggttttattgctgatgaaagtggtactcagcaggaaggggagctgaaaggggaatggagtggggaagtaatcttcccctggagcaatgccatcaaaccgtccctctgaagtcaagcctcttctctctaatgtccaaccataggtctccaatatc

SEQ ID NO: 544569 - DNA, 331 bp, Homo sapiens
cctgtgtttccctccacctttgatccctgagtcaggaatttgtatcttggtttctgaaatctttgagagtggarctgtgcacaattgctttcctgagttcagcagttcacacaagatcactctaattaagatattggtgaaaagtcagcaggaaggaagttttgaataagaaaagcagattactcaactgtcagacacagatttatattctgggctaaataagactcttcattacacatagtcttaaaataatattaatacattaataaaagtgataagagctatgaaagccagatatattgctaacaaaaataataaacgctgggtttat

SEQ ID NO: 544570 - DNA, 670 bp, Homo sapiens
gctgggcaaacccaatttatgaatggagtctgattttagttagattgcctgcaatcatggctacacaaagattcagtttattagaaaggtaggcatgtagaagaaaactgtatagaccagaaaatcctcattttccagaactgtcaaatacaataaagcaaaatgatttttttggrttctttctttcttgtagctcagttccataaaaatacaatgaagcctctttctcttcctaattattcagccctattctcttttgttagagttcaagtccagaaaaagaaaagctataaagatgttgagtgaactattttccctttcccaatctaatataagctggcagaaaaatggcttattttttatttgactctccatgttactaaactggtaatatggagagtcaaataaaaaataagctctttctagtgaaatgtccttgttaaaaaaaaacaaaaaacaaatgaagttagacgtgggattttatcgactgctgccttgttgatattcaaagcacagcgaatcacagttagtaaaattgcatagccaatacttattaaacataattaacatgtccaaaacttaaatatgaaagtgaagtacctcctctgaccctattaaaagggtttctcacagtacctagcaaaaagctgtgaaaagagaagtgcttgct

SEQ ID NO: 544571 - DNA, 670 bp, Homo sapiens
gctgggcaaacccaatttatgaatggagtctgattttagttagattgcctgcaatcatggctacacaaagattcagtttattagaaaggtaggcatgtagaagaaaactgtatagaccagaaaatcctcattttccagaactgtcaaatacaataaagcaaaatgatttttttgggttctttctttcttgtagctcagttccataaaaatacaatgaagcctctttctcttcctaattattcagccctattctcttttgttagagttcaagtccagaaaaagaaaagctataaagatgttgagtgaactattttccytttcccaatctaatataagctggcagaaaaatggcttattttttatttgactctccatgttactaaactggtaatatggagagtcaaataaaaaataagctctttctagtgaaatgtccttgttaaaaaaaaacaaaaaacaaatgaagttagacgtgggattttatcgactgctgccttgttgatattcaaagcacagcgaatcacagttagtaaaattgcatagccaatacttattaaacataattaacatgtccaaaacttaaatatgaaagtgaagtacctcctctgaccctattaaaagggtttctcacagtacctagcaaaaagctgtgaaaagagaagtgcttgct

SEQ ID NO: 544572 - DNA, 670 bp, Homo sapiens
gctgggcaaacccaatttatgaatggagtctgattttagttagattgcctgcaatcatggctacacaaagattcagtttattagaaaggtaggcatgtagaagaaaactgtatagaccagaaaatcctcattttccagaactgtcaaatacaataaagcaaaatgatttttttgggttctttctttcttgtagctcagttccataaaaatacaatgaagcctctttctcttcctaattattcagccctattctcttttgttagagttcaagtccagaaaaagaaaagctataaagatgttgagtgaactattttccctttcccaatctaatataagctggcagaaaaatggcttattttttatttgactctccaygttactaaactggtaatatggagagtcaaataaaaaataagctctttctagtgaaatgtccttgttaaaaaaaaacaaaaaacaaatgaagttagacgtgggattttatcgactgctgccttgttgatattcaaagcacagcgaatcacagttagtaaaattgcatagccaatacttattaaacataattaacatgtccaaaacttaaatatgaaagtgaagtacctcctctgaccctattaaaagggtttctcacagtacctagcaaaaagctgtgaaaagagaagtgcttgct

SEQ ID NO: 544573 - DNA, 440 bp, Homo sapiens
cctcctctgaagttctccttatttaacagttcatagagtggaaggcagtcttttgtgaaagtgtttcctgggatttaaacttttatcatataatatggctcctaaatcttttggaatttatagttggatggggtagagagaggggaagggagagggatagagatgtccccttaggaaaataatttattaataataaataaaaggatgaagtcataaaagatgtgagctgaggagaagctgtggtttgagagccagggaaagacagtgattctagtctcacctttgtaaaaggaatttactctctttagacgttccttagcaataacatgagacacttgggcaggttcccttgaaaggcccrcttcctctaacagtcagtgattaccgtgtagaaagcagagtgcatgccattgataaatagggtgatggcattaaaagga

SEQ ID NO: 544574 - DNA, 654 bp, Homo sapiens
aaagtaaaattgagcatgtcagggttcagttaggttcatcttctgcctgcctgtcattatttttacttgaggatagaaagattaatgtatctgttgtctctatgtactgagaactgtgctaagtgctgtggatacagatattaaatgaacagttccaagcacagactgatacatgagtatgtgctgatcatggtatgcacataacttttcagtccttatgacaaggaagtgagacacctctgtccactgctgactagaaggttatgttataagcagcgatcttctagactacagcagccctacacagagattcagaaatgcagagatttttgcagtgagttattaaatgggtagcatcccaaacacaacagacaggaactaacatgatagaytctgtgttgaggttctgacctaccaggatttcttctggccattttggatcccagcctattctttatagcttttgggaacccaaatcccccttttgttttctatttccctatctctgaatcctcatggtcagtagaaaagtttgtattgtcaaggagtttcccagtgttgtagcttcatcctattttctcctgactagaataaggaacagccagacaggattttgttcatagtatctcctcctatactgaagattgttaagtc

SEQ ID NO: 544575 - DNA, 603 bp, Homo sapiens
ttatttttacttgaggatagaaagattaatgtatctgttgtctctatgtactgagaactgtgctaagtgctgtggatacagatattaaatgaacagttccaagcacagactgatacatgagtatgtgctgatcatggtatgcacataacttttcagtccttatgacaaggaagtgagacacctctgtccactgctgactagaaggttatgttataagcagcgatcttctagactacagcagccctacacagagattcagaaatgcagagatttttgcagtgagttattaaatgggtagcatcccaaacacaacagacaggaactaacatgatagattctgtgttgaggttctgacctaccaggatttcttctggccattttggatcccagcctattctttatagcttttgggaacccaaatcccccttttgttttctatttccctatctctgaatcctcatggtcagtagaaaartttgtattgtcaaggagtttcccagtgttgtagcttcatcctattttctcctgactagaataaggaacagccagacaggattttgttcatagtatctcctcctatactgaagattgttaagtcctctc

SEQ ID NO: 544576 - DNA, 492 bp, Homo sapiens
agctgtttgagttggtctggagatggagagacccagaggaagagctatgagtgcycagaatggggtggggggggggtgggagtgggttgtgtagggcatgggcttgcccctgactgaacccaaggctctgtcttggagtccattgaaggagcctaggatgagaacagaggaagttgtacactaaagaatcctctttggtaggagcatgcttccctgtgggcctgtgtttgagtggaagcctggctccccttaaggaacagacatcagggttagtgcactgagatcatctcacctgttcctctgccttcataccccagtgccttcaaatcctctcaaccacacaaggatgtattctactttgagtagtagagaaggctgaaaagaatattttcatgcatgccctccaaaaataagatcctggaatgccaggagaaaagggatgaaaacaaggtctggttcaataatgctctgatgaagagagacagactatgc

SEQ ID NO: 544577 - DNA, 591 bp, Homo sapiens
aactctgcaaaggactggtctagtggtgggaaaaatagatggcaaaaacaatatataaaggctgacaatgttattttaaaaaatagatgtggacacactggctactggctattacattactcattataggacagaagtgaatatcatggtttcaacatcaatatgtkgcagccccatggctttattcattcttgcggagtacgaggaaataaatttccattctgcagtccactcaggggtgagggatgagaacctcactggaacacgtcactgtgatagcagcaggtggcagttaggatctggtggaagaattgtacagacctggaattaagtctcagatctggctcacccttcaggtgaccctgagaaatttacttgtcctctttggccttcagtctcctcatctgtcaaatggagactataatggtctccactgataggatgattgttgctgctattccgtccaacaagtttgacattatattttttaaaaggaaacagaaagtttcttagtttgtgattttcctcttctctagaaaagaagaggatatttatgttattgataaattctgaggtacacagagatgacag

SEQ ID NO: 544578 - DNA, 625 bp, Homo sapiens
tttttttgtttgatatatacaggatctttttctattaaatattaatcttaaattttggcaaatagtatctcttatgatttgttttttagtgagactcaaacttttaaagatattttcttattcatggacatttcacttttgtgttttgaaagactcatttttttttctttggtagttcttccattgcttgtctgcatgcagaattctccatatggaaaaaaaaaacctaaatcattttttattttttcaaatgtttaatgatttttttaaatgaaaattttgaagtactgaatttcaaatgttttgtcactaggatcattttgccctttaaaagttattgaggacttcagagagcctatgtttatatgagttataccttgccatgtatattatattagaaattaaagtgagacattttacaattacatttggcaatacttttaaaataattttgtkgttaaactgttttaaaagtattgctaaataataataacttactacattaacataattaatgtatttgtaaggaaaaatagctacatttttaaaacaaaaacaatttttgagacagggaatattactttacctttttgcaaatctcttcaatatctaacttaatagaaaa

SEQ ID NO: 544579 - DNA, 607 bp, Homo sapiens
tcaaacataaaatcaatgaaagtttctgaaaagtaggtgaactgaaaatgtgaacacatatctccactatttctattacagaattttagatatttctgattttatatatgagccaagaggaagaatcattggctctatgaaggtgtaagattccaagcccctttgacaatgttgtcactacccatggccctgggatgggtactgttatgttgggaagagcaagaatgggagggttgcttggaaaatatgatactttgttgtatgtcagcctttaatttgttaattcctgctaatacccatgaccttacagaattcacagatttgccagctctggtttggctaygtgacttgtttactgcaatgggacaatagcaaataggatgcaagcagcggtttagcaaataagatgcaagcagatgtctgacatttttacacttaggcttttcctcttttgctgccttttgagcttcatgccaccatgtaaacaagtatgggctagctggtgagatgatgagagtcatgtgatctgtgacccagttacacccatcatctctgctgagagcaagtcaactggcagatgtgcgagtggggacgtttggaaccagcc

SEQ ID NO: 544580 - DNA, 333 bp, Homo sapiens
tggggctctactccactttgcactcctagcatcctggtcagggcctggagcagtctaggcacagracaaaggtttgttgagagaaggaaggcctgcctgtgaaggcaagtttgcaatcgaccttcctaggaccaacagaggcaacaccgtccccaaaaccagtcttccccaggcctagggctcacaccaacctcttctgaacctggagcttcctgaagtcacttttcctgggcccaggaatcaatgaagggagaccagcccccctcaaaagaccccagcttcaggcctggcagggggtgtggattgggctgtgggtgggagggactgagtttt

SEQ ID NO: 544581 - DNA, 620 bp, Homo sapiens
gagaccaatggaagtgggcagagggtcatgggagcagactgctgtttgtaaggtgcagtcaaaagattcagcagattggaagaaacaaacaaaatgccaccccctaccaggatccagtttcttctaaggccagttaatgccagggtcaaaactggcctaggtggcaaagaggggaccactctgcctctattgctttggaagtggcaagggtgcagttggcgtctctcttctcagtggctcacactttagacccctggtgcctgggctccattccctaactctgtagggcttcaggaagaggaaagcctgagactgggctacaggaagagggccagaaagggacagggatggacgaccaaaaggcggggcggggtggggggaagaggttgtgctatcagtatccttacagagggggagcagagtgcaaatttgcatcaatcatttataagctcttgccataggctgctgctactgagcatctcctcacacacttaaaaatattgacccmaaagaaattccgacctttctttctttctttttttttttaaagtgcaaaaagctctctgctgccctagagagaggatcttgggacaggccgttcaatgcaaagtaaaaggggg

SEQ ID NO: 544582 - DNA, 463 bp, Homo sapiens
gggactttcaagtgctagaaaacttggtgcttatagcactgatggctatacttcagtgggggacaaagctagtacagtttacccttcctgcagagaaaggaattgtttgctgttgtaacctatctggctttcaggaataattagtagaagagatgaggggaaaagtggtagatgagatattcataatattccaaggaaaaatagtgcatttcagtgctgtgataaaagggctttttttaggttctaaggcgttgaagaacaagtcatagaatatagagttggaagaggattaagtgaaaaaataggacattaaaaagtactgacttgggctgagcccagtggctcacacctcttgtcctagtgctttaggcggcagaygcaggcagatctcttgagaccagcctgggcaacgtggcgaaacctcacctccacaaaaatacaaaattatccaggtgtggtggtg

SEQ ID NO: 544583 - DNA, 626 bp, Homo sapiens
cgcacacacagccagggtctgcagcagcctgggctccggaacgtcgtgtcggccacaaagcagctcccttgcggggatgctcaggaagaggcactctggcggccttgtcaaatgtcacggcttcttcacaaatatgacatgagcacccacaccctgcaatttactgctgacatggagaccgtaatctgcattacgctagaatgcaccaagaacaaacttccagaattccatgccctgtggtttccaggagggggttatcccccatcccaaacacgaaatggctctagagtcagaaaattgcccccacctgggaacagagctgccaacatgttaataccagaaaacccacttctgccagcatagacgcgtccttttgcagtaaacagcaaagcagagaagggatattactgttttagaaaaaagctgcagtcaaacacctcatttttagtatctcagttgcagcagagtagaaataacgtgaatatagctccatccagcagtggaaactgacccatggggagccggcggggagtagggaaggggcccaggaagaaggggcaggtgtgagggaggctgtgcrtcctcaagggctacactgtgcttttggttcccactgtgtgttccga

SEQ ID NO: 544584 - DNA, 505 bp, Homo sapiens
agagcccagggaacaaggtctcatcaatggatagggggtttgtgagcctctttccctggaactaaggtgaagaaccatgagggaaggaaacggaagcataggaccatgcagcagtcctcaggccagtgatggacactcccttgactcttgtgtccattcttggcttttctttttctatggctccttcctagggagatttctctcccatctgtgacccagttgggagtgggaaactgtgtccaccatgccagcagattgccaaggcctgccgctgctgcacaggaaggaagctgrcttcagccagggccctgccattctccagttctgtccagggctgaacctgccctaggagctagccttgaaggagaccccttagagacaggtgtctaatggcctgtggaggggagaatgacctcaggagctgggatagcaaaagtagaaaaggttgaaaggagaatggcttgaggacagggcaaatcctcccaagtcctgtttaattcatcca

SEQ ID NO: 544585 - DNA, 630 bp, Homo sapiens
aaagaattggaggatggagagagaaatcagttatgcttatgaaaaattcaactacatttttacctttaatcctataatagtcacatttcatgcaaataaaatatagaatctcttttagttccctccctgcttctggttggtagttgcatgtactgctcaatatccctggcaagtaacattcagttataagaaactcaatgccattgggggaaagtcctttccatttgtgaatacttctgtggttaggaatttcttcacattgaactaaacttttcattaaatatgtattaagtgtctactaagtggcaggcactattttatgttcygaggatacaaagtccttgatcttatcagacttatcttctagtgggtacaaattctagatgaataaaagataactatgatgccagatgtttacactgaaatacacctagctatactgtaccagcaaatactaagaaggaaaataaataagtctcagtgtagaaatatggactacagacataaatttataagcatccagcttataattttcttcagatgctgagtataaatggcaatgagaaaagccccagggcactccactatcaatattcggggcaatgtagggggactagaaaagcagccaga

SEQ ID NO: 544586 - DNA, 630 bp, Homo sapiens
aaagaattggaggatggagagagaaatcagttatgcttatgaaaaattcaactacatttttacctttaatcctataatagtcacatttcatgcaaataaaatatagaatctcttttagttccctccctgcttctggttggtagttgcatgtactgctcaatatccctggcaagtaacattcagttataagaaactcaatgccattgggggaaagtcctttccatttgtgaatacttctgtggttaggaatttcttcacattgaactaaacttttcattaaatatgtattaagtgtctactaagtggcaggcactattttatgttccgaggatacaaagtccttgmtcttatcagacttatcttctagtgggtacaaattctagatgaataaaagataactatgatgccagatgtttacactgaaatacacctagctatactgtaccagcaaatactaagaaggaaaataaataagtctcagtgtagaaatatggactacagacataaatttataagcatccagcttataattttcttcagatgctgagtataaatggcaatgagaaaagccccagggcactccactatcaatattcggggcaatgtagggggactagaaaagcagccaga

SEQ ID NO: 544587 - DNA, 630 bp, Homo sapiens
aaagaattggaggatggagagagaaatcagttatgcttatgaaaaattcaactacatttttacctttaatcctataatagtcacatttcatgcaaataaaatatagaatctcttttagttccctccctgcttctggttggtagttgcatgtactgctcaatatccctggcaagtaacattcagttataagaaactcaatgccattgggggaaagtcctttccatttgtgaatacttctgtggttaggaatttcttcacattgaactaaacttttcattaaatatgtattaagtgtctactaagtggcaggcactattttatgttccgaggatacaaagtccttgatcttatcagacttatcttctagtgggtacaaattctagatgaataaaagataactatgatgccagatgtttacactgaaatacacctagctatactgtaccagcaaatactaagaaggaaaataaataagtctcagtgtagaaatatggactamagacataaatttataagcatccagcttataattttcttcagatgctgagtataaatggcaatgagaaaagccccagggcactccactatcaatattcggggcaatgtagggggactagaaaagcagccaga

SEQ ID NO: 544588 - DNA, 579 bp, Homo sapiens
aatttgtcaatctttttaaaaatctgaattacatttcctcactttcaaactacagagaaattcacccattttaattaaaaaactatagttctcatttacttggcaactcaaatctgatccactgcaattttttctgttgtatgggatgaatggatctaattttatcttcttccatatgctaactgtgtatctttcccctcatctttatcatagaataaattctgacattttgttatttccagattttttattttattaatctaactattcttatactagtacggcagtactgcctttatgtttatactatgtaaacgtgtaagttatatacatgtatatatgtgtatataaacattatttagtatgtacaatatgtacaaaagtacaactttagtagtatgttttaatagctggtagggcaagacatgttttttgaaactaacttttttattataagtttaaatttagttgcattgaggtttaaaaaacatagtctacataatattgattctagacaattygtgactctgtgacttgacagtggtcaatccttgtaaacattgtcctaggccagggcca

SEQ ID NO: 544589 - DNA, 645 bp, Homo sapiens
ttcacttcatagcacaagccctgtctatggccctgagggagggtgcttgtttcagacattgcaggacaggaattttcactaatcctctttgagaattatgttgctgctcagcaggtgtttatttttaccttgaattgatttttaaaattttttgtgttggtctttaactgtcatgtttatgtagtggcacctatcactctcgagatgagagtacagacagtggactaagcatgagcagctacagtgtccctcgaaccccagatgacttcctgaacagtgtggatgagatggatacaggttggtattctttattcctcttagtaacctgacttaacagtsggatatgttatcaccaggtctcataaggtattgtaagcaaagatgattcagaagaaaaccaattaaaatcctgtaaatttgaattaaattgatcctgctttgtctctatacggtgatttgtaacttgtcttttcctagtttaaaaaaatatatatcatggattggccgggtgcagtggctcatgcctctaattccagcattttgggaggccaaagtgggtgtattgtttgagcccaggagttcaagaccagtctgggcaacatggtgaaaccccatctctataaaaaaacatacaaaaataagtca

SEQ ID NO: 544590 - DNA, 348 bp, Homo sapiens
agttagcaagcaatagtgagatcagtgtcattttctaatcgtatacctcatatgctgtgggatgtggaaagccactaaacttcaaaatgcttatgaattactacagaagctgtctttaagtacttccwataggatttaacatatcatgtggctgttgtagggtgctgtgctcgtgtacactaacgtcagtatgggtgaggttaatgaaaaattccaagatccatggcccaagtgatattgaaatgtaaaattttgaaaaaactttaaaggcatttatatatcttcttagttaaatatggaaattatcaccttaatttattatactatgttggcaggattttggaaaaa

SEQ ID NO: 544591 - DNA, 540 bp, Homo sapiens
agtccctcctggggctctcagaggtgctgggcacacatactaaggcaycagggcaatcttcaacattcaagccaagccaagccaagccaagagtacttttgttttaagtattacttgtactgctctttaatataccaaaagcagaagaaaactttcagcgaaaagatgcaaacattgtccccacagaagtaagaacttgtaatttttcagtggattttctgttaatgtcagcatatgcctaggagtacaatttagcctggcttcacacattttggcagccaaggatattggaaagaccgtgctccttttccacttattaatcaggtattgaattgattctaggcagaaagctttctgaatagtttattttctaattgtatatggtaattttctaatataaaaagtgggatgtctttgaagccctgactaggcaggctctacattgtgtcaatataaaaaataaagtaaaatgcacagtattatatatattatggataatttgcagatcatttcccaggatatttaatgtttactctctgg

SEQ ID NO: 544592 - DNA, 464 bp, Homo sapiens
agctgccatacttcaaagggactggcaaaggaaaatgatcttgggagccatataagggcttgccagtgttctgttttggggcatatagtatatagagagtatacccttttgggctaccatggaagacggtttccaaaagtattgttttctccatgataccattttttcaggggcccagtgagtcatttcatgaaaaaactgaaggaaaggcaattgtgcacctatgggaactatgggttttttgctaagccctagccaaaattcctcacttgggtctaacatgcctccattctgctgccaggtttgtttctcttgaggagttgatgctgtaaaagaaagttagtgcakgtatttgtaggacgaaaggtacacacccacacatgatgggccatctttcctaggacagcattctttgctgcagcattagccagattatttccttttgcttcttcagtgttagcctt

SEQ ID NO: 544593 - DNA, 625 bp, Homo sapiens
acatgtaccctagaacttaaagtataataataataataataataataataataataataatctcctttctttttgcaaaagcggcaaattgcttcctcttcgggtcacttagatctctggggaccatkggacccttgcaaactcccaacttgcttactaagttgtgttagttgtaaactcacaatcttagagactgtttccttttctttctcgatgattgtttgtgacagttagttagccagggtgactaggtggctagtgggcaaggaagcccaagccacattattcatcttcattggggttgctaactatttaaaccttgaatgagccttctaccatgctcaaaattttcaggaggtattcctgaaaactgaatgtcttttcacacctgacacaaaagtcaggcacggtttcatttgggtgtattttacattgttgcacccttgcccaatttataaccttggggaatatctgtggcgtatagtttcacagaggtgatttacaaagctctctgcatttatcttttccagttgcatctattttgtcaaaatcttttaaaggctgtttccaacctgctactttaaaccattgttcagctttgtttttggggacgagtagctcaatc

SEQ ID NO: 544594 - DNA, 616 bp, Homo sapiens
tgtaccctagaacttaaagtataataataataataataataataataataataataatctcctttctttttgcaaaagcggcaaattgcttcctcttcgggtcacttagatctctggggaccatgggacccttgcaaactcccaacttgcttactaagttgtgttagttgtaaactcacaatcttagagactgtttccttttctttctcgatgattgtttgtgacagttagttagccagggtgactaggtggctagtgggcaaggaagcccaagccacattattcatcttcattggggttgctaactatttaaaccttgaatgagccttctaccatgctcaaaattttcaggaggtattcctgaaaactgaatgtcttttcacacctgacacraaagtcaggcacggtttcatttgggtgtattttacattgttgcacccttgcccaatttataaccttggggaatatctgtggcgtatagtttcacagaggtgatttacaaagctctctgcatttatcttttccagttgcatctattttgtcaaaatcttttaaaggctgtttccaacctgctactttaaaccattgttcagctttgtttttggggacgagtagc

SEQ ID NO: 544595 - DNA, 626 bp, Homo sapiens
ctgtcttttgcttactggttaacttgggtggtgatggcacctgggtccaaatcatagcaatatcatcttggatggaaaakgataataacagtcaaagacagagacagataacccaactataacgataaattaatagggtgaaactttagaactgtacaataatttataattcaaatactgtggatttgtttaaaatcttcacctgaagtggcagtacaattgtcccggtgctgctaccattgatcaaaacagtttaggaacattgaattttattgtaaaaaatctctgatacttttagttacttttagatgaatcactctcatttacatatttttttctgtcacaaccagcattaagcctacaaataatgcattagcactagtttgaaattgcagggagctgcacctgtaatatcataatcatggaattttaaattattttcatgaaaggttagttttaaagtctctctaaggaaatttttactacagtttttatacgccacatccttctgataaaatcaaatcaccccaagggacacactaggtaaatctatagtatctattaatataccattcctagattattggataagatgatagcaaacataatgaaaatttccatttgac

SEQ ID NO: 544596 - DNA, 607 bp, Homo sapiens
ccccttcttctcctttctctatctcttcaaccaattaccaaaaatgaggacagtagcattttgaaccagagtatttgattctgaatcttttctgattctattcattttccccatgatttaaccacagacaccaacctttttgggccagcttcttcttgctatatataatgctatataataatattcttcctgctaaaatcttccagtcactgtacaggtggttgaaaatggaaataggaaagtcacagtctctgcccttaagtgtgtatgtgtggcaggagtgagggcagggtgtcagtgagagacaggactatctggatttcctaggctaggaattcctaagcctagctggggaaggtgactgcacccacctttaaacatggggcttgtatctcagctcacatccracaaatcaggtagtaaagagatctcactaaaataccaattaggctaaaaagcaggaggtaaagaaatagtcaatcatctattgcctgagagcacagggggaggaacaatgatcaggatataaacccaggtattagagccggcagtggccaccccctttgggtcccctcccattgtatgggagctctgttttcactctatt

SEQ ID NO: 544597 - DNA, 479 bp, Homo sapiens
gctcctatggagaacatagaaaatcttgtactcattataaaatcacaattatcataataatattaacttggtaccaaagtaattgctgtttttgccattacttttaatggcattaacactattactaacctaataacagatttctgcattaaaaccatacttgtactttcattgtctcttttgagcctcacaacggccctttaagataagcagaataggtatcatatctaattgaacagagaaagaaactgaagttcagagagggtaagtgcctcatataaagatgcacagctttttagaaagaagtagcataaaagagacatgaacagtttttaygctaacactggcacttttttgctctctttgctatcttcaaaaacgatcttctttctctgttggttacagagtctgaatcctcagaacctcaaagtggcataggctggcatccaagcctgttgtagaattctttttaatgattt

SEQ ID NO: 544598 - DNA, 536 bp, Homo sapiens
atttctaagctgttgataaaagaaaagtaataatcagtgataattacatctttcctgcgtcatcaaaacttttaaaattatctgattctcgtggaaatgatagtyctagttgtaaaatagatggaggagaggagagagaaagaagttcaagtgctaagagatgaaaatgggccatgaggagacagtgcctttctggaagttgagtctggcagttaagtgaaggatgaaatccaaaagagcctctcaaaatgaaggaggaccagggtggagtccagggaacatgttgaaggcccaagcaaggtgttggctacaggaatggagaagaggagctgggtgggaaggatttttagaagacagaatttctaatatttgaagagtgacttgataaactagcaggattgaggagtctaagctgacttatagatatcgggcttgggcaactgagtggtgatatctattacaaggaagcccaggagaatgcacaggtttgaaaggaagtggaaggggaggggagagttgatttcatttgggctgga

SEQ ID NO: 544599 - DNA, 321 bp, Homo sapiens
atctcacaatataggggacagaaagatcaaggggcagcaggtgggttagaggaggaaagacctggagaccatgggggagccaaaccaactcttcctttcartcctaatccaaatttaagaaaataattagaacagtgtaagaggaatattgagaaattccctattcctttcacacaacaggcatctagcatgtttcctcttagggaagttctcatgggacagggagagaatggctttgtaaatgttcctcttacaagtactgaagttaagaatttcaagaaggaaatgaaaccactcctagaagatcccctcagtttagca

SEQ ID NO: 544600 - DNA, 655 bp, Homo sapiens
tgtttccactgtctttgacaccttcttcaccagggggcctggcaagtcaggtagcatgttggggttgatgaagaaatgcagcggcaggccagagcggtcgatggccaccaggtggttggtgataccctgctgccaggcctggagggtgatgcctgggtaaaaaggaacccctccaatgctctgcaccctggagttggttyggtttgagaggtagctcttggtgaggacattctccgaggtatggttttcctcaaatgtgaagttcacggtgttttggaaggcaagtccagcagaggcggtcacagcactacgactgctctggctgtcttggaagaaggaggccttgatgtggtcctcctgaataagagcagccccagcgtcgacactggtgatgacgtgggtgccatagttgaggaccaggagttctgccaggtaggtggccatccttctctggttgttctctagacagtcagagatgtcaaggagctccttcctaaaacctgagcttagctctaaagttgggttgattttgactgtgtagacgaggtttcttacctgaactcgggtagttatagctttgtccttcacttgaagtgttttcattctctggaactcagcagagaacttggcattgactttggaataaagacagaga

SEQ ID NO: 544601 - DNA, 497 bp, Homo sapiens
tgtgtgggagataacacaatactacaagatagaaagaagtacaatcatttgtcaacaatatctttagtctggtttagaaatcataaataattttattaagaggtccttgatacttcagtactagttcttcctttattcccctttaagagagaagtgatgatgggaatgatcattgctaacattttttgaggccttagtgtttttgttttttgttttgaggagtctcgctctgttgcccaggctggagtgcagtggcacaatctcggttcactgcaacctctgcttcccaggttcaagcaattccccttctcagcctcccaagtagstgggactacaggcgtgcgccacaaagcctggctaatttttgtatttttcaaagaggaggagctttaccatgttagccagactggtctcaaactcctgacctcaggcaatccacctgcctcggcctcccatagtgctgggattataggtctgagccaccgcgtctggctgag

SEQ ID NO: 544602 - DNA, 520 bp, Homo sapiens
ccctgtgggtgttgttctctccagagactctccatctctacctgcctagccagcccctaactgcctcytctcacaaaaggtacagtgaccggccctaggtcatgcagaaatttggctggcagaggggacaagacctgcatgaggcctagggacagaacattttaaggccaaagccaatgcataaagctgagcccttacacctgtgctggatgaaatcccaaccctacaataagaagttacttcctctgacaacacctgggttcactgaaaaaagaggagacagaaagcctcccgcaaacccagctcaggatgatgtgtcttgccttgtagtcagctttgccctccctcagtgggaaaaggggccaagttcagtgctgccagcaaacacagggctggcctggtgaccgctgtttacagcttgcactggggcccagggaaaatggcagggaagggtcccaactgggccactttaagaacacacaaccccaaacacaaggaaagggtgaagggacttatttgg

SEQ ID NO: 544603 - DNA, 544 bp, Homo sapiens
acagaaaagggaggccaggtggtttaaatcacctgtctgtggcctcacagctggtgagatggagactctacacaaatacacatgggaatccttatggatgcacagaaagacacacaggtaaagacacatgcacatgctcagaggtgtacccacaaatagcttatttcacctaaaccaaagtaggcgcctcaggactggtccagagctgtatcaggcaaaggtcccctccagcctgactccacattcttctcctgtccagatggcctatcccagatccaccagcttcacacatcactttaggaaggacaagttcagacctaaatggaggaaagacttcaggtttacactgcagtctgccaggttcatagtcaacccccagcctcagctccaaattgttyccccagtattccctagatagtcactgaaagaagcctcagctacactcttctgaagggatcgcacttccaaggagggagcacctccgaggctctgagcactgaccagcctccaatgctaggatcctgtccttcaggcccagatgaat

SEQ ID NO: 544604 - DNA, 477 bp, Homo sapiens
gggggtgagctcccccctccatctcttctgccatgtgaggacacagtgtttgtccccctttttgcccttctgccacatgaggatgtagcaacaggtgccatcttagaagcagagagcaaccctaaccaaatagtaaatctgctgatgccttgatcttggactttccagccaccagaactgtgaggaataaatttctattctttacaaatcacccagtctgtggtattttgttatagcagcaggaacaaaactaagataagatgtaaaagaaagaacatacrccaaactgttaatggtgggtttatctgaatgatgggataactaagaaacacatatatttttggggggagagatgctatattcaaaattttctgtattgtgtatatattattttataattaggaaaacaagttatttaaattatttcatttgaaaaaaccctaccagcacattcaggtcaagactaactcctccata

SEQ ID NO: 544605 - DNA, 595 bp, Homo sapiens
ccagaataaagatctagcagctatgacgctcagcataaaactgattacctgtaattaagttctcatcaaatagaaaagtttggacactccaaagatctcagagtggaggtaaatgcttatgtctctacatcccaaaactctcaactcaaggcatgcattgaaactcaaggactttccatgatagtgttaaaaacaaattctcattgcagtagaactcagtgttgcttgagtagttgcatgagtagaactcatgacagtgttgctgtcatgtcgtaacatgacagtatgaagttccactgcactacacacaaaaaaatcaccttcataacaaccaaaaattagatgagagatcacaatgccaggttttaacatcatattaaggaaagaggcgctaaaaagtgaaggaaagaggcactaaagagagtaggaaagacagtcttgaatcatctataccaccccttctccatctcctggcatcagcctcayggtgtgaagaatctgtgctcttgggagagggagagcacagtcatcgtggggctcggcattggaactcagtgctgccctgtcatggcagaaagtaacatggggcagaact

SEQ ID NO: 544606 - DNA, 604 bp, Homo sapiens
ttctctcaactctcctgattccccttcttgctccactttatgaacctgatgcatgtggattcctctctgatttgtcttcatgctggtattggtatttttgcttatgacagagaatgttttgaagacctcaggatggaagggaagacagcakgacttactgaacacattagagataaaagaaaataagggaagcttcttgagactgtagagggtgttatgacagaggcatccaatttctgcttctaaatgtactacgataaaataagcacgtccttaatgccttggcattagatgaatcaatctatttttctaaaaggaactgagctgcggtgctcattgctctggtccacatccagacttgagggtgtccagtgcctatgctcagaagtagccttagcttcagggtagctgggtatggggcttggtgggtcatcactatgacccagctcaagcagcaagaacagtgtgtgaaggagctggtaagtacttctgggagaggatgctgcaaaccctgttctctgagcttcttctgaagactttagggaatttcattttcctgtggtaatgggtagtgttggtgcttgtggctggggtatggtctctg

SEQ ID NO: 544607 - DNA, 604 bp, Homo sapiens
ttctctcaactctcctgattccccttcttgctccactttatgaacctgatgcatgtggattcctctctgatttgtcttcatgctggtattggtatttttgcttatgacagagaatgttttgaagacctcaggatggaagggaagacagcaggacttactgaacacrttagagataaaagaaaataagggaagcttcttgagactgtagagggtgttatgacagaggcatccaatttctgcttctaaatgtactacgataaaataagcacgtccttaatgccttggcattagatgaatcaatctatttttctaaaaggaactgagctgcggtgctcattgctctggtccacatccagacttgagggtgtccagtgcctatgctcagaagtagccttagcttcagggtagctgggtatggggcttggtgggtcatcactatgacccagctcaagcagcaagaacagtgtgtgaaggagctggtaagtacttctgggagaggatgctgcaaaccctgttctctgagcttcttctgaagactttagggaatttcattttcctgtggtaatgggtagtgttggtgcttgtggctggggtatggtctctg

SEQ ID NO: 544608 - DNA, 437 bp, Homo sapiens
cttagggggaggggagataataggagagaggtagggtgaggtaaggaggcagagagaaaaaggaaggagtagagaaggagagaaaggagttatggtgataaaaagaggggaagaagggaaagaagaaagagaaactgctaagagagaaggcaaaccctagaaagagagcaaagcagaaaccaaaacacaacagagagcggcagagagagaagagacacccttacctccccagggcccccagaaagtctacaggacatgaaccctacagtagctcagagcaccccctcctcagtgtgcagcagcctcaaaggascctgcacccttgccaacccttctctcagcctctgcttctctgggagggttaaacagctagtcatcctagaatctcattcccagacagcctgaaaacacccaagcattaaacaagcctggcaacc

SEQ ID NO: 544609 - DNA, 555 bp, Homo sapiens
gctggtattttagggcacctactcttccaagcgctgtatagtgtgtgcccagtggtcaccagggggaggaggtcatggagaagattctgtccagaaaaaaagataaccactggaagaaaggaraggagcagagcaaatgccatccctccaccagcctgtgggagggagactcaaagtagggttgaacgaaaccaaagaagagaaagaatcaacccagctcaattcactgtcctccctgccaaatggttgccttgggacccaacccagaaaggtcactgcttctctgcagcaagtgtaatccagagtataaactacagcatggagcaaattatatatgctgagctccatgtcagatcccagcctgacctggcttgccttccaaaggcagtgtttggaagttttcacttctaaaagggcgaacagtgcttctaagtcccagagctaaagggacaagatgctctctggctgagctccatggacagcctcagtttcagattcaatggaacccctcaaaggcaccacatcaccatctgccctgacccccacagccaaagt

SEQ ID NO: 544610 - DNA, 516 bp, Homo sapiens
gggcaggggctttttcctcttgcagtggcctcaggcacaagatatccccttgccacaccaaaacctccctctcctctctctcagcaggccccctcatggcaacagccatgatcaggaccaccagtgagatgtcaccaaggacatagctgagatagaaactggtcacaggccaagcctcacgaatacataaggggtccagagtcaggctctatccccatccacaggcagctctttctgattccacatctggccagctctgagacaagcctaacaccctgcttttgtctgggtcaagatgggagacagttggtcctggcggtcaggtasagcatctgttctgtatcaagcctcagctagatgagagaggagatgaacagaacaattttcttcttcttaaaattttattcccattgaaagagatatgtaaatgaataattaaataaaacatagaaattcctccagcatgagttcaatgagatgcttgacctttctctgaaacaagtgttctatagtgcc

SEQ ID NO: 544611 - DNA, 567 bp, Homo sapiens
ttgtcccaggaactgccactaccatatcctgctgtttgtgttagccataaagccccacaccattgcatctaggagctgccccagaagtactcctagcctcagcattcctgctggcctaaaggccaagcaggttcacacaaggccattgtcttcttgctctctgagtccccagcctattattcctccatctgattttmgtttcagcctcttaaaacacagctctcattgtaaaatctccttgaaaacctgtgtctccccaaactctctcaactcagatgtgaactccttagcctggtgcttgtacttctccagaccctgtttccagcccatgccacctctttttagcattacaacccaatattccccaacaggtcccttatgttcaagcttcagagcaactttcccgttattcttcagaactgacttgccctccccacctgtcaagactcagcttaaatgtggcttccacccagaagcttactctgacctccagcccatagggctcctaaaacactgaagtgttgacaccattcatcctgagcccgagagacttgcttcgttttgtag

SEQ ID NO: 544612 - DNA, 617 bp, Homo sapiens
gggggtgtttatcaatggcccaattcattctcaactatcccccttgtctgagccagcacagagatgggcattatgtcccagagctactaggaaaaaaacctccaagacatcgtcaccaattagagttcaaaggtacagaagccaaattgagacatatgagttgaaaaccagatgacatatttgaaattgaggatgtcccaggaaaatccagtgtgattcccatccccagagaccaatagaatgcttaattgctggtttttcatttatttgttctgatttccttcaacaaaggatgtggaagtttacagttaaaaatatgtattctataaagttgataaagcagaaattagaagtcaaagcaatggttccaactaacatagttattacaacagagccatatgatggactaagagcttcccagcaagcagagtgacaagggaagcacaatgggaaaataattccttcccctgccacctttattctgctggactgaccayagcctgcccttttttaaccattcccaagggtcaggtgtaggatcaggccaaagagaagctagatcccagcattcccctcaaaaaatggttgaacccaacttgctctcctgcatattagag

SEQ ID NO: 544613 - DNA, 490 bp, Homo sapiens
atggggccaggccaggatggggttggagggggctggagactagagctggactgcggactatggtccagatgaggggctggagatgttagggataggaagctacaggtctgtggccaaaaggagtggggggcactcaaagcccaaggctcagacaaccttcaggacagttctggtcattgtcttttccagaactgaaagaccagagacggcctcactttcaaaaagcatccttttattctcactcctcccttttattttattttttcaaataacgagttagttcactctgtgctggagccaagggggtagtttaatgaaaatcaatacagaaattaaakatgaggggagagcggggaggacggctcaatttcaagtccaagaagaaaatcaccaagggcaagagctggaaaactgctgcctgtctccatgcagctccttcacgccccaccctcatttcctggggcagcttcttggaatcaataggccctga

SEQ ID NO: 544614 - DNA, 463 bp, Homo sapiens
gtagtccaggctgtctcttcaataatgggaggggttccttcaggacttctcaatttgtactagtctttcccagccataattaaaagggttcaaaaagcccttaattctggatacataatactatcacagcactacacatwtattctgagaaagttacaataagctgatcctcaatgcctacagaactccaggaacttcaggcaacctgttgtcccaggatgtcatccttagggttgccaaaggccttaacagatacatgctcatctgtagcccataaaaaaaaaaggatgtgactgagactgtcttggttgcagccttggtaggatgtcagtcagtttatttcagttgtctatagtctataaagatttgtgaacatacactcactgggggaaaacatccaccacaggttaattgtggtactatgtttaccatatatggggaaaaaaatgcctcctttctcatt

SEQ ID NO: 544615 - DNA, 628 bp, Homo sapiens
gtccaggctgtctcttcaataatgggaggggttccttcaggacttctcaatttgtactagtctttcccagccataattaaaagggttcaaaaagcccttaattctggatacataatactatcacagcactacacatatattctgagaaagttacaataagctgatcctcaatgcctacagaactccaggaacttcaggcaacctgttgtcccaggatgtcatccttagggttgccaaaggccttaacagatacatgctcatctgtagccmataaaaaaaaaaggatgtgactgagactgtcttggttgcagccttggtaggatgtcagtcagtttatttcagttgtctatagtctataaagatttgtgaacatacactcactgggggaaaacatccaccacaggttaattgtggtactatgtttaccatatatggggaaaaaaatgcctcctttctcattgacgggcatttgaactgttttccttttcctgcaaagtcaggcatttgcaacttctttactaggacttgcttgatttgcattctttcccattcagcatattcaaaacatcttaatttttagctccctgaaaacactgtgtttctgccactccagcatgcattgatttgg

SEQ ID NO: 544616 - DNA, 638 bp, Homo sapiens
caaggagttgagacagaattgaaccccagcctctttaagtttaattcagagttcatggtcctaaaccccacagtggtgacttctggttcaatctttggcccttcaggtccttgagccaaagtgtgactcaggagttctcaatcctggatacacaatcgaactactagggagctttaaaatttttaggattctgacttaattggtctggagtaggtcctgggatgaatattttagctttccaagtgattctactgtgctgcgtgggttgaggacctctactctcttttgggagtcatttaaatgtatttaacctgaagagcttgtagtggtgttggagcaaaggggatggaggagatagcattggatctgttttctccaaggattctgtgactcaaacatttaacttggtcaagagggctgactggagatttttgtcttggtgctgtgggggaacagccaacagctccaacctctgagctgaaactgacttaacatttgtttaatgattaattccaaacagtaagtagctgaacttcttttggaacaattaccatttttccctttcaaaatgagttgcaaacacatgctggrtttgggctctctgtgtggatctgaggtctgggtgggataaggacttc

SEQ ID NO: 544617 - DNA, 610 bp, Homo sapiens
cctgcagcagttggaagaatctgaggaatagcatggtgactgttggcagagggagaaccagctctgggcatctagtcagttccttccacctgcctcagattggtttctaggacctgcttcctgtgactccaggcctgctctatgggrggctgctccaagggagttgccagatgtttgggaaccctgttgaagggtactgatcgccagccctagcaaatatgcctgccttggcccctggctcccgagccccagaagcatttatagtatcccatctccagcttggactatgaagggtgacattatttctggagccagcatttctctgtagtgtacatgtgagcatttgagtgtgtgtaagtgtgtgtggggcgggggttgctggaggcagggaggacccgaaagcatatctggcgaatcagggatgtcacttattcttgagttagccccagacaaggtcacacagtaagatgatgtgacatttctttctcttggcaggagggtggggtcgtagcactcttcaaggtttgccggcaggacagtttccggtgcttgtacccccaggcgctccgcacgctggcctccatctgctgcgtggaagagggtgtccacc

SEQ ID NO: 544618 - DNA, 530 bp, Homo sapiens
tgtacaaaatgttacttgctctcttctagagattggtgtgctggagtgaatgacaactactaattaaaatggtggcttattatcatgtaagaagtgacacaatttgtctaagacctggwgtaaaagatgaatcacttttatttgtagaaaattctaatttaaaaatatgcatttttagatgaacatctgtggtgtttttgacaggagacatgtgataattaaaaccttttttattttctgactgaaatgttcatattatatttttgctgtgtgccaatttttatatttctataaataagaacaaagcaagttttctagaacaactagaagtttatacgatttataatttttaagtccaagtgtcaaaattagatacctaaatcatgattataagtttgtatattgccaaaaaatatattggatattaactttccaacttaatgatctcttttttttaaatggatttctattaaagcagatgaattggtcttttgcaggacaaatgtacgttactgttctcaaaacactta

SEQ ID NO: 544619 - DNA, 544 bp, Homo sapiens
aaatattaatacacacacacacaatccttctcatttacctctccccaatttttttaacttttatttaagttcaggggtacatatgcagtatgtgcaggtttgttacacaggtatgtgtgtgtcatsggggtttttaatacagattatttcatcacccacatattaagcttagtatccattaattatttttcctgactctctccttactcccacattcaccctctgataggccccagtgtgggttgtttccctgtaagtatccatgtattctcaccatttagctcccatgtgtaagtgagaacatgtggtatttggttttctatacttgcattagtttgctaagcataatggcctccagctccatccatgtccctgcaaaggacatcatcttgttgctttttatggctgcatagtattccatgatgtatatctaccacattttctttatccaatatatcattgatgggcatttaggttgattctatgtctttgctattgtgaatagtgctagcaattactggttgtttttcaatgtttaagtttt

SEQ ID NO: 544620 - DNA, 544 bp, Homo sapiens
aaatattaatacacacacacacaatccttctcatttacctctccccaatttttttaacttttatttaagttcaggggtacatatgcagtatgtgcaggtttgttacacaggtatgtgtgtgtcatgggggtttttaatacagattatttcatcacccacatattaagyttagtatccattaattatttttcctgactctctccttactcccacattcaccctctgataggccccagtgtgggttgtttccctgtaagtatccatgtattctcaccatttagctcccatgtgtaagtgagaacatgtggtatttggttttctatacttgcattagtttgctaagcataatggcctccagctccatccatgtccctgcaaaggacatcatcttgttgctttttatggctgcatagtattccatgatgtatatctaccacattttctttatccaatatatcattgatgggcatttaggttgattctatgtctttgctattgtgaatagtgctagcaattactggttgtttttcaatgtttaagtttt

SEQ ID NO: 544621 - DNA, 571 bp, Homo sapiens
tgaggctctgtgaaattaagtagcttaatgaaattcacagaatcataactggactctaactcygtttggctcagaagttcttccctctttgcttccctaattttacaacttataaaacttgattttgacctagatgtgtttcattatttctaaatcaatcactgaggagtaaaatgcaatcgctataattgtctcagacagttgtccttactcagggacaattttgccttcaaaagtacatttgacaaatttggttaggacaatttggttatgacaattagctggggctgggattctgaggagaagtctcctactatctagcgaatggaggtcagggacgctgctaaacatactacaatgcacagaacatgcccccccccaccagaatggctcataatgtcaatagcaacattgttgaacaaccgtgcttaagggcttcgataaatgtgccctcatattgcttcctaatcaaataccaactgagttcctcaacatgccgcaatatatccacaaaacagactataaagagataaattattaagaaacagaagtcaaagtgactgaaagagca

SEQ ID NO: 544622 - DNA, 571 bp, Homo sapiens
tgaggctctgtgaaattaagtagcttaatgaaattcacagaatcataactggactctaactctgtttggctcagaagttcttccctctttgcttccctaattttacaacttataaaacttgattttgacctagatgtgtttcattatttctaaatcaatcactgaggagtaaaatgcaatcgctataattgtctcagacagttgtccttactcagggacaattttgccttcaaaagtacatttgacaaatttggttaggacaatttggttrtgacaattagctggggctgggattctgaggagaagtctcctactatctagcgaatggaggtcagggacgctgctaaacatactacaatgcacagaacatgcccccccccaccagaatggctcataatgtcaatagcaacattgttgaacaaccgtgcttaagggcttcgataaatgtgccctcatattgcttcctaatcaaataccaactgagttcctcaacatgccgcaatatatccacaaaacagactataaagagataaattattaagaaacagaagtcaaagtgactgaaagagca

SEQ ID NO: 544623 - DNA, 571 bp, Homo sapiens
tgaggctctgtgaaattaagtagcttaatgaaattcacagaatcataactggactctaactctgtttggctcagaagttcttccctctttgcttccctaattttacaacttataaaacttgattttgacctagatgtgtttcattatttctaaatcaatcactgaggagtaaaatgcaatcgctataattgtctcagacagttgtccttactcagggacaattttgccttcaaaagtacatttgacaaatttggttaggacaatttggttatgacaattagctggggctgggattctgaggagaagkctcctactatctagcgaatggaggtcagggacgctgctaaacatactacaatgcacagaacatgcccccccccaccagaatggctcataatgtcaatagcaacattgttgaacaaccgtgcttaagggcttcgataaatgtgccctcatattgcttcctaatcaaataccaactgagttcctcaacatgccgcaatatatccacaaaacagactataaagagataaattattaagaaacagaagtcaaagtgactgaaagagca

SEQ ID NO: 544624 - DNA, 680 bp, Homo sapiens
ttgatacgtcattatcatttcccaacaatcctaggaagcatttctcttggcaatgagttctttgaatatagggaactaaaaaattctatgttagctggtatcactccacctgctgtagagtgagagkgctctttgaggatgcaaatggaccaggtacacttcagccccaggacataaggattaatcacttattcctatgttgttcctagttcacctgcaattgtatcttcttcttatatatataaataaaagagatactacttgagacattcagatacaacttgtaataatatgtatcaatacagtcagttgagtctgagataccttcaatacactctatcctttcaccttagtgaccatatttttgttggataaaaatatctgctgatgaattgatatataaccttcaaataaattagaagcacttatttattgtaaaccatcctggactaacaccctcaacttacttcgatttactctagatgttggatgtcatctgggtgtctgaactagggtaaaaaatcttcaacccaacagatgacagttgggtagataggaaatggcagacttctgctcagaggtggctaacactgtaacaggttcaggtattttgaataatataaagaaaataatgaatttttgaaattttgatctttcactcaaatctttgccactctatg

SEQ ID NO: 544625 - DNA, 680 bp, Homo sapiens
ttgatacgtcattatcatttcccaacaatcctaggaagcatttctcttggcaatgagttctttgaatatagggaactaaaaaattctatgttagctggtatcactccacctgctgtagagtgagagggctctttgaggatgcaaatggaccaggtacacttcagccccaggacataaggattaatcacttattcctatgttgttcctarttcacctgcaattgtatcttcttcttatatatataaataaaagagatactacttgagacattcagatacaacttgtaataatatgtatcaatacagtcagttgagtctgagataccttcaatacactctatcctttcaccttagtgaccatatttttgttggataaaaatatctgctgatgaattgatatataaccttcaaataaattagaagcacttatttattgtaaaccatcctggactaacaccctcaacttacttcgatttactctagatgttggatgtcatctgggtgtctgaactagggtaaaaaatcttcaacccaacagatgacagttgggtagataggaaatggcagacttctgctcagaggtggctaacactgtaacaggttcaggtattttgaataatataaagaaaataatgaatttttgaaattttgatctttcactcaaatctttgccactctatg

SEQ ID NO: 544626 - DNA, 513 bp, Homo sapiens
tcaacctttccctctgcccagtcctgctttcctcactcactcacatatttattccagagataaccctctaatcactctctaataaacctgctgcatgcaaatctcagagtctaagagtctgtttcccttkgaacccaaaatgtgacatttagtgtccaagtagtagcaggaaggcagatcctagaatgacactttggagctgaatggcatttaggaaaaggaatttttaaaccattcatggatgatgagattcagtgtggcaatgatgaaaggaattgcactagcaggtgtaatatctcaggctattgagaaatactgaagaatagtaactgtaaggattaaacagtcatagaactgttgctagggtaattgatacattatagaaagtctatgaaaaactgatggtaattaatcattgatttaaactcagtctttcaccatctgagggcttccttggcaataaatatattcttagcttccttagtcaaaggacaaaaaagctttagatcaggc

SEQ ID NO: 544627 - DNA, 513 bp, Homo sapiens
tcaacctttccctctgcccagtcctgctttcctcactcactcacatatttattccagagataaccctctaatcactctctaataaacctgctgcatgcaaatctcagagtctaagagtctgtttcccttggaacccaaaatgtgacatttagtgtccaagtagtagcaggaaggcagatcctagaatgacactttggagctgaatggcatttaggaaaaggaatttttaaaccattcatggatgatgagattcagtgtggcaatgatgaaaggaattgcactagcaggtgtaatatctcaggctattgagaaatactgaagaatagtaactgtaaggattaaacagtcatagaactgttgctagggtaattgatacattatagaaagtctatgaaaaactgatrgtaattaatcattgatttaaactcagtctttcaccatctgagggcttccttggcaataaatatattcttagcttccttagtcaaaggacaaaaaagctttagatcaggc

SEQ ID NO: 544628 - DNA, 608 bp, Homo sapiens
tgtgtaatagacagaatttgtaacctttgcgtttgagttctttcctcattgctattaaagattcagtgatgtctgcagtattttccactttaaaacaaaaaatatgattaggttattatcctctttaaggctttctaatgtatctaaataactcagacaaaagtagtttctttagactcttggaaattgaatcggttatttaattaataaataggatttgaaaaaaaatgtacaagttttgagacagaacattctgagaatttaaaaacatttagctgttccaacataatgctagagaatatttagtccccctgatgtacttggggcttaatctatgccttgcatgcagcaggagcataagctatagaaagagttgttcgcctatcactcatggccactctactattagartgatataggatcaagctattctcctgcccagaatcttttgttggatcctcttgcctaacagcgttttacaagctgtgctatacattagtctggtaagactttcttccttatgaaaataaactcatttttccacattcaggtaagtttgggaaatgctgtacttaataccttcccttagagagtcacaatacacacta

SEQ ID NO: 544629 - DNA, 608 bp, Homo sapiens
tgtgtaatagacagaatttgtaacctttgcgtttgagttctttcctcattgctattaaagattcagtgatgtctgcagtattttccactttaaaacaaaaaatatgattaggttattatcctctttaaggctttctaatgtatctaaataactcagacaaaagtagtttctttagactcttggaaattgaatcggttatttaattaataaataggatttgaaaaaaaatgtacaagttttgagacagaacattctgagaatttaaaaacatttagctgttccaacataatgctagagaatatttagtccccctgatgtacttggggcttaatctatgccttgcatgcagcaggagcataagctatagaaagagttgttcgcctatcactcatggccactctactattagaatgatataggatcaagctattctcctgcccagaatcttttgttggatcctcttgcctaacagcgttttacaagctgtgctatacattagtctggtaagactttcttccttatgaawataaactcatttttccacattcaggtaagtttgggaaatgctgtacttaataccttcccttagagagtcacaatacacacta

SEQ ID NO: 544630 - DNA, 529 bp, Homo sapiens
atagctgataaaagcttgaaagttcaagtgggagttagctcagcaagggaaaagactaaagcaaggatagaatcaggaatgtggaacagcttgttcaaagatatgaaaccaaatgtgaatatgcttttgcactagtaaatagtttgtaatggctgaagcatagggtgggaggaaaatagtgaaagatgaagctggcgagtgtaattctcaacaagcaggacttgagtgctagactcaccatttttatcccacgtgccttgatttcaatataataaaatattgktttgccatatggagatggtatggaacaagtatagaatattttattgtcctcagataaaatgtgttaaatggtaaactgtagtatggcaatttaattctagtatttaatttctgagggatactttacctaagatgtaaaattgactctttatgagaaaaagaaatgcttgccacaagaatagtattacactggtatgaagaactaagacaactctttcatttattttaattaaataccaactgccca

SEQ ID NO: 544631 - DNA, 611 bp, Homo sapiens
agctgataaaagcttgaaagttcaagtgggagttagctcagcaagggaaaagactaaagcaaggatagaatcaggaatgtggaacagcttgttcaaagatatgaaaccaaatgtgaatatgcttttgcactagtaaatagtttgtaatggctgaagcatagggtgggaggaaaatagtgaaagatgaagctggcgagtgtaattctcaacaagcaggacttgagtgctagactcaccatttttatcccacgtgccttgatttcaatataataaaatattgttttgccatatggagatggtatggaacaagtatagaatattttattgtcctcagataaaatgtgttaaatggtaaactgtagtatggcaatttaattctagtatttaatttctgagggatactttacctaagatgtaaaattgactctttatragaaaaagaaatgcttgccacaagaatagtattacactggtatgaagaactaagacaactctttcatttattttaattaaataccaactgcccatttataagctttattgctttaaaaatatcatggctagtttgactgttgaattaagtttctctttcttcttttttctctgataga

SEQ ID NO: 544632 - DNA, 611 bp, Homo sapiens
agctgataaaagcttgaaagttcaagtgggagttagctcagcaagggaaaagactaaagcaaggatagaatcaggaatgtggaacagcttgttcaaagatatgaaaccaaatgtgaatatgcttttgcactagtaaatagtttgtaatggctgaagcatagggtgggaggaaaatagtgaaagatgaagctggcgagtgtaattctcaacaagcaggacttgagtgctagactcaccatttttatcccacgtgccttgatttcaatataataaaatattgttttgccatatggagatggtatggaacaagtatagaatattttattgtcctcagataaaatgtgttaaatggtaaactgtagtatggcaatttaattctagtatttaatttctgagggatactttacctaagatgtaaaattgactctttatgagaaaaagaaatgcttgccacaagaatagtattacaytggtatgaagaactaagacaactctttcatttattttaattaaataccaactgcccatttataagctttattgctttaaaaatatcatggctagtttgactgttgaattaagtttctctttcttcttttttctctgataga

SEQ ID NO: 544633 - DNA, 526 bp, Homo sapiens
tttttagttttttcaggtctcatgtagttagattagttctctccaaataatccaggacactctccgcatctcaagccttgtaaatctaatcacatctaaaaattcccttttgccatatagagtaaaatatttacaggttccaaggatttggaagtgaacatccttggaagacattaccacaccaccatataggaagcctatactccttagcaccatccagtaatttatggtctgattgtaatggcattttactactcaccttttcctcctcactatgcatttctgctttcttatcacataaamcattatgccatgatctatcccactttactttttggctaagtcacaagtctactccttaccttttcagggtctagggaagcaacaaaacagcagtccacttaccatatgtctacacagttaaacaccatgagatatatcaaactgttaaataggttctatcttccccctctaacatgtataccttgagcatggttttgaaggtccagtccaaatttataattct

SEQ ID NO: 544634 - DNA, 594 bp, Homo sapiens
tagatttgcatcctgtgtgatctttttttaaagaaacacaattctaatttattaatttattttatttattctgtcctttgcctcatcaattttagtttttatcttcattttttcttcagtgtacttctatttggttcactttttgttactagttttatgagttaaaattttaacatatttatgcttattattttattagtgtaggcatgtaaaattagatctaattgctactttaaatgtagtccatgaattttgatatgtagctttttcaatattaattataagagttcttaatttctatatatttttttaaattttagattcaggagatacatgcatgtgcacatttattacaagggtatattgtgttatgcagasgcttgggcttctgttcatccagtcagtcaaacagtgaacatggtacccaatacacagtttttggcccttgcctctctccctccatccccctgtttggagtccccattgtctattgcactcatctttatgtccctgggtactcaatgcttagctcccacttataagtaagaatatatgatatctggttttctatttctgcattgaattttttaggat

SEQ ID NO: 544635 - DNA, 594 bp, Homo sapiens
tagatttgcatcctgtgtgatctttttttaaagaaacacaattctaatttattaatttattttatttattctgtcctttgcctcatcaattttagtttttatcttcattttttcttcagtgtacttctatttggttcactttttgttactagttttatgagttaaaattttaacatatttatgcttattattttattagtgtaggcatgtaaaattagatctaattgctactttaaatgtagtccatgaattttgatatgtagctttttcaatattaattataagagttcttaatttctatatatttttttaaattttagattcaggagatacatgcatgtgcacatttattacaagggtatattgtgttatgcagaggcttgggcttctgttcatccagtcagtcaaacagtgaacatggtacccaatacacagtttttggcccttgcctctctccctccatccccctgtttggagtccccattgtctattgcactcatctttatgtccctgkgtactcaatgcttagctcccacttataagtaagaatatatgatatctggttttctatttctgcattgaattttttaggat

SEQ ID NO: 544636 - DNA, 573 bp, Homo sapiens
cagctgtacttaatcacaacaaatatattgtgtagatagataggcagacagatatagacagagtagatgatgactatctawctatctatgtttctatctacgtatctatgtatctgtctatgtatctgtctatctatctatctgtctgtctgtctgtctatctatctgtctctgtctctctctctctctctctctacctacctacctacctacctacctacctacctacctacctacctacatgcctacctatctacatacctctctatatctatctatcaccagaagaaggagacagtagtaagcaatgcactgtagtaaaagaagatctagctctggagtcagatagatggggtttgaatcaccattatctatggcacctactagtgaggtaacctcaggcaagttacttaatacttctaaatcacatttacccttttgtaaaataaagaaaataaaatctcccaggatgagttgttttaagatttaagagtataatctaggtgagctatatattttccctctaggagcttctgtatttactaagtcagtgtctgtgtgaccttatagaac

SEQ ID NO: 544637 - DNA, 658 bp, Homo sapiens
tacttaatcacaacaaatatattgtgtagatagataggcagacagatatagacagagtagatgatgactatctatctatctatgtttctatctacgtatctatgtatctgtctatgtatctgtctatctatctatctgtctgtctgtctgtctatctatctgtctctgtctctctctctctctctctctacctacctacctacctacctacctacctacctacctacctacctacatgcctacctatctacatacctctctatatctatctatcaccagaagaaggagacagtagtaagcaatgcactgtagtaaaagaagatctagctctggagtcagatagatggggtttgaatcaccattatctatggcacctactagtgaggtaacctcaggcaagttacttaatacttctaaatcacatttacccttttgtaaaataaagaaaataaaatctcccaggatgagttgttttaagatttwagagtataatctaggtgagctatatattttccctctaggagcttctgtatttactaagtcagtgtctgtgtgaccttatagaacataactaccatgaataatgataatcaactctgtgtatattatacatataaatttatatatgacatttatctccttcaggatgttacctatg

SEQ ID NO: 544638 - DNA, 746 bp, Homo sapiens
tcacatttacccttttgtaaaataaagaaaataaaatctcccaggatgagttgttttaagatttaagagtataatctaggtgagctatatattttccctctaggagcttctgtatttactaagtcagtgtctgtgtgaccttatagaacataactaccatgaataatgataaycaactctgtgtatattatacatataaatttatatatgacatttatctccttcaggatgttacctatgcctgaatagaatataacaccgtaccatcactatgcctattatatacaaaggtggaggaatgaaggaaaggtgagaagagagaaaggatagcagggactgaaggaagaatgactgcatgaaagatggctttgaaactcatcacaaaattgacatatggctatggctaatgcctgttttcccctcaaaatttgactgccaggttttcatagaaatgttactctaatgcctttcacgcttggcatcctgactcactgtcagttctcccgaatgccaaatgtacctctgcatgcttttcatttttcttcttaaaagatttgccaccatttatagcatcaacttcttcatctgggtcatctgctttttcaattatgacaagctcttgctaaatgtgtaaatgagctcagagtattccttcccttaccagggctctttatcttcctccctctgccctgcacttcgtgctgggattgcttgtgccctgtctgcatgccatttttcttttcaag

SEQ ID NO: 544639 - DNA, 606 bp, Homo sapiens
attttggcaaaatttatattcagattttaaatctcagtctttctgtagagttctaatgtccagaatttccctcttaaattttcagctgttctacctctctgaaacctgtgtggccctccccgatggcaaggctgccatagttagttcctcagcagagcttggcaaagttggggagctccaagaagaaagagccataaacttwcatttcttacctgatatattattggtcattcaggagtaaactcttcacaagtgcctgccagtcactcgaactttttgtagtaccttcaaatagttgtttttaataattttgtccagtttttataattgttatctttaagaggaattgtatgaccttcttatgtcatcattacagaagtcccatctatcccttgtgtgattttttaagtaacatctatttctctgcagagattttccatctgttcctccattttgaatatattttcttttaaaatattaaaatattataatagttgtgctttaaatcttcttgtctgcaaattgcaacatctaggtcatctccagactggtttccattgcctgattttcctgtagagggtcatatttatctgtttttttggtatg

SEQ ID NO: 544640 - DNA, 606 bp, Homo sapiens
attttggcaaaatttatattcagattttaaatctcagtctttctgtagagttctaatgtccagaatttccctcttaaattttcagctgttctacctctctgaaacctgtgtggccctccccgatggcaaggctgccatagttagttcctcagcagagcttggcaaagttggggagctccaagaagaaagagccataaactttcatttcttacctgatatattattggtcattcaggagtaaactcttcacaagtgcctgccagtcactsgaactttttgtagtaccttcaaatagttgtttttaataattttgtccagtttttataattgttatctttaagaggaattgtatgaccttcttatgtcatcattacagaagtcccatctatcccttgtgtgattttttaagtaacatctatttctctgcagagattttccatctgttcctccattttgaatatattttcttttaaaatattaaaatattataatagttgtgctttaaatcttcttgtctgcaaattgcaacatctaggtcatctccagactggtttccattgcctgattttcctgtagagggtcatatttatctgtttttttggtatg

SEQ ID NO: 544641 - DNA, 543 bp, Homo sapiens
ttctaacaacacaatattcaaccaagaaataatgataatatcacttactccagaagactcttgtgagggttaaaagagggaacagatgtcagcaactacaatgcctggcacaggtgaagcctaatattagttctggttattttattagaatctgttgttggccttacagtagaactctcagtaattttttaccgtattttcatgttttatttttttatttttttatttttgagatggagtttcgctcttgtcgtccaggccaaagtgcagtggcgtgatctcgactcactgcaacctccrcctcacaagttctctcttcttagctcacctccaccctggggtcccctctttcttcctgcagcccccagaacaagccgacaaccaacctgccctcagataactccccatcatgtcatcagaagagacatgcactcaggtggtggtgcacaggcttagggggcaggcgggaagtctcctggccctaggaaaagtttccttcacaaagcacctgctgtggtaggtgctttgctaaagcacacagtc

SEQ ID NO: 544642 - DNA, 651 bp, Homo sapiens
tggcccactggactatcttggctkcccaccctgactcaagggctgggcatccctgatggccctgtgcaccccacccccatgagtgtagcccaccctgaactggggctgagtgctgccaatgtggttggccctctgatagggtttggctgtgtccctacccaaatctcaacttgaattgtatctcccagaattcccaggtgttgtgagagggacccagcagagataattgaatcatgggggctggtctttcctgtgctattctcgtgatagtgagtaagtctcacgagaactggtgggtttatcaggggttttcgcttttgcttcttccttatcgtctcttgccactgccatgtaagaactgccttttgccctctgccatgattgtgagacctcccagctatgatggactgtaagtaaaattaaacctccttttcttcccagtcttgggtatgtatcagcagcgtgaaaacggactaatacacatccttagttggaagggagccagaggggtcagaaacatcctttatggtggagggggcactttatgttggttgtctaagtgagtttgggctgctagaacatgaacaccacagactgggtgacttaacagaaatgtattcctcacagtatgaagtctgggaagtctaagat

SEQ ID NO: 544643 - DNA, 651 bp, Homo sapiens
tggcccactggactatcttggcttcccaccctgactcaagggctgggcatccctgatggccctgtgcaccccacccccatgagtgtagcccaccctgaactggggctgagtgctgccaatgtggttggccctctgatagggtttggctgtgtccctacccaaatctcaacttgaattgtatctcccagaattcccakgtgttgtgagagggacccagcagagataattgaatcatgggggctggtctttcctgtgctattctcgtgatagtgagtaagtctcacgagaactggtgggtttatcaggggttttcgcttttgcttcttccttatcgtctcttgccactgccatgtaagaactgccttttgccctctgccatgattgtgagacctcccagctatgatggactgtaagtaaaattaaacctccttttcttcccagtcttgggtatgtatcagcagcgtgaaaacggactaatacacatccttagttggaagggagccagaggggtcagaaacatcctttatggtggagggggcactttatgttggttgtctaagtgagtttgggctgctagaacatgaacaccacagactgggtgacttaacagaaatgtattcctcacagtatgaagtctgggaagtctaagat

SEQ ID NO: 544644 - DNA, 627 bp, Homo sapiens
gggtaaggaagagatgactggaacacagcttctcatgagcaagttataaatgtgtggtatattgattacctaagcccatcaggcagagccctaggatagctggagctcacaggtttgtcacctccagccagaagtggcttcaagtatttatcccaggaggccaggtaaatattctcatgcataacataatatagagagaaataagttgggaagcactgtattggatgaatacagatatggtccccggcctacagcactactagtcctcgcttaggaggaactgggcatttggaggctgaaaaggactctytaacagcaaagctaacctgagaaaattgagctgcccagaaaaaaaacattagaggagagggcccatgggatctgtctgtggtgctgaatcagctcccagcaagttgagcccatctcctctcttacttggccctgacttctgctattttgatcttttctatttttactggtcttggaacaatgatgttgatgtcatctcattaggccactacaagcaatcacagcaaattcatttgtgacccagcccaaatatccactgtgccaataacattcatcacatctgaggttctctctaccctcagccagtcaggaatctgc

SEQ ID NO: 544645 - DNA, 550 bp, Homo sapiens
agtaatctcagatttaaaaacctccttgaggctaagaagctaagtcaaggtagactttagattttacctatagttttaaggttcctgggcgtgccaggaaatgataatttttaattcagtgtaatgctgagaaccattgaagccaggcattctacacattctcaaatatgacattttaatcaaagccttggtaatacaaccagtgtttccaattgtatcctgttataacgagagccgatttttattgaacttaagcaaatcatattgccttaagagtactcacaaataggctgggcacagtggctcatgcctgtaatcccagctctttgggaggccaagacaggtggaacacctgaggtcaggagtttgaaaccagcctggccaacatagtgaaacctccccccsgccaccgtctctactaaaaaatacaaaaattagctgggtgtggtggtgcatgcctgtagtcccagctacttgggaggctgagacagaattgcttgaaccctggaggcagaagttgcactgaaacaagatcgtgccactgcactcc

SEQ ID NO: 544646 - DNA, 267 bp, Homo sapiens
gaggggacaaggataatgcagaattggacccagatcaagaacagtggcaccactggttctgtgtccagactggaagaagcagaagagagcagtgagctttcccttcactgcagccaaagcaggcttgcagaagacaaagtcaatcccacatctttctgctgaaggcctttcaatggatccctggctctcaggatcaagaccatcatccttgcacagcccataaggycctgcatagcaaggccctgccccctccagcctccttataca

SEQ ID NO: 544647 - DNA, 638 bp, Homo sapiens
aggcacaaatgagcccacagcaaaccagagggtgcggtttgtactgcccggccttggttcacagttcaaaaggcttcttggaaaaccactgccccggtgcattcaagtgtttgtttacagctcattaactacttgatggaaaggttggggtgggggaaatattgacagaaaatcaatcagaaatgaagattaacgatctccaaaatattcctgtgggtccatagggaaatgggacttragttctaaaaccagggtctcataaactgagatattgtttctccatttgcctttgcgcagagagaggtcaccaggaatcaggttgtgacgagtggccacacctgcagggaatttgagatgggcctccaagggaaccttttagctgtaaggcctgttcctcctggcctttgttcctgtcagcaggcagagaatagagaagaaactcaggttggttcacttcaccaccaccgtgagactgggcaagctgggaccaggacagggtcccacgggtgccttcgctgcgtcccatgcctctgttcctgttttattaactggatgagatcaggcttcccaggtggagctggaagggaaaggcaggcaggtattttcaaataagcccatgggagctagaggtcaaataa

SEQ ID NO: 544648 - DNA, 486 bp, Homo sapiens
tttggtcagatttttgccaaaaagggagaatgtctcttaactggcaagttaattagaagtaaatctttatgcaagattagggtatagttcttagaggaggacttagagaccactgggttaaattttcttcctcttcctgtgacttattatatgtttctaattttctttaaaactatgggcctataacatcagagaagttgctcactcagagccaagcattgaacaagagaggtgtccaaatctgcaactgttgtgtgcctcagtagcaaggttcaggatttgctgcaatgtatgtctgtgtaaaaatattacttcctttgasatgaagttctattgataacttctctaggctttaccaatcaagaaaaaagggaaaatcagtcttaccatttgcctacacaaggtgcattcatggcacatttgtatctaatctgtctaaacatttctcttgggtgacagatagacttgtgtgtttgaatcatggag

SEQ ID NO: 544649 - DNA, 588 bp, Homo sapiens
tccatagttaaataagttgtgcatatgcttggttttaaaaaaatgaattcttttattgcatattacctttgatgtgccatacattcttttaagtattatgcaaagtgtttcacaaatttctcygaccagggaacactttttcacagagcatcttcctggaccagtgttctttgggaaatcctgggtctgatgacttgccattgctgccatgtgtctccattctctggtttcttcttggcttcctaggttctgccactgtggccatcacctgggattggagaaaggcaaatggaacagaccaactcagaattacagtcctcatttatttcatcagaggttggcctgtacttacattagccctttctggctagagcttcatgtctcacccactgtctgttcacttctgacctgaaacaatgggactgcagaagagagaaggaaaatatctggtggtcaggctaactctgtgtaccccatgatgaagatgttttccataggagttcattgtcacaggtgaaatttaggagctgtagccaaagatttcttaagcctttctttcaatcagtgtgccacagctatttgatatgt

SEQ ID NO: 544650 - DNA, 487 bp, Homo sapiens
ctgtcagtggcccatatggaaatgacaaataatgtgacaggatgaagataaaaggtttcacctcgacactgacctgtgccaggactccttttctccactccaggcttttaaggcagatgccatggctatgtgctgtgttaacttggctgttagaaggttgcgtgctggacaatgactgcagtgacccatcaggccatgcatcgtaattcagatgttaagctgtctgggttgacggatcacttcactggatgatctactgctctgccctcaamcactcagatggtcagaaacaattgattccattcagaggagcctaaccaatgccttctcaagccacatctagtgtattgaagatgttaaagataacagctccataggctcttcttttgtaaatctggtgtacgaggtcaaatggggttttcacaggccccaggagggacaaatcctcgattcaaatttctttcttatttcattcatcctgcccagc

SEQ ID NO: 544651 - DNA, 558 bp, Homo sapiens
ctattgtatgctgagcacttgctatttcatgtaattcttacatgacatcttttacaggagaatatcacacagtgctcagattcaaactcaagtcgaaggcatccaaaagcccaagcactgtcttcacactttgtagacagattctctccttcttcttggatgaggctgtcaaagaactggggagtagggggatattcagaccacatcttcatgttcagtagaatatcttcacgttttggagtgttaagttggatagcatcacttctagccatggaactcttccagaagcttgagaacctgtgagattcttgagcgacttgggacactcagaagggccaggatgaggttcagggttgagccactgagagctggctgttctgagcttgattttaagggaaagaaggggttgaattcaagcttgccaagacctggtttcttctatattctatctgctttcaacttgtccatctttatttatgtagtgactagagttatcctttttagaaacaaacatartcatactattttcacacttaatgacttctttttgaactcctt

SEQ ID NO: 544652 - DNA, 623 bp, Homo sapiens
ctatctccacttatccattcttttgatcttggtgactgcctctctttataagccttatcttctctgtgctaaaacaattgattgattgaatcataataatgacaagcataaaagcagtgaagccttctcccttagcattggggaggtggaggggccaagccaagtggtcacttgcttgcatttttcacattattagtgatcttacatggatttgcgttggtttttcagggttgcctttcctagatactactcagttttcttttttttccttatgcaaccgtaccccataaggagcttcttaccatgaagctccattacagtagggcagacctggaaacacatgcttttgttcaacactcccccacttttatttttgctttcagagagtctatgaacattttccaggcgaatccacccaccctggtagagaccctcaagggaccaggaacacaggatccaaggatagggcaggaaaattccacctcaatccctctcccmaagttccctatttctcctcccctatattctaaccgtaggcctgctgaggccccaggggtgggatactgcacttaaagcctttaaacccatcaagattaaggtgttttttttttgctggtcagctg

SEQ ID NO: 544653 - DNA, 510 bp, Homo sapiens
aatagtacagaaaagacgtgcccagacaaacagttaataaaaggccacacaaaaaaagggattgtaatgtgctcaactacgaaggtttttaaaaggtcagatattcactttgaattaataggataaagattagaaaaggttcatatttgcaggtgaaagggtagttcttccaatcctccctaaatcttaacatccctgagtgagtgatttcagccctaactcattttctttgcgccatgcagggacttcactgtgcacaccatgcatcctagagtttcttcagggtgtcatgcaccatctgccaagcgcttcatttttgatgtmtgtcttaccttttcaagaagtctgtgaactactgaaggtctacagttaattcaaaatttactttctctctcttaaataccttaacaaagggtagaaatatgcaggttctgttgatggatttttggtagtaaactgggatttgggaaaagtcccttatcccactgcagtgtcactgtcataactatt

SEQ ID NO: 544654 - DNA, 621 bp, Homo sapiens
ctgcaactacaactattgcaggcagtgtgactccagtgcccacacttctaaaccactrtacatcactgccctataataaatggtttcattttcctgtatccaagtgaaagtaattctacttaataaaaaacaagttttatttctcagtatacaataccaaagaggataacttgctgattagtttttggctgccacaaacatctcacttactataaataacatttcaatttgctatgaagtacaataaatgctaactctattcacatttttttcaaataagatagactgtatattcacaaacaggaggcacagaagaatcaacagaagtggatattataccagaacaaaagtggtttggaaaaaagaaaaaagtggagattggttcacaaggtgtggtgaacttagctctttatgattttgctttaaaattttgcacatccacacaaaaagcttttcatgatccaaaaaggccttatcaggacttttaaatttatgaattaccaaatcaggagattaagtatattacttgtcaggagaataaacaactttagagaatttagaatttttatttcatcagatttgaatctgtatttgacagaatgacaactaacaaaaccaaag

SEQ ID NO: 544655 - DNA, 477 bp, Homo sapiens
ctggatcagtcttctgtcatctaatccatgctgagtcccctcagtattgtctgctgggatgattcagggagcaaaacttgctatgagtatacaaacagcaagcgcacaaaatcagattcgcctggcttgccctgtttgcaatactttttttagcttatcttttgtgaacaaactttagattcaaataacaaaacgcctgagtatacttacttttataggacaaataactcctatacttcctgccttagcatttaccttaggtgagacagtagcttttccaggaaatatctgcaaatcactttcactagcctgcctcttcagtgagtttccactattgccctttgagacctctccgaacaattaaaagcccccaagagactcaagggttaaactcaagggcctttagatagcaaattcctcaaggatgggaaccaggtgtgtgayttgcgaccaaataggttcttgtggttcttaggg

SEQ ID NO: 544656 - DNA, 558 bp, Homo sapiens
gacatccttacttccataaaatttacaatacaagctggggagactgatagaaacagatcttcatagaatggacatctgatcaaaattgtgagggttttgaccccagtcctcggctgaatctattcttctcaacgtcactgctgaccttcatagggctgaatccactggtcagattttggtcaatcttagcttcttaaaagtagttaatacaggccaggcgcagtggctcacgcctgtaattccagcactttgagaggccaaggcgggtggatcatcaggtcaggaaatcgagaccatcctggctaacasggtgaaaccccgtctctactaaaaatacaaaaaattagccaggtgtggtggcaggcgcctgtagtcccagctactcaggaggctgaggcaggagaatggcgtgaacccaggaggcggagcatgcagtgagcggagatcgcaccactgcactccagcctgggtgacagagcgagactccgtctcaaaaaaaaaaaaaaaaaaaagtagttaacacagtagagtcacactctccttttccaaacatttctt

SEQ ID NO: 544657 - DNA, 606 bp, Homo sapiens
attagatggtgcccacccagattgagggtgggtctgcctctcccagtccactgactcgaatgttaatctcctttggtgcctcacagacacacctaggaacaatacttagcatccttccatccaatcaagttgacattcaatattaaccatcacaaagggcatcacaagtaaacccagagctgaagtcagagtgcctgccccaagtaataatacctgcagcccctcctgcaggttggcacagactctagccctcagtagactaatccctgactcacttcatcaggtgtggcccttgtgcttcyccaggtgtggacctgggctcatgttcatcagaatcacctgtgtgcttaataaaactgcagcctccaaagcctcactccggcctactgagttcctcttctggttggagtcaaggaatcttgccttctgacaagcaccctgtttgtattagtctgttttcacatgctataaagaacttccctgagactgggtaatttataaaggaaagttttaatttactcacagttctgtatggctgaagagaactcaggaaacttacaatcgtggtggaaggggaagcagcagtgtcttccatggcggcaggtg

SEQ ID NO: 544658 - DNA, 624 bp, Homo sapiens
taatgtgttccaaattctattttatctgttccaatattttgaaggactacttcatcaaaacatggcaggtaaccatggaaatcatagagcaattcagtgaagagaaaaaattgattagtttagcgtaagagcaaggtgagtatgtggcactggacaaataggctagcttctaggtgagaacccaggagggaagaactagcctctagatcagaacgggggcatattaggaagcctgtcctttcaattttctttaacctaaggtattttttttttctacacagaagatggaaataaagtacaaaaataatatttaattttcaatttkgtcttgataatatataagctatgtagatttagataattgttaagttattgtggcttatgtacacattttatgctagtagtttttgtttataagatatgtgtgcattgcatggagtatagccctcatacaatcctataaggcaagtaatagtagccccatcatacatatgaagtgcaaagagataagggacttgcctgaagtcaccagggtggggctgtgagtctgggacttgaatgaaagtctatccaagttaaagtcaagagttaattccatagtaccatcgctagataatgttactc

SEQ ID NO: 544659 - DNA, 600 bp, Homo sapiens
ggaatacaaaagtagacaaaacatactaaaagctctacttttgtggaaactacaataacagaatgggataggcaaataaatatttggtacacaaaatggtgaaatgtgctactgaaaaaaagaaaaaartgaaagtggatagctgatggatggatgaatgagggtgagtgctattaaagtgaccaactctcatggtttgcctggaaccgaggttgttactggggtgtgaaacttttaatcctaaaattgggatactctgaggcaaatcggaatggttggcaaatctacttctaatttaggaagcattgacaggaagtagtctctgagaaaagacatttgaccaaaattctgtaggaggtgaggaggtcacccaggtagatatataggggaaggcaagtctagtcagagagaaaagcaaatttaataaacatgaggcaggtgaattcctgataggatccagaagcagcagcagtgctgtagcatggttggagctgaatacctcggagagtgagtggtagggaatgaggtcaaagaagtgacaagatctgggtcacaaaaaagcttgtaggttaatagaagtacattgaattttactgtgag

SEQ ID NO: 544660 - DNA, 537 bp, Homo sapiens
ctgatgcatacttacttgtgtatatgagatgattacttttgtacagaagtaagtaccacatgctatttgaggaacttggcaaaattatccttttgaaatatatctcactgattgatttcctacagaatgtttatgatttatttacattatttaagtcacagtacctttttaaagagaactcctttagaatgaaggtacccttgtactaatagtagtagtgtcagtaatagttgaacmaagtttgttattttttttttctggacagtagggatccattatttctgatgaagtcataccctagaatcaaaggatcatcatttaatataatagaggtcatgggatacttttcatgccttgccaggggacaacttacaaaagggggccaaagtgtattaatttaatccagtatctaatatgtgcatagaatgagtggaattaaacatttttcatacataatctcatttaaacatctcagtagtcccacgggcagataatagtattccaaataacaagttaggaaaagaagtcccaaagaca

SEQ ID NO: 544661 - DNA, 598 bp, Homo sapiens
ctggaagccgtggctgcgctctcttccctctgctgggcgtcctgttcttccagggtgagtgctccggctggctacgctccacttccggccggggggttagggaagatggtcgcttttccggttccgggtaggggggtctccagaaagcccccgcatagctctgggaaggaaggagggagggagcgggacgttgggacgatgtcatcaccaccccgttgaggatagttggtattttgtcagtcctttcctgagccttgggagctttttcaccttgcgtgacctgtcattgtagtttggtgatagcatacttgatggaaccacaaagagctctggctttgggggcacccggtgttattttgtggtgttattatcagtggttgaccgctgtcgtttgggcgctgtataccctgattagaaagaaaacggttctagcattcagtagtttgccccagtagttttgggaaacaaaatcatgacagttggtaattttattttttgtaggtgattattgtagtctataaaatgaaatatttgctagtcacagaagggatgtgatgtgattcgttatagagaagmatatcgatgaaaaagtaactgc

SEQ ID NO: 544662 - DNA, 561 bp, Homo sapiens
ctgacagtgattcaccaaggaagggtacagaatctactttccccatctccactgaggaacaaaacaaccacttgtcctgtgtttgtcaaagtcctgatgtctccttctgaccatcatcagcatattcaccttctacccacatgcaaacatagcattagtgcctgtcctagattgcggtaaaagcaggccaaggccaattttcgtgtcctcaactcctgagcacctcccacgctagggactgtggatggtgccagggactccagtggatcggggaacaaaaacacctcgcccaagacagagatagactttcctctaaagattgagggcaaaggaaaaagggtgaaaaaaatatacaggaaataggggaaaaaaagaaaatgataattcttctccacaatttggagcaactttacacttgtgaaaacaaaggacaacaaacaatttttaaaaacctcaaaacacccacaraaaagactttttaaatttctgtgggaaatggcaactgtcacccaatttcagggataacagtgacaatggtgaggatattcaatacccaaagaa

SEQ ID NO: 544663 - DNA, 652 bp, Homo sapiens
tcttctccatgccagccgctgtgctgagccaagatgagcaaaagcagatactggccctgtgattatggagctaacagtccaggaaaacttgtatccatgaactgattacacatttgtaaaataacagccttggaattgctgcaaatgagaggtgcatggttccagcagtgtctgtaaagggcaacactgaccaaagcatcggggtcaggcaacaatgcccgtgggtggaaagaatgaactgaaatattgcatgaactaggtaaggaggagggacccattaaaaatatcaatgatgaaaactaaaaaaccctgtgcargtgttaagggcaataggaatgataaaagtacaagcaaacagtcctctttcagagatacacatcctccccggtggaccatagagctgacaaggtgaatgccaagcctgtgccaggacaagctctggtccacagttaggatgaatgcctcacagacctgtctgctgtgaaagacgtctcagtcctgaagcccaagtccatgggtctgtagactcagagatcatgaactggatttctttttccatttatgtcagagagaaatggtgtatctaggtgtccatgtagttctgaaagtaggtgatttagtggattttggctgtgctctaaactaggaacta

SEQ ID NO: 544664 - DNA, 556 bp, Homo sapiens
tcatgagtctagctccagcccctgggaagcaccctcttccaagcacgaggtcacctattcaggctggggttaggatctgcacaaaaccaaaattccaaaccttttyctgtgcttgttgaacaagcccctcatcaagttcagagctatttcttctactccccagcacctacgaagttttattgaaaatcagtgcaggcaaatattaggaattcttctgcctgagcttcactcctgggtgggatctgtgtcagatgatgtaatgtgaggtctggggtgaatctgggatccgccacttcccagccctttgaccttgggcacaatgctcaccctccctgagcctcctcctatcactggtagttagcgcttctgccaggagaggttatgagaatggagtaagaaagattaatactgtcaaaagagtctagctgtgggctaagcatggcggctcatgcctgtaatcctagcactttggaaggtcaaggagagtgaattgcttgagctcaggagtttgagtccagcctaggcaacgtggcgaaactccagctttaccaaaaga

SEQ ID NO: 544665 - DNA, 556 bp, Homo sapiens
tcatgagtctagctccagcccctgggaagcaccctcttccaagcacgaggtcacctattcaggctggggttaggatctgcacaaaaccaaaattccaaaccttttcctgtgcttgttgaacaagcccctcatcaagttcagagctatttcttctactccccagcacctacgaagttttattgaaaatcagtgcaggcaaatattaggaattcttctgcctgagcttcactcctgggtgggatctgtgtcagatgatgtaatgtgaggtctggggtgaatctgggatccgccacttcccagccctttgaccttgggcacaatgctcaccctccctgagcctcctcctatcactggtagttagcgcttctgccaggagaggytatgagaatggagtaagaaagattaatactgtcaaaagagtctagctgtgggctaagcatggcggctcatgcctgtaatcctagcactttggaaggtcaaggagagtgaattgcttgagctcaggagtttgagtccagcctaggcaacgtggcgaaactccagctttaccaaaaga

SEQ ID NO: 544666 - DNA, 552 bp, Homo sapiens
ctgcacacagcctcctgcatgttcctccttctcatgtcacctgcctggatgccatgtccccagagtgtgctgaggacatggggagtgagcctgggcccaggcagaaatggtaaagggccaagcatgrccgcctcgctgctgggagctttcctgagaccaaactgccctcatgtaatggacacagtcactgtggaatgtcctggggagcatgggagccttgaacagggagaggaaggcagggagggacatagagcaggggctcctgcagatgtagcactggcaggctggacttctctgcagcttctgcagagccaggaaggagcccctcccagctcctgagaccccatactcccctccacacccacgacactctcctgaccatggccagtcgtccaagaccctagctagtctacctcctgcagtgccatggaagcgggatgttctcactctgtctttctcaagaaatcagaggttttccaggggcctctctgcctggctgcctctgagttgctgtcctgaggtttagctgcaaatgctcatggaagctgcagg

SEQ ID NO: 544667 - DNA, 502 bp, Homo sapiens
tcataaaaggatatgttacccaatcgttaatcattctgtttattaattctgacatgagtatctcaaattgtttatttgattgttacctcggagagttttctaccctgtgcagtgcactttagcaagtttccaaggggattaaggtccgtctttctcaagagagagaagagcaactataaaaggggctgagggggccgggcgtggtggctcacgcctgtaatcccagtactttgggaggccaaggtgggtggatcacctgaggtcaggagttcaagaccagcctgaccaacatrgagaaaccctgtctctactaaaaatacaaaattaaccgggcatggtggcatatgcctgtgatcccagctacttgggaggctgaggcaggagaatcgcttgaacctgaaaggtggaggttgcggtgagccgatatcgtgccattttactccagcctgggcaacaagagtgaaactccgtctcaaaaaaataaaaaagaaaagaaaaaaag

SEQ ID NO: 544668 - DNA, 485 bp, Homo sapiens
  misc_feature (1)...(485): n = A,T,C or G
aactggctactcatgacaataattcttcatactaaaccctcaataaaagcctctggccaggtgcagtggttcacgcctaaaatcccagcactttggtgggccaaggcaggaggattacttgaggccagtagtttgagaccagcctgggcaacatggtgagaccacatctctrcaaaaaagtaaaatattacctgggtgtgatagcatgtgcctgtagttccagctacttgggaggctgaggcagaggactgcttgagctccagaggttgaggctgcagtgagctatgataatgccactgcactccagcctgggtgccagattgagatcctctctctggaaaaaaaaaaggggctgattatcattttcctcatgtgctctgcttatgaaagagactgaacaataatatgcacacaaacattctagtctgatgaaattttattctttactgcaagttgataaaaggcactcttttannnnnnnnnnn

SEQ ID NO: 544669 - DNA, 485 bp, Homo sapiens
  misc_feature (1)...(485): n = A,T,C or G
aactggctactcatgacaataattcttcatactaaaccctcaataaaagcctctggccaggtgcagtggttcacgcctaaaatcccagcactttggtgggccaaggcaggaggattacttgaggccagtagtttgagaccagcctgggcaacatggtgagaccacatctctacaaaaaagtaaaatattacctgggtgtgatagcatgtgcctgtagttccagctacttgggaggctgaggcagaggacwgcttgagctccagaggttgaggctgcagtgagctatgataatgccactgcactccagcctgggtgccagattgagatcctctctctggaaaaaaaaaaggggctgattatcattttcctcatgtgctctgcttatgaaagagactgaacaataatatgcacacaaacattctagtctgatgaaattttattctttactgcaagttgataaaaggcactcttttannnnnnnnnnn

SEQ ID NO: 544670 - DNA, 478 bp, Homo sapiens
ctgaccctggctggtggccttgtttcccaagggtagtgaaggaccttgattatgaaatgtgagastgtctccttggccagtacttattggggctctgcctggtgccccagtccttgtggccctgccttgtcagtcaccttcttacacagaacagaacttcaggaaaggcctctggtcttggagccatctttcttggcagcaatatgcctgttgttcaagtcaccaaggcctcgtctagacccagcgcctccctcgcgcccgagcctcatgctgggattccaagtctgagttgctcagtgttcaatccaccccagcacccccatattccagctcagtgtcccaaaatgtgtcagaagcttgcaaagactgacctccccctgcgtaggggtgaatacatctggtgacacggggttgggattgagtgaagggaacagggtgaatcctctaaagagaccgcaagcatcagaaacgctttctg

SEQ ID NO: 544671 - DNA, 478 bp, Homo sapiens
ctgaccctggctggtggccttgtttcccaagggtagtgaaggaccttgattatgaaatgtgagactgtctccttggccagtacttattggggctctgcctggtgccccagtccttgtggccctgccttgtcagtcaccttcttacacagaacagaacttcaggaaaggcctctggtcttggagccatctttsttggcagcaatatgcctgttgttcaagtcaccaaggcctcgtctagacccagcgcctccctcgcgcccgagcctcatgctgggattccaagtctgagttgctcagtgttcaatccaccccagcacccccatattccagctcagtgtcccaaaatgtgtcagaagcttgcaaagactgacctccccctgcgtaggggtgaatacatctggtgacacggggttgggattgagtgaagggaacagggtgaatcctctaaagagaccgcaagcatcagaaacgctttctg

SEQ ID NO: 544672 - DNA, 456 bp, Homo sapiens
ctgggaagcccctctcacctgccgaggccctcaactggaggcagaagccctcccggctgtcacaggtgtccctgtgtggctgcagaggacccttcagaaggcttgcaggaactaaaggaatgaggtgtctgtggccttggcaaatggcacrgggagctggggctgcaggctaagcatgtccccatctgagggtccttgctcagggcctgcctggctcggctcagctctgaggtgtctgagaagagaacagcttctgcgacttgtttctagacgctaccacccactgttctactgtcacccagcacagcaagacccagcacttccacctcagttcagacccacacttgcgctcccccatcaccccactgcctcaaggctactgctcaggtctgtgaaccaataaatctcagtagctctggggaccacagacaacctgtctgttctcttcaaagaccc

SEQ ID NO: 544673 - DNA, 501 bp, Homo sapiens
ctgctgggaagcccctctcacctgccgaggccctcaactggaggcagaagccctcccggctgtcacaggtgtccctgtgtggctgcagaggacccttcagaaggcttgcaggaactaaaggaatgaggtgtctgtggccttggcaaatggcacagggagctggggctgcaggctaagcatgtccccatctgagggtccttgctcagggccwgcctggctcggctcagctctgaggtgtctgagaagagaacagcttctgcgacttgtttctagacgctaccacccactgttctactgtcacccagcacagcaagacccagcacttccacctcagttcagacccacacttgcgctcccccatcaccccactgcctcaaggctactgctcaggtctgtgaaccaataaatctcagtagctctggggaccacagacaacctgtctgttctcttcaaagacccacagaccctgacggggcctggtgcaggggaggagggagggaa

SEQ ID NO: 544674 - DNA, 604 bp, Homo sapiens
cagctgcagcgccgggctgacagtcatgggtggtgatgacccccatttaaggggtttatacccagaagatacatcctcctcatctccccatgctgtgtcatcccagctcacgtgctccctgatgaagacgcccatgtgactacatggctctcccaccagcacaagcattctctggaatgctaagtgccatctgcacgmcattcaggcctcagagctggtctggtggtagggaagtggcctaagcactggcagagggatggaaggactgttctccaatgcagaggtggctcgaacgccccaaggtggagtcctgaggcagtgggcctgtcccttcctatccacttcagaactgctgcccgatgggccccgcaggcacgtgcgcaccaggccaggaggcaggggattcctgctgacacacagcagttccacgccccggggccacactctggcttccagaagccccctccacccacgctgactgctggctttttttcctatctcatttttccattcctctggtgcaggtgtttccttcccatcccgaatttaatttttgggaaattaaatttgttaatttcccaaaaattaacaaattgaactcaaa

SEQ ID NO: 544675 - DNA, 604 bp, Homo sapiens
cagctgcagcgccgggctgacagtcatgggtggtgatgacccccatttaaggggtttatacccagaagatacatcctcctcatctccccatgctgtgtcatcccagctcacgtgctccctgatgaagacgcccatgtgactacatggctctcccaccagcacaagcattctctggaatgctaagtgccatctgcacgacattcaggcctcagagctggtctggtggtagggaagtggcctaagcactggcagagggatggaaggactsttctccaatgcagaggtggctcgaacgccccaaggtggagtcctgaggcagtgggcctgtcccttcctatccacttcagaactgctgcccgatgggccccgcaggcacgtgcgcaccaggccaggaggcaggggattcctgctgacacacagcagttccacgccccggggccacactctggcttccagaagccccctccacccacgctgactgctggctttttttcctatctcatttttccattcctctggtgcaggtgtttccttcccatcccgaatttaatttttgggaaattaaatttgttaatttcccaaaaattaacaaattgaactcaaa

SEQ ID NO: 544676 - DNA, 604 bp, Homo sapiens
cagctgcagcgccgggctgacagtcatgggtggtgatgacccccatttaaggggtttatacccagaagatacatcctcctcatctccccatgctgtgtcatcccagctcacgtgctccctgatgaagacgcccatgtgactacatggctctcccaccagcacaagcattctctggaatgctaagtgccatctgcacgacattcaggcctcagagctggtctggtggtagggaagtggcctaagcactggcagagggatggaaggactgttctccaatgcagaggtggctcgaacgccccaaggtggagtcctgaggcagtgggcctgtcccttcctatccacttcagaactgctgcccgatgggccccgcaggcasgtgcgcaccaggccaggaggcaggggattcctgctgacacacagcagttccacgccccggggccacactctggcttccagaagccccctccacccacgctgactgctggctttttttcctatctcatttttccattcctctggtgcaggtgtttccttcccatcccgaatttaatttttgggaaattaaatttgttaatttcccaaaaattaacaaattgaactcaaa

SEQ ID NO: 544677 - DNA, 604 bp, Homo sapiens
cagctgcagcgccgggctgacagtcatgggtggtgatgacccccatttaaggggtttatacccagaagatacatcctcctcatctccccatgctgtgtcatcccagctcacgtgctccctgatgaagacgcccatgtgactacatggctctcccaccagcacaagcattctctggaatgctaagtgccatctgcacgacattcaggcctcagagctggtctggtggtagggaagtggcctaagcactggcagagggatggaaggactgttctccaatgcagaggtggctcgaacgccccaaggtggagtcctgaggcagtgggcctgtcccttcctatccacttcagaactgctgcccgatgggccccgcaggcacgtgcgcaccaggccaggaggcaggggattcctgctgacacacagcagttccacgccccggggccacactctggcttccagaagccccctccacccacgctgactgctggctttttttcctatctcatttttccattcctctggtgcaggtgtttccttcccatccygaatttaatttttgggaaattaaatttgttaatttcccaaaaattaacaaattgaactcaaa

SEQ ID NO: 544678 - DNA, 595 bp, Homo sapiens
gctgctccgagactttctgcgggataacctggcaggggcagcagggcagaggctgagacgggcagcaggacagggtggcacccartctctccaagagccaccagcttggatagagtatgataagagaaggtgaaggcaaaagatctgggttccaggccagattctgccacctctagccatgaggccccaggccattcttgtctgagccgcagtcttcctaactgtaaattggggatcatgccacagtccgcacagaactggctaggaagattatattcatccaaacctccggctgactgaagttacaccacaccgagcccctgctgaaagccttacacacgctctgccttaatccagagcacgcccttgagaggcagagaccactatccccattttagggatgaggaacggaggctcagagaggcagaaattcaattcaaagccgtactgctctgctaaggggcagagctggggttcacacccaagcctaaccccaagacccagcctctttccctagcactctgcagccccaatcattcctgagggggactaaaacaagcatgacaatatgacggctgggacaaggcacgtggtc

SEQ ID NO: 544679 - DNA, 570 bp, Homo sapiens
cctggtgaacatgcgctcggcctcctcttggatttcctcaagccacaccaagtccttattatccatgttgcagagaaactccatgagcttctggtcacatagctccagcaggtgaatgggccctggggccgtcgtccccatggtggctctgtctggtgaaggcagggacaagaggcacaagttaggggcccagggtaggggtctggggctttctccaagctgcaatacccaccygacccacaaccaccacaaacacccagtgcccgaaccagggcccctctctgctcacagccactccccagagctgcagaattccaaacactcatcccctagcctcatctctacaaagagaagcccttctactcacactcttcaaatacctccctgtccccacccccccgccagcatgactgtccccataagtccacagttcccaaccaaattctgacattgacagtcctccttataaatggccttttctgggcttaagatgacagggcactgccatctgtcttcctggccaccccagggcccctcactccctgcccaaacacagtcctgctctcgctc

SEQ ID NO: 544680 - DNA, 588 bp, Homo sapiens
acatcagtttacctcttaatcattcagctcarcttctggattgtgcagtagacttcttgagctggaatttacctgcttgttcactttctttttcatctgccaaaggaccacaacataaagggccaaatgggacagtggcttgcacacagaaatatccagaaaaatagggcagagaccagaacagcatgctagtaaagccttctctcttaataagctgcgctgatttggtgaacttcactggggctcctggggtcaaagttgtgtaggggttaaggatataggaagtgaaagtgggtgcaagtgagaagggcacgttcttattagtgaagaggattctgaaacgttggaattggtttccaggaaacgagggacggctgttctgaggtttccttggactcctctgggatccctgttgtgaatatcaaaggagtactgctggtgagggggagcgggggcttcagagagagtgggaagactgagcaagctaagtggagttcatttggtataaatcagaggctgtcatttcagatttcatgactctacatatccagttataaataacgttcctaggtgttagtaggacaaata

SEQ ID NO: 544681 - DNA, 588 bp, Homo sapiens
acatcagtttacctcttaatcattcagctcaacttctggattgtgcagtagacttcttgagctggaatttacctgcttgttcactttctttttcatctgccaaaggaccacaacataaagggccaaatgggacagtggcttgcacacagaaatatccagaaaaatagggcagagaccagaasagcatgctagtaaagccttctctcttaataagctgcgctgatttggtgaacttcactggggctcctggggtcaaagttgtgtaggggttaaggatataggaagtgaaagtgggtgcaagtgagaagggcacgttcttattagtgaagaggattctgaaacgttggaattggtttccaggaaacgagggacggctgttctgaggtttccttggactcctctgggatccctgttgtgaatatcaaaggagtactgctggtgagggggagcgggggcttcagagagagtgggaagactgagcaagctaagtggagttcatttggtataaatcagaggctgtcatttcagatttcatgactctacatatccagttataaataacgttcctaggtgttagtaggacaaata

SEQ ID NO: 544682 - DNA, 565 bp, Homo sapiens
cctgtatggagcccaggtagccaaacagaactcatgaggcctgcacagcaggctgaatgttcacagactcgggcactcacatgcattcccacacaggtgcattctgtaccacaggctggaggcctgggtgcccataccaaaagaagctggcagttcttgctgagggctgggcattgaccttcctgatccccacggtaagctccaaagctggacagtggtttctgagttatgagcagacatttgggtgtttctctgcagcctgcattgggcctgggctcgagagtagcatctagtgtgggcaggaagaggagggctgtgagaggcaagcaccaaggcagcacaggctctgacatcaggaccagcctgctggaaaggccatgcctgaacaatttgtcgtctcctactgctcactacattcccagagtcatattcttgtgtttatgatggaggaatcactggctgtggaacrattactatgttgcaaacaaagcgttatggctggaggtgagaggaaaaacaaatagcatgcactttgaaatctggctgccttagggcttctgcagca

SEQ ID NO: 544683 - DNA, 554 bp, Homo sapiens
tgctatgatcacctttactttcttccccactccttaggccaatcgctcagtactttgataagaccaaagttggccacatgtctgcctctcaaacgtggtgggcaggcagcatgctgtgaatggaagcttcatcaaaatcacacctggagaaaaggaggcagttttccaaataaagaatggggtagcaaattagttctcagaataagtgcaggagggatgatggacagactaaataataataatagcaataaacaagatattcacttccaaactttaatcctattttaaggttaaaaccactgaatgttttagtaaacatccttccggattatgtttatttatgcatttttttccttataaactgggataatactagaattcrtatgtttcatacctgcattttttacttaaccatatttagtaaatacttcaatatgtaatgaacattttgctgtacatgattataaatatcgtaaaagtacagttgacccttgaacaacatggctttgaattatgcaagcccacttatacatgggttttcttcaatacaaaat

SEQ ID NO: 544684 - DNA, 613 bp, Homo sapiens
aagccaaagacagacatggtcacagaagtagtgcaccttcctcacctggggacgacccactcatccccaaactgcttatgaccactttgaccagagtccttgcttgagccaagaggccctctaccaagagaggcagttaggaagataagcgttcattaattaactaggccagagacattaaaraggacacttagtttggttcacttgaaattatttacatcaccctgcaagcaatattgcaattgctctgtgtttgccttgcacaagattaatagaggataaagggcccagattttaattatatattttttccctccaaatgaagagaatccacaagcttctctcttcactgccaaacacagtctgcaaaacacatgtgcttgattacttttgttctgtagtctcaacagtggattgctacatctaaataattgcattttgtttagcatatttcccagaaggatataaatgaccggaggaaaaaaaaaatccaaccccaaagatacatcgccaagagtgagcaaagattttaattatctgttgacaaaatgcacgcttctgacttggttcagcagtgtgggttcttgcaggcaagctaaaaataataggaatg

SEQ ID NO: 544685 - DNA, 572 bp, Homo sapiens
ctgttccatctctggcttgagctccagtggattggctgtagcttcgaaatgtagagagaagatgaatttccaaggaggacacttggcttcgcttaatcatataggaccttagacacagcttccccgttgaaacaaataatcaaagaggactaatggctcactaactgcaaggtaccatgtaggaactgtgaattacaggcagatccaagttkgattcctgtcctttaagatatgaaagtatagttggaaaataagcaaatatgtaaaagattattaatattatactgttaaattagcagctaacagtattgtgcttgtctaagagacacctgttgtatcttagagatcttaacagtccatggagaagcatcagtgagcctgtaaactgcctgaaattgcatgtaaattttgtgtgtgtatgcattttactggggaaagggtctatttttgcatcatattcccaaagatgtgtgcagtctgtcacaaatttaagtccattgtatttcattctcatagcagtcttctttttcacatgagaaagccaatacccagagaggttaaatggcagaatc

SEQ ID NO: 544686 - DNA, 511 bp, Homo sapiens
ttccatctctggcttgagctccagtggattggctgtagcttcgaaatgtagagagaagatgaatttccaaggaggacacttggcttcgcttaatcatataggaccttagacacagcttccccgttgaaacaaataatcaaagaggactaatggctcactaactgcaaggtaccatgtaggaactgtgaattacaggcagatccaagtttgattcctgtcctttaagatatgaaagtatagttggaaaataagcaaatatgtaaaagattattaatattatactgttaaattagcagctaacagtattgtgcttgtctaagagacacctgttgtatcttagagatcttaacagtccatggagaagcatcagtgagcctgtraactgcctgaaattgcatgtaaattttgtgtgtgtatgcattttactggggaaagggtctatttttgcatcatattcccaaagatgtgtgcagtctgtcacaaatttaagtccattgtatttcattctcat

SEQ ID NO: 544687 - DNA, 624 bp, Homo sapiens
tctccttccttctccctctgttctatgtggcaacttttagcctgtgtatctcctgccttcgtgtcattttgccaaagcaaattctttagggctggataaagaataatgtgaaatcaattttagggaaattgctgtggggctgagacaaccgcagatcatgctgacaggtgctcagagtttagtccttgggtgcaaagagggtttttcctcaagtagaagagcaaatgcaaggtaaactggaggagaggaatttacatctcatgaatacaaagtgaaacttaaactgtcctaatgggtgaatatgaatgcaagtctctgggggttggaagtgcaatttttaaagctcacatcctgcttgggttctcttggctgcctgtgggttggaccccaaggaggctttttagacccattgagggaatgccatcctaaaaaccaaacctaacacaaatacaactttcctggatgggacatacaaagggcttgggggtacctcctgggtggtamaatttgactcagatgttcatttcctgacacggttccagtttgccaccatcgagaccatagtgacctccatctcagacgagtttcccaagtacctacgcacacacaagccagtgtttactc

SEQ ID NO: 544688 - DNA, 736 bp, Homo sapiens
agatgatacacatgagggaaaaaaagccaaagctataccctattactttaaaatgtatagactcaagtttaacgagagctcaccaccaagtactgttcgagcactttgtatgtattatttcaccctcactacaaccatatatagtaggcactattattacccccaccttatcagtgagtaaatggaagtactttgagatggagagcttaagtagcttgatagttgctatcatacattaaccttaaagtacaggatttttgaagtctgcctatattaacagagctgtggtgaaacagtaaaatttctgagcatctccagatctgtactgtctaatatggtaacccctagccacaaaaagcaaytgagcacatgaaatatggctagtgtggctgaggaaatgaattttcaattttgcataattttaattaattttaatttagatttatagtgaatatttgatgaaactacagttttcaagacactagccatcagtcaatgaagggcagtgatccttcagagacgggatacaaaagagatgagccctataattaccatagcttactgctctgagggagtttccaggcatagcataggaaggcagaactcaggcaatctccttgagttgaggagagaaagctgaagtctggggagaccaaggcacctagatttcacaggacagtatacacaagagaagatagcagcacaaagacggaaacacagatctacccaaaatcag

SEQ ID NO: 544689 - DNA, 583 bp, Homo sapiens
aactgggtttccaagctttatagaggtggtgactgcsgatacaagattgtggccctgatccacctgcctcagagactgatgcagtagcaaaatctgacccaccaccaccagtaaacacctccacaaagtgttccctaattaatcagtcacaatcacctgtgttaaggaggaaaaaagtggaaaaggaccctgtccctgttgaagaagggtggcagagggactggccaggaaggagaatccctggaataatggatatatatttccatccaaggggattcctggatggaaagccagataccctgataactctttttagagaaccttaatgcagagaaatacagccgtgagcctcctcttcccttgtttgagaaagacaaatccctaaagatgcctctcacccatggggtgctctgagcaatgattcattcatgattgcaaagtgatttccaactatatgtattaataaggctagtgatcactctaaggggctatgtttaagccattcataaaggctgtgtctatctacacataccatctcaatagtgcaattttgactgtgctgttggaaatgttttaatcagca

SEQ ID NO: 544690 - DNA, 583 bp, Homo sapiens
aactgggtttccaagctttatagaggtggtgactgcggatacaagattgtggccctgatccacctgcctcagagactgatgcagtagcaaaatctgacccaccaccaccagtaaacacctccacaaagtgttccctaattaatcagtcacaatcacctgtgttaaggaggaaaaaagtggaaaaggaccctgtccctgttgaagaagsgtggcagagggactggccaggaaggagaatccctggaataatggatatatatttccatccaaggggattcctggatggaaagccagataccctgataactctttttagagaaccttaatgcagagaaatacagccgtgagcctcctcttcccttgtttgagaaagacaaatccctaaagatgcctctcacccatggggtgctctgagcaatgattcattcatgattgcaaagtgatttccaactatatgtattaataaggctagtgatcactctaaggggctatgtttaagccattcataaaggctgtgtctatctacacataccatctcaatagtgcaattttgactgtgctgttggaaatgttttaatcagca

SEQ ID NO: 544691 - DNA, 614 bp, Homo sapiens
tgccaagtgtaattcattactgttcaagtttaactcctctgacaatacaatgtggaaacaggtgcattctgaatctcccctgacacaggggaactagctgtgcagaaacctccaatgcacacctgtctcacatttgaggcattcccaggatttataaaccaaactgttggccctctcagttcaccatgatcaccacctaaaaaatgaatgcatcacctgggtgaggtgagccagtgcctagtgtgcaaaattgagaggcgctcactctcaggttcctgaagtgcagggccggcacctgacagtgaatgcctctgtaaattttgcaccctagatgcctcctgtctcacttgcctccccctagtcctggccctgccatacacatttctcatcatgtggcccatagaatggcrttcatggaaagagtggctttggagtggggaagctttgggcttaagtcttgtctcaagaccttgaacgagatatttaaacccttgtgagatgcttaacctgaacctcagttaacttctctgcaaaatgggacaaatatacctggccacagagggaactcaggagtgatggtgtctaaacagcctccaacagtgaaatgggaacag

SEQ ID NO: 544692 - DNA, 518 bp, Homo sapiens
ctgtgaggccagccctgagacgtcagatgcccttggatttcctaacatccacgtgtggaagggcttcacttctccttagacttcaaggggatggaaggagagaagcaggtttggaagaaatagagaggagctggctgctgctcctcccttccattcctagcactgcaagttctttgagacaaggagggaggagagactgctgttctgtggtgcaggaaaaatgtgtccyggtcagcagtgtcacagtggagagaaaaggagtgcagtccacctctggcaggtctgaacctgcagccaggaagaaagagttcggccttgagtaattgagtttagagacagaagtaacttccccatttcagttcatggcaactccaccctttcagttgctgaggccaaaacacttgggagtcaccttgactcttctctttctctcacactccccatgaagtctggtggctcctcctgaaaatgtatctggcatgtgtttctcaccagctccagcgacaacaccctggctg

SEQ ID NO: 544693 - DNA, 518 bp, Homo sapiens
ctgtgaggccagccctgagacgtcagatgcccttggatttcctaacatccacgtgtggaagggcttcacttctccttagacttcaaggggatggaaggagagaagcaggtttggaagaaatagagaggagctggctgctgctcctcccttccattcctagcactgcaagttctttgagacaaggagggaggagagactgctgttctgtggtgcaggaaaaatgtgtcctggtcagcagtgtcacagtggagagaaaaggagtgcagyccacctctggcaggtctgaacctgcagccaggaagaaagagttcggccttgagtaattgagtttagagacagaagtaacttccccatttcagttcatggcaactccaccctttcagttgctgaggccaaaacacttgggagtcaccttgactcttctctttctctcacactccccatgaagtctggtggctcctcctgaaaatgtatctggcatgtgtttctcaccagctccagcgacaacaccctggctg

SEQ ID NO: 544694 - DNA, 546 bp, Homo sapiens
ttgattatttccattgtattgcatgccttcttttttccttctagtggtattttggcaaccttatgtgtagtgattcttggaaaatattttaggaggaaaggaagtaagggagagaaggaaaggggaaggcagggaggcagagaaaacaatgaaggatggagtcaatgaagacataaattcaaatcattgctgtgaccagttgtaatgcatatcctttacaaaatgggagtgatgatctcaaatattgcagaaaactactaattgtgattacttaagactcacctgcccaaataattcctcttactctgtatttattcttttgaagtgaaaatgtccaacaaaatgaaatgaattacataagcaaacatagattacatgtatcataaaaagaagcctgtccaggcacaatggctcatgcctataatcccagcactttgagaagcaggtgtgggaggattgcttgaggccagaagttcaaaaccagcctgggcaacataggkagatccgttatctacaaaaaattcaaacaaacaacaaaaaaaatca

SEQ ID NO: 544695 - DNA, 525 bp, Homo sapiens
tgccttcaatggatgagtttattaggtgctttcccatgaataggtgaagactggaaggaggaacagagggagcatgagacacctggtcttccaggaagaggtaccagtaagactctgctacamgtcagagggaatccaagcaactacctagttcagaagttccaatttacaccccacaggccaattctagcctgttttgttggtctaaagtagtatctaatttaaaaaatctgaatttgatttccttaataagactatgatccctccagttcatcgcagaccctatcagtccacagtctcacatcagtctgcttcatttgttcagggcacctggcctgcaggtatgtgagttgttgacatctgcattctagtccagttttccattacatgcaaaagccctttcaacaacattatgtattctttatttattcatacattcattaaaaaaatatgtgctgaacaggtactacaagtaggctcataaatgcacagaattttagagcaggaagagagcttggagttgtt

SEQ ID NO: 544696 - DNA, 525 bp, Homo sapiens
tgccttcaatggatgagtttattaggtgctttcccatgaataggtgaagactggaaggaggaacagagggagcatgagacacctggtcttccaggaagaggtaccagtaagactctgctacacgtcagagggaatccaagcaactacctagttcagaagttccaatttacaccccacaggccaattctarcctgttttgttggtctaaagtagtatctaatttaaaaaatctgaatttgatttccttaataagactatgatccctccagttcatcgcagaccctatcagtccacagtctcacatcagtctgcttcatttgttcagggcacctggcctgcaggtatgtgagttgttgacatctgcattctagtccagttttccattacatgcaaaagccctttcaacaacattatgtattctttatttattcatacattcattaaaaaaatatgtgctgaacaggtactacaagtaggctcataaatgcacagaattttagagcaggaagagagcttggagttgtt

SEQ ID NO: 544697 - DNA, 607 bp, Homo sapiens
ggagaaccactggagagcggtcaagaatataaatgccagaatcaggctcaagacttagatttgttgactttgaataagtaactaagcctctctgagcctgaatttcctcatctgtgagacagcaatataatgctacttgcttcagaggattaactgaaatactatagataaagtgtttagcacagggcctggggtatagtaayaactcaataaatgtgagtgtctatcattatcatcatcataattattattttaattatcataaagccaatgacttcttatgtcatgtttagagatcatttggggggaatgatgatcttgagtctaacaaagaagatgaagttgaaaagctgttgacctttataaaaatcagccctggtaagaaagttgatttttttctcagcttctaagaactctggaaattgacatttactaaatccagttattctgaaccatgggaaactgtttcgcatctgtcaataatttcttcaggctggccataagctattaagtttacccaattaagccaaaagtggccagtgaaattctccatttcaaaagacatttcacagttactggcttacctctgggagtgtggagttagggc

SEQ ID NO: 544698 - DNA, 222 bp, Homo sapiens
tccctgctcccctcccctacctcagttctctcctgttttccatgattcacaggcatcctcttagtccccatcttgcttttcccacctccatatgatggrcccccaaggcctggttagcaggatctgaaagataactcattgacagtataataagttagctaagtgtcactgagtatttactatgctccaggcattgctttaaaaggttagcacaccatgaag

SEQ ID NO: 544699 - DNA, 592 bp, Homo sapiens
gctgccttacccccaaccccatcccctgaattgacagctacaatttttagagctcttccttatctttcatgtacacagccataggataaatgtattattgccccatgccacctgcaggagacccaggctaggaaagaatcctatctttgccaaattaatcttgcatataacaaagtactgcacacaggcagagaatatggctgcctagcagcacaagaatggaattatttgcttcgttgcccactgcttctytctactcgtacagaagccttccttgaagtacttactggacttcattaagcgttcaaaaagcctctaataaaacacctgtgttcttattcaaaccctcttttatgctgtctacatagcacctaagagtgatgtattcatctggtgaattctggctggtacctttctccctgcaaagaagggagagaatgagaggccagcctggattataagaaggagcagaggagactagcagtgcaagactgatcagaagttcatgccctagaaagtcagcttagaagggtgctgaaggcctggggtgagctttggattcagggcctcacaagagagttggcttttaggt

SEQ ID NO: 544700 - DNA, 479 bp, Homo sapiens
tcactagccagcttcctcacatcttcaccagcattggaaaggactatgatgagcgtgtgctgctgtacatcactaagagatcctcatgttaccgattgcttactttgatactggagaactgatcacccagagagagctgrtctccaagccggttaacaacgaccttacggagcaagcagccacctttgagctcatcctggatgatgtgaaaagatcctcatgttactgatggcttactttgatgatggagaactgatcacccagagagagctggtctccaggcaggttagcaacgaccttgcagactaagtagccacctttgagctcatcttggatgatgtgtccttgacacatctgacctttgggaaggagttcacagaagtggtgggagtgaaacaggtggctcaacaggaatcagagagggccagattcatggtggaaaatctgagcagcagaaaaaggtggccatcatctctgcc

SEQ ID NO: 544701 - DNA, 617 bp, Homo sapiens
atctctcaaaaattatctttcccttgaattgttaaaccatggggaaatcaaagcccagtctcataaatatttgatttaacaacaaaaaaaaaatgctatccctcttggtagccagtttttcttccaacttatctcaggcctccttcattatctcttggcatggagggattcaagcctcttatatttctgctatcacaccagagctgtattttataagctgacatctacacatctatctcctgacatctgagaggatcttaacttggtaaacaatacaaccggattcattaaaagtttctaactcacagcaactccatgaaaacttcctctagttttctgatgaattttgttcctgggctccttkgtcttgagtgtttcaatctggtaaagtgttttagtctctgggaaaaaaaaaaaagaaaaaaaaactttttctaccctccccaaatatttaggggtggctgtaataaattcttgatcaatggactggaaatgttgaagacaatacaattgagctaatatagtgaatgaaaacaaatttgaacttgggttctgaaatcagagtcagttcaatctgagagtctaccactcactagttgcatgactattcaacaact

SEQ ID NO: 544702 - DNA, 325 bp, Homo sapiens
ctgcatgtttacagcttgatgaagagaatcacatttttttttttttcaggtaaatgtgcatcttttttcaacaaaaaagatactcccacatgaaataagctttttgacaacagaatttttaagctgaattaactaaattaatttctgaatgaggacatatccccactagagtgaaaggtttgaaaaagatgctgtgtaattctatgagtcatcgtggggattctgtttgctaacactggaccctaaagaagctctrtttttaaagtttagaaatagatttgttagaggataatttagaaattatctctaaattatcattatggcg

SEQ ID NO: 544703 - DNA, 604 bp, Homo sapiens
aaaatgaattttatttctaccgcaaattagaagaaagtaagtaccccatcttcctgcttctgctgctgaaaggatgagtaaagaacaaaagaaattgtttatactcgggttaagtaccttctaaaagaaatatatacctctgtgctgcactttaattcagtttatttactttaccttcaggtgtagaaatacattagaattgatgttgagaattgaaaagttttatattgtgttcttaaatcttttgtcaaatatgaactcgttagagaaaaatgatttaggctatacttcactctagtagatgggagaagactctaagagaaatatgaattagatttcaaagtttattttctcttaaagtctgatcggattttgcctgtgattagggaattaaggagaaaccatggaggcaaattagtttctcaggcttccatcgggcaaactgttactctagtacacatttgatgcagcaggaggctgaacaaaktttttcttcttcaaatggtgaactgcttgatcttttgtagttgatagaagcatgagtaaacataaataaacatggatttaaatatactaattagaggaattactaagataaagccag

SEQ ID NO: 544704 - DNA, 518 bp, Homo sapiens
taaactttgacctcactttacaatatgcatgcattataaaagtttgtaattatgctgattaatttattaatagtgctttgtagatctttttcttttgtcattttgagcactccatctttaattttccttataaatatatcttgcaatgagcgcatatgcatgtatacacatgcacatacacacacattayacttgtacaacatgtgtaacattagaaaaaataagttcgcttttgacacagcataactcagccatgggtagggggaggaatacttcgccctctgagataagagtaactgagttcctacggtaagttatagtattattttaaggtggaagaaattaaaggtcattttaaggtagaggagaaggaggctgaaggaagtcttaactgattagatgtctttactccatatatttagaagtcaggacatcagagggaaaggtctagaatgaagttgaaaacttaagtaaagctgtaagtgattggaactgcagctttgaggcaagagagagac

SEQ ID NO: 544705 - DNA, 595 bp, Homo sapiens
tttgtcatatgaaagtaaacaacaaaaccctattacatagcaggtcatgaaatttttaggaaactgcatagggccccaacttcttagacatgctttaaaatgtccatctctgacagatattttctcccctttcttagtcaacataatcattcctcaccctacccacccccaattttggaaacctcactcttgttctcttcttcatcaagactttgtgcttttgtagagaattcctgttctccattgtaccttatccccaaaccctttaattttctaacgtgtttattaggttttgaaaacaaaagcagggaaatctttacaggctgcttctgagttcaaccctgcttctccctgcttcctcctacaatgaatacctgcttcaggtgggaagaaaggaaaaggaaaaacrcacagagaagtaataaaaacactagtagctcgaaatagagcctagttacacagagatgtacattaggaaaaactgaaattatttcaagcatttgagcaattgttagaattcagagtttacaagcttatattttatccatttaccttgatgttgatgagcctgatgcattttaaactctcaaattat

SEQ ID NO: 544706 - DNA, 508 bp, Homo sapiens
ttccaaaactattttaaatgggaagttccccttttttttttttttttttgtcaatcagagaggaaatgtatgtgtaagtctattaaagccatagcatctgttatgatgaaatgacattgccgaatcttaggaagtgaaatattccatctcaagattttgagactgctctgtgttcttactgaggcaagagttcctataactaaacaggtatagaaaagttatgcacaaaaacagatacaaaattcttcccatacttttcatataatattatcattgtagtcatcattttgaattgatatacacaacatacatgaaactattcatcacattagatgtatgtggtcctaagagrgaaaagctcaaattttgaaataggaagacctgaaatcaaatccaatctctgctcaaattgctgacagctttaagcagaggacttaatcacttggaagtcttctcatttctataatgtagataataagttttattccacaaagttatagggagtatc

SEQ ID NO: 544707 - DNA, 508 bp, Homo sapiens
ttccaaaactattttaaatgggaagttccccttttttttttttttttttgtcaatcagagaggaaatgtatgtgtaagtctattaaagccatagcatctgttatgatgaaatgacattgccgaatcttaggaagtgaaatattccatctcaagattttgagactgctctgtgttcttactgaggcaagagttcctataactaaacaggtatagaaaagttatgcacaaaaacagatacaaaattcttcccatacttttcatataatattatcattgtagtcatcattttgaattgatatacacaacatacatgaaactattcatcacattagatgtatgtggtcctaagagagaaaagctcaaattttgaaataggargacctgaaatcaaatccaatctctgctcaaattgctgacagctttaagcagaggacttaatcacttggaagtcttctcatttctataatgtagataataagttttattccacaaagttatagggagtatc

SEQ ID NO: 544708 - DNA, 545 bp, Homo sapiens
ttgttaggggctgcccatacttaggcaaagatacagtttaaacacaactcaatttttggagttcataggtgacttgggtctaaagatttttctggagacctgctttgatcaaggcatggtgtcagaaggtacaagggtaaaaaaaaggttaatatacaacctgtgctctcatgaacatgaggatataggaaatgccttgagaatagccttaagaaagtgagtgccmatagcagagcaacataatgatccatactgggcaagggaatatttttttaaatggaaaagtgagtaaacaccacagaatgggagaaagtttagttgagattttttttttttttttgagaccaagtctcactctgttgcccaggctgaagtgcagcgatgtgaactcggctcactgtaacctctgcctccctgcttcaagcgattctcatgcctcagcctccagagtagctgggactacaggcgtgagccatgatgcccagctagtttttgtatttttagtagagatggggttttatcatgttggctatactgatcatgaa

SEQ ID NO: 544709 - DNA, 545 bp, Homo sapiens
ttgttaggggctgcccatacttaggcaaagatacagtttaaacacaactcaatttttggagttcataggtgacttgggtctaaagatttttctggagacctgctttgatcaaggcatggtgtcagaaggtacaagggtaaaaaaaaggttaatatacaacctgtgctctcatgaacatgaggatataggaaatgccttgagaatagccttaagaaagtgagtgcccatagcagagcaacataatgatcmatactgggcaagggaatatttttttaaatggaaaagtgagtaaacaccacagaatgggagaaagtttagttgagattttttttttttttttgagaccaagtctcactctgttgcccaggctgaagtgcagcgatgtgaactcggctcactgtaacctctgcctccctgcttcaagcgattctcatgcctcagcctccagagtagctgggactacaggcgtgagccatgatgcccagctagtttttgtatttttagtagagatggggttttatcatgttggctatactgatcatgaa

SEQ ID NO: 544710 - DNA, 552 bp, Homo sapiens
tggacataaatataagaggttagatataaacattatagctctgaaaatattacagcagacagccacttgatcatacattagagaagctattgggagtattataagtctgggaacaaagtacctagaatgatctatagttttcatctatctgaatttctgcagtccgttgttctgtaatatgtgttccttggcacttgggagttctgctgagttcttccagagaccacckcaggtgctagaggactctcgagggggaaagatgcattctcccaccatggtactcatctccatttcggtcaggggagcacagcttttaagaactttatatgctgactttctcatgagaagttgaagaaaaagtttggaggaagagttgcatggattaaaaatacttgaaaacccagaagtgatagtctatgaatttcctttctgattcttcagttagtaataatgctaaaactttcatattggaattataaaatgctgcaaaaccagggagctcatttatttcgtggtcccttttggaatgctgctaaataaaaatgccacatc

SEQ ID NO: 544711 - DNA, 515 bp, Homo sapiens
aaacatcttttcttcataaattacccagttttgggtagttatttaaggcggtgtgaaaagggactaatacactgtcaatcttctttgttgaaaatacttgctttctttttccatttgatgcctgtcctcttgccaatcataacatgatggtctctgaaagctgcttaccattttctaaaaaccaaaaccaaaaaaaaaaagatagtcaaaactgaataatttatttatattcaaatgaagtatgcctttaaaaaaaatcatagcgtatttatctttgtagaaagaacagtaagatttgaactctcttttatgcagtcaacttgaataaagagaaacccaaaatctatttcctacttgacctcctcaccaaattactatataacaaattgtacagttaatatggatcagttatcatttaagattcaaatgctctctkgcctgataataatctagtaccatgggagtgcttctaagtgagggaagatatatccctatgcttgcaattacaaagacaa

SEQ ID NO: 544712 - DNA, 643 bp, Homo sapiens
tgtggacttgccatatatgaccattatactatggtaaatgccttctatacctaatttgttgacartttttatcatgaaagtatgttgagttctgtcagaggttttttatgcatcttttgagatgatcatgagatttttacccttcattctgttaatgtgatgtatcacattaattaatttgcatatgttaaaccatcatcccagggatacaatccacttgattatagtgttgatgacattattggagtcgttttaacgtagaagaattatttgctttttctttacctccaaatggcaaggttccttaaggtttttgaaactgaatttgatttataaatcatacaggcagccaactttttcaggcatgctttcatattctatagctcatatgtacataactaaattgctatatactgtatagttatatgtaagagtggatgagtactgactaccttccaaaggaagaaaatctagagacacacgagcaaataaaataggaagcaaatcacatgcagtaatcactggactcactattcctatccaaagcttcaaaaataagttgtttctaggttggaagggctaaaggactttctctcttgctcttctcagatatttgaaccaacactgaaatatacaaagaaca

SEQ ID NO: 544713 - DNA, 596 bp, Homo sapiens
aaaaatacctagaacagggtatgttttggctgaaaaaaaattaggaaaaaaaatagaaagctttccccctagctgacttggatgccacagatttgcttcctcaaggttatattgtgagaaaccctggcctgtagaggagcatgagaaatcatgcatcacttatgcaaaggttttctataattgattcccatttaatcattgtgtgacttttttcttatagtgtaagatgctgaaaaatattaaagatatagaattaacaggatttaatgattgrttagatagatggagaggatgtggataaaagaggagaagaaatgataggcgtatttcttgcttggattgaaacatcaaaatattctgacataaagtacacagatggggcaggttttggcttgaacagtatccctccagtcataactatgttctttctgtaaacactactccctttcccagccttggaaagtaatgcttgtagtatgttaatctgcttctctgggccatagtttattggaacaaggatgaacacttagacagagttcaaactattatatttttatgaactattatgaaaactattatatttatatgaaatttgg

SEQ ID NO: 544714 - DNA, 585 bp, Homo sapiens
aggagacagagctgggagtctgaataaggcaaagcaactaactcacagagcagagtgcaagagatgagaagcttgtaaagagaaattactccrgagacaggcacaaggtcctcctaatgtgttcagctaagaacttaaaagtaaaaccctgtgaggaaactatccaaggccaggaaaaaaattgcccgattgaattaactgaaaaggacaattaaacatttcacgtgttcaagaagtgaaaggaaagattgagcatgtttactagagatataaaatatatttttaaaagatgtaaatcaaacttctagagacaaaaaccataatgtctaagatgaaaaatacattgaatgaaattaatggtaggtcaaacattgtggaagaaacaattagcgtacttaatggcacagcaatagaaaatatccatagtaaaacacaaagagaaaagaatgactgaagaaaaatgaaaagggaattagtgtgttatgggacaacttaaagcagcccaatatatatataatagtatttatcaaagggagcgagaggagacataaaattatttgcagtatttaaataaagcaaaatttc

SEQ ID NO: 544715 - DNA, 571 bp, Homo sapiens
ctggaagccgtggctgcgctctcttccctctgctgggcgtcctgttcttccagggtgagtgctccggctggctacgctccacttccggccggggggttagggaagatggtcgcttttccggttccgggtaggggggtctccagaaagcccccgcatagctctgggaaggaaggagggagggagcgggacgttgggacgatgtcatcaccaccccgttgaggatagttggtattttgtcagtcctttcctgagcyttgggagctttttcaccttgcgtgacctgtcattgtagtttggtgatagcatacttgatggaaccacaaagagctctggctttgggggcacccggtgttattttgtggtgttattatcagtggttgaccgctgtcgtttgggcgctgtataccctgattagaaagaaaacagttctagcattcagtagtttgccccagtagttttgggaaacaaaatcatgacagttggtaattttattttttgtaggtgattattgtagtctataaaatgaaatatttgctagtcacagaagggatgtgatgtgattcgttataga

SEQ ID NO: 544716 - DNA, 500 bp, Homo sapiens
tgaaatagccccttctcttgagtttccctgagacctcaggggacaattagtcactcctcactctttgctgctgcagcagtttgatgttaactctattaaaacacttatcacactgcattataacatatttgttaagttttaacaggtctctcacccccatcatgagcccttcacaggctcaagttttatttatctttttacctctaggctagcacaatgctcagactttgtcagtgctcagtacacttctgaatgagggataatttattgagcatttattatgtgccaggcactatggtatgtgtttcacatgtatttattttttatttattcctaacaactgtgctttaagggtgggtggtaatatgtgcattttttgtttgtttgttttttgatatgggagtctcactcactctgacacccaggctggagtgcagtggtgtaatcttggctcactgcaacctctgccttctgagttyaagtgattccccatcttagcc

SEQ ID NO: 544717 - DNA, 524 bp, Homo sapiens
tccattgtattaaaaacaagtcaacacagaaaacctctccaaaatgtgagtctatagctcttggcattgaatgatccatctggctaggagttcttcctgatgtctgcttacattcccctggctgcttggggttccaggtgagctggttgcaacctgaagagcagcgtccatgtgggggccttctgtaggccagaaggtgtcccctcacttacccacttgagttcygcatgcgaagctcctggctgttttctgtgatttcaacaacatccagatcctggtctgggccaatctccacagctctgaaagtgggtttgctgctcacatcaagagggagagagagttgtgagctggggcagggggttagaacaagatggtagagttggcccccactttcaggagaaagagtggcagagaatgcttggtggggagtggccagggagtggagatggtcttagtcagtgaagatggggcctgctttgctatacaataaagaaccgacccttggcatcccaggactcaaccct

SEQ ID NO: 544718 - DNA, 636 bp, Homo sapiens
tccattgtattaaaaacaagtcaacacagaaaacctctccaaaatgtgagtctatagctcttggcattgaatgatccatctggctaggagttcttcctgatgtctgcttacattcccctggctgcttggggttccaggtgagctggttgcaacctgaagagcagcgtccatgtgggggccttctgtaggccagaaggtgtcccctcacttacccacttgagttccgcatgcgaagctcctggctgttttctgtgatttcaacaacatccagatcctggtctgggccaatctccacagctctgaaagtgggtttgctgctcacatcaagagggagagagagttgtgagctggggcagggggttagaacaagatggtagagttggcccccactttcaggagaaagagtggcagagaatgcttggtggggagtggccagggagtggagatggtcttagtcagtgaagatggggcctgctttgctatacaataaagaaccgacccttggcatcccaggactcaaccctcagtgcattgctgaygtaacttgctttcttgggtggggaatccaaatccagaacccagagccctggagaaatgttaggggtctcctttccatattcccagctctgtccctat

SEQ ID NO: 544719 - DNA, 630 bp, Homo sapiens
tcttacatggcagcaggtggaagggcgtgtgcagggaaactgccctttagaaaagcatcagatcatgtgagacttattcactatcatgagtacatcatgggaaagactcactcccattacctgtcactgggtccctcccacaacacatggggattatgggagctacaattcaagatgagatttgggtggggacacagccaaaccatatcacagagtgattcagagaattaagtaaaagggaattaacattgakagagaatgcattaattaccaagctctgaagaaaactcctcaacaaatgctgtatttctccctgctcttcccactcctcctgtgtacactaatgataatgtactcacagtgcagtgtactgtttatccagattagaatttatttatattatcatgtgttctacattacagacacattggatgtaaagatgatacagcatattttacgagaactttcacagttccaaggaaaggacttcattgctaatctcttgccatttattatcttatttgagtacttgctgttaaagacactgtgtaacgatcactccatttctttctggaattaccgttctctgtactccacagcatgaccctatagacacatcattactttcca

SEQ ID NO: 544720 - DNA, 561 bp, Homo sapiens
tttctgatttaagaagactaaaaagacatgagaagtaatgttctttctggccctatactggggagaaatagtgcttacagagaacattattgggaataatcacaatgttagaatgcaaacaataagttagacmaaagtgttgtttgtatctatataaaattaactgaagttgtggtggggttattacattagagaatatcattattcttaggaaaactatgctgaagtatttagaaataaagggctatgaaacatgtaacttgcctataaattgtttaaaaatttacaggaacgaatacccagagagatacagacacaatgagtctgagtttagatgtgtagaggtaaaacagttttttttttaatttttgcaatagtacatgcaagagatgttttagactagagaagagaggtagcactggaggtagcaaagaatggatggatggaatatgttctaaaggctgaggcaacatgacttgcttaaggatgttaggagtaagaaaatcaaatggatctataaatgcctgtttgttaaaaagttacttacatcataaagtttgt

SEQ ID NO: 544721 - DNA, 606 bp, Homo sapiens
gacataaagaaggcatgttaaaggaatctgactagacatacataggggatatattctagataagtatgtaatgacactggctctctggattggggtgttatgtccttggaatctatgaagcaatcctggaaaaacctttaatttctcaaatttgaccatgaacactttcatcttgtctctaaggattgttaataacctcctattgacccccaaggaactgggtgcttataatctagatgtaaaaacacatataatatctctaataaattataatagaactataaagaaatatattcaaaacagtgtgaattaaaataaaaaaaaaaaagaggaccactgaatctatctggatgycgagttgttaagagaagtcaaaaactgagtgattgggccttgaagaaaaagtatcccataaaacaaaaaggcattctaagaagaagaaactgtggaaaagacacacactcttgaaagtgtttggtatttttaaatatcaggaaagcaatttcaggtggccaaagactaggtcatacacaataggatgaagaatagaattagaaaaaaatgggaatggttttttgcccaaacttgctctcaatatagaattag

SEQ ID NO: 544722 - DNA, 469 bp, Homo sapiens
agctgtgctcaggagtcttgagagtattaggaaactactgaagattttccaaccagtgaaatgacctggaatgtttatatttcacaaagattactggctgtggtatagagaaaggattggaagtaagaaagactataggaggactatggctataagagacatattcataaatccggttaaagattctggtaggtaatggagaaatgggaggattcaaaatatactaaggctatcaaaaatagaagaaatattaagataaggcaatttagagsaaactggtttatatggataggaagaaaaaaatcaaaacatttaatcctgtcattcccacaaaacaaaattttagtggttatttcttaaaaactaataaaaacgaaaactttaattcttatccattatatttttccaatctttatatttagccctatgttctacatcatatctccgtatttctttctcaaaaaatccc

SEQ ID NO: 544723 - DNA, 600 bp, Homo sapiens
ctggtgggttataatgtaatttacctggttttgttacgctaaggtctaaagtcaaggcaaattggattttccaaaggtgattctttctttcaaaattcaccattaattggtttcctgataccaaaagtacagaaagataataactcttttaaatatatgcagacctctctatatttactttaaaatacatatcataaactgtgagtctctatgaattatctgtgcttacatgatttattttgttgtagaaaacattgatacatagctggcttagaaaatagtgatagttcacaagttgtagctattattagttacaactaatgtaaatgaacttaaataaatttgcctaaaaattattttttcctgcatgaaattrtttctattatacaatacctacaacatctggggtttgaaatagttattactaatgttgtttccatgctgttgctccttataccaaccctggggggaaaaatagttccttcaacagtggctgagtctaagtgaaatagaaagttcaattcctcccacaaatgttcttgacaatttttagcttgccagaactagctttaaaaaaagaaataaataaatacttaaaga

SEQ ID NO: 544724 - DNA, 604 bp, Homo sapiens
acttttaaagtttcaaaatcatctgaagttctagtaaaaatacagattgcttggcccatttsccagcattaatagtagatcacagtaatttgtattgatagcaatctgctagattatgctgatgctcctgctctagagaccacattttgaaaactattgataaaaattgaaaatattacagaagatgattatctttatgcctactatgtgccattcaccattctacaggcttcatacaggtaaaatacctataatcatgtttggctttcctcctactaccagtactagctgtgataattcagcatcaaagtatttgacctctgctagggctcagtatacaacttctctagtcatttattagtgcttactgcacacagagaccaataagaacaaaattgggaggtgggttggttacatgagcttctgagccataaaaggttggctcctagcattcttgttaattattttatattctctggccctcgtttgtcatatttgtttttcttataatacagatatttttataagtagacttagtgactaatggaattacctttctaaaggacagcaagccacacacctatgcccatttatctattgtttc

SEQ ID NO: 544725 - DNA, 604 bp, Homo sapiens
acttttaaagtttcaaaatcatctgaagttctagtaaaaatacagattgcttggcccatttcccagcattaatagtagatcacagtaatttgtattgatagcaatctgctagattatgctgatgctcctgctctagagaccacattttgaaaactattgataaaaattgaaaatattamagaagatgattatctttatgcctactatgtgccattcaccattctacaggcttcatacaggtaaaatacctataatcatgtttggctttcctcctactaccagtactagctgtgataattcagcatcaaagtatttgacctctgctagggctcagtatacaacttctctagtcatttattagtgcttactgcacacagagaccaataagaacaaaattgggaggtgggttggttacatgagcttctgagccataaaaggttggctcctagcattcttgttaattattttatattctctggccctcgtttgtcatatttgtttttcttataatacagatatttttataagtagacttagtgactaatggaattacctttctaaaggacagcaagccacacacctatgcccatttatctattgtttc

SEQ ID NO: 544726 - DNA, 433 bp, Homo sapiens
agataggaaaaagagtaaagaggtatggcttaccactaggcattaagaattattataaagttatagtaattaagacatcgtaataagacacattatagtaataagacaccatgctactggttggtattgataaattgaccaagaatgaaaggtaacttaaaaaacaaacttatgtgtgtgaaatgttgatatataaaagtggtgttatgacagacgaatggagaagggaagagctrttcaataaactgaccacacatacagaaaaataaaggtggatcctcagcttccatcaaacacaaagatcaattccagatggataaaagacttaaatatcagaaacaagcctttaaaatcttaatataaaatatatttgagtattactctaacattggaggtagagaatgattttttttaaatataaaaagagctaacc

SEQ ID NO: 544727 - DNA, 584 bp, Homo sapiens
ccactgtccatgggaaaagctgtcatatgccagccagtatccaaggggaggagaaatacacctctcatctccatgggatatgtggcctccttgaattcaccaaattaaaaatacaattgtgtgacttaaagcaacagaaatttatttttttgcagttctggaggtcaaaagtcctaaatcaagtcgtctatggagttgtgctccttccagaggctttaggggagaatctgtctttgccttttctagcttctcatggctccaggcatatcttggcctgtggcactataatttcaaccactgccttcaacttctcatggccttctctttcatgggtgtctcttttgcatgtcttttataaggaaacattggatttagagtctccatggatgatctaggatgaatctcatcttgagatcctgaattacatctgcaaaactctttttccatatagtgccatattcatttattctagattttataatagaatgtgggcatatcttttgaggggtccaccatccaactcactacaacttgtccrataagaatttggatctaaaattcaggggagcagaaggctcttggca

SEQ ID NO: 544728 - DNA, 548 bp, Homo sapiens
tcctttgctccgttcattccagtcatcctagcttccttgctgatttttcaatattcttccaatacaagatatttgcacttgctggaaaatctccaaagcatttacacaaatcaaatctccccctgttcattcaggcatctgttcaaatgccactgctcagagaagtctctcacctggcctggcccagctccatccctgtaccccacccaactgctggtcattgtcattgtcacctgacctgccattacctatgatttgcttattctttatcattccattagaatggactttttctgtttcacatgccactgaaacttcagcccctagaagagtgtttagtacttcaaagtccctaagaaatgtttgttaaacattgaggaaatcaagkaactcctttgtcttcaaggagcttagcagggatattgggaaaccaggtagagatggagttactcttattttcccagcctgctcattagaaacggtttaacttgacttgtatttatttcctataattgcctgtgggaatcaaggggaagaaaagtccccaa

SEQ ID NO: 544729 - DNA, 465 bp, Homo sapiens
tttgtgtttagtccaacccagggatctgactttctctaatccagagtacaagtcaaccacagttaacagaagctgacagtgaggtgatcagtgttaacctagcaaaagaggttaccttcctgtgtcacaaactaacatgcagaccacrgtcatgtcatcatcttttccttctggggatcctattgcgatgtctaaaaatggtatctttattctgcccattttctaccaaggaaaagcgcttggttcaactgcaggtgttttgcaagggctcagcgactctgctagaagtcatcaggaaagctgtttgtttcccccagtaattctggactcagcgcatttgtctcaggctcctggtgatctgggacggcacattatttgatgtcgtccagggccatgccacttaggaagttttgcttatgtcaacatcacgggctgtgcacattttttttcttttgctgggggcag

SEQ ID NO: 544730 - DNA, 559 bp, Homo sapiens
cagtgatgtcccaccccactgtctagggaagaaagggctggtctcatcagcttcccagggagctgggggctccgtgacattggtgtttttcctctccgctgttctttctctccatgcagtctcttcctctacccctcctttgaaagaaggctccacaagcacgttctcccctcgcccctgacaggtgtggggaatgacccgtccctccgctgggggccgtgtgcgctgatgctcggttttgcrgcaagcatttgtattcagcactccgctcccctgctcttgcccagtgtgttctgatgagcttctccctgcactcatattgtctcagtcgttaaccacccatttgcaagtctgtaatttacttttgatcattcatttcatgaggcgcacagggcaaaaagctgattctctttccttctcccgccaccccttgattcccggcctcctcggtctactttgcagctacgagtctgtcccagtcacacacgcagttgcgttatcatctcacggagaagcctgtgctgccttgacttttccaggagagattttccttctgctt

SEQ ID NO: 544731 - DNA, 616 bp, Homo sapiens
gggtttattgatatgataacccctgttgacagcaggggaaccactggcagcatggataggattgttctgccttggactaagccccaggagtaggtgctgtggctgaggaggctctgccaccccttcccaagtgggcatttcacagccattttttgttctgcaggaatcagcgcctgcccaggctgagaggtgcccgcccaccacccagtagccctgagaatctggctgaattctattccttctcgcattcatcagaattttcagtaaataaaacayagtgcctcttataccagaaggaggaagagtcggtgacaggagaggagcagactctttaagacccttctcagggtttctcattttttcccttcctcttgttctctttggacacttttcctaagtagaaatcagcccttacatcattcctcgctgccgagaccttctttagaaatgtttcccggctggtgttgtcccgggagatgtcaggggcttgccacaggcagattgtgcaccccccgcacgccacccctacagacatactcaaatccccacgtccctcctccttcccgccacctccttccttccctgctgtagcgctcaaggcctcataagcagggtc

SEQ ID NO: 544732 - DNA, 407 bp, Homo sapiens
acaggattcctaactggttcaggattcaggtatcaggtatccatctgcttcaaggcagactggttcctcccaggcccaggcatgaatcttgtttctttaagcgagcaattcccaaactttttggtctcaggacttcaactcttcagaataccctcttcaatgaccttttgtttatatgggttatttctatttatacttaccattttagaattcaaaattcagaatttaaaaaaaaattgtaaattcattttaaacgaacaataataagcccagtacatgttaacataaataatacatttttaatgaagaataattacatcttccaaaacratttggttagatgagtggcactgggctgcacctttgtaaatctcttaaacatggcttaatagaagacagctgcatcc

SEQ ID NO: 544733 - DNA, 482 bp, Homo sapiens
atctggccccattaagtgcttgaacccagacgctgacgtctgccctccgtaccttggtgtttaggcctcgtggaaaatgacttgcttgtgaatagctgataatgcacctgtcaaattctacatatggccaagatccttctgttggttcctcacactcaaagtgccttgtttttcttcaagtactatctgagatgtctctacggattagtgtttatatgcggcaagtactgcagttagttaataatgtcaagatcrttgagcttccctaatgaaagagatacacaacatcaactgtcattttaaacaaacatgcaatcaggatagcagtgctgaaaatatgatctgcctaatttcatggagatgatgcaagaaccaggctgctttcacagtccttccactggcgagctccatttcacaggatttcaggggagaaacggtggattttcacaagagccgcaaaactgccggttctgtgaaaaaga

SEQ ID NO: 544734 - DNA, 620 bp, Homo sapiens
aaagattaatgtaatgtatccctaggctggcagtgcctggacagggcttgtctaattaatatttaagcaataaccttcacataggcatcagcctgctaacgaaggctattctgacatctccgtcagattctgtagaagaggaacactgaattagagttctgaagacctgtgttctagtattttttttttctttttgctacttccttttgctcctacagactgactgtgttttctcatgcaaatgaagataatatctgctttgttttctttatatgtttkggtgagacctgaagagacatgtgtggaaaggcatttgggttaatggtgaattgttttgcaaatataaaatcaaccctattttctttctacttgaatcatgcctgcatcccttttctcttaccctccccttttcccaatggtctccatcaatctaagagattaatttctattccaaagaaggtgatcttttaagtcatttccttaaaacttgctgagatccttgaactgacatgctgtattttgtagaaatgctgacttgtcatactgatgtccatatttatgcctaatttttgggagaggtctcagatcctcagagcaaatactgactcattacttctgca

SEQ ID NO: 544735 - DNA, 595 bp, Homo sapiens
gtatccctaggctggcagtgcctggacagggcttgtctaattaatatttaagcaataaccttcacataggcatcagcctgctaacgaaggctattctgacatctccgtcagattctgtagaagaggaacactgaattagagttctgaagacctgtgttctagtattttttttttctttttgctacttccttttgctcctacagactgactgtgttttctcatgcaaatgaagataatatctgctttgttttctttatatgtttgggtgagacctgaagagacatgtgtggaaaggcatttkggttaatggtgaattgttttgcaaatataaaatcaaccctattttctttctacttgaatcatgcctgcatcccttttctcttaccctccccttttcccaatggtctccatcaatctaagagattaatttctattccaaagaaggtgatcttttaagtcatttccttaaaacttgctgagatccttgaactgacatgctgtattttgtagaaatgctgacttgtcatactgatgtccatatttatgcctaatttttgggagaggtctcagatcctcagagcaaatactgactcat

SEQ ID NO: 544736 - DNA, 599 bp, Homo sapiens
ttgggtgtttcctgctctttccctcaaccatcttgtacactctgattatttaaatgactatctccccaagttgactctgacctttgcctcttagggcaagaatcatgcctgtccacctcttcacatgacttcgaacatggtgggcatttagctagtatttgttgaatgaatgaatttgtacttattaaggaaagccaggccatacctatatatyatcaggaagaactgacccaggtaatgttgggcaagggttgaaaggatgttaacggatggatcacgagctaactgggattcaattgcgatgtcctttggttacatctttcccctgtaatacatctgtttcactgaaggtgacgagagataggttttaagaatcttattgttcttattgtgctcatctcaggttcattttatcttccacagaaaacctgtggtttgctgaaaaaatggtaggttttgttgtcatacaaatcttggttctaattcttgtcatttgttgggtctgtaacctcaggccattcttgtcacttgttgggtctgtgacctcaggccattcttgtcacttgttgggtctgtaacctcagacaattgttgtcact

SEQ ID NO: 544737 - DNA, 611 bp, Homo sapiens
agctgtgcatgcccaggactgcagaggatcctggcgggcaggcagagaaccccatccctacggagaccctcatccctccctgctcggcttatgttctgaagcactgacttagactgcraagccccagagtggctctgctctcctctgccctccaagcagggctgggccaggattctccctttgcttcaacattttccaggacttcccaagaagatcctatactcctcagttgcctgtccaagggctttgtgccactatctgtcactgacacacttcctggtatcagagaagctgtggagcagcaggacacctgcctgtcccttttttgggatctttttgtgctgggtcttcatcctttcctggtttgctaccccagatgacggatattccagaagcactctctttgcctcctgtacgttggcagagaagcaatttatcactgcattttaaaaaaccctcattaaggcaaattaaggcagcaaagccgacaacagagggtttttgaaaaaaatagtgttcatgaaatatttattaaaacagccattgtaataaatatttgaaaaccagttattaacgttaaatcatatcagtgtcaagcatacgttacacgc

SEQ ID NO: 544738 - DNA, 611 bp, Homo sapiens
agctgtgcatgcccaggactgcagaggatcctggcgggcaggcagagaaccccatccctacggagaccctcatccctccctgctcggcttatgttctgaagcactgacttagactgcaaagccccagagtggctctgctctcctctgccctccaagcagggctgggccaggattctccctttgcttcaacattttccaggacttcccaagaagatcctatactcctcagttgcctgtccaagggctttgtgccactatctgtcactgacacacttcctggtatcagagaagctgtggagcagcaggacacctgcctgtcccttttttgggatctttttgtgctgggtcttcatcctttcctggtttgctaccccagatgacggatattccagaagcactctctttgcctcctgtacrttggcagagaagcaatttatcactgcattttaaaaaaccctcattaaggcaaattaaggcagcaaagccgacaacagagggtttttgaaaaaaatagtgttcatgaaatatttattaaaacagccattgtaataaatatttgaaaaccagttattaacgttaaatcatatcagtgtcaagcatacgttacacgc

SEQ ID NO: 544739 - DNA, 611 bp, Homo sapiens
agctgtgcatgcccaggactgcagaggatcctggcgggcaggcagagaaccccatccctacggagaccctcatccctccctgctcggcttatgttctgaagcactgacttagactgcaaagccccagagtggctctgctctcctctgccctccaagcagggctgggccaggattctccctttgcttcaacattttccaggacttcccaagaagatcctatactcctcagttgcctgtccaagggctttgtgccactatctgtcactgacacacttcctggtatcagagaagctgtggagcagcaggacacctgcctgtcccttttttgggatctttttgtgctgggtcttcatcctttcctggtttgctaccccagatgacggatattccagaagcactctctttgcctcctgtacgttggcagagaagcaatttatcactgcattttaaaaaascctcattaaggcaaattaaggcagcaaagccgacaacagagggtttttgaaaaaaatagtgttcatgaaatatttattaaaacagccattgtaataaatatttgaaaaccagttattaacgttaaatcatatcagtgtcaagcatacgttacacgc

SEQ ID NO: 544740 - DNA, 611 bp, Homo sapiens
agctgtgcatgcccaggactgcagaggatcctggcgggcaggcagagaaccccatccctacggagaccctcatccctccctgctcggcttatgttctgaagcactgacttagactgcaaagccccagagtggctctgctctcctctgccctccaagcagggctgggccaggattctccctttgcttcaacattttccaggacttcccaagaagatcctatactcctcagttgcctgtccaagggctttgtgccactatctgtcactgacacacttcctggtatcagagaagctgtggagcagcaggacacctgcctgtcccttttttgggatctttttgtgctgggtcttcatcctttcctggtttgctaccccagatgacggatattccagaagcactctctttgcctcctgtacgttggcagagaagcaatttatcactgcattttaaaaaaccctcattaaggcaaattaaggcagcaaagccgacaacagagggtttttgaaaaaaatagtgttcatgaaatatttattamaacagccattgtaataaatatttgaaaaccagttattaacgttaaatcatatcagtgtcaagcatacgttacacgc

SEQ ID NO: 544741 - DNA, 722 bp, Homo sapiens
tgccttcttccctctatctgcatccatagttctacaaaggaccctgggccactgtcctgagatcaacagtttgcattcctctctcccttccagaccagaagttttttgatgccaagaagcatacaatatcctctttgtcttcagcacccagcacagtgcctgcaaagtgtttgtttttcttttccttctctcttttttaatcttttcttccgttttttattgttttcttgcttttgttttttaatcaaccagaatgaaagtttttaagagcatgtttttcaatctcaggaacagtctggggggaacaattaatacaacaaaagrgaatggagcttgaatagagaatccaaatcttagccttagtttcttcatcaatcaagtgggaaccctgatacccacttccttgatttagtgtgagaaatgaatcatatgactattgaaactgttctgcaagttataaagtatctttgtgaaattttagacacatttttgacaaaaaaaaaaaaaaaatagttgtcttaaaacgggttgcacccgggcccaggacccgggctggaaatcctggtggctgtgtgggcccctcacacattaaggtgaatgaggactaagtgtgcattgcaggaagctgctaagtcacctaggctgccaacaagctgggatgtaagtttgggatgcacaagtccgtgggcatatcagatacatacaagattcttactgagtcg

SEQ ID NO: 544742 - DNA, 549 bp, Homo sapiens
ccacatggtgctggaaacgtggaaattttagcgaatgctctgacaatggccattcttcaggaggcaggagcacagattcaggagccagaatatctgatctggcttttgggtctaagacttcctagcatagtgacctcgggcaagtcatctacattgtctgggtttcactttcttcatctgtaaggtggagataataatactacctacttygtggtgttactatggagaataaatgatttaatacccatatcacactaagaaggatgcctggcacttagcaaaactcagtattcttacttccttagcctaggttccctggaaaactgaggcagagctcatgtgataacccttaataaggggaaggaggtaggtgaaatcccaggaaacaagaatgaggtggaaaggaagggaaacaaggagggagagaaaggtccaaaatcacgtgataatgggatggccacagcttcacaagaaaactctgctggttgttcattccacaagtcctctccagagaggccacacagaactactgcatctaagaacaatccc

SEQ ID NO: 544743 - DNA, 486 bp, Homo sapiens
cctctagtgaaaatgcagacggttgcctcattttgtaaccgcattcctagaaatctcatactaaaatgcattttatgaaccaagtagaattttccctgtaggaagattgctaattcggaattgagttccatatcaagaatgtggcatcaaataaattatagacatcactaacaatttarggggagaaatataactataaacttctataatcatttaaaatagtaaaggtgtgttccaactcacataaaatgggcatgagtatattgtacatgttgattataccgagagaccccaatgtgctatcaagtgtacatagaatgcataaaattctaacattagtgtaccataaacagcctaaaaccagcctactagctataataaatttaattaaacattaaatgaacagtaatttggttttccttcttagacttcagaagggcttcttgaggctaatttgactaccttggatctccaataaacaacaac

SEQ ID NO: 544744 - DNA, 573 bp, Homo sapiens
ttacggtgtagaacagctcatgctggttacaatctgaagttagtgcagggaaggactaattggttcttccaaggaccagctcagcccttatgcctggtgtactccttctgaaatgccagcccagcgtttatgcaaatcactagtctgtctctcttactctctcccttgtacttttaatgtcttcattatttttctgtaagkgtttacaattcaacttccactgtaacagtgagtttacatttgtactatttgctttacatgccatgaaggtatgaattatctacattgtattggtgagaaacctaaggttcagagtatttagttaggattaaagtcagcttgcaagtaacatttatttatctctcattttaaataaagttttgaagcacacagtgcaggggtagtttgatggcctcatgaaactactgttagatattcaggctccaccttccctagatgtggcccccatccaaacagttccacaagggcagctagatataactgcagctactgtatacaaatttcaagtagcagctagaagaaccaaatcaagaaagggcaaaatcttacaca

SEQ ID NO: 544745 - DNA, 608 bp, Homo sapiens
tcctcctaccacctgctgagagccagttgcaaggagagactagggaagggcattgggtaactttgttgctaaaactcttttggataaagacttttgggaaaagaagcaaatagagttcagcagaagaggtaagaaagtaagtttatgtttggccaggcacggtggctcacacctgtaatcccaggactttgggaggccgaggtgggcagatcacgaggtcaagagatcggaccatcctggtcaacatggtgaagccccatatctgctaaaaattcaaaaattagctggccatgatggcacatgcctgtagtcccagctactcgggagcctgaggcaagagaatcacttgaacccaggaggcagaggttgcagtggaccgagatcatgccagtgcattccaacccggcgacagaacaagactccatctcataaaacaaaccmaaacaaacaaacaaacaaaaaagcaagcttatttttaagcctgaacaaatgtagtggtttaggggttctgcaaatacggccccaatcaggctacaagatgttgtggcagcaacacttacacccagtcactcctggctggctgagccacttttcaaaacacccttgca

SEQ ID NO: 544746 - DNA, 586 bp, Homo sapiens
atctcctctttttaatgctcattygagtaatacataattctatagagagaacctttctctaatatgtgcttcatctcaggttaagcgtgttttgtgcaactgtgcttcatgaaaaaaaaaaaggtaagggatctaattggggagccattcacaaaagtgctaccacttgatgctattttatactctgagatttcttattcccagtgcctaccaggaatggactttctggagaagctcagattaatcactccttatgagaggtgacagtgtgctggcagccctcacagccctcgctcactctcagtgcctcctctgcctgggctcccacttgggtggcactggaggagcccttcagcccatggctgcatggtgggagcccctttctgggctggccaaggtcggagctggctccctcagcttgcagggaggtgtggagggagaggcatgagctaaaacgggggctgaccccagcacttgcctgccggctggagttctgggtgggggtgggcttggtggccccgcactaggagctgccggatggccctgccagccccgggcagtgaggggcttagcaactgggccagca

SEQ ID NO: 544747 - DNA, 671 bp, Homo sapiens
tgttgaataaaacataatgcaataatgagcttgtgtatgtcaactctatagtggaggtaataatagctagagagagcatgtcccatctcctctttttaatgctcatttgagtaatacataattctatagagagaacctttctctaatatgtgcttcatctcaggttaagcgtgttttgtgcaactgtgcttcatgaaaaaaaaaaaggtaagggatctaattkgggagccattcacaaaagtgctaccacttgatgctattttatactctgagatttcttattcccagtgcctaccaggaatggactttctggagaagctcagattaatcactccttatgagaggtgacagtgtgctggcagccctcacagccctcgctcactctcagtgcctcctctgcctgggctcccacttgggtggcactggaggagcccttcagcccatggctgcatggtgggagcccctttctgggctggccaaggtcggagctggctccctcagcttgcagggaggtgtggagggagaggcatgagctaaaacgggggctgaccccagcacttgcctgccggctggagttctgggtgggggtgggcttggtggccccgcactaggagctgccggatggccctgccagccccgggcagtgaggggcttagcaactgggccagcag

SEQ ID NO: 544748 - DNA, 671 bp, Homo sapiens
tgttgaataaaacataatgcaataatgagcttgtgtatgtcaactctatagtggaggtaataatagctagagagagcatgtcccatctcctctttttaatgctcatttgagtaatacataattctatagagagaacctttctctaatatgtgcttcatctcaggttaagcgtgttttgtgcaactgtgcttcatgaaaaaaaaaaaggtaagggatctaattggggagccattcacaaaagtgctaccacttgatgctattttatactctgagatttcttattcccagtgcctaccaggaatggactttctggagaagctcagattaatcactccttatgagaggtgacagtgtgctggcagccctcacagccctcgctcactctcagtgcctcctctgcctgggctcccacttkggtggcactggaggagcccttcagcccatggctgcatggtgggagcccctttctgggctggccaaggtcggagctggctccctcagcttgcagggaggtgtggagggagaggcatgagctaaaacgggggctgaccccagcacttgcctgccggctggagttctgggtgggggtgggcttggtggccccgcactaggagctgccggatggccctgccagccccgggcagtgaggggcttagcaactgggccagcag

SEQ ID NO: 544749 - DNA, 173 bp, Homo sapiens
caggctataaatgcttcaatatctttkccccctggatggaacaactttgaaatatattccacatcacctcccagaggtccccagtggggtcaaatcctagttgcctggagtggtaagctgctcattgaagccccctgtgtggcctcctgcctttccatgaatcaattcctcac

SEQ ID NO: 544750 - DNA, 173 bp, Homo sapiens
caggctataaatgcttcaatatcttttccccctggatggaacaactttgaaatrtattccacatcacctcccagaggtccccagtggggtcaaatcctagttgcctggagtggtaagctgctcattgaagccccctgtgtggcctcctgcctttccatgaatcaattcctcac

SEQ ID NO: 544751 - DNA, 173 bp, Homo sapiens
caggctataaatgcttcaatatcttttccccctggatggaacaactttgaaatatattccacatcacctcccagaggtccccagtggggtcaaatcctagttgcctrgagtggtaagctgctcattgaagccccctgtgtggcctcctgcctttccatgaatcaattcctcac

SEQ ID NO: 544752 - DNA, 251 bp, Homo sapiens
ccatgaaaataaatgactgttgtattaagccactgagatttggagtgacttgttatgcagcattttgtgacaataastaactgatacaagggtcaccatcctttatctctgtagattttaaccaatttttaatagctagatggagatcttctagttgcctttatttataatgaataagactgtagagctagtttggcctgacactaccagttacctacccagaaattcagaaatactttcttctccaaccc

SEQ ID NO: 544753 - DNA, 501 bp, Homo sapiens
cccctctattcattgttattctccctgagatttttctcttgtcacttgacggacttgaattttgatctttactgccggactaaagctttgtcaaccttctgttttctttgtgagtcaactttttttttttattattctcatcattcttcttggaacagaaagcaaatattttttagcagtctgtgtgattcatttggtgccttattttggcctaaatgtttgttctctcttytataatcaattattttaattgtagctgtctgggctctaaaggtagaaagagatgatggctaatctctatttcaataattggaaaccagttcttttcttgtagtgtctacaaattccatggagggaaaatgtattccatgtctcctacacaaaagattttagtggacacatccaaaagctatgggtttttgtgctcttatccatatgttttcatggcaaacttactccataaaacctcaggaagagagcagtttggagtgtgtgtgtgta

SEQ ID NO: 544754 - DNA, 647 bp, Homo sapiens
ctgtttctctcccctgttcattgttgctatgtagccagtgttggtaaagcgtcaccttgggttgcttcctgtttttcccttcctgattccccttagccttccatctctctgccatgtgatttcaccacaaaaataaggcattggcatttaatcacttcctcagggtctgttttctagggacacagcagtaagatagtttggagaaaaattccttaacatattaactaggcttgatcaatattaccaatccatccaatttctcaagagctgaaatgtgagtgtgtaactgggatattggactgagaaagaaayaacttatctgagggtttgaatgaccaagttctagtcttgtgttttatgtctgtgagtttcaatgcattagtatatggctctgacttggattcattctttgtgaaagctttcaaggatgcagtagaaatgtcatagttactcttttaagagaacctcaatatcaaatataatctcatgtgaaattgcttacacagtggttactattcaacagtattgatttttcttctcctttccttcaaagaaaggcatgctctaaaattaagaaaatctcttatttttccatagagaaaattaagagaaaatttcactgagttttttaaggtgacatgctaaat

SEQ ID NO: 544755 - DNA, 565 bp, Homo sapiens
gtagcataaaaatatctctgatgtccagaaggggtgtctatcttccagcacagcagccagacattctgcttataggtctggttttctgtgccacggccttttctctttgatatccatcaagaaggagtgtttacactgaaaatggggtgtgagtgggacraaaacactccctgggggatctgtgggtgatgtgtccagaatagggcattcgagacatcaatgtgggagaatagaacacgtggaaaaacaaatataaagtcttgacagtcctagaaacctagggtcaatggacagcttaaggaaccttctcaggacactggggaatgggaataggagatgctcctatagaagtgttttgagcagtaaagaaattggactaatgagaggtcattgatactttggttccagagaacccatgtgctggccataaactgaaactatttgcataagaggcacgatgttttggaaggactttacatgagaagaagggatttgaagagtagaaaagcatttcttcaattgaatcaatcagattccattatttgcaagttaatatacagtcagt

SEQ ID NO: 544756 - DNA, 620 bp, Homo sapiens
taccttgcactattaggtgaacccgggacgttttgggatgattgtctgtctgcacagagcaggtgtacggaccttcgtcatacacatccacattttggatcatgatgctgtactgggttggtgtattgaccaggatgatcacacgagggtctatggaccacttgtcattcccagcgtagaggatggtgctgcggtttagccaggccacccgggttacccggtcatctatggtacacctgcagtgaggcagggagtggtggagggaggaagaagggaaagagagagagtggagagattatataatatggtaaataagacgttgcattttgaggagtaaatgaaacaacaaaacacagtgctaaaaggaaacaattattgatgaaacttcctaaatataaactaagagtgaccagaatcatcttgaagaactgacaatacaaaatcatttctatttgacttcgagacatattatgtatctttgccatccatttgctttccctgttatttttttccccataggcttatatgaaaatyagtttatgtttcttgagcacatttaccaccttggggaagaagtggcccaggggcacatgggagagagagtggatcagcatttcaaa

SEQ ID NO: 544757 - DNA, 320 bp, Homo sapiens
actggcaataaaaactgtcaggcagtacagtggcaaaagttagaaagtgcttgttaaaataatcaggtttaaaacagtcagtgacaaaaacgtaaatctcagtatgttattggactttccagcttatgaaaatacacaaattgtttctatatgtctgaattctcttagatacaacctcttttaagawcaccaaattttatttgggaaatgcctatcccatcatcaatgccattctgaagattttacctgtgaatatagattgaatttgagagaaagatttgtttttctctcttcatttcaactagagagaattaacatgt

SEQ ID NO: 544758 - DNA, 661 bp, Homo sapiens
ctgctaggaaaatgcaggaaacaccatgtcccctgtctactctgtcctcaggatcatagaaatgggctgtaagaaaccctgctaggggcagcctacttgcagtcagttgctgtgctccaaactcaactcatgacctcctgaccagggtggtgacggctgtgcagttgaatcatgagttgtataagtcaattaaatgcatgttataagagtactaattttatgtatacgcctacaagagggtgtgccttcttcccgagttcttgaaatactcggatgctagtgatgctcccaacactaaacactctgagtagaatcattagtggggcaccaagggagaagtgattagaagatgagaaataactgaagacgtggaactaagagatggtatttctgaatgctaaggtaacagggtttcttggcagcaaaaacaaacagagacatatgatgagcatgtaaattatcaggcgtacatttcctttcataatacattgtcaaaatcatcatcatcaacatcwttgccatgttgctcctaggtgcgactgtgttaacatttagcactaaggagagctcctaaaagagtaactcatttacttcataacctgtttattgtgtttcatgcatataatattgtgtttggtagcatgagaaatataatgataaa

SEQ ID NO: 544759 - DNA, 599 bp, Homo sapiens
aaaagtgacgctctttccactatgcgttgtggcttcttatgatcaaaatgttcttttaaatgagaagtccaggaaaagctatctgggggcatcttcagggagatactattagtgatgcatagaatgactacatctgatgtaatgagttgtaaacatctgaaaggagctactgattaatacagaagaagaggggtagaaaaagaacgcagacagacacagtgctgctggaatgtcccaggtttctgtgtggcagagccctggagagtgcycttggtgttgtccatgcggccctgcctagctaagcacaggagctgtcactcctcggaaggtggccacaccaagctgctctctcactggctcctgctgagccatgccttccccgctttcattccgcatcttaccacaaagagaactcattttgctcacaaacactagaactcaatgataaataaatcaacttgtgaatatgaaggcaaccacgttctggcctcagaagccttgctttgcctgacgactaccagggctccctctaggcctcaaaggcattatgccagtcaccttatggaaatttaagtgagtatgttgagatgttctttaag

SEQ ID NO: 544760 - DNA, 656 bp, Homo sapiens
gaattgaactggcaactgcagaaagaagcctgtggcaaaaattagggcaagaaagaattggagaaggggggactcagggggcccagtgactgacgcaataggaagcagggatgatgagcggttctgtgagttgatttgtatttcccggggttaaggcagcagggccttgatagaccatatggtctggccttgacccttaaatctctgcctgcccagagascagcagccctcactgtagctggcttccacctcttgttattcttggcactaggagtcctgatcgcagggtagttcagtatcataatccaaagaattagatagaaaccatctggaagagcaaccaactttaaccttgagggctatgtgaaaataaccttcatccactgagccctttgttcacatggaaaaataggttagttagagcatatttcaaaaagcaccagggtcttgggagccatccacctcagaagagaacaacatttaaccactatgctttgatatctatacaatgcattttttcccatctgcttagtgccaaatttcctgtttcttgcacgatggggattcaataaacagggccaagaaggtaacaaagctcactgcaggatgctaagcaatagaaagcagagaggccacgcctgtaataaatcaattag

SEQ ID NO: 544761 - DNA, 464 bp, Homo sapiens
acttggagctacgctaaaataacaaatatgttttaaatagcatcagctttacagggagccacacacagagagcaaggagggagatggaagtgtttgatttaagccrcttctttccaagatccacaactacttcagtgcttaatgaaggtgggagatggtctttgaaaatgctttagattgagtactttaggaccccaaatgcactagttgtgtcccttgcgtattactgccctgattcttcagtgcacaagacgaataatttactaaaaagcacatgtaagtatttctttattattcattataatgaactgagacaggagtaattctccactctgctgcaatccccgagggcttaaccaggctgtgctttgctttcccacagttaatttgagtagaaggggacccttctctttgtacctgtggcctaagtaggacttgtgctagtctaggtgtgagcaggaaaa

SEQ ID NO: 544762 - DNA, 464 bp, Homo sapiens
acttggagctacgctaaaataacaaatatgttttaaatagcatcagctttacagggagccacacacagagagcaaggagggagatggaagtgtttgatttaagccgcttctttccaagatccacaactacttcagtgcttaatgaaggtgggagatggtctttgaaaatgctttagattgagtactttaggaccccaaatgcactagttgtktcccttgcgtattactgccctgattcttcagtgcacaagacgaataatttactaaaaagcacatgtaagtatttctttattattcattataatgaactgagacaggagtaattctccactctgctgcaatccccgagggcttaaccaggctgtgctttgctttcccacagttaatttgagtagaaggggacccttctctttgtacctgtggcctaagtaggacttgtgctagtctaggtgtgagcaggaaaa

SEQ ID NO: 544763 - DNA, 597 bp, Homo sapiens
ggaaagctttccttattggagcagccacttctgtcctacccacctcatgggcaatgaagttggagaaggacttaggaactaatatcatattctaaagggaagagtggcatggaaaacatgaacttctgcatttgttttctttaagaggcactaygtggagaagcatagtattagatgtcaactgcaatcacttttcttcagaaagctaaagagcatatatacagactatatatatatatacagagagagagagagcatatatacagactatatatatatatgatgtatacatatccagcttgatgtaattaatatattaatatagatcttgtaactctggtgttcagacccctgtatttaatagctataatagaaatcactatagctggtaacagaaaaaaagtcatattctgtggctttatgtcaagagagaattatatttagaatttagtttatagtttaaccttaaagcaaggatgacaatagcctttcccaaaactaaaccacacttgtaaaactaatcaacgtccacaaagttaggattattacaggggcttgaattctgctaagatatgggtgtggttaaaagataaccag

SEQ ID NO: 544764 - DNA, 520 bp, Homo sapiens
cttccaccgagggggagccttattaagtggcgaccttcattctctccacagagacgggcaagctcgcatcagaccacttgtgggggaggaggatgtgggggagrgtgggggcacctgtggagcattttatgggttttgagaaaaccaggctgaagtcctgagtagcctgcagttccgctaattacattcatcttctcattcgcctctaccaaatcaattgccgacaacatccaatctcattttctgcagtacatttctgtgagatatagctgtactaccaaccccttcctcctctctgggaatggcttcctgccaccaccctatgggacaggggctttagagggtgagggaatatgacaggtagacactttacaaacaatagaagctttccaggttctttcatgcaggctctgccaattgtgagagccaggggaatcgtatgaaaatgaggcaaactgttgtttctatttagttgaatatttgctccttaagttaatccttgtgtataccattattgcac

SEQ ID NO: 544765 - DNA, 628 bp, Homo sapiens
tttgtggcccaggtctttgcctttttcagaagctccacatatgacgccagcgtacaccagagttggagaaccactacgatgtacttgtgtacttagattataaatggggaatatttattagattaccaactgtattacagatattttgtaagcactaaacatttgtttctttactgagctaatattaaatgtatctatgtatcccatgaaagtcaacttttgtttaaaatgacagtgctagaggcaagaggcactgaccaatgcttaaattagggggtaaaaatcaaagagaagcaggatattcrcacggtcttagcgaatcccctctgacgcgtatcaatcattgtgttggttttaacaaatcataaagccttcgtgcccctctctcctggaggtggagcttaatctccctccctttgagtgcgggctgtagttagtggctatcatctcatgaatagagcatggaaagggcaaaactgtaactttacggtggaggattctggtggacaacaccttaaccaagtgatccaaaaccaggggggcatgctacagaatacctggtcactcctcttcaaagtcaaagtcatgaaggactaggaaagtccaagacactactacagattggagg

SEQ ID NO: 544766 - DNA, 628 bp, Homo sapiens
tttgtggcccaggtctttgcctttttcagaagctccacatatgacgccagcgtacaccagagttggagaaccactacgatgtacttgtgtacttagattataaatggggaatatttattagattaccaactgtattacagatattttgtaagcactaaacatttgtttctttactgagctaatattaaatgtatctatgtatcccatgaaagtcaacttttgtttaaaatgacagtgctagaggcaagaggcactgaccaatgcttaaattagggggtaaaaatcaaagagaagcaggatattcacacggtcttagcgaatcccctctgacgcgtatcaatcattgtgttggttttaacaaatcataaagccttsgtgcccctctctcctggaggtggagcttaatctccctccctttgagtgcgggctgtagttagtggctatcatctcatgaatagagcatggaaagggcaaaactgtaactttacggtggaggattctggtggacaacaccttaaccaagtgatccaaaaccaggggggcatgctacagaatacctggtcactcctcttcaaagtcaaagtcatgaaggactaggaaagtccaagacactactacagattggagg

SEQ ID NO: 544767 - DNA, 628 bp, Homo sapiens
tttgtggcccaggtctttgcctttttcagaagctccacatatgacgccagcgtacaccagagttggagaaccactacgatgtacttgtgtacttagattataaatggggaatatttattagattaccaactgtattacagatattttgtaagcactaaacatttgtttctttactgagctaatattaaatgtatctatgtatcccatgaaagtcaacttttgtttaaaatgacagtgctagaggcaagaggcactgaccaatgcttaaattagggggtaaaaatcaaagagaagcaggatattcacacggtcttagcgaatcccctctgacgcgtatcaatcattgtgttggttttaacaaatcataaagccttcgtgcccctctctcctggaggtggagcttaatctccctccctttgagtgcgggctgtagttagtggctatcatctcatgaatagagcatggaaagggcaaaactgtaactttacggtggaggattctggtggacaacaccttaaccaagtgatccraaaccaggggggcatgctacagaatacctggtcactcctcttcaaagtcaaagtcatgaaggactaggaaagtccaagacactactacagattggagg

SEQ ID NO: 544768 - DNA, 621 bp, Homo sapiens
ctgtcatatatgacccaaatgaactgttttcaggctcaatggttataattttttcatgatttcttctataatatgtttactgtaaatatgcttgttcattgatattactcttaaagagtgctacccagaactgaacacaatctgagtcttcatcagttactgggcaatatgtttgtacatatccaagttgaaagatgcacagacactcagagaatatgtaagtgaaatacccataaggcctgctagtgatggctgtaatagggtagtttatcttattttgtgaactaattctacatgttggttaaaacaatgcccctttgaaccatttctcagccatgtgcctggataatgtaataatgtgtctatactagaagtyctcatctgtatgccctatttttgttctcattgtcagtgggcagatgtcatttgctatattctcatataactgaaatatgttccataggatcctggaccaaaagtgcctagcagagtgctggcacatactaggtattccataaccattagctgctttctttttctttaatgtttctgcttagagcaataatatcatttactcctggatctcctgtggtctgctggagctgatgaaaggctggagca

SEQ ID NO: 544769 - DNA, 486 bp, Homo sapiens
tggatcttgtgatatttcactgactatacaggtctgattattttataaggaacaaagttgtagcgttttatctagacataaagctagttyttttttagtcacctagaggttctacccatgaacctccatgaaaaatttacattaagatgagtctaaatatattatccatagaaagaatctaaggttatatctgttgggataaaatgactaatgctgaaccttgagatgaattaaaacaagaacagattaactagggccaatcaaagagtctgtctatagcaaaacactgaatagttaggttgatattatatggaaagcttttgtttggttctctcatattttcaattggtcagtgtcagagaaagaattgccagttgtcctttctttaagacaaggtggactcatcctcaggaaaaaagggcaacatttaccctgaaaaaccaattgtaatattcaactttaacttcctatttaaattggaatata

SEQ ID NO: 544770 - DNA, 609 bp, Homo sapiens
tccaggtgagagggagatatgacttggattagaggaaactggaagaaatgaatggattaaagatacattttgaaggtaaaatgtgtctaacctgctgataaattagatgaaagacttgagagtgagtaaaatataaagggttattcctaagcacctgacttgaaaaactgcttgtccaaaagtctttttttctgagctgaggaagtcaggaggaaatttggaggggggaatgatcaagagttcagttttagaaatattaagtttgataaataaagaatgctaatggagatggtaccactgatataataaaactaaagaggtttttaaaatattcttagttagttgaactcgtaatcgaacaagtcaggatgtaatgataatgaaaayttaccttttataggcaattcaatttatagtaaatttcactgagaggcaaattttttaaagtagaatttcaatgcaataaatacaccattcatttaaattcacattcctgggacagaagagctggatgaatttgcagataaagtaaaatatttggagagagacgctgtggcagagattggctaactgttcaccaaatctattttcttttctttctgctgacac

SEQ ID NO: 544771 - DNA, 609 bp, Homo sapiens
tccaggtgagagggagatatgacttggattagaggaaactggaagaaatgaatggattaaagatacattttgaaggtaaaatgtgtctaacctgctgataaattagatgaaagacttgagagtgagtaaaatataaagggttattcctaagcacctgacttgaaaaactgcttgtccaaaagtctttttttctgagctgaggaagtcaggaggaaatttggaggggggaatgatcaagagttcagttttagaaatattaagtttgataaataaagaatgctaatggagatggtaccactgatataataaaactaaagaggtttttaaaatattcttagttagttgaactcgtaatcgaacaagtcaggatgtaatgataatgaaaacttaccttttataggcaattcaatttatagtaaatttcactgagaggcaaattttttaaagtagaatttcaatgcaataaatacaccattcatttaaattcacattcctgggacagaagagctggatgaatttgcagataaagtaaaatattyggagagagacgctgtggcagagattggctaactgttcaccaaatctattttcttttctttctgctgacac

SEQ ID NO: 544772 - DNA, 489 bp, Homo sapiens
aatttaggttttcaaatcctagtaatgagttttttctgttgtgccaaaaagtagcacacctcaggagagggaaaatgtgtgtactgtgggtatattggggttatcagtgcttctgaaggaagacaggcatcactacttcccagagatgcccctggaaatgatatagaagatgctgaagaattcaacatgatgacggaaggaggcatttgtagtaatgctaagaacagaaaaatggactaagtggaaaatttgtaagcatgtctttgaatgtagatttgttatatgaacaaactatatacctagtttatttttggtttaacataataattcttttgagaaaacatgaaataactactcaatataaaaygcattttaaaactgctataaatcagtcaaaactttattccttttatcataatggtcactatttgagtcactagtgctatttctgagccatctcctattggcatctacattgtggttaggcag

SEQ ID NO: 544773 - DNA, 644 bp, Homo sapiens
tgttatatggtttcacatgacaaaataaaggacttcctatatcaaaaaaaaaaaagaaagttattctgtgctaatagtttagattttctagttatctaaagttagtatttattttttcaattttcctagaaaatcatccatttcttctaggttctcaaattaatttgcacaggattgaacaaaatattttcttaggattctcttcttttctatttttatcatttccccattatttcttggtttatgccctttcctgtctactttttgattttataaacttaatatcatatttttaaaaaatcagctcttttatttagctgatcaatttttgtctaatttataacttttattcccttcttctgcttttttatgtttattgataatttttctaactttgagttagatatttaatggagttattttctttcttcattaagataagtgcctctgaactctattttagytccatctcacaagttctgatatgtattgttttcattatgcttttgttttagattttctataacttgtttggtttcttctgatctaagaattattttagtaggaaatttaaaatgtccaggtgatgatattctttttcctaagttctacttttattgcaatgagatcacagaatgctgtat

SEQ ID NO: 544774 - DNA, 248 bp, Homo sapiens
cctgggcgacagagcgagactccgtctcaaaaaaaaaaaaaaaraaatcatttttggaagagataaaaggcttgacagcaatatataaatatttcatttaaaataacttgttaaataatacttaaatgttaaatttcttaaaattcttgtttttctgagattttggaaaaacaaaaccaaataatatattgttaagggaggcagaatctcccttcctatttctttaagctcattttcataattaatct

SEQ ID NO: 544775 - DNA, 576 bp, Homo sapiens
tataggccatggaattggattataattttgcaaagtgttatcattgggggaaaaacatacacacacacacacacacacacacayatatataaatagtatatgtaacaatgctatctacctaaataattaagaagccatttctcaaattgttttaatgatatctctagctaggactgatatagtttggactgatatatttgtctccacctaaatctcgtgctgaaatgtaatccgcagtgttggaggtggggcctgctgggagggatttggatcatggcagtgaatccctcatgacttgcttgagctatctccttgatgataagtgagctgttgctctgagttcacataggatctggttgtgtaaaaatgtgtacctgcccttcccctaatgcttttgttcttgccatgtgagatgcctgctccccctttgccatgagtaaaagcttcctaatgcctcaccagaagctgagaggattctgatgccatgcttcctgtatagactgctgaactatgaaataattaaacctttttctttataaattacgcagtttaagatatttcagatatttctttaca

SEQ ID NO: 544776 - DNA, 443 bp, Homo sapiens
atatccagtcctacagaacttgtgacttatcacagtgatacatgttcatcctaggtctgtctttaccctaagacatttatttctcccccgtctcctgggctaaatcactgttgtcccttcatgaccaaatatttttcgactccagaaagggttctctgactaaacaaaagtatgccagtttgctctttttctgggttcacatagcattctgtgcacaattctattayggaacttaggacttcctgttaacattataagttgccgcatttatctgcacccacttgtcaataaatgccttgagattaggaacaaagtatttctcatgtttttaaccccagattttagaatgacacttgatttaaacatattgttaatgaataaattaataatatatgaaattatttctgctgtctccaagtttatttggtaaaaatgaaacttct

SEQ ID NO: 544777 - DNA, 553 bp, Homo sapiens
cttcttctcttctctccttctttgccttgccactcttctattcctctgctcttctgctcatggagcctggggtttggagtttatatgggtacaggatggggggcgtggcaggccaaaaggcaacgtttgggtgcagaaacaggaatgcctgttcccatttagggccgtaggtttccaggcttgaggctttgctggggaactgccctcttctacccagtatctcccttgccttctgttcgtatcagcaacatcagtaggatatggaattatgttcccagacgacttctgaaaatacatgatmtccatcagggcataagacttcacaagaagtacataatagaaatcatccctagcattgagaagaaagaaatgaagtcagctccatccactgcaggccctgaagccatgggacaacaaggaggtaaatgcaacagctcatgttccttcagagtagcaggttttagcggggaagagcatagccagtgatcaaagaaactcattagaaaagatgacaagaaaccttcctgtttaatactgctgtaccttttccact

SEQ ID NO: 544778 - DNA, 566 bp, Homo sapiens
ctggcaaaatctgcccctcttggatccaaagctggctttgcagggagaattaaatatctgattgttggtaataagagacctgactgaattggatcttatggtccataataacttaaagacaacagtcaaggtaaagacttaaatgggtaataatgtgcttagtgacagttgttggagctaagatggcctttgttttccagtacaacttctccactcactgtctcctcaatatgttttcaatctccctacactggtatcattgctcatgtagttccttccataagaggtatgtcccctgatccataaatccataagaatcagctgcagcttcatttcttttttttatggagttttgctcctgtcacccaggctggagtgcagtggcrcgatctcggctcactgcaatctctgcctcccaggttcaagtgattctcctgcctcagcctcctgagtagctgggattacaggtgcctaccaccaggcctggctaatttttgtgtatttttagtagagacagggtttcaccatgttggccaggctggtcttgaactcttgacctcaggtga

SEQ ID NO: 544779 - DNA, 547 bp, Homo sapiens
tcggtgggaggtgattgaattatgggggtgggtctttcctgtgctgctctcgtgatagtgaatgagtctcatgagatctgatggttttaaaaacgagagtttctctgcacaagctctctttgcctgccaccatccatgtaagacgtgacttgctcctccttgccttctgccatgattgtgaggcctccccagccatgtggaactgtaagtccattaaacctctttttctccccagtctcagttatgtctttatcggcagcatgaaaatgaactaatgaaaatgaattaatacaaggaccagaaccatgctggcatcctaatctcacactttcagtctccagaactgtgagaaataaatatttattatttaaggcactcagtctatgacaattttttttatagaagccagaactcattgagatatttggtaagacaggtaagaatctgtgcacatgtacagtggaggcgtcaagataaatgccttcctgccccatccccatygtgaggcagagactactctccagattgccatagccaagaacacaag

SEQ ID NO: 544780 - DNA, 431 bp, Homo sapiens
ctgtttctcccagcatcatacctcaagaggatccttcscagcagttcctgcagcagagccttgaaagagtgtatagtcttcagcacttggaccctcagggagcccaggagctgctggaattcaccatcaggtagggtaatcatcccttcatctgacagagttagtgctgttacactcagcttgactgttctgaattctggtgttggttactaggcttgatattctgactttattggtctacattcacacacggttttatggtctgtttatatttggattagattgtggtttgaacatattttttaaaagagctctttatattcatgactcgattgatgattagtacacaacagaaatagttacaaagaacctgtttttagttttttaattttatatattaggatgagtgaccaaaatgcaaagtaacagtg

SEQ ID NO: 544781 - DNA, 431 bp, Homo sapiens
ctgtttctcccagcatcatacctcaagaggatccttcccagcagttcctgcagcagagccttgaaagagtgtatagtcttcagcacttggaccctcagggagcccaggagctgctggaattcaccatcaggtagggtaatcatcccttcatctgacagagttagtgcygttacactcagcttgactgttctgaattctggtgttggttactaggcttgatattctgactttattggtctacattcacacacggttttatggtctgtttatatttggattagattgtggtttgaacatattttttaaaagagctctttatattcatgactcgattgatgattagtacacaacagaaatagttacaaagaacctgtttttagttttttaattttatatattaggatgagtgaccaaaatgcaaagtaacagtg

SEQ ID NO: 544782 - DNA, 431 bp, Homo sapiens
ctgtttctcccagcatcatacctcaagaggatccttcccagcagttcctgcagcagagccttgaaagagtgtatagtcttcagcacttggaccctcagggagcccaggagctgctggaattcaccatcaggtagggtaatcatcccttcatctgacagagttagtgctgttacactcagcttgactgttctgaattctggtgttggttactaggcttgatattctgactytattggtctacattcacacacggttttatggtctgtttatatttggattagattgtggtttgaacatattttttaaaagagctctttatattcatgactcgattgatgattagtacacaacagaaatagttacaaagaacctgtttttagttttttaattttatatattaggatgagtgaccaaaatgcaaagtaacagtg

SEQ ID NO: 544783 - DNA, 165 bp, Homo sapiens
caaattggctagcttttgtgccttttgcacttgctttagtgccaacaggataaaactgtcaaggacaaaatctaaatgtttatttaggtggggatgagtcaggaagtagactktattttactgggctcagggccaacaacctcattcagtggcctccaaaactaa

SEQ ID NO: 544784 - DNA, 344 bp, Homo sapiens
tgtgtgagtccattcattacggtaacaagctttcmctcaagctttgtttcttgcagtatctatcatttctagtgtgatctcctccactgatttttaaaaatccagtcaacagtaggattttcttgttgaactgtgaaggcctgtgctaggtagggactttgtgaatcatccctgcttgggtcccagagctactggggggcccatcactggagtggctggtgagaccctccagggcatgagagttgctatgggcctctgtgtggcttctagaggcttcccaggggcacaaagactaagtgacccaggtggaagctcaggaggctcacgctggacacatgctgcac

SEQ ID NO: 544785 - DNA, 526 bp, Homo sapiens
ttactgattacagtgatggtattcaggtgaacactctgccatttggaatatcatttaggcttagcctgtgcagctaatgcagcttcttcacaccacacagccatctttgacatatttcaacttgttaacgattcatgttctgcagcccttttggctgatgctatcactgcaaagcagtgatatgtgtgagtccattcattacggtaacaagctttcactcaagctttgtttcttgcagtatctatcatttctagtgtgatctcctccactgatttttaaaaatccagtcaacagyaggattttcttgttgaactgtgaaggcctgtgctaggtagggactttgtgaatcatccctgcttgggtcccagagctactggggggcccatcactggagtggctggtgagaccctccagggcatgagagttgctatgggcctctgtgtggcttctagaggcttcccaggggcacaaagactaagtgacccaggtggaagctcaggaggctcacgctggacacatgctgcac

SEQ ID NO: 544786 - DNA, 617 bp, Homo sapiens
cttggttgggacttaaagactttccatggccgggcgtggtggctcacgcctgtaattccagcactttgggaggccgagacaggcagatcatgaggtcaggagatcgagactatcctggccaacatggtgaaaccccgtgtctactaaaatagcaaaaaaaaattagccaggtgtggtggtgcgcacctgtagtcctagctactcgggaggctgagtcaggagaatcgcttgaacccaggaagcagaggttgtagtgagccgagtttgggccactgcactctaacttggggacagtgcgagactccgtctcaaaaaaagaaaaaaaaaaagactctccatggataacctttctattccatatattttatttctatttcatataattatgctttatgtcttatttttgaggtatattaggactcctgagaagcctaaaagtacattgttccatgattatccataagttgtgtgttaaacacaggcattctacagatgatttcctaaaggaccaaaagcactttycctggtcctggttctttttctctggagggtcaaggactagggagtaaaccagaaagtataatggcaagcagtagggaagttagtggtggtagcag

SEQ ID NO: 544787 - DNA, 665 bp, Homo sapiens
taaaagtgctttggttttctgttgtcaacagtgaatgttttggaaggagggatgggatggggagagccgaattcagaatcaccataaaatgggagtcatccaasgggtaaaaataagaagtaccaaggaaggagcttcttgggtgctgtgagaagacataggaaaggcattgcagagaaagtcccgagaggctccctcagggaggtgttgcctaagctgagtcttacagggggatgagaagttggccaagtgaagcctattcaaagcagagggcctttcagacagctctatagacagaggggagtttgagtcaaagcttttcttcatggcgagtacaggctaagaagaagagatgtgagcacaggttaaaattctagacttcattcttagggcattaggttgctgaaaggtttaaagcccagaagctgcatgatacactaggaaagtcatcctggctatgtggtggtaaacggattgttgggaaaacaataggaaaaacaaaactgccatagttcatgcaggaggctgtggctttcgagacagggaagagtagacaggttgcagtgacattgcaggggtggactccacggcacatggtgattggcttggtgaggcagttcaggagagcaggagtcaaggaggacctccagctttctgctttggca

SEQ ID NO: 544788 - DNA, 665 bp, Homo sapiens
taaaagtgctttggttttctgttgtcaacagtgaatgttttggaaggagggatgggatggggagagccgaattcagaatcaccataaaatgggagtcatccaaggggtaaaaataagaagtaccaaggaaggagcttcttgggtgctgtgagaagacataggaaaggcattgcagagaaagtcccgagaggctccctcagggaggtgttgcctaagctgagtcttacagggggatgagaagttggccaagtgaagcctattcaaagcagagggcctttcagacagctctatagacagaggggagtttgagtcaaagcttttcttcatggcgagtacaggctaagaagaagagatgtgagcacaggttaaaattctagacttcattcttagggcattaggttgctgaaaggtttaaagcccagaagctgcatgatacactaggaaagtcatcctggctatgtggtggtaaacggattrttgggaaaacaataggaaaaacaaaactgccatagttcatgcaggaggctgtggctttcgagacagggaagagtagacaggttgcagtgacattgcaggggtggactccacggcacatggtgattggcttggtgaggcagttcaggagagcaggagtcaaggaggacctccagctttctgctttggca

SEQ ID NO: 544789 - DNA, 578 bp, Homo sapiens
gggaggttgtcctgggggtgcggggattgtgttttctgggtattttcttatttgctctattggagtgtatttaatttaatatatatattttaaacatcttttagtttgccttaatgtaattttttttgagatttaattttttttttttggaratggagtcttgctctgtcgcccaggctggagtgcagcggtgtgatctcagctcactgcaagctccacctcccaggttcacgcctttctccggcctcagcctcctgagtagctggaactacaggcacccgccaccacgcccggctaattttttgcatttttagtagagacggggtttcaccgtgttagccaggatggtctccatctcctgatcctcccgctcggcttcccaaggtgctgggattacatggcgtgagccaccacacccggcctgcttttttttttttttttgagtcttgctctgttgctgaggctggagtgcagtgattcagtcaccgcttactgcagcctctacctcctgggctgaagcaatcctctcacctcagcccgcaagtagttgggacctcaggtgtgcaccaccacgccca

SEQ ID NO: 544790 - DNA, 562 bp, Homo sapiens
atgacagggctacaaacgacagaaagggccaagctatctttacacgttcaatgtgaaagtgaccaatgggaacattatacaaaagtaagttatagacctggaatgaaacttggctatttttaataggctttatgtgtgttctatgctttctgaaacaagttcattcctatctaaaaatgccttcaggtaaccttggttttgtttactttttattcataatgccaaacaatttacatgctaaaaccaacacaaaatagtcaactcttgatttagtagtattctgcctaccttccctgtgttgacttctgtttctgctttcctgactttattgcctcaaacataaataaaacccctgaaactatcccttgctaccaatagcaagaacctctatttcactaaaaatataagttgctgtcccaaacctgttaaaacttactgtcacagttggctgctatgggcatgaaatgacagtaaggaaaakggggaagaaaatggttaagggtgcagacaggcaggagatgagacagttgttttcaataatcctacagaagtatgtaaaagt

SEQ ID NO: 544791 - DNA, 607 bp, Homo sapiens
caggacagatgtgagtgaaccagcaacttcaggaggtgcagctgatggtgtgacctccatttgctcccacggctgtggcctccagtaygactgcggcctccattacgactgcggcctccagtatgactgtggcctccagtgctcccacgactgcagcctccagtacaactgtggcctccattgctcccacgactacagcctccagtatgactgcggcctccagcactcccatgacacttgcactccccgcgcccacgtccacttccacagggcggaccccgtccactaccgccactgggcatccatctctcagcacagccctcgcacaagtgccaaagagcagcgcgttgccaagaacagcaaccctggccacattggccacacgtgctcagactgtagcgaccacagcaaacacaagcagccccatgagcactcgtccaagtccttccaagcacatgcccagtgacaccgcggcaagccctgtaccccctatgcgtccccaagcacaaggtcccattagccaggtgtcagtggaccagcctgtggttaacacaacaaataaatccacacccatgccctcaaacacaaccccagagcccgcccccac

SEQ ID NO: 544792 - DNA, 570 bp, Homo sapiens
cctgcagcagtctcacgagtagaacccagcactgctgcccaacaaattctcaactacaccagacgcaggtcaatttcctttccacaaacacatagaaaagtacaaatgataaattacttcgaagtattcacaaaaatacatgcctggacatacctttaatgatactcaacacaaacacaaaacatgaatttttacttgatctcaggtctctttcatgttacaggagtatctgtgtgagttcactggagggtaagatgtgcatgtgagcagtatgcttaggggaatggcaaaaaaaaaaaatctgatcaatgctaaagacaactttacaattgttttctaacatgaattttttttctggttcccttactatttaaatccgattatagtatttaacttttaacgtgcctttkgatttttctcataggtttcactaaacagtcttctatctattctacatcagttataagctaaggatttttcagttattaaattttaccaaattttaacattaaaacctctcattaatgatcatatatcttacacttaggagaaaaggcatagaattgaaca

SEQ ID NO: 544793 - DNA, 554 bp, Homo sapiens
ctgtcagtcctctctgtgtttgcttctagagagggctggttagggctgagttttatttgggggaggggagatgaaaaggtgtgtgatgggatcccaaaggaacaacatcctcagtgacagggaaattttcttggtgcctgtcccactgccccaggtgggtgctgagcacacaacccccagggcacccgtgagctggaacgctacacatcttgtggggtgggtggtggagaagccttgtcaacaaagcaagattgagcccccagaatttggggagtgattacagagccccttgcacctccytttatccttgtagcaaccctggaaagttagtattatctttccctcttcctccctccctcccttcagcaaaagcatagaagcctcaacactctgtccccaggggtggttccagatgctgaagacacagcaatgaatgagacagacaaagctccctgcccttgagaagctgatagtctaaaaggagagtcagccctaggatgaatactgaaagatacagaatgctagagctgtcgtatgtgctaaggagaaagaac

SEQ ID NO: 544794 - DNA, 582 bp, Homo sapiens
gcagtacacagcagtacacattgcaaaaagggtcagtggtatctgtgatttcctccatggctcagagtatagttatcacttgagcttgcattgaagttttgttcagcagttggacacaaactgagccagtctttaggccccagtggtagcagcagtgggacaaatgtgcctgattttaggcctcagagcagtttacattgctctgatgttagtgagtcctggaaggttgatgcttgaacctccaggcaacctgcctcaaatacaggagtgggagttggggggcaggtgttcgggcagtttttcagtatctggacagctagtatgatgtgggtgatggcagtagtggtggcggagcagcccactgggactcaagygtttcatgttcatgttcctgggaggtgaaatggattgggcaggctagtccccgtcccacagctacctgtagaagagcagtgggtattgtcctaagtgttcttagctcccctgtgcctcccctatatggatggtacctgtagtcacactacttagtacttggctcaagagtaagcacataccagaattaaactctcaaaacactaacag

SEQ ID NO: 544795 - DNA, 609 bp, Homo sapiens
ttttttttcaagtagaagtttaataactttccagtttccaaaagtgaatgttccaaaaggtatttgggcagcacgcattgctgcctctagtttgtgggtctccagcaagatgcatgtattgcaggctctgttatatcactgtttctaccaaactgttacttcgtattttcagctttaaataaaattatttttttctgctcaatttattagattcttacaattttatacacacccatatagcagtgtgcatgcagtagacactcatgcatatattttaggaacactgtcttctatgaccaggaaaatcatcaagattccaatggaaacatgaactgctctacaaatctaccacgtccttaaagtagcactttcaggaaaaggtgaagagaaactttggaggtaggggttagactgttaccmaaggtgcttcagctactgatagaaaataactttctaaaaagtgatagtcccatctaaatgaaagataagtgaataaaaacaagtatgttttttgtgaataggcaaacaaaaagaccatggtgtgggaagcaaaggggaaaatacaacttgagatgacgaaatgatttttttttttttaagtaagataaa

SEQ ID NO: 544796 - DNA, 611 bp, Homo sapiens
ctgtgctccctggggcattctgtcctgaaaggagaactgagctatacaactgcatggccataaaaataatgtaactacccagagaattgtacacgaatgttcatggaagttttattcataacmcaaagcagcaagcaattcaagtgtttatcagcaggtgaatagttaaacacattagggcatatctttacaatgaaatattactccaaaataaattgggacaaactactgtgcaagaatatggatgaatatcaacacttacactgcgtgaatatagccagagaaataagaaattgcattatataattccatttacctgaagttctagaatatacaaaactgatctatagcagtagatgtttgatcagtgattgcttatggcaggaattgcaggggaattcattacaatgggtcagaagagaacctttgggagtggtgaaatgttcaaaatcatgattgataccatgattatatggatgtatacattaggtaaatttatcaagctctaaaaatgattatgtcttattgtatgtaaattacatccctataaagtatatttttttaaagtggctacttcaacagttctatactaggaacacaacttatttttc

SEQ ID NO: 544797 - DNA, 630 bp, Homo sapiens
taatctttgtctgtcttatgaagggtaaccaatatgttactttgtttttattttcattcccttaaatactagtgaaatttaataaattagctcagatttaatctcttttctttctgaaattcctaatcatgttcttaacccctgtattattttcttttgctgctataaccaattaccacggacttagtgatttaaacattaaaatttgtttyataattcagtatgtcaaaagacccacacaggtctcaatggggtgataccaagatgttagtaaggcttccttcctttctgaaagcttcaagggagaatacattttaccattttaagcttctattggttgacagcattccttaacttgtgtctttctccctcttcaaaaccagcagcagtgggtcaagtcctaatgtcatatctctctgaagacccactcttctgccttcctcgttcagttttaagggctcatatggttatattggacccacctagataatctgggattatctaggttcatacccttaattgcatctgcaaagtcctttttggcatgtaaagatattgtgcgatgagcatagccacagattctggggttatggcatggacatctttggggggcccactattctgcctatc

SEQ ID NO: 544798 - DNA, 537 bp, Homo sapiens
ctgcattattgcctataaaaaatgggaatgaaacaaactcatatctagggtaaatgagaaagtgaagcccttatactgctgcctccaaaaatgatttttactcatcggtaatgagaaaaacgtctaaatggctgtaagggacatttgaaatttatgtggtttgacacttaaaatttttagaaacatctaaaccagcataaaaataaccaaactgtgaggttaaaatatactacactccagcctataactccatgtcaggagttatttatttttgagcaacatctcaaatacagtgctaaactctatagtcattctttttttcaaaagagaaacaaaacagtaaaawtatcaaggaaagaaacaattggcaccctcaaagttgaaaatttactcaggaatacatcagaatctgctgttgggtatttgaatgtgttagtccctaaccacaaacatgtttgcatatggcaacaggatttatctcaagtgttacttttaattatggttatatgtttataattttgtgataataacagtatc

SEQ ID NO: 544799 - DNA, 630 bp, Homo sapiens
taatctttgtctgtcttatgaagggtaaccaatatgttactttgtttttattttcattcccttaaatactagtgaaatttaataaattagctcagatttaatctcttttctttctgaaattcctaatcatgttcttaacccctgtattattttcttttgctgctataaccaattaccacggacttagtgatttaaacattaaaatttgttttataattcagtatgtcaaaagacccacacaggtctcaatgggstgataccaagatgttagtaaggcttccttcctttctgaaagcttcaagggagaatacattttaccattttaagcttctattggttgacagcattccttaacttgtgtctttctccctcttcaaaaccagcagcagtgggtcaagtcctaatgtcatatctctctgaagacccactcttctgccttcctcgttcagttttaagggctcatatggttatattggacccacctagataatctgggattatctaggttcatacccttaattgcatctgcaaagtcctttttggcatgtaaagatattgtgcgatgagcatagccacagattctggggttatggcatggacatctttggggggcccactattctgcctatc

SEQ ID NO: 544800 - DNA, 630 bp, Homo sapiens
gaacctatatcaatgtctgtacttatattcttagaatttatactaaaataatgcttcttacactgagcaagcatatgtcttccataatgtaatctgtaagagaarattgaaactgcttttttgagtacgctagttacttgagagtgatcttgagcccttgggtgggaatagccaagacagggaattgatggaatcatgcagttctaaacatctcaattggtgatggaaaccagatgcgcatttcctactggatcagtggccacatcttttattcaagcagcacattaataagatgaaggatgggagagaaagtcagtactcgctgattacatgtccctgaaaaacataacatccacaagaatggttcagtaagctggcctggaaatgccctgctcagagtagttttaaaaataatttataatatatgcatcttcctctgtatttgtacacagtttcatttaaagtccatccattcatgttgaattatactttgaagccaggtgatttactcctgaagccagttgccatgtaaagaataactaattttaaaaaataaactcagtaaagtccctaactgcacatgtgtatagtttgtaaattctacatgtaaaattctagatactaatacca

SEQ ID NO: 544801 - DNA, 574 bp, Homo sapiens
gagaataataagaaagactattccagacaacaggagttcaggggagacattccatttaccaatatcaaagtaattagtggagggctgggattgaatgagaggcaattatagattacagatttgcatcaggaaaacaagaagtccctcttaagtttaaaaacaagaaaatatatgttaggaacaaatcctttagtgaagagatagtgaatagaatcgccagaggaagagggaatggctgttgtgtgtacaggtgtgggcgtgctagcttctgagatcagcttcacgtsgtacatcatggaatgtgaaaatatgaaccctgacaagctattacaaaagtgaactgagtaattcaattgagaagcaataaaggtatggataagaagtgaagcagagatgcaactgcgacacagtggtatatatggacagatttgcagaaggggttttaatgggtttttaatgtgtttgtcaaagctgtgaaaatcttggcatgttgccccaaatcatcaaggatccatgcaagtaggtcggagggaaggcttaagacagatagttagatgaacagcatggggcatgc

SEQ ID NO: 544802 - DNA, 646 bp, Homo sapiens
ctaccaggccctgtttccagacgtctcttcagaggtcaagccttggtagccagtggcctggacatctgcccccgggtgtctcggaggccctcagggaaaccttgttctgcttctcagagatggcgccacggttcgcttggcctgtggaaacgtgtgtgtcatgggacctggtgtgtgggtcagaggaaggactgggaggaggaggaaggtgtccacatgcgattttttttttkgagacagagtctcgctctatcgcccgggctggagtgcaggggctagatctcagctcactgcaatctctgcctcccaggttcaagcgattctcgtgccttagcctcccaagtagctgggattacaggtgcctgccactacacccagctaattttggtatatttagtagagacagggtttcaccatgttggtcaggctgctcttgaactcctgacctcaaataatccacccacctcggcctcccaaagtcctgggattacagccgtgagccatcgagcccgaccttcacacgcaattctttagcctcaatgtggccttgtcttatcttcaggtttctgactattggagctcatatggcagcaagctctgagggctacttttgtgttgggccaaaaaaagccaacctcactgtgaa

SEQ ID NO: 544803 - DNA, 646 bp, Homo sapiens
ctaccaggccctgtttccagacgtctcttcagaggtcaagccttggtagccagtggcctggacatctgcccccgggtgtctcggaggccctcagggaaaccttgttctgcttctcagagatggcgccacggttcgcttggcctgtggaaacgtgtgtgtcatgggacctggtgtgtgggtcagaggaaggactgggaggaggaggaaggtgtccacatgcgattttttttttggagacagagtctcgctctatcgcccgggctggagtgcagkggctagatctcagctcactgcaatctctgcctcccaggttcaagcgattctcgtgccttagcctcccaagtagctgggattacaggtgcctgccactacacccagctaattttggtatatttagtagagacagggtttcaccatgttggtcaggctgctcttgaactcctgacctcaaataatccacccacctcggcctcccaaagtcctgggattacagccgtgagccatcgagcccgaccttcacacgcaattctttagcctcaatgtggccttgtcttatcttcaggtttctgactattggagctcatatggcagcaagctctgagggctacttttgtgttgggccaaaaaaagccaacctcactgtgaa

SEQ ID NO: 544804 - DNA, 626 bp, Homo sapiens
ctgtccttgggcatggcccaacctgcacaaccaaatctggtgccctgggtcagcagcatatgttctcaagacagcatatgccacgggcgccttctcccagcctgtgcaccccgaaagcactaacctctcagaaagtacaatgacctgctgggctgaccttggtttctgtgctgcttattgcctgaaaggtcttgggcaattgtttaaccaccgtagacctcagtttccccacctatcaagtggggataacgatataaatgtcagggattattacaacagaaaattttgctaggtgggcgtctggaataacaattcttgatattttcagagtgcttggatagtgcacaaataagtccacttctgtaataactgtgatagcagtttactaaaatgctcatgcgtctgttgccttatgtcattcaaccctcacagcagtcctgggggaaccccattttccctgcatcatcctctcatgctgttttgcacactgccagcccgggctgtctgtttctgcttcacccacttttctttgtcaaggccctgcctgtccttgaaggctccgctcagctcccacctcctccctsgtcttcctgcctgtgtctctccagattagtttcgtttgcatc

SEQ ID NO: 544805 - DNA, 589 bp, Homo sapiens
aggcttggctccatggagcagggttgaacaagttcaccagaagggaacacacagcgggaaagacttaggctagacccaaaggaagaacttccctgtaattgagagctgggcccagagatggggttgggtgtggcctctttggaagcaggccatccacgtcctgaccttcctaggcctttcttgtttgcagtgtctacgaaacagctttggtgagcactgaagatgcaaaaaccaccagaggccaaccccgcccagccctgagcttcaactcctgacctgaacctggtttacgaggatgctctgagctagtggagcttctgcctcctgggatcctccccacaccccagggtggctgctaccaccataccctgcagatatgaagactggcagaggtcagggcaagactgaaggctgcctgcccagcactgcacctccttcaccctcagccctccacagccattcctccagaaagcaccaccccctccaggcaccctccctgcccctggcagaggactaggcgggtgtctrcagatgaccacttcaccctccctcctccctctggcctctcctctctcctcttctggctcct

SEQ ID NO: 544806 - DNA, 540 bp, Homo sapiens
tggtctcccagcccacagcaggcctcagggagtggttgctgaataaatgagcgaaggaaggaataggcaaatgaatgaatgaaagtgagcaaaagcagagtgagctcccaggtgcaaggcaaggaccttagagagcctgcaccatgcaaatgagtctgacgtgagtctccttgttgctgaagcagctccgctgtccacagccctggggaaagtcrggcgatcagaggagactagcaggtgccattggcctccacccactacagatgctcatctcttgagcctcctgagatgttcatctcccagccccctgcctcccccagccctgaatgctgcaggattagacataggcccctggggagctgatccctcctaaggacaaggcttgcggatctcagggactggagggggaaggtccccaggctggagagccaagtttaatcctggcatggccattgactggctgggtgaacttgaatgagtccctgcccctctctgtgcacaggtgctctccagctccaatattctgagattcaccacatg

SEQ ID NO: 544807 - DNA, 515 bp, Homo sapiens
gccctcatggatgggtgcaggtgagctgtgggtcctatagccatgggcaaaagggacctgtccctagagggaaagcggaaaacgagaatgaatcccacctactactcactgcaagtctgctgtacgccaagcatttcaacatgaacaatttctactccttgcagcaatcccactgggcacggtggcaggtgaggagggccttagattcagctaaaggaggctaaaagccagggtccaacccaggcccatccaacttcmaaactccctactcttgtgacaagagccaagaagtggaacaacccaagggtccatcgacaggtgaacggacagacagaatgtggtctagccacacaatggagcagcactccgcctgaacaaagaaggggatccagccacatgctgcagcatggatgaaccatgaggacactatgctaagtgaaataagccaaatattgtacacttccacttatatatggtatctaaaatagtcaaactcagaaacagaaagtggaatg

SEQ ID NO: 544808 - DNA, 594 bp, Homo sapiens
attaataacctccccagtcttggcaagtacaacatgccccttagcacttgacagccagatgtgatggccccactaactgagcaggtaacacacagcctgccataacctattttaaagtggcacttggaaccatggatgcatcaagaggtcacaagtgactctgcaaccctcctctgcttcactctaggttccaggctctctccacgtcatgaaaggagatcacaggtgtgaaattatttcatcaaagagctttgtttagacatagagattattgcgaggatttgaakccccagacagaggtctggggtagagggaatcccaagcccctcagtcaccttgtcttttgggatcccctaacccttccacccccagggattgagcttcagacttccacagacctctcaccacgctcctccaccttccaggggctttccaaggtggtttccccttgactccagggagttgggcatctctagggttaactaggcctagccaaggccacagggcccagaccaaggccatatcccctccccgtccccacacagaataagagcccacagagtccatgccaagggctctttcacaacacccctc

SEQ ID NO: 544809 - DNA, 594 bp, Homo sapiens
attaataacctccccagtcttggcaagtacaacatgccccttagcacttgacagccagatgtgatggccccactaactgagcaggtaacacacagcctgccataacctattttaaagtggcacttggaaccatggatgcatcaagaggtcacaagtgactctgcaaccctcctctgcttcactctaggttccaggctctctccacgtcatgaaaggagatcacaggtgtgaaattatttcatcaaagagctttgtttagacatagagattattgcgaggatttgaagccccagacagaggtctggggtagagggaatcccaagcccctcagtcaccttgtcttttgggatcccctaacccttccacccccagggattgagcttcagacttccacagacctctcaccacgctcctccaccttccaggggctttccaaggtggtttccccttgactccagggagttgggcatmtctagggttaactaggcctagccaaggccacagggcccagaccaaggccatatcccctccccgtccccacacagaataagagcccacagagtccatgccaagggctctttcacaacacccctc

SEQ ID NO: 544810 - DNA, 401 bp, Homo sapiens
gtgctgccccgacctgggctttccctgggggtggcctggggatggggtggggcccctgcactcagtgagggggattctggctcagagtggcccacagagtccacggagggtcacagcttcagtcggcctcacactgtattcctcctccaygtctctctctctgcatgtatgcacctgtgtctgtgtgagttagaggcggggttcatcttcccagcaagaataagggcttccccctagagcacctggatcctgacaggtcgggggtagaggggtccagcattgcaccccaacctgcccagggctcaccaggcagcactcacggccccttatctgcagcctcccaggtgaccattctctgtaccttcttcaccgtggtgtttgccctctacctggcccctctc

SEQ ID NO: 544811 - DNA, 415 bp, Homo sapiens
gtgctgccccgacctgggctttccctgggggtggcctggggatggggtggggcccctgcactcagtgagggggattctggctcagagtggcccacagagtccacggagggtcacagcttcagtcggcctcacactgtattcctcctccatgtctctctctctgcatgtatgcacctgtgtctgtgtgagttagaggcggggttcatcttcccagcaagaataagggcttccccctagagcacctggatcctgacaggtcgggggtagaggggtccagcattgcaccccaayctgcccagggctcaccaggcagcactcacggccccttatctgcagcctcccaggtgaccattctctgtaccttcttcaccgtggtgtttgccctctacctggcccctctcaccatctcctctcc

SEQ ID NO: 544812 - DNA, 573 bp, Homo sapiens
gtgggaggcccaacagtttccatctctttgcctggttcccccatcttgtaccatgggactagtragagcacctgctgtggggctatgaggagcaggagttagcatgtgtgcagtgcccaaatatgcacatggtgcacagaaagtaagaggcagacactgctgttaccttgggcagggccatctctctggagcagggtctcctgctccatgaaagccttgaacccaggcttcttagcagaggtagtacacacccccaccctgccaagtgggggtgtgtgtgagcacttcctgagggcttggcttcctggtgttccaggctgttgtgggacctcagggtagtaagggggtctcacataactgctttggaaggaggtgctgggtctgccgggctgccactcactctggaagtctggccccctgcatgtggtgggtattattttctcgataagactccagcccctgagccagactccagtgctgaccccagtccctcccagaggcagccagtggggatctggatctggtgtccagtttggccacatgctgcctgtgcatcttggaggggtcaccagt

SEQ ID NO: 544813 - DNA, 634 bp, Homo sapiens
atccaaatgtggtccacagcacgcatctggttggcgtgtctcctgagtgccttttgatttgtaacaatcccccggctgggctcagtggctcatgcttgtaatcccagcactttgggaggccaaggcaggcagatcacctgaggtcaggagttcgagaccagcctgatcaacatggagaaaccccatctctactaaaaatacaacattagctggatgtggtggtacatgcctgtaatcccagctacttgggaggctgagacaggagaattgcttgaatccgggaggcggaggttgcagygagccgagattgcgccattgcactccagcctgggcaacaagagtgaaattccgtctcaaaaaaaaaaagttccccgtcccttttttcccttaagctgtttatttgtcctgagaaatggagtcatttgtcctgtgggatttttcacattctgcatctgactgatcatgccctggtggtagtttttgaggggctggcaagggtcccctctgtgtgtccctgtgcattgccttggggggctctgactctgggtccacatgtctgtgtgtggtgagcccaagtgcacatctctgtcttggagactgtctgtgtgtccctggatgtgttgttcctatgcag

SEQ ID NO: 544814 - DNA, 486 bp, Homo sapiens
tccatgcttaactggaccaccctgcagagactcaacgctggccagtggttcctgaaggtctggctgcacctgatcccaatcttaggcatggaaaacaccagcagggactgcaaggagtgagaggtgcaagggtggccatcagcttcgagacccccactctcagagctttcrcgacctccacccaagctgcttagtggcctcctaggctcctgccactgctgccagactcatggttgtcactgcttgttctgggtccatttccctcactagaaaaggttgacagggatgagagcagtgaatagaattcttaactctgtaaaactctagagaggggttggctctctgatctgaaatgctctagaaggagaaatgctgtgggtctgggagcgattccaagcaagccgtcctccgtcctcttggtaagcagggtgtggggtagaaaggttagggctggggcctcctacagcctccacatggccacagcca

SEQ ID NO: 544815 - DNA, 558 bp, Homo sapiens
ggtcacaaggatgggtacgggccagtcgctccagtagcccatgcggttgtagaggtacctgccaggaggagagggggcaggggtcagacctccaccaggccactacctggcccaggaatcaggatggtctgagcctccacacagacgacaggctgggctcagtgaccaggctgtgcccacctagcaataaggctcagcgtctgcctgatgctctaccatgcctgctcatggcagccacccggggaccaagaaatgtaaaggagaaaataatgccccataatcctattggccagaagtaatcattaccaaggctgtgctggatcttcctcctgtgggttcccccgcccccatgcctatatgtttgtataaacagcaaagccaggaccccgctgcacaaagcaacacggtcaggagcacaggctttggagtgaggcacacaggctggattcamatcccctctcgtctctgcttttcactgtcttgtaggaccttgtggaggacaggcttcactgattctaagatgccatcgattgtcactgtcatctcaacttcaatgtt

SEQ ID NO: 544816 - DNA, 626 bp, Homo sapiens
ttgggaaacctcaagccagacagagaaaaggagcagaggrcgtgaaggcacagagcaaagcaggctttattttggggaactggctctttatgggcttataaaagctttccttatgtaagagaattagccttcgtacacactgtatattttttcttatatatcatttgaattaattttatttatcatgctttctgtgcagaaatttaaatttttatgtagtcaaatctatccctcttttcctttatacattttgcctttggtattggatttaagaagggtggcccaatatcatatatttaagtaatattttacacccacgatttctcggcttcattgcttacatttcaatctgcaatccacccatccatcgacatccatctatatatagttccatatggatgtcacgtgtgcggagagaggtttaaaagccttatctctaaagcatgaagactagaatttcttttacatctttccaagttgtttaaattttttcaacaaatgtatgccttcaaaatgggaaaaaaattttaaaaatagaaaaaaatacatcttaatccatctggaatttattttggtgtgaagtaaaaggcagggatctaattttactttcaccaaatggatgcttc

SEQ ID NO: 544817 - DNA, 499 bp, Homo sapiens
tggaaagggtgcagggagctcccaaaagggagagatgggcaggctatggcaggattaccctggccctgatccgggagatttgggggaggtggtggcctggggaggttgaagagatattgcagcattagggccgagcagggaaagggattagaatccccacccccagccggctcctgacagcctaagaggctggatttatttttctggactacagagagctgggcaatcaggcctctgtccttgcttctgctggggtgcattgcactcagagtggttcattaggcaggagaatgcaattaagtcctgcctggggcaccctgtctctcccagcctatcccttggctggcatcagccccttggggagacatgagcagaagggctgaggggcccttaggaagaaccatcccagatccctacataggaccctgaccacgtcacagggtgggtggygatagtcccctggtaatgccccatctcctgccccacccttgctcaaggt

SEQ ID NO: 544818 - DNA, 508 bp, Homo sapiens
ctgtttaatgggactgggctattcccagaaatagaagactggtttacggggatcctttgccactcagctattaactcagttttcccaccarctcagcttttagtgtgtgaaacctctagggaagcttcagatggggatgttggagctcagaaacctacacccaaattgtggtatgctgacatgctgaaataaagaaggctgttaggcataatggtttaagctctttggcccaggcagttctgaataattaaattgtattagatttccttttggcaaaacaagtggtatctgcgcaatagctaataccacttgttgtgaatagaaaaaatttccaaataagctaaatagttatgagaggtgtgtaccacagattccccttaaatgatctctttagctggcttcctaagggaatgggaaactggttttagttccccttacaaactcttattattgtcatcttgctcttctttctattcacaacagacaatgaggactagtaacaaaagaa

SEQ ID NO: 544819 - DNA, 504 bp, Homo sapiens
caaactcttattattgtcatcttgctcttctttctattcacaacagacaatgaggactagtaacaaaagaactgacacttttgtcatgcagaatcagaaccctatacctggcmctcaagaacatttacaggctactacaaagcagtttcattcctcaaatcctaattatggtacccttgacccctgtcagcaggaaatcagccaaagcagtcatggcccaattcctccttaatgatcacacttcaggactgagggataaagaagataagggggtactgaagccatcctcacagggttaacaagaattctggacagaaatatagctctaattaagtattaatcaggcttcattttgaaccacttccttgtaatggaaaatcatttgacattgaccatttgcatccccagtgtatctatagataggatttctgacattagaatcacaaggcttttgtttaagaattgcttaagatgtttttcagatcccatattccggtaaaacag

SEQ ID NO: 544820 - DNA, 626 bp, Homo sapiens
gccataacctgactctccaaccaaatgtgaatgtagcttaattaaatagaaagcagcttaaacttaaaaggcaatattggtatacagaagtgaagttttaccatctgtgctgcagaagctgtctagtagatgacatttcctattacctggttcttaggatctcacagcctcctctgcctggtgcagctcccactacagccaagtcatttaggcatcctctcccagcccctgtttcctttcctgtgaagtctgtgggtggcaagcgcagagccccgaggcagatatggcatttacggagactttatcatggaagcacaacagcttgtcctcagtggaatacagcaggagawccctcgaagatctgtcaggcttggccatttagaggcttggacccctgactcctgccaagagcagtaaggaagcgtgggggccaacacctgtgcacatactctcatgccctcactctccactcattgtgcagagcagaaaccagactcagaagtgctccaggccaggctttcttcaccaaccttcaccagcctctgctggatttggccgtttgcagtgaaaaatgagcctgaaagccctggaggcttcctggtgatttaccgagaattttacttcca

SEQ ID NO: 544821 - DNA, 612 bp, Homo sapiens
aaaacaatgaaagattgagaaactgtcatagaccagagaagattaagaaaacatggacactaaatgtattttcttggattctgtyctggaacagaaaaagacataagtggaaaaactagtgaatgctacaaaaagtctgtactttggttaatagtaatgtaccagtgttagtttctgagttacaacaaatatgtgcgattcacaaaaggagaaactgggtgtggggtatattttctataaatctaaaattattccaaaatgaactttatttttagcaaagctatttgaaatgttttttaaaaactctgctaaggctgctggatacacaggtaagtagaacatataaaaacctagagtttttattaatattagcaataaaataaaaatcaaaagaatacataatagtgataagaactacaaaatatccaataaaaattatgaaacctctaaaactggaaagacctgaatgaggtatcatggcatgttcctgagtaagatttagtaaaaaaatgattaagcctctccaattaacatataaatttaatttcaaaagtgtatcttatataactatacaaaatgataataaagattagagttgataagccatatgga

SEQ ID NO: 544822 - DNA, 615 bp, Homo sapiens
atttattgacaacagcagaaaaactgtcaatcatttcttcttctttaccaaaaataaaagtatatggcatacaagacatttagcaactcttttgttatatattaataacgtatgttcaaacaagattaagagaagcctttaaatggcaaaaaaaaaaaaagggctcataaatcargggaagcattgaaatgatattttgcaagtaagggtaccagcataggagatattactaacaatcactggttacatgcagggaaaaattgtttgctggaccttgctgattcttcaagaaaccaaatttgtcataagagtttattctctgcatgttttctgctgtaaagatactcttattctactccaggaagctgctaaaattggtatgcatgtgatgaaaggtgcaatgcagatagaaattcgggaaagattttgttatcttcaaagccaattatgttgctatactgtcaaatttctagaaccaagatttatcttctgcaagcagtacaaatagcatgttttgtaagattgcttctgtaaaactgcatatcattgtagaccatagagtactgtttagtattccaaatgtgcaagatagttggccatacgaaggatttatca

SEQ ID NO: 544823 - DNA, 603 bp, Homo sapiens
caaagacttgagcagaaaaaaattaacctatatctgaacatatgatagtgaaacaataaacactcaaactaataaaggctactagatagaattgtaactgagtagcccatttaaaatccttttcttttccttcctgttttgttcttaataatgtaataacctttgctcctgtctttccaccagtcactcccttgcacactgtttcttttttatctaattatgtgattgcttagaagttccagsgactaaatcttgaaacaaaccagttgattgtggatttctcccctacctggaaattacctcaaggctagagttaatttacaacccagccgtaaccaagactttgccagcccattcaccagatggaacaaaaactcaagatggtcatcagaacaagtcacatagaccagcacctccttgccactcctgcatgcccctcaagccaagttttcctttctaatcctctatactcagcccaaaatttgaaacggtttattcaaggtatgagcctggccatttcctcaattgctagcttttgcaattaaagtcacggtcctttcactgcgtctcatctttgttcatttgattttgcaagctgtgagc

SEQ ID NO: 544824 - DNA, 637 bp, Homo sapiens
atcacttaatttatagggaaactgtagggggaaattggaaaactggacaatggacagaacttttaaataattaacgtgaagacagactatacatacacacacgcgcacacacacgcataccactcacacatattcagtcactgaggcaatttctgcttatagtggagaaaccaatgacatcagtgaccaggctaaacctatgcattttgtgggtgaatttaaatttcaagtgagtgcagagtgttttggattatctccgccaagttgctgcctagcatggcatgccattcatgtgcctagatcaatataaatatggatacccctgtatgaactaggcagggaaagtgggacaatttgacagccccttgctgagacacagcggcttccatccctgggaagggcctgaatagcccagtgcagccctgatggacyataagcaagaaaacagcagcccggaaaatgcagatgctttggagatgctggcttgacagactgaagcctgtttgtcaaacaggctgtcacctatcagagttttaaataggagctttctatgggatgttacgtaacttgctggctcacaacagccccagtggaatggaacggggggcagggggggtggggggcagcgccaatgaga

SEQ ID NO: 544825 - DNA, 475 bp, Homo sapiens
gcttccacattctctgcgatatcagggtgatctcagattccagatgctagtgcttgtcatccctaccctaaggactgctgatgaaatattgcccctttccttcaagtaaccaaaatagacacaattaattgattcgwgtactctgctcattaactcgaatgtggcttttagaatctttcagaattggatttatgtgttgaaatctatcactcaatactacaattatggacacacagcaggtggctcaggagtcccacagccccttcagagggtgcaggacatgcactggtggttagaggtggtggtgaccataccctctcagatataaatcttgacccttcacaggttactgtggcccagttacaaggcccgagagcatctactacctattgaaaagcagattacagccagacatttgtcaaggaaaatatgttctcccacataggacaagtagccttaggttgcacttggggtc

SEQ ID NO: 544826 - DNA, 617 bp, Homo sapiens
ctggctcattgtttgagcttccacattctctgcgatatcagggtgatctcagattccagatgctagtgcttgtcatccctaccctaaggactgctgatgaaatattgcccctttccttcaagtaaccaaaatagacacaattaattgattcgtgtactctgctcattaactcgaatgtggcttttagaatctttcagaattggatttatgtgttgaaatctatcactcaatactacaattatggacacrcagcaggtggctcaggagtcccacagccccttcagagggtgcaggacatgcactggtggttagaggtggtggtgaccataccctctcagatataaatcttgacccttcacaggttactgtggcccagttacaaggcccgagagcatctactacctattgaaaagcagattacagccagacatttgtcaaggaaaatatgttctcccacataggacaagtagccttaggttgcacttggggtcttccaagcttctctgggtgaagacacagtgtttttctgttagttttgaggttatcaattataatagatgtggttacaataatagaagttctcaggaatggcataaaaggatgctgaatgctttagg

SEQ ID NO: 544827 - DNA, 617 bp, Homo sapiens
ctggctcattgtttgagcttccacattctctgcgatatcagggtgatctcagattccagatgctagtgcttgtcatccctaccctaaggactgctgatgaaatattgcccctttccttcaagtaaccaaaatagacacaattaattgattcgtgtactctgctcattaactcgaatgtggcttttagaatctttcagaattggatttatgtgttgaaatctatcactcaatactacaattatggacacacagcaggtggctcaggagtcccacagccccttcagagggtgcrggacatgcactggtggttagaggtggtggtgaccataccctctcagatataaatcttgacccttcacaggttactgtggcccagttacaaggcccgagagcatctactacctattgaaaagcagattacagccagacatttgtcaaggaaaatatgttctcccacataggacaagtagccttaggttgcacttggggtcttccaagcttctctgggtgaagacacagtgtttttctgttagttttgaggttatcaattataatagatgtggttacaataatagaagttctcaggaatggcataaaaggatgctgaatgctttagg

SEQ ID NO: 544828 - DNA, 209 bp, Homo sapiens
tttccactgccactgttaccttacattcctactgcggacacccactacctcctgcaaacacatcctgcttccggctggtccctcccactgccctgcctgctccgctgggaggagmacatccctggtgcctcacaggatgggggcctgcaatgcctccctgactccaggtgtatgtctgaggaggtaacaccctcttcactattcatcac

SEQ ID NO: 544829 - DNA, 517 bp, Homo sapiens
aggggaaactgagaagcttttactagtgtgayaaagcgggaggagaggctagactctgatattgcacttgtatcatgaaagaagccagggagcttccccattcatgtacacataaggaattgctgcagaaactaaaggcaggttatgccggatgaggtgaaaatgtgtttcagagtcaaataagggcacctgagctttgtagagaaagttaaaatgagaacaatgtctttgtccatattgagtgcataacaattaggtgagacagaagagaagatagaagaagacatatggagaggaaaagttgatgagcttccccacttctggtgtgaaaagttcatcaactgaaaagccaagagtgcatgaataactaggtaataatgcatttcactgtcatcatcgctgccttaattcattcctcccccacctaccccttgctcctgtcttaggttcataaaatgaatgtacattttttggtgtctgttggatcccaaagttttcttatgaactccctgtaagg

SEQ ID NO: 544830 - DNA, 533 bp, Homo sapiens
atttttattacccctctgtggagtgttaatcaattaagcctccatgttcagcctcttccaccrttcagatgcttaaaagccagagggactgaagttggaaagcagagtggatgtcaggattaaagcaaagggagcatcttccacttttgctggatttgaagtttgcttctgatacatgtgcattgtttattatcatttatggttactttacaggttcaaaatgatggagagttgttgatattgggtttcaatcataccatgaggtctttgtcttcctggttggctatttgtctctttcctaacagcaagatgtttccttgcatgctgtaggtgctgtataattgtggacccactatctgactgacatcagtagcaggttcttctgcatgagggcagagaatgaaaagaaacccgattaggttgccttatcctgacataggtcgtggtaagatttcagtctgcgccaagctgagcatgctacacggaaactctttatttattaatttattttgtctgcccacccacctttcttc

SEQ ID NO: 544831 - DNA, 591 bp, Homo sapiens
taattcagtaccagaatatgcagtttggccacaaaactcacctatgtggcatggtaaacattgtgttgaaagttattgaaccatttaaatttatttaaattcatgatttccaattgtgggcctttatattttctgtggaaaatattctaggtagtctaatggtagcccagaaccacatttctctctttctgagagttgmtagagcagggctccaagtaattgtcgtttccgctaagactccaacatgaattacagccccgtgttccaggagccctttagtgtcctagggtttgtaatagatgtttctaattctcatgaaattattgaacaaacatcaaggaaagatgttttacaatgtaaagctaatgcagagggtcattaacattgttattatagacaatcagcatgatttagccaagacctttgacaagggtatacacctgtctgtgaataataggtctctgtttatcacccaagctattaattagactaagattaaagatggggtggggtgcatgctccaaagagtgtctaaatggccgagagcatgagctaagaggttgcagtgactctttcatagatgggatatca

SEQ ID NO: 544832 - DNA, 495 bp, Homo sapiens
acattactttttgcataaaatattaggaatcatcctttaaattcttctgttaattgtattaacgagctagggttaggctttttctttctctcctttaaatcttctgagccttgaaaatggaatttgagtaaagaaaaacatttgtcgaacactcttacacagcagttttcttatgtcaaacttggctggttaggattgtaacaatccttaaaggattgttttcttggcataaggtggsgtttcttgatctaagttgacaggaaggtaaacagagcaattaaactccggactacctctttcctcagactctattggatttgttcatgtatttgtgctgtctgggagtcccctggctgtccatgtcattaacaatcccctttctgccaagcccctcacaagtgatgtaagatatttgaagacaacctaacaacgttctaaagcattgaggaaacaggagagcaatgtaaacatcatggctaatgctagctttaaatt

SEQ ID NO: 544833 - DNA, 594 bp, Homo sapiens
ttgggtgtttcctgctctttccctcaaccatcttgtacactctgattatttaaatgactatctccccaagttgactctgacctttgcctcttagggcaagaatcatgcctgtccacctcttcacatgacttcgaacatggtgggcatttagctagtatttgttgaatgaatgaatttgtacttattaaggaaagccaggccatacctatatatcatcaggaagaactgacccaggtaatgttgggcaagggttgaaaggatgttaacggatggatcacgagctaactgggattcaattgcgatgtcctttggttacatctttcccctgtaatacatctgtttcactgaaggtgacgagagataggttttaagaatcttattgttcttattgtgytcatctcaggttcattttatcttccacagaaaacctgtggtttgctgaaaaaatggtaggttttgttgtcatacaaatcttggttctaattcttgtcatttgttgggtctgtaacctcaggccattcttgtcacttgttggatctgtgacctcaggccattcttgtcacttgttgggtctgtaacctcagacaattgttg

SEQ ID NO: 544834 - DNA, 594 bp, Homo sapiens
ttgggtgtttcctgctctttccctcaaccatcttgtacactctgattatttaaatgactatctccccaagttgactctgacctttgcctcttagggcaagaatcatgcctgtccacctcttcacatgacttcgaacatggtgggcatttagctagtatttgttgaatgaatgaatttgtacttattaaggaaagccaggccatacctatatatcatcaggaagaactgacccaggtaatgttgggcaagggttgaaaggatgttaacggatggatcacgagctaactgggattcaattgcgatgtcctttggttacatctttcccctgtaatacatctgtttcactgaaggtgacgagagataggttttaagaatcttattgttcttattgtgttcatctcaggttcattttatcttccacagaaaacctgtggtttgctgaaaaaatggtaggttttgttgtcatacaaatcttggttctaattcttgtcatttgttgggtctgtaacctcaggccattcttgtcacttgttggrtctgtgacctcaggccattcttgtcacttgttgggtctgtaacctcagacaattgttg

SEQ ID NO: 544835 - DNA, 598 bp, Homo sapiens
ggctcctgcatgaatgcttctctagacaagctgacctttgctacttagtagggtgtacgttgcctctaagcccatttccaatttactgacacctggtggatttttattcaccactgagctctggccygaagagagctgccaaacgtcctaggccatccattcactcagcacttataatcgtgatagtcaccacccatgaaagctttaggacctgtttcaggtaagagcactaacttttgggacagagcctaccagtgttcaaattttgctttgatggctactaaatagctacagtttggaagctcttgagcttcctctggtcccccttcctagcctgtagaagaggatattgctaaagggctattgtaggtaaaatgaaatgggatcagggttgcaaatgccgttttttactgttgcagtgtttctgcatcgtgtcgcctgagggctttcttctgtgaccagaaactgctctgcccccacgcagcactggcctggaactggagaattaaagacctccctaatcccacacgcaaactttgatgtgattggcatataagtatcttagcaccctagtatcatgagttacatggcgctgagg

SEQ ID NO: 544836 - DNA, 596 bp, Homo sapiens
cttttcattttgaaaatgccaaacttacagaaataatgaaagtataatrtagtgataaatatctacatactcagcatctagatataccaattattaatattttgctccattttcctctctctctctcacatatcaaaaataatttgcaagtaaattgtagacattatgacactttatccttcagttcttcagcagatattatccaagaataaagacattctcctacataaccccagtgtcataatcacccacaggaaattaatactaacttgttaacatccccagagcatacagtccatagttaagatgtaccctctgttttaggccaaaggtggcaattttctcaactttagactcaacagaagtttggagaagggaaaaatctgtatgagttgaatagaaaggaaaatacttcatggaggaaagaggataagaattgggctgtgaaggattgacattagaaagaaggggtggagcaaatgctcagatagaagcaggtaaatacctatgcaaacatgcagacatgggcattggaattgccttttgtgggaggagaagactgagcagaatttgtggactaggataggtaggctgtg

SEQ ID NO: 544837 - DNA, 637 bp, Homo sapiens
atcacttaatttatagggaaactgtagggggaaattggaaaactggacaatggacagaacttttaaataattaacgtgaagacagactatacatacacacacgcgcacacacacrcataccactcacacatattcagtcactgaggcaatttctgcttatagtggagaaaccaatgacatcagtgaccaggctaaacctatgcattttgtgggtgaatttaaatttcaagtgagtgcagagtgttttggattatctccgccaagttgctgcctagcatggcatgccattcatgtgcctagatcaatataaatatggatacccctgtatgaactaggcagggaaagtgggacaatttgacagccccttgctgagacacagcggcttccatccctgggaagggcctgaatagcccagtgcagccctgatggaccataagcaagaaaacagcagcccggaaaatgcagatgctttggagatgctggcttgacagactgaagcctgtttgtcaaacaggctgtcacctatcagagttttaaataggagctttctatgggatgttacgtaacttgctggctcacaacagccccagtggaatggaacggggggcagggggggtggggggcagcgccaatgaga

SEQ ID NO: 544838 - DNA, 296 bp, Homo sapiens
cagcttgcactagcctcaccaggccaagcagtcctcatttggaatccttgagaaactaagcctatgtaggcaaggctaaacagagattaaactgaytttactggggagaacaaacattgttagacctgatgtgtccatttggtttagtgtcatggtgttcaaagtagacactgagaagcaagtgatgatcccctcgtgtggggcaagaaaatatgagtttttccatgtatatttatttgtagtgcatccttttatacatttctatttttcaagtgtttgattatttgttcaataca

SEQ ID NO: 544839 - DNA, 460 bp, Homo sapiens
acacattcctctaactattccaaagagctaatgattctgaagtcttctcactgtgtatattttggttagggctggctacatcctgtctgattacaagaatatctacaatcctaaatagctatgcataatgtttgtggcccaacatacttttattttttttagagtgaagtcttgttgaaagattcccttccttgcaaatattcccaatttcactccttactactcaaataaaaaaaaaaagcctatctcttccatcatattcttcagcaacttgatgcttagtcaaagttccttttataaaatctcaattagttagacattctgaactggaccattaaagaagtgctgtagaatgagcttcaggagttttcactttgctgtctgaaactagctgggtcagcacctgccaaatctattcttggctctggyttgcatgattagccccctcactttcccaagc

SEQ ID NO: 544840 - DNA, 553 bp, Homo sapiens
ccactatgtgtcactgggcaagtccttaatctttctgagccacttcctcaactgtaaagtggagataaaacatttgcctcatatggctgctctaaggattagagaagataaggtgtgtaggtgggatttgagtagcatcttaatgaatggacgggagttttccagcacctacagagaagagctgaaatttcaggtagagggaactgcacagtggcaggcgatataaaagaacaacccacatttcagatacagacatctgttatgcctagcgcgtccatctcttgtagtggatatgtacatattaatttactctacatgtgtgtcaggygctgtgctgggtatggcaggtgcaggggagggggtcaggggaacagcagggtgactgcttttctttccttaacttttggactcatccaatccattcctctcacaacccttagcatcctgtacttaaaacacagattgatcatgtccctactgaaaactcttcagatgtgtgatgcaacccataagagaaagtccaaattctttagggcagtccccctgaaactgg

SEQ ID NO: 544841 - DNA, 635 bp, Homo sapiens
atgacattccctgagatcccacagctttatccccgacagatctcacctctcccagctcacccaggtcccagccatgctctcccagtgggccacccagtaagattcagcccttcattcctctgtgacccagcacagggcattctctctccctgaaacctgttgtctcccttcctcccttgtttgtttgcagaattgcctcctgggaaacaattccatatgttgacagccttttctacttgtcccacccaagcaacacaatccttttcttctatattcccagaaaatcttgcccaatcattataacacatctctcattgcactgtaataattgtttttatgtgtatatctccagctaggctgtttagaatcaggacattttaaaatttatgtccatagtctcaacacctggcgtcaatcttaggacacagtaggtgcttaataaatgcttgtcacataaatgaacaaaattataatgtccttcctctcttccttccatttgtctagccattgcagggctctgtccacsgtagttactattggttactaccaagccatcattatgatgccttctcctttttcaagtggtgttccagtttccatgaactgatatacataatacttctgtcttaggatca

SEQ ID NO: 544842 - DNA, 656 bp, Homo sapiens
ctggggacccctctcatcccacttggactcagagtccctggtgccccgaaggaaagcaaatcagcctcacttataattaagtgtctcaaataaagttttgttttaggctaaataagaaaagtgataccaagtcaaacagatcacaactgattattaagaacagatctactacagtttgacaactgccacaaacacaaatcttatttgggagttgctaaaactcagtaaatatcattttaataattaattaaactttaattaatgtcttgacagtagtctcaacctgataggcctcttcacaatgtgcaggctgtgatgaggatggtggctgctgggacggccaagggcagctaggtttcaggtgtcccctccttggggcaaggagaactaagttcactttcccccaagaaaaatctgtggtctacacaaatcaacctaaccactgaatcatcaaacactctgagaattcaggttaccaacagtgactgcaggagaatctaaagtgcttttgcatccttagagaaaaatctctgctccatctttttatggatccagtgggtggcagaaggaatggagttactgcaacatgacaatctccatcctgcctgatgygcgagcacataaccgcctaagtttaaagagaattctggatataa

SEQ ID NO: 544843 - DNA, 621 bp, Homo sapiens
tctgcctgcaaacagcatttgatagtgcaaccttcaggattacctcaggaataatgagctccaggcaccctttcagctgcattagtgagggaaatgcaacactctattcctggcacacaaacaggccacccctacagccaggtgtgaactccaggctttctggctgcacagaaccattcaacccctggacaatgagtgagcaaactagaagcccaggtatcactyttcagcggatttagctgtgatgggggataatgggatggtggagcagagtggctgcattctgagccacagctgtgggaagctctggttaataggatgtctgcttgctgttggaggttggtgagggacagggacatttaggagtgaggacacggggaacactgctttagcagctgatatttgtggtgcatgcgtgcccacatacctgacatttgcaaaaatccaatcccattgggctttctgatttttagaaaaaccttgattaacttgagtgcttgaaaaagatgtagatttatggttacctaaatatattctgcataattgggaattaatgagaaactccaccccttttacatttcaatttttatgaaaaatatttcttaaatacactagctctct

SEQ ID NO: 544844 - DNA, 606 bp, Homo sapiens
acacacacacatagttctacatagctgctctatggtcagccaaacaaagacragattgagagcggaaaaaaaaaatcttcctgtcctaccattttcttgcttttatttcctcctccctcatcatcttcccattcctcttcagggcactaaagagctctgagtgttcattgttattaagcagaaatttcttgtgacagctatcatgtcatctctcagtcttttagaactgacagagacaagaagagagtttataaaatacccacatttcccttcttacagaaaactgggacagcaacagggcttataaaatacacactgcccccaccttacagaaaactgactgtatatattccaagcaagtaacaattcctccttttattgtttaattatgagctgacgcagctaagataaaggcccaaccaatccagggctcaaaagtgccaatcattctctgcagaaagctgaggctaactctctccttttattatatttgttatgattttagtttgttcagcaataaatgcaatattgacgtttagctcctagaaaaaaaagaaaaaagaaataggcaaccaaaacattgttagcttcaaatatttgagaagt

SEQ ID NO: 544845 - DNA, 376 bp, Homo sapiens
tgtttgacttccttagacatgagacatgtactagatggcaatagcaggggacgtatcccctacactcctgtcctggtccaatgcctaacccatggggaacactcaatacatttatttgaactgaaatgaacctggttggtgggcgaggccgctaggggtagaggcagttggggaggaaggtggcagccatgtgcatgttggagatatgtgagtagctttaggtatctggaccccaaccagcccagtgaagagggtagagatgcaagacytgtagatatgacatcagagggtggcaaataatctgggtccctagcatgctgggcagcctgaggcgacggtccggtcagccaggctcagccaagcccctgagagcatc

SEQ ID NO: 544846 - DNA, 376 bp, Homo sapiens
tgtttgacttccttagacatgagacatgtactagatggcaatagcaggggacgtatcccctacactcctgtcctggtccaatgcctaacccatggggaacactcaatacatttatttgaactgaaatgaacctggttggtgggcgaggccgctaggggtagaggcagttggggaggaaggtggcagccatgtgcatgttggagatatgtgagtagctttaggtatctggaccccaaccagcccagtgaagagggtagagatgcaagacttgtagatatgayatcagagggtggcaaataatctgggtccctagcatgctgggcagcctgaggcgacggtccggtcagccaggctcagccaagcccctgagagcatc

SEQ ID NO: 544847 - DNA, 376 bp, Homo sapiens
tgtttgacttccttagacatgagacatgtactagatggcaatagcaggggacgtatcccctacactcctgtcctggtccaatgcctaacccatggggaacactcaatacatttatttgaactgaaatgaacctggttggtgggcgaggccgctaggggtagaggcagttggggaggaaggtggcagccatgtgcatgttggagatatgtgagtagctttaggtatctggaccccaaccagcccagtgaagagggtagagatgcaagacttgtagatatgacatcagagggtggyaaataatctgggtccctagcatgctgggcagcctgaggcgacggtccggtcagccaggctcagccaagcccctgagagcatc

SEQ ID NO: 544848 - DNA, 376 bp, Homo sapiens
tgtttgacttccttagacatgagacatgtactagatggcaatagcaggggacgtatcccctacactcctgtcctggtccaatgcctaacccatggggaacactcaatacatttatttgaactgaaatgaacctggttggtgggcgaggccgctaggggtagaggcagttggggaggaaggtggcagccatgtgcatgttggagatatgtgagtagctttaggtatctggaccccaaccagcccagtgaagagggtagagatgcaagacttgtagatatgacatcagagggtggcaaataatctgggtccctagcatgctgggcagcctgaggcgayggtccggtcagccaggctcagccaagcccctgagagcatc

SEQ ID NO: 544849 - DNA, 486 bp, Homo sapiens
gggggtacaccaatgaacagagcagaaaaawccccctgccccattcattttgttcatgtgaatactttcttggtgagagtgatttcagctagcacatagtttagagagaatgctgcagagggaggcagatagctgagtttcagggttaacccggagttgcagagttgcgaggcctgctcctgaactttctgaatgaagctttgtagcaagcctttaaaaaaaaagtaaccaagaaggtctgaagataaagcaagccaaccttttcctgcaggaaaagatacacgcatagaagatctgtgcagctagagctaatggcagcttccatgatgatcccaagtggaataactatataaggtgtggattctgacccagaggagtttataatctatcctggggaaatgaataagacccaagaacagagaagaatacaaacacacgataagaggtaaaaaattttgttgaaggagggagcagaaaaacttaaag

SEQ ID NO: 544850 - DNA, 537 bp, Homo sapiens
gaatgtgaaagctcttgaaatgatttcttctcaaatagtgcactccctgtgccaaggaggggtatcattgtttatgtcactaatgactacatcctgggcctccatgcattttgtaacccctgttcctttattagagcaatcagaaaaaagatcacataattaccaagatgttgctttatgggcaaggggtacggccacatatgccttcattgatgtgaataataccaccctgggcattactatcacccagatttcacagatgctaaacccccagcatrgcagttaggagcatggactgtggatcataggagattggggttgaagcctggcactgctacttattagctcttggttctcaagcaaattgtttattttgtatgggcctcactgtctgcacctataaaacagggacagtgatatttactttcaggatgttgggtaagtatcaaatacccggcatgatgctcactgatagctgttggcttaggctcaattttgaggtcactattatcccacctattcactggtgtgagatca

SEQ ID NO: 544851 - DNA, 619 bp, Homo sapiens
atgtgaaagctcttgaaatgatttcttctcaaatagtgcactccctgtgccaaggaggggtatcattgtttatgtcactaatgactacatcctgggcctccatgcattttgtaacccctgttcctttattagagcaatcagaaaaaagatcacataattaccaagatgttgctttatgggcaaggggtacggccacatatgccttcattgatgtgaataataccaccctgggcattactatcacccagatttcacagatgctaaacccccagcatagcagttaggagcatggactgtggatcataggagattggggttgaagcctggcactgctacttattagctcttggttctcaagcaaattgtttattttgtatgggcctcactgtctgcacctrtaaaacagggacagtgatatttactttcaggatgttgggtaagtatcaaatacccggcatgatgctcactgatagctgttggcttaggctcaattttgaggtcactattatcccacctattcactggtgtgagatcaccttcaccaaggtaatgttccatgaggacggtgatggccagagaaatgttggactgaatcagggcacagctttcttggaggcta

SEQ ID NO: 544852 - DNA, 543 bp, Homo sapiens
gaagttcatgaatgaacctcattgtgttctcccaagaaagccctctctcccaccattctttgcgatgtttggagctcacccttgcctgttgtgcctatattcaaagcattggaattgggctgctccaggctgtctccaaatccatgctcaatccccatcatctcactgccctactgcggaggtagctgccagtctgcccttaactttcctaaatgctccagggctctgcatcaggagggttctccttctctaagaaaatatactttcttggtttaaatcttctgcccttccctgccatgtctgtctgggccctcagctaaggaagcctgctgaagataggaagtaggtcactggattgcttcatcccctgrctaccacctcaatccaagccaccagcttcttccctaattgtctcactgcattctatctgctcccccaaccccctccatatccagtgcagttagaggggtcttactaaatcaggtatctggttgtgttactgtcctgctcagtgatcccaggattgtgtccctacccctgcac

SEQ ID NO: 544853 - DNA, 643 bp, Homo sapiens
ttctgtaacaactgggtacaccatgtagtttacaagtaatcctcaaacctggtcaaaaatgttgtcattgaggcctagtggttgagtttttagaacagaaaaaagtagcaagtggagactctggaagagctcctagacacagaacatcttcttagagctttcctagtgctcaaatcttctacaaagccaaaaccgctctttagttaagcaaatttgggatgaggggaagtaacaaatagtcatattaattgcatggcagtggttgttttgtaaaaggaatagctagctggtgggtcacttcctctgctctccaaatcaattgttttgcacaatggagacacactccttgggtcaggaaactaaatgtgagtgtatctgttcccatgtgtgtaaayatacagctctcatgtgcctaatttatagcaagtcacctactactagaacatcggcccttcagttttggatcacttgaattattcaaaccaaagacgccttcaccaccaatgatcagaggaaaagtgattcagatggggtttagaactactcagagtcttccttgagtgcaagcagttccggcttgtgagaaattcagagaagtctagaaatagaaataacaaacacaaaaaagaaagcctgcatgttt

SEQ ID NO: 544854 - DNA, 551 bp, Homo sapiens
tcttcgcttaatgcctgacacttgaagttcaattactcattccatgaagagaaggaggaagtaggcatgcatttctcattggggcctcagccttataccctggtgtccccctgacacaataaattcttcctattcaggattgtctgctattctgtatcattcctaagcagaatacaaccatctccagcagcagatacccccgataatctcctcctgatacctccttctcacactgatcagtgagacattactgagcatctacggtgtgtccttcagtgagccagatgctgcrggcaataaactggaaaatgtaagacatggtttctacccctctaaagcatatgttctagttagagaaaatgtaaaaatatgagagtccattatcaaatacccagagcatctcaacggatgtactcgcctatcttttcaatctcaggtctctaggttgataggccttttctgtttcttctgttttgtcttaaagcaaaaggtgcaggctcctcttttctgaagctatccttattactatgtgtgccttatcccacatggca

SEQ ID NO: 544855 - DNA, 566 bp, Homo sapiens
tggtacccagaccatctgtgggtggttcctgccattcttagcagcccttctctcttggagaatgaagtctcctacactgagtcagttggtgaccactgaattttattttgggaacgtgtcctagatacagcaggcttcccactcactatgcagaagagaatgcctttctagaagaggattccgatttgtctaacaacagcatgctgctcaggcaatctctcccttttgttgatggctgaatggagagatgctcagcttctgatctccaagggtgagagcatccaggcaaaaagcttagcagcctgtcgtgcttccaggcggaaatkcatctttgtgtccctccatggggaggggcatgtgcatgagcatctctgtgttccagaagcctatgaatcagaacatttcagaactggaaaggatgcgagggtccaaagcctactaatcacataaagtccctttagagcagttctgataaagagtcattctgctgcttctttctacctccccctgacagaagacccaccacctcacaaagattcctaggccatggtaaccacatggtgaga

SEQ ID NO: 544856 - DNA, 508 bp, Homo sapiens
tctggtcaggatttgtgactacctgaatttctaaaacacccagctcagtctctgagattttaaggggctcagatggagcagcagtcaccacaggacttccatccagggaactctgaccaaaggctctgatatatggtggatgctcagtgtttggtgaatgcatgaatgaggcaatgaatgaacagtattttagaactaaaagggaccttaataggcctcaagtgatgactacaacaccaatatcattgcaattattaattccaacaggkcaactcttagcatactaacagaagcttggaaaacgcagactttataaccgtcaacatgcttattgttgtcaacgttaggatgattgatggcctacctgggattctgttcctctcttttcccgccattataaggaaacttaggtgagaaaggcttaagttagaagccctcaaggaggagggaacatctgtctgttgtgagtctaatgaggcaggtgattagggtgaaggtagttttgcag

SEQ ID NO: 544857 - DNA, 602 bp, Homo sapiens
gacatggacctgggcagccgggacttccacagaagggccagcttctgttccctgaatccatggctagggttatgccttgatctcttgttagccaggtttctgaggtcactttgttaccttgtcagagtgatacagtgggcartatgaattgggccctttagaacatgagaaagtatgtttttcatgatgatgatgatgatgatgacatcatgttaaagatactcagtgtttaccgtgtgccaggcgtgatgctaggggttttagaggcacttaattcttactcaactatatggttgagaatactattattccaattttattaatgagtaaactaaggctcagagagattaataccttgattacagctatgaagctccaacaggtgcagggcttcatgggcgtacgctctattccagaagacttgagctgggaaggtaccacctgcccccacctttctttggccaaagcctggaaaactgaagtgacctctgcaaggccacaccactggaaaatgacagagctggtaaaggccagttcttctgaaccctgctcctttgttcttttcagactggcatactcattgtcacattgtcttgcagttt

SEQ ID NO: 544858 - DNA, 600 bp, Homo sapiens
tgccttctggctgtatcctcacttgctggaggggcaagagagctccctgaggtttcttttataaaagcactaatcccattcataaagcctccacccttgtgacctaatcatttcccaaagccccaagtcctaatactcctaatctcatcaccttggagactaggtttcaacatatgaattttgaggggacataaacattcagtccattgtatctacatagaaaaagctgtttgtggtgaacatgggtgaccctctgcctgagggctttttttttttttttttttctcctagcgggacttggcaaaatcccggggtagttaaggcctcaaatgcagccctcagccaatgacagagggaggggggggaatgaacacccggattcctggcccctgggkggggatgatgctgagggctattctgtacaggatgagaccgtgctgccatactcatgacttgctggataaggaaccgttgctgcctaccttcactccctgtcttcctgcccactctcctgcagtgtctccagggatcacctctgacatgagttactggcactggaattgcagggtctatttctgggcgactgaaagtaggacatgg

SEQ ID NO: 544859 - DNA, 662 bp, Homo sapiens
ttgaagttatgtgtcttatttttgaacagtaaacaatattttttaaataattgcaagtaacatgagataagtcagagcctttatcttcatttaacatatgttcatatggaaaatggatgcgcatatgtcatcttggatcaagtggtagagtgtctagggtcactcagaatcagatgaaatacattcggatctcagcttagctacttactagctacataaatatggacaaattgtaaaataatatgaatcatggtttgtaaaactggagcagtattaccaaccactgagggctttttgataatctggagataacmtgggtaaaacatttagcacctttttattataagaaggaaacagacaaattcctggatccagattccagacaaatattgatcacctttctggttcctaacacaacttcagtccagtctgaccttagaggaacctcagatattttaaattccttgtggaaatcatcacagaagacaaatgacattcgcagtttggctaagttatagagaatacctttgctttaactacagacggtaggaatttgaaccaataaaatatctctactacaaggatatagcaatgcctgagaaacaagggcagcaggagtaaaatttaatggcgacttttcccctggattccttaaagagcag

SEQ ID NO: 544860 - DNA, 662 bp, Homo sapiens
ttgaagttatgtgtcttatttttgaacagtaaacaatattttttaaataattgcaagtaacatgagataagtcagagcctttatcttcatttaacatatgttcatatggaaaatggatgcgcatatgtcatcttggatcaagtggtagagtgtctagggtcactcagaatcagatgaaatacattcggatctcagcttagctacttactagctacataaatatggacaaattgtaaaataatatgaatcatggtttgtaaaactggagcagtattaccaaccactgagggctttttgataatctggagataacctgggtaaaacatttagcacctttttattataagaaggaaacagacaaattcctggatccagattccagacaaatattgatcacctttctggttcctaacacaacttcagtccagtctgaccttagaggaacctcagatattttaaattccttgtggaaatcatcacagaagacaaatgacattcgcagtttggctaagttatagagaatacctttgctttaactacagacggtaggaatttgaaccaataaartatctctactacaaggatatagcaatgcctgagaaacaagggcagcaggagtaaaatttaatggcgacttttcccctggattccttaaagagcag

SEQ ID NO: 544861 - DNA, 659 bp, Homo sapiens
tcccctatcgcacccactgcctatcrtgtttcctgggatagctactcaaataaactattggcacataaattcttatgtcaggactgcttctggagaatctaaactaaaacaatagttgtatctatgttgtatggttgttgtgaagattaaacatattaacatatgcctgatgctcttagaccactgtctgacatgacatttaatttggtgttatctgttattacaacactagaatgaaaattccaagagggcagagcttatttttttttacatactttatttaaactgaaaatttttattctgtttttggtaaaacaggctttttatgatttacgaaaattcttatgaattgcaaaaatgtttttttctttccatgtttttccctgtatgaccgtgttttttcctgtgttcccccattcaagattggctgccacaatgagatagaaagcacaaggacttttttaaaaacttgcatctgtagtggaaagcttagcagcagacagtaactgctctaggtctgtccacatagatgcagttttattcacttttgaatttttagcatccatagcagtgcctaatccatagcaagtactcataaatatttgataataaatttaattaaatacttgagggccttctaggctttggtgatatgaaaa

SEQ ID NO: 544862 - DNA, 659 bp, Homo sapiens
tcccctatcgcacccactgcctatcgtgtttcctgggatagctactcaaataaactattggcacataaattcttatgtcaggactgcttctggagaatctaaactaaaacaatagttgtatctatgttgtatggttgttgtgaagattaaacatattaacatatgcctgatgctcttagaccactgtctgacatgacatttaatttggtgttatctgttattacaacactagaatgaaaattccaagagggcagagcttatttttttttacatactttatttaaactgaaaatttttattctgtttttggtaaaacaggctttttatgatttaygaaaattcttatgaattgcaaaaatgtttttttctttccatgtttttccctgtatgaccgtgttttttcctgtgttcccccattcaagattggctgccacaatgagatagaaagcacaaggacttttttaaaaacttgcatctgtagtggaaagcttagcagcagacagtaactgctctaggtctgtccacatagatgcagttttattcacttttgaatttttagcatccatagcagtgcctaatccatagcaagtactcataaatatttgataataaatttaattaaatacttgagggccttctaggctttggtgatatgaaaa

SEQ ID NO: 544863 - DNA, 659 bp, Homo sapiens
tcccctatcgcacccactgcctatcgtgtttcctgggatagctactcaaataaactattggcacataaattcttatgtcaggactgcttctggagaatctaaactaaaacaatagttgtatctatgttgtatggttgttgtgaagattaaacatattaacatatgcctgatgctcttagaccactgtctgacatgacatttaatttggtgttatctgttattacaacactagaatgaaaattccaagagggcagagcttatttttttttacatactttatttaaactgaaaatttttattctgtttttggtaaaacaggctttttatgatttacgaaaattcttatgaattgcaaaaatgyttttttctttccatgtttttccctgtatgaccgtgttttttcctgtgttcccccattcaagattggctgccacaatgagatagaaagcacaaggacttttttaaaaacttgcatctgtagtggaaagcttagcagcagacagtaactgctctaggtctgtccacatagatgcagttttattcacttttgaatttttagcatccatagcagtgcctaatccatagcaagtactcataaatatttgataataaatttaattaaatacttgagggccttctaggctttggtgatatgaaaa

SEQ ID NO: 544864 - DNA, 314 bp, Homo sapiens
tccaaagtgcgttttatttctaggacacaatttgtttcttttcttagacacaaacggtgtgcaatttaaaagtgtaaatatgtttgtgaaagaaatattttaaatgataaagaaacagaggataagtcaaattttaaagtgccctcaagaaaatttgttctatattatcatgcagttaatctaattttaggcaattcttttctakgcatgaaagcaaatttccttaggactttcattaggcacaatttctttaatctgagtcacttctgtgttggaaagtaacaaaagagcattttttggtgtgaatatcccct

SEQ ID NO: 544865 - DNA, 614 bp, Homo sapiens
tttcctgtccaaaccctgactaacacatatgtcaaattttatgctttgtacctttctttcatctcatctttcttcttgtaatgttatgtctgttccctgatgttttagataacagactgcttccttttgtcattaccatcacattatcttattttaatttgggatattatttacaattctatttgttttcttgtttattcagtagaatataagtgatcttgttcatctgtgtattcccagtgctagtacagagtttggtactcagcaggcatccaataaatatttgtgtaataaatgaattaaaacttaccatcatgtaagatttttttctccataccaaagaataacagtgattgaaattttaagttcctctgatgaattttctgagaaatctattaaggataaaagggtattttcagtactgtgaaaggtacaaacttgaattggagtcctgcctttgaggagcgagtaagggaaataagaaatatgatgtattaatatatatayatatctatactataaaacaaagtggtaccgttatgcacatattaaagctattaatgttcaaaaagagttatgctacttccatttgcaaagatcagtgaagtttttca

SEQ ID NO: 544866 - DNA, 472 bp, Homo sapiens
aggtcaagactgaggctgagacagagagtgacactgctggagagggagacctgaggagcaacactgagagataagacagcttaaagctgtcttgcactgcaggcagtgatayaaccaggaaccagcaagtgagggactagtgaaaacaacagtaaagcaaaaatgcaccacaggattaccaaaaataaagctaaaacagattgtatgtgtatttcagtgtagagaaatgtaagagcacaaatgaggagtgagaaggtctctagtcttcattgtgccattaataataaaaactctcatggcaacatttattagggattgctgttttccaggcatggtgctaagggtttcccaagtaccctcttgtttgatccttacagcaactctatgcagcagatcatactatctttcctctttggaagaggaagacactggaaaatactcagcaaggtcagacttggcccaaggtcaccca

SEQ ID NO: 544867 - DNA, 472 bp, Homo sapiens
aggtcaagactgaggctgagacagagagtgacactgctggagagggagacctgaggagcaacactgagagataagacagcttaaagctgtcttgcactgcaggcagtgatataaccaggaaccrgcaagtgagggactagtgaaaacaacagtaaagcaaaaatgcaccacaggattaccaaaaataaagctaaaacagattgtatgtgtatttcagtgtagagaaatgtaagagcacaaatgaggagtgagaaggtctctagtcttcattgtgccattaataataaaaactctcatggcaacatttattagggattgctgttttccaggcatggtgctaagggtttcccaagtaccctcttgtttgatccttacagcaactctatgcagcagatcatactatctttcctctttggaagaggaagacactggaaaatactcagcaaggtcagacttggcccaaggtcaccca

SEQ ID NO: 544868 - DNA, 623 bp, Homo sapiens
gctgagtgcttctggcttcgggtctcatgtgtttgtagtcggatgttggctggggctgcagtcatctgtaggcttaacaaaggctagaggatttacttccatggggctcactggcatagctgacaagttggtcctggctgttagcttggagcctcagttctaycccatgtaggggcctctcttgggctacttaagtgtccccatagcatggtggccagcttcccccagagcaagcaaccagagagagagaaaacatccttgccatttatgacccaacataggaagtcatcaatgtcgttttccttggattctcttggaacaggagttacaaagtcagtctagatgcaagtggaagaaatataaaccttacctctcaaaggaggtttgtcagcatttacatgataagaagagcacacagaatgaaatatgtactggcacaaacatctttggcaaaaaaaaaaaaaaaaaacaatttgccgcaacctccctcacagaagcctgggagatggttaaggcaaatattttagtctttcttcatcaagagggagcactttaaaatgtgttatcaaaaagcagcccaataggtctgggttcaaatcctctcttaatattttattttctga

SEQ ID NO: 544869 - DNA, 623 bp, Homo sapiens
gctgagtgcttctggcttcgggtctcatgtgtttgtagtcggatgttggctggggctgcagtcatctgtaggcttaacaaaggctagaggatttacttccatggggctcactggcatagctgacaagttggtcctggctgttagcttggagcctcagttctatcccatgtaggggcctctcttgggctacttaagtgtccccatagcatggtggccagcttcccccagagcaagcaaccagagagagagaaaacatccttgccatttatgacccaacataggaagtcatcaatgtcgttttccttggattctcttggaacaggagttacaaagtcagtctagatgcaagtggaagaaatataaaccttacctctcaaaggaggtttgtcagcatttacatgataagaagagcacacagaatgaaatatgtactggcacaaacatctttggcaaaaaaaaaaaaaaaaaacaatttgccrcaacctccctcacagaagcctgggagatggttaaggcaaatattttagtctttcttcatcaagagggagcactttaaaatgtgttatcaaaaagcagcccaataggtctgggttcaaatcctctcttaatattttattttctga

SEQ ID NO: 544870 - DNA, 538 bp, Homo sapiens
cactagtgagactcattctgctcagcttttaactctgtttccagtggcgaatataatctctcagtcaacacttggccaaatgactcatttgcagtcagcaaccagatatattcttgtgcataaacatatttatgtattttggaaaaactctgagcccatccaattctatgactatgatatttgcaccaatcctggcttactgttttaccactttccagaacaaaccccctttgtatgtgttgctgtatccaaacatcactagctagtgctgtactcactcctgtatccaaacatgactagcaggyaccattccttcttccccaagtaactttcattctttttcacctttcctcaaccccatatccttcctccccaattttatgattttcacctgttcttagaggctcagatcttatccaaaaccttcctgaagcttcttctgcccatcagagcctaataggacctctttctcctcattttattaggcattcaccatatttggacttgtgttctcatttatcttttttaaaaatgtgtt

SEQ ID NO: 544871 - DNA, 320 bp, Homo sapiens
gggtcttgcaatgtatcctccttggatagaggaggactactatatatgagttttatcatgtaaacartacattagtactttcttaaatttattttatgaacagggatcaaaagtattctgtcttgagatttaaaattgcatgaccttagagctgggaaagaaatttagagaacatctaatccaacttcctactttccacccactctggctaagctttctaggattatcctccaacctctggtcttctcttaaatgctgtgagtttgcaactttccaaaggtttgttttgttttgttttgttttggccactatttcatggc

SEQ ID NO: 544872 - DNA, 508 bp, Homo sapiens
acatgctgggcattgggaggccagcctaaggattttaaatttgctgaggacagacccrtatgggtcatggccacatggctgttaaggccagctcttctgccaccagggctggcctgagacctccagtatcccccctggtctgcctgttcacgtagttcacacaaggagaatgagaggccaatcacacccacaccgccccgtgcccagctctgtccttgacttgcaatgacaaatggcttcagcagatggaccacacagctctttctcattgttctgagatggaactagcctcagatagggtgaataataagcagttactaaattaatacaacatggtctgcctcctttacccccagtgccagggatgtgttgtggttaatgacttttgcacctgctgagtgtaattagtaattcacatgggtgtgttattactgggtaaacacatgatatttaccaataacttcctgctaggtaagcaccaatgaacactaacaggtagctattagga

SEQ ID NO: 544873 - DNA, 508 bp, Homo sapiens
acatgctgggcattgggaggccagcctaaggattttaaatttgctgaggacagacccgtatgggtcatggccacatggctgttaargccagctcttctgccaccagggctggcctgagacctccagtatcccccctggtctgcctgttcacgtagttcacacaaggagaatgagaggccaatcacacccacaccgccccgtgcccagctctgtccttgacttgcaatgacaaatggcttcagcagatggaccacacagctctttctcattgttctgagatggaactagcctcagatagggtgaataataagcagttactaaattaatacaacatggtctgcctcctttacccccagtgccagggatgtgttgtggttaatgacttttgcacctgctgagtgtaattagtaattcacatgggtgtgttattactgggtaaacacatgatatttaccaataacttcctgctaggtaagcaccaatgaacactaacaggtagctattagga

SEQ ID NO: 544874 - DNA, 395 bp, Homo sapiens
aataaaaaaactaaggcacaaagggcctatgagagtttccagcaaccaccaaggccatccttatgaggaatggcttactagaattggtctgcatccaggagctcaatcatactagcacacctgttgaacgatggatagagatayagggtaagcaaaggtgaaatgtctccagtcagtacccatccaattagtactcaactcagggcccctagaaaacactgtgctttcacttcataacagtagccagaaacgatgaaacaaaacaaaacaaaaaaacactgggcaaattgtcatgagtagctaaggatccatttcatttagcaaatagtgttggtcccaggaaaaagcaccaagcctgggaatccctgccacaatgacagaatcacattcaacag

SEQ ID NO: 544875 - DNA, 579 bp, Homo sapiens
actctgctccagtggagaggcccgtaacagaaagactccaggccttggaatcaggtagacctggaaactagtcccaggctggtttcttctctgtcaaatggaagggaaaactgtgcctgcagtgagaactgagccagataatacatgtcaagtcccagaacagagtatagctcagggttcctaaaccaggggcaattcctcccccacaggggacatttgactttgggggacatctggaggcatttttggttgctacatctggcaacaggggaaccaccggcatctggtaggtagagactttggacacggctaaacatccaccaaggcacaggccccacaacaagaatgatccagccccaaatttccatagtgctgtggttgggaaactcttgtctagcccaacaagaagaaaaaaaaaaaaaaawatatatatatatatatatatatttttttatttatagctcctcactcccctatgctatgatccccccagaatacatattaaaaggaataccttgaagcagagctatccagccccaggacggcctgtagctgctggctggagggattaagctcgct

SEQ ID NO: 544876 - DNA, 466 bp, Homo sapiens
aatcggaatcacatctctactgtagagaagccgagtgaacatttccagttagtgtcagggacagtgccagcacccaggcagctctatgcctaccccgtgtgctttccactgccactgttaccttacattcctactgcggacacccactacctcctgcaaacacatcctgcttccggctggtccctcccactgccctgcctgctccgctgggaggagcacatccctggtgcctcacaggatgggggcctgcaatgcctccctgactccaggtgtatgtctgaggaggtaacaccctcttcactattcatcacataacaaaaaactctttgggaaaaaataaattaaatccagaccaaaaaaaaaaaaaaaaaaaacagyaacaacaaaacgcaaccctttcctccaagttaattaatttgagcactattttcaggaaaagcgtttcttaaatccctatcgctgaagg

SEQ ID NO: 544877 - DNA, 528 bp, Homo sapiens
tgcaatcggaatcacatctctactgtagagaagccgagtgaacatttccagttagtgtcagggacagtgccagcacccaggcagctctatgcctaccccgtgtgctttccactgccactgttaccttacattcctactgcggacacccactacctcctgcaaacacatcctgcttccggctggtccctcccactgccctgcctgctccgctgggaggagcacatccctggtgcctcacaggatgggggcctgcaatgcctccctgactccaggtgtatgtctgaggaggtaacaccctcttcactattcatcacataacaaaaaactctttgggaaaaaataaattaaatccagaccaaaaaaaaaaaaaaaaaaaacagcaacaacaaaacgcaaccctttcctccaagttaattaatttgagcactattttcaggaaaagcgtttcttaaatccctatcgctgaaggcaattttcttgccacaatcamtccgtgttcctgacagaaaggagcataatcactccttg

SEQ ID NO: 544878 - DNA, 512 bp, Homo sapiens
ctgccatggagcaagctgaaagctgaaagcgatgacacctatatcctactctcccctcaaccatgaaatgctccttatctcttggctctcaatcatcattcaaaatatattttataacatatttcctcaaagagaatttccctggaatcctccagtctagattaggtcatctgtgtgtttctctcgtgacatttatcaaaactgtaatgaggtagacttgtgtgtgtttgtttgtgtaccatccaacaggctagggcacagagggcaggaaccccgtgtctcttgtccctactctatcctcagacctagtgctgtccctggcttaaggtagatrctcattaaacacttgggaataaagaaacaaggacagaaagtgttatctctcttggaaataatgccaaagtcaatacttaatatcaaaaagttaaaaactacttgatccataggaaaactacttagtccccttgatttgccccatacatagggaacttttacttaaatagaagtgactt

SEQ ID NO: 544879 - DNA, 692 bp, Homo sapiens
ggactgtaggcacacaccaccatgcccagctaattttttgatttttgttttttgtagagacggggtctcagtatgttgcccagcctgatctcaaactcctggcctcaggtgatcctccsaagtcagcctccccaaagtgctgggattacaggcatgtgccaccatgctggccaatttttaaaaattttctgtagagacagggtcttgctatgttgcccaggctggtcttgaactcttgacctcaagtgatcctgcctcaggctcccaaagtgatgggattacaggcatgaactaccacacctggccttaaacttaagcaaatttttttttttttttggagacagtttcactctgtcgcccaggctggagtaaagtggcgtgatctctgctcactgcaacctccgccccccgggtttaagctattctcctgcctcagcctcccgagtagctgggatataggcgcctgccaccacgcctgactaatttttgtatttttagtagagacggggttttgccatgttggccaggctggtctcgaactcctgacctcaggcaatccgctcccccgcacccctaccttggcctcccaaagtgttaggactacaggtgtgagccaccatgcctggccaaatttaagcaaatgtttgaaaacacatacccacaggaatgctgcacattttacccagctacta

SEQ ID NO: 544880 - DNA, 630 bp, Homo sapiens
gttgcgctccaatcatgttacataacctacgsgaaggtatcgacaggatcatactcctgtaaaatagaactttgttgatcacatcctgtgtacttgtttcacggacatgaggagcaattacaacaggtcgtacaattatggcaaaataatggccttattttgtttttagcttcagcgagaacccagacctttcccaaagctcaggattcttcgaaaagttgagaaaattgatgacttcaaagctgaagactttcagattgaagggtacaatccgcatccaactattaaaatggaaatggctgtttagggtgctttcaaaggagctcgaaggatattgtcagtctttaggggttgggctggatgccgaggtaaaagttctttttgctctaaaagaaaaaggaactaggtcaaaaatctgtccgtgacctatcagttattaatttttaaggatgttgccactggcaaatgtaactgtgccagttctttccataataaaaggctttgagttaactcactgagggtatctgacaatgctgaggttatgaacaaagtgaggagaatgaaatgtatgtgctcttagcaaaaacatgtatgtgcatttcaatcccacgtacttataaagaaggttgg

SEQ ID NO: 544881 - DNA, 630 bp, Homo sapiens
gttgcgctccaatcatgttacataacctacgcsaaggtatcgacaggatcatactcctgtaaaatagaactttgttgatcacatcctgtgtacttgtttcacggacatgaggagcaattacaacaggtcgtacaattatggcaaaataatggccttattttgtttttagcttcagcgagaacccagacctttcccaaagctcaggattcttcgaaaagttgagaaaattgatgacttcaaagctgaagactttcagattgaagggtacaatccgcatccaactattaaaatggaaatggctgtttagggtgctttcaaaggagctcgaaggatattgtcagtctttaggggttgggctggatgccgaggtaaaagttctttttgctctaaaagaaaaaggaactaggtcaaaaatctgtccgtgacctatcagttattaatttttaaggatgttgccactggcaaatgtaactgtgccagttctttccataataaaaggctttgagttaactcactgagggtatctgacaatgctgaggttatgaacaaagtgaggagaatgaaatgtatgtgctcttagcaaaaacatgtatgtgcatttcaatcccacgtacttataaagaaggttgg

SEQ ID NO: 544882 - DNA, 501 bp, Homo sapiens
tggtagggtcttggacaagaagaaagacatcacttctgctcacattctcttttgacaaaactcagtcacatggtcccaatatatcttcgaggtggctgagtaatgttatcttcctatgtgtcaagcagaggaaataatgtagtgaagacacaggatggtctctgaaatatcatctcaggcatgaaagtagagcatattcacttgagtgagcctccagtggtgtgaagttgatggcaggagaaagagctggggaagaaaaggccagtggcaggtctcccctcctagccctatgcagccccacagtgggacccttgcatggacctcaaccatcagaatcttttcttttgcaggtcgttactctctgacctatatctacactgggctgtccaagcatgttgaagacgtccccgcgtttcargcccttggctcactcaatgacctccagttctttagatacaacagtaaagacaggaagtctcagcccatgggactctggagaca

SEQ ID NO: 544883 - DNA, 614 bp, Homo sapiens
  misc_feature (1)...(614): n = A,T,C or G
cacattttctaaccaaacataagaccaaccaaactctttattataattatttgaccagcactaaagatgtacctacccctccacaacagatgaaactgtgccagccaaacaacaaatgggcattgtccccagaagcttggacaaaaaggcacacagagttcaattccagttgaacagaataaaggccaaaatagagctgccttgggggtcactgcaattasactgcttaatgaagacattaaaagaagtatnctgtgtncgtttgtgtgtggaggggtgtgtgtgtctgtttttcaactgatttgaaaatacaggtgttgaatcctaataataaaccagaaaaattaacatctccagagaagatagaggtcatactatttgaggcaagaattagcgtctttttaataaacgaaaatatggcaaagatgcatnttagaaggcacgtggagctataacaatttaagaaatacgtgaagagctcaaggctcagccttctagaatcccagaaacttaaagctagtaaaaaattggggaagtctctaaggatatatgcctgaaaatacacactggttatctgtgagtgttaggattactgggtggtttttagtctatca

SEQ ID NO: 544884 - DNA, 614 bp, Homo sapiens
  misc_feature (1)...(614): n = A,T,C or G
cacattttctaaccaaacataagaccaaccaaactctttattataattatttgaccagcactaaagatgtacctacccctccacaacagatgaaactgtgccagccaaacaacaaatgggcattgtccccagaagcttggacaaaaaggcacacagagttcaattccagttgaacagaataaaggccaaaatagagctgccttgggggtcactgcaattacactgcttaatgaagacattaaaagaagtatnctgtgtncgtttgtgtgtggaggggtgtgtgtgtctgtttttcaactgatttgaaaatacaggtgttgaatcctaataataaaccagaaaaattaacatctccagagaagatagaggtcatactatttgaggcaagaattagcgtctttttaataaaygaaaatatggcaaagatgcatnttagaaggcacgtggagctataacaatttaagaaatacgtgaagagctcaaggctcagccttctagaatcccagaaacttaaagctagtaaaaaattggggaagtctctaaggatatatgcctgaaaatacacactggttatctgtgagtgttaggattactgggtggtttttagtctatca

SEQ ID NO: 544885 - DNA, 628 bp, Homo sapiens
aaacacaattctactttttgaaatcctggatcacttattttcagattaaaataaatggaaaacaccaattatttaaaaaaaataatggtcatgttttgaagttaaatacctaagaggaattgtagttgcaaattacactgaatccttagtcacagagaatctggatttgacataggsttgccgtttactattctctttactttttaactaacaattcacttcctctttatgtaggtttcaatataatgaaacctacctcataggtttcattacatatgtaagtgatgtagttattaaactaaatgagatgacatatgtgaaaggccttggtaaagtactatacaaagtaacatgctagtattatttcagccagatttagacaatttttagtataagatgacctaaaagctagagagtggaaaaggattaccatattcccatccctagccgttcatataattattcttcatttgtgccgtgattcagtaccctgatgctacagacgaggacatcacctcacacatggaaagcgaggagttgaatggtgcatacaaggccatccccgttgcccaggacctgaacgcgccttctgattgggacagccgtgggaaggacagttatgaaacga

SEQ ID NO: 544886 - DNA, 578 bp, Homo sapiens
gttagggactgaggtgggatgggaacttgtgtccttggacttaattcttaggctccttatactatacacactgtccaggacaaggtccttgctcttgaaggactctaagtatgtgtggacagtaaagaacaggatgatgccctaagatgttatcaaatgagtcctcagtagagtgaaacatctagaattctagagttctatcrctcagggaagggatcgaagggagctgtgggagctgggggagagttcgaggaggaaatgaatatttagtagctttctaagaactggcaggttttggaaggtcatgtctttatagagagtgcctttctatcaggggacacagcattgctcaaagacataaatgcagaaaggaacagggcatgcttcagagcagtgagatgaggagagatgagataatccatgaggccgatgaaccaccagggctgcttctgagttctgatggggggcccttcctgcccactcagctcctccttacatccggttttgattgtgggctcagggcttagcctggaggtcggcctcccatacgcttggtctgggctctcctctctaccgtc

SEQ ID NO: 544887 - DNA, 579 bp, Homo sapiens
ggcctggtgattcaaatccacccaggtggctaaactacaaataaaccgtacccatctactgaacataaactaaataccactattaaggatacttaaaataaacacacttagtgaacccattatgaactgaaagtgtctttcacccttcccacgttttctaaatcccctgagtcatctaagtattcttcaatccaaaatgaactatatttcctttggtgcaatctccagaaaccacagatccaaggagtttcagcaagtagagttgttttttgttttttgttttttttttaatttttttttgagatgggaagaacttgggtcctccttgctccacccaccctgcatggtgagaatggtggagcaggaaaggcaaaggggacctgatggagtgtctctcctgccagggctccctccttccggctgccacccgatcccagcttgccctgcatcctggtgggtccaggcactggcattgcccccttccggggattctggcaggagcggctgcatgacattgagagcaaaggtgaggctggkgactaaaggactgcctgaagggagtcacacaatctagggaca

SEQ ID NO: 544888 - DNA, 282 bp, Homo sapiens
aatcaaggagaaaactggtatgtgggcsccccccggattgctcaactctgggaacagaaccctgttcattatagggctagagtgtgacaacttggggccctgaggaaagtaaggagtcagggggactggggaaggaaccaaagcctgggaacttggctctccaggaagcaccaggaggactgagcactgggtattggggtctctgggtccctaagtccactcgcctgcatgctaggcctcagcattcggagctcccaggaggaggagccggtggacccacag

SEQ ID NO: 544889 - DNA, 510 bp, Homo sapiens
actgttcatcggctgagagggcgtaggaattatatccttcttgctcatcagttgatgatacgcccgagcagatgccaacacagcagccattcaagcaatcctatacaaccgtatcggcgatatcggtttcatcctcgccttagcatgatttatcctacactccaactcatgagacccacaacaaatagcccttctaaacgctaatccaagcctcmccccactactaggcctcctcctagcagcagcaggcaaatcagcccaattaggtctccacccctgactcccctcagccatagaaggccccaccccagtctcagccctactccactcaagcactatagttgtagcaggagtcttcttactcatccgcttccaccccctagcagaaaatagcccactaatccaaactctaacactatgcttaggcgctatcaccactctgttcgcagcagtctgcgcccttacacaaaatgacatcaaaaaaatcgtagccttctccacttcaagtca

SEQ ID NO: 544890 - DNA, 510 bp, Homo sapiens
actgttcatcggctgagagggcgtaggaattatatccttcttgctcatcagttgatgatacgcccgagcagatgccaacacagcagccattcaagcaatcctatacaaccgtatcggcgatatcggtttcatcctcgccttagcatgatttatcctacactccaactcatgagacccacaacaaatagcccttctaaacgctaatccaagcctccccccactactaggcctcctcctagcagcagcaggcaaatcagcccaattaggtctccacccctgactcccctcagccatagaaggccccaccccagtctcagccctactccactcaagcactatagttgtagcaggartcttcttactcatccgcttccaccccctagcagaaaatagcccactaatccaaactctaacactatgcttaggcgctatcaccactctgttcgcagcagtctgcgcccttacacaaaatgacatcaaaaaaatcgtagccttctccacttcaagtca

SEQ ID NO: 544891 - DNA, 415 bp, Homo sapiens
cagcaatcaaccttcaactgtcacacatcaactgcaactccaaagccacccctcacccactaggataccaacaaacctacccacccttaacagtacatagcacataaagtcatttaccgtacatagcacattacagtcaaatcccttctcgtccccatggatgacccccctcagataggggtcccttgaccaccatcctccgtgaaatcaatatcccgcacaagagtgctactctcctcgctccgggcccataacacttgggggtagctaaagtgaactgtatccgacatctggttcctacttcagggycataaagcctaaatagcccacacgttccccttaaataagacatcacgatggatcacaggtctatcaccctattaaccactcacgggagctctccatgcatttggta

SEQ ID NO: 544892 - DNA, 608 bp, Homo sapiens
taaaaaactccagttgacacaaaataractacgaaagtggctttaacatatctgaatacacaatagctaagacccaaactgggattagataccccactatgcttagccctaaacctcaacagttaaatcaacaaaactgctcgccagaacactacgagccacagcttaaaactcaaaggacctggcggtgcttcatatccctctagaggagcctgttctgtaatcgataaaccccgatcaacctcaccacctcttgctcagcctatataccgccatcttcagcaaaccctgatgaaggctacaaagtaagcgcaagtacccacgtaaagacgttaggtcaaggtgtagcccatgaggtggcaagaaatgggctacattttctaccccagaaaactacgatagcccttatgaaacttaagggtcgaaggtggatttagcagtaaactgagagtagagtgcttagttgaacagggccctgaagcgcgtacacaccgcccgtcaccctcctcaagtatacttcaaaggacatttaactaaaacccctacgcatttatatagaggagacaagtcgtaacatggtaagtgtactggaaagtgcacttggacga

SEQ ID NO: 544893 - DNA, 608 bp, Homo sapiens
taaaaaactccagttgacacaaaataaactacgaaagtggctttaacatatctgaayacacaatagctaagacccaaactgggattagataccccactatgcttagccctaaacctcaacagttaaatcaacaaaactgctcgccagaacactacgagccacagcttaaaactcaaaggacctggcggtgcttcatatccctctagaggagcctgttctgtaatcgataaaccccgatcaacctcaccacctcttgctcagcctatataccgccatcttcagcaaaccctgatgaaggctacaaagtaagcgcaagtacccacgtaaagacgttaggtcaaggtgtagcccatgaggtggcaagaaatgggctacattttctaccccagaaaactacgatagcccttatgaaacttaagggtcgaaggtggatttagcagtaaactgagagtagagtgcttagttgaacagggccctgaagcgcgtacacaccgcccgtcaccctcctcaagtatacttcaaaggacatttaactaaaacccctacgcatttatatagaggagacaagtcgtaacatggtaagtgtactggaaagtgcacttggacga

SEQ ID NO: 544894 - DNA, 346 bp, Homo sapiens
ggcctgcccccgctaaccggctttttgcccaaatgggccattatcgaagaattcacaaaaaacaatagcctcatcatccccaccatcatagccaccatcaccctccttaacctctacttctacctacgcctaatctactccacctcaatcacactactccccatatctaacaacgtaaaaataaaatgacagtttgaacatacaaaacccaccccaytcctccccacactcatcacccttaccacgctactcctacctatctccccttttatactaataatcttatagaaatttaggttaaatacagaccaagagccttcaaagccctcagtaagttgcaatactt

SEQ ID NO: 544895 - DNA, 209 bp, Homo sapiens
aacaacgtaaaaataaaatgacagtttgaacatacaaaacccaccccactcctccccacactcatcrcccttaccacgctactcctacctatctccccttttatactaataatcttatagaaatttaggttaaatacagaccaagagccttcaaagccctcagtaagttgcaatacttaatttctgtgacagctaaggactgcaaaacc

SEQ ID NO: 544896 - DNA, 495 bp, Homo sapiens
tctgtgacagctaaggactgcaaaacctcactctgcatcaactgaacgcaaatcagccactttaattaagctaagcccttactagaccaatgggacttaaacccacaaacacttagttaacagctaagcaccctartcaactggcttcaatctacttctcccgccgccgggaaaaaaggcgggagaagccccggcaggtttgaagctgcttcttcgaatttgcaattcaatatgaaaatcacctcggagctggtaaaaagaggcctaacccctgtctttagatttacagtccaatgcttcactcagccattttacctcacccccactgatgttcgccgaccgttgactattctctacaaaccacaaagacattggaacactatacctattattcggcgcatgagctggagtcctaggcacagctctaagcctccttattcgagccgagctgggccagccaggcaaccttctaggtaacgaccacatctacaacgt

SEQ ID NO: 544897 - DNA, 412 bp, Homo sapiens
tccccctctattgatccccacctccaaatatctcatcaacaaccgactaattaccacccaacaatgactaatcaaactaacctcaaaacaaatgatarccatacacaacactaaaggacgaacctgatctcttatactagtatccttaatcatttttattgccacaactaacctcctcggactcctgcctcactcatttacaccaaccacccaactatctataaacctagccatggccatccccttatgagcgggcgcagtgattataggctttcgctctaagattaaaaatgccctagcccacttcttaccacaaggcacacctacaccccttatccccatactagttattatcgaaaccatcagcctactcattcaaccaatagccctggccgtacgcctaaccgctaac

SEQ ID NO: 544898 - DNA, 412 bp, Homo sapiens
tccccctctattgatccccacctccaaatatctcatcaacaaccgactaattaccacccaacaatgactaatcaaactaacctcaaaacaaatgatagccatacacaacactaaaggacgaacctgatctcttatactagtatccttaatcatttttattgccacaactaacctcctcggactcctgcctcactcatttacaccaaccacccaactatctataaayctagccatggccatccccttatgagcgggcgcagtgattataggctttcgctctaagattaaaaatgccctagcccacttcttaccacaaggcacacctacaccccttatccccatactagttattatcgaaaccatcagcctactcattcaaccaatagccctggccgtacgcctaaccgctaac

SEQ ID NO: 544899 - DNA, 433 bp, Homo sapiens
ttgacggatattgcagttcaaatcccagcgctktctgctgcagagttccatcttgctcagagaaggtcaatgttttgttcaatttacaccttcaatgaattgaatgaagcccacccacattatagagatcaatctactttactcaaagtctagttattttgcattaatgttatccaagaaacattctcacaaatcatccagaataatgcttgatcacctatctgggcactgtggttcagccaagatgacaaataaaattaattatgacattcttcaatttaagaatattctgaggaaattagcctttgtcctaataaaacaaggaacaaacaactgtttctaaaaattttcaaccaacagtcaaaaagccattcctatagattgttgctcaagttcattctataactgtgggtgaaaaaaacatgtatttgtt

SEQ ID NO: 544900 - DNA, 433 bp, Homo sapiens
ttgacggatattgcagttcaaatcccagcgctgtctgctgcagagttccatcttgctcagagaaggtcaatgttttgttyaatttacaccttcaatgaattgaatgaagcccacccacattatagagatcaatctactttactcaaagtctagttattttgcattaatgttatccaagaaacattctcacaaatcatccagaataatgcttgatcacctatctgggcactgtggttcagccaagatgacaaataaaattaattatgacattcttcaatttaagaatattctgaggaaattagcctttgtcctaataaaacaaggaacaaacaactgtttctaaaaattttcaaccaacagtcaaaaagccattcctatagattgttgctcaagttcattctataactgtgggtgaaaaaaacatgtatttgtt

SEQ ID NO: 544901 - DNA, 433 bp, Homo sapiens
ttgacggatattgcagttcaaatcccagcgctgtctgctgcagagttccatcttgctcagagaaggtcaatgttttgttcaatttacaccttcaatgaattgaatgaagcccacccacattatagagatcaatctactttactcaaagtctagttattttgcattaatgttatccaagaaacattctcacaaatcatccagaataatgcttgatcacctatctgggcaytgtggttcagccaagatgacaaataaaattaattatgacattcttcaatttaagaatattctgaggaaattagcctttgtcctaataaaacaaggaacaaacaactgtttctaaaaattttcaaccaacagtcaaaaagccattcctatagattgttgctcaagttcattctataactgtgggtgaaaaaaacatgtatttgtt

SEQ ID NO: 544902 - DNA, 433 bp, Homo sapiens
ttgacggatattgcagttcaaatcccagcgctgtctgctgcagagttccatcttgctcagagaaggtcaatgttttgttcaatttacaccttcaatgaattgaatgaagcccacccacattatagagatcaatctactttactcaaagtctagttattttgcattaatgttatccaagaaacattctcacaaatcatccagaataatgcttgatcacctatctgggcactgtggttcagccaagatgacaaataaaattaattatgacattcttcaatttaagaatattctgaggaaattagcctttgtcctaataaaacaagraacaaacaactgtttctaaaaattttcaaccaacagtcaaaaagccattcctatagattgttgctcaagttcattctataactgtgggtgaaaaaaacatgtatttgtt

SEQ ID NO: 544903 - DNA, 551 bp, Homo sapiens
aaaaatacaaaaaaattagccgggcatagtggcacaagcctatagttccagctacttgggaggctgaggtaggtgaattgcttgaacacagtggggagaggttgcagtaagcagagatcrtgcaattgcattccagcctgggcaacaagagtgaaactccatctcaaaaaaaaaaaaatcctaaactaatgtttctctctgcatttaccccttagtactggggcaacactcactgcatctcagtaaggatgaaatgtgttttcatttattctcactagaatggatgtgtttatccatgactcacagatgaattaacaagcaccaggacttggagagattctcctgaggtcacagccgttgagtggtggagcagtgacaagcacctggcacccttggtctagtccagtattctgggtgccacaagaattgcagaattgcaaccttgatttttatacatttggttattttctctttttttatttccttttttgttgttgttgttgttgttgttgtcgagacagggtctcactctatcacaggctggagtgcag

SEQ ID NO: 544904 - DNA, 516 bp, Homo sapiens
atagttccagctacttgggaggctgaggtaggtgaattgcttgaacacagtggggagaggttgcagtaagcagagatcatgcaattgcattccagcctgggcaacaagagtgaaactccatctcaaaaaaaaaaaaatcctaaactaatgtttctctctgcatttaccccttagtactggggcaacactcactgcatctcagtaaggatgaaatgtgttytcatttattctcactagaatggatgtgtttatccatgactcacagatgaattaacaagcaccaggacttggagagattctcctgaggtcacagccgttgagtggtggagcagtgacaagcacctggcacccttggtctagtccagtattctgggtgccacaagaattgcagaattgcaaccttgatttttatacatttggttattttctctttttttatttccttttttgttgttgttgttgttgttgttgtcgagacagggtctcactctatcacaggctggagtgcagtggcac

SEQ ID NO: 544905 - DNA, 551 bp, Homo sapiens
aaaaatacaaaaaaattagccgggcatagtggcacaagcctatagttccagctacttgggaggctgaggtaggtgaattgcttgaacacagtggggagaggttgcagtaagcagagatcatgcaattgcattccagcctgggcaacaagagtgaaactccatctcaaaaaaaaaaaaatcctaaactaatgtttctctctgcatttaccccttagtactggggcaacactcactgcatctcagtaaggatgaaatgtgttttcatttattctcactagaatggatgtgtttatccatgactcacagatgaattaacaagcaccaggacttggagagattctcctgaggtcacagccgttgagtggtggagcagtgacaagcacctggcacccttggtctagtccagtattctgggtgccacaagaattgcagaattgcaaccttgatttttayacatttggttattttctctttttttatttccttttttgttgttgttgttgttgttgttgtcgagacagggtctcactctatcacaggctggagtgcag

SEQ ID NO: 544906 - DNA, 516 bp, Homo sapiens
atagttccagctacttgggaggctgaggtaggtgaattgcttgaacacagtggggagaggttgcagtaagcagagatcatgcaattgcattccagcctgggcaacaagagtgaaactccatctcaaaaaaaaaaaaatcctaaactaatgtttctctctgcatttaccccttagtactggggcaacactcactgcatctcagtaaggatgaaatgtgttttcatttattctcactagaatggatgtgtttatccatgactcacagatgaattaacaagcaccaggacttggagagattctcctgaggtcacagccgttgagtggtggagcagtgacaagcacctggcacccttggtctagtccagtattctgggtgccacaagaattgcagaattgcaaccttgatttttatacatttggttattttctctttttttatttcctttkttgttgttgttgttgttgttgttgtcgagacagggtctcactctatcacaggctggagtgcagtggcac

SEQ ID NO: 544907 - DNA, 505 bp, Homo sapiens
ctggctggatatcactgctagcagaagttaatgaggctgcaggccaatggtgtgcagccgaggatttgctgagtgcattcctttccagctagaaagtggatatggagttattcacattcataccacatttatttacastttccctgagagctattataactcttctgtcatctgtaacatagtcttaagagatgccggacattctacagaatattaaatctgttcatttcattggcaacatcatagattgggatggatgagaaagaaggtggaaagtatgctggaggtcttggtaaaacacatgcaccccagaaagaggaggataaatcttacagaaatttaggagtggcaactgcagtgaaattttatgggtccagtggctaggtgcatgcagagatatttcttccaagtaaaaacaaaagaaaacagaaaaaaaaacccgttgcatctttcatcttcagtgagaaaaaaaaaaaaaagagagagaagcggactgcctggtgaa

SEQ ID NO: 544908 - DNA, 588 bp, Homo sapiens
ccatgcctggttaatttttgtatttgtrgtagagatggggttcaccatgttggccaggctggtctcaagctcctgacctcaagtgatctgcctgcctcggactcccaaagcgttggtattacaggcatcagccactgcacccagccaagaaatacatgattttaaatgaggtgcatttaatatcttcctcactgtaatggtgatgcttgctcattctacaaaatacagaaaaacaaaaacaataagacaagagactttagtccccaacccagagaaacctttagttactgtatggggcattttccctcgtcttttttactacttattttttcaacaagctgcattttgaaatatagattgtttcactattaagaacagtatgtactcaaaatttttagaaaaaaccttcacgcctccggctcacatcacagtgacctttcagggtcacagagcccttgagaatctcgggttttaaaaatcattttaactatgcagacgatactcaaaattacagcttttcttcagattttagagaaacctcttctgtgggggcaagaatgaatttcatccccttggttattaattaat

SEQ ID NO: 544909 - DNA, 588 bp, Homo sapiens
ccatgcctggttaatttttgtatttgtagtagagatggggttcaccatgttggccaggctggtctcaagctcctgacctcaagtgatctgcctgcctcggactcccaaagcgttggtattacaggcatcagccactgcacccagccaagaaatacatgattttaaatgaggtgcatttaatatcttcctcactgtaatggtgatgcttgctcattctacaaaatacagaaaaacaaaaacaataagacaagagactttagtccccaacccagagaaacctttagttactgtatggggcattttccctcgtcttttttactacttattttttcaacaagctgcattttgaaatatagattgtttcactattaagaacagtatgtactcaaaatttttagaaaaaaccttcaygcctccggctcacatcacagtgacctttcagggtcacagagcccttgagaatctcgggttttaaaaatcattttaactatgcagacgatactcaaaattacagcttttcttcagattttagagaaacctcttctgtgggggcaagaatgaatttcatccccttggttattaattaat

SEQ ID NO: 544910 - DNA, 595 bp, Homo sapiens
cgaaaccccgagcttttacaacataaagcgcatggtgtggccgcggcgggtaatggcgctctgggagccctgcccaggcggcctctgctcgccctcctccacttccagctccgagctgggtgtgttgcaagtttcatactcctacatattataagtgacactaatatcagggacaactaagtgctggggaacttcaatgaaaacctggctggtaaagtcaacacccccagacttctctgtgctacatttctttaattaattccggagtggtgtgtggacgggcgtctttgcagttattatacacgtaagtgaattaggccatttgaagctacgaagtcatacccaacattttccattaagaatattatttttttagctactgctggcaacttttagaatttaattatgataattttcctcttttcctcattatcccagatatggctggttgtgagatactttttcactaaatgtgtctytttaatgattttggaattaagcaagtatgccaaatgcgccaagacatttataactttagaaattgctgtatagtatatatttttggaacaccacaggtttagttgggaaaatattt

SEQ ID NO: 544911 - DNA, 595 bp, Homo sapiens
cgaaaccccgagcttttacaacataaagcgcatggtgtggccgcggcgggtaatggcgctctgggagccctgcccaggcggcctctgctcgccctcctccacttccagctccgagctgggtgtgttgcaagtttcatactcctacatattataagtgacactaatatcagggacaactaagtgctggggaacttcaatgaaaacctggctggtaaagtcaacacccccagacttctctgtgctacatttctttaattaattccggagtggtgtgtggacgggcgtctttgcagttattatacacgtaagtgaattaggccatttgaagctacgaagtcatacccaacattttccattaagaatattatttttttagctactgctggcaacttttagaatttaattatgataattttcctcttttcctcattatcccagatatggctggttgtgagatactttttcactaaatgtgtctttttaatgattttggaattaagcaagyatgccaaatgcgccaagacatttataactttagaaattgctgtatagtatatatttttggaacaccacaggtttagttgggaaaatattt

SEQ ID NO: 544912 - DNA, 307 bp, Homo sapiens
ggaaaccagggagggtcacctggtcccaggccattcaggagaaggtttttgaagtaagggatttcgaggagctggagtgggcagaggaccatctctgggctgagaatctgatgctatgtccagcctcacgctccctcccacccctcagactctgatggacttatgtgcccagargccctgcccacgcaattcccactgcctccagactgggccctccttccactgcttgtgcctccagggatggaccgggcctctctgcaaccttccactgtcctcctgccagaaggctgcactgagccaaggtaac

SEQ ID NO: 544913 - DNA, 529 bp, Homo sapiens
aaatatttacacaggtccaggggaagtaaagagtaaatatggccaccaggcgcggtggctcacgcctgtaatcccagcactttggcggctgaggcgggtggatcacgaggtcaggagatcgagaccatcctggctaacacggtgaaaccccgtctctactaaaaaatacaaaaaaattagccaggcgtggtggcgggcacctgtagtcccagctacttgggaagctgaggcaggagaatggtgtgaacccgggaggcggagcttgcagtgagccgagataatgccactgcactctagcctgggcracagggtgagactgtctcaaaaaaaaaaaaaaaagagtaaatatggcctgatgtgaaaaaaaattataaccaccagaatttcctaaaatgtattttattgatctatagtgttattgcacaacatccacaaatatctatgatgacaattgtttaaaattcaagttaaaatacaaaatttaaaaaagtttacctacttttacgttgttaatttatgactctttggg

SEQ ID NO: 544914 - DNA, 467 bp, Homo sapiens
agtctaagatgaaagtttactagcctgcaaaatagcttgttttgtctgttcttagcctgcccagctacttaggtcataagtctaacacttgaagagcccctaagctaactaagattacaatgcattgtgggctgcaacaaaatgcagcaaaacgaccctaaaataaacaaaaaacaaaaaactcctggcgctcccacccaacaatcaacaggcgagaagwttatgaccccgtagtactcagcctatgaggaactgggggagggacctgtgcactaggggataaactgcttgttgaaagtgtgctgggtgtgcctgtcagacacctgatcttgcaagactgtcattaaaagtctcactttcactgttctccgggtctccgagtccattctttgggttgggatgggcgagactgtttctcacattatgaaaagctgaaggttaagtgaacttggggaatactgcctcct

SEQ ID NO: 544915 - DNA, 467 bp, Homo sapiens
agtctaagatgaaagtttactagcctgcaaaatagcttgttttgtctgttcttagcctgcccagctacttaggtcataagtctaacacttgaagagcccctaagctaactaagattacaatgcattgtgggctgcaacaaaatgcagcaaaacgaccctaaaataaacaaaaaacaaaaaactcctggcgctcccacccaacaatcaacaggcgagaagtttatgaccccgtagtactcagcctatgaggaactgggggagggacctgtgcactaggggataaactgcttgttgaaagtgtgctgggtgtgcctgtcagacacctgatcttgcaagactgtcattaaaagtctcactttcactgttctccgggtctcygagtccattctttgggttgggatgggcgagactgtttctcacattatgaaaagctgaaggttaagtgaacttggggaatactgcctcct

SEQ ID NO: 544916 - DNA, 516 bp, Homo sapiens
acccttgtctgagaaccactggattaaaaggacatggtttcacgtattgggcagccttttgtgttgaaccctccttatcccattccactgaatataaggctacatgcattatatctcgatrgttccaaatttcctcttaaacaaatgtgtgggatacaactccaaaggttatgttgacagatgaataatcctctgaacaccattagttcagaaaacctgctacccaatgtacagcatctcttgctgaccagagtgtggagtgaaacatttgaccaaactgtgtgcataattgctaattcaaatttttaggtaaaacacctaaaacataacacattcttctctacttatcctcttaggggttgcttttcaagcatggtgtacaaaattatgacaaggcctcgtatgtgtggagtttacattttagaatgggtagacgacagtagacaagagcagcctcagaactgagcagtcagtgaagtcctttttttagccctagcgctggatgcaaattttacc

SEQ ID NO: 544917 - DNA, 515 bp, Homo sapiens
ggtcctgggaagctgccagacgcacacgggcaccatgtacagggcttctcagagatgggagcagggagcaggggacggagaagcgtggggtcaagagcgtggccctgagcagggggctgcagcgaagaccaaggggattcataagccagatccrgggagggggtctcccagccccacctgctccactaaactcctctcctgccggagccacagctgtcaaggccgccttccttaaggcatcagggccactgcttgtgcacacagctaccatcagcagcacggattgagatggggtgtgagtgcaaactgggtctattccccagggcttcagggttggggcatccctgcccgtactgccagggtgtagggatagcagggagcactctgggcacgtgtatgcaggctgaagggagacgtattgggtttcggagagggaaagagggccccacaggtgcccagggacacggtaacgctctgacatcgctgcaccagcaaaggggccccagctctggata

SEQ ID NO: 544918 - DNA, 515 bp, Homo sapiens
ggtcctgggaagctgccagacgcacacgggcaccatgtacagggcttctcagagatgggagcagggagcaggggacggagaagcgtggggtcaagagcgtggccctgagcagggggctgcagcgaagaccaaggggattcataagccagatccagggagggggtctcccagccccacctgctccactaractcctctcctgccggagccacagctgtcaaggccgccttccttaaggcatcagggccactgcttgtgcacacagctaccatcagcagcacggattgagatggggtgtgagtgcaaactgggtctattccccagggcttcagggttggggcatccctgcccgtactgccagggtgtagggatagcagggagcactctgggcacgtgtatgcaggctgaagggagacgtattgggtttcggagagggaaagagggccccacaggtgcccagggacacggtaacgctctgacatcgctgcaccagcaaaggggccccagctctggata

SEQ ID NO: 544919 - DNA, 567 bp, Homo sapiens
cagctgccacctggatgtccccactcaaatgaacgggacacatccccagtggaggccctgggcacgctctggcctccccctcacagctctgggcctaggttcctgcaggacaaagtggcagcaggacagatggccgagcagacgagctcagagctggccatggcgggtgtgactctgccagtggcccaggcagtagagacaggaggggccgaggaagtcgcatgaagtggtrcttggtgtcagcgccccacactgctgggaggcccccagagccagggtggtgccaggggaccagctcccaggcccacagcagggaccgcctgcaatatcaccaaggcaacgaggaccccacctccccagggcctctgacttctcagagttgtgcctggtcccctgtgggagcaggtcagaccagtgggctgggcagggccaggatgagacagccccagtggatggcgagcaggaaaggccgccagaggcccacccgggtctcctcgtccaaagcagcactggcccgggcggtgctcaaacaccggtgaagggcccaggcaagcgcagggctgggga

SEQ ID NO: 544920 - DNA, 567 bp, Homo sapiens
cagctgccacctggatgtccccactcaaatgaacgggacacatccccagtggaggccctgggcacgctctggcctccccctcacagctctgggcctaggttcctgcaggacaaagtggcagcaggacagatggccgagcagacgagctcagagctggccatggcgggtgtgactctgccagtggcccaggcagtagagacaggaggggccgaggaagtcgcatgaagtggtamttggtgtcagcgccccacactgctgggaggcccccagagccagggtggtgccaggggaccagctcccaggcccacagcagggaccgcctgcaatatcaccaaggcaacgaggaccccacctccccagggcctctgacttctcagagttgtgcctggtcccctgtgggagcaggtcagaccagtgggctgggcagggccaggatgagacagccccagtggatggcgagcaggaaaggccgccagaggcccacccgggtctcctcgtccaaagcagcactggcccgggcggtgctcaaacaccggtgaagggcccaggcaagcgcagggctgggga

SEQ ID NO: 544921 - DNA, 567 bp, Homo sapiens
cagctgccacctggatgtccccactcaaatgaacgggacacatccccagtggaggccctgggcacgctctggcctccccctcacagctctgggcctaggttcctgcaggacaaagtggcagcaggacagatggccgagcagacgagctcagagctggccatggcgggtgtgactctgccagtggcccaggcagtagagacaggaggggccgaggaagtcgcatgaagtggtacttggtgtcagcgccccacactgctgggaggcccccrgagccagggtggtgccaggggaccagctcccaggcccacagcagggaccgcctgcaatatcaccaaggcaacgaggaccccacctccccagggcctctgacttctcagagttgtgcctggtcccctgtgggagcaggtcagaccagtgggctgggcagggccaggatgagacagccccagtggatggcgagcaggaaaggccgccagaggcccacccgggtctcctcgtccaaagcagcactggcccgggcggtgctcaaacaccggtgaagggcccaggcaagcgcagggctgggga

SEQ ID NO: 544922 - DNA, 567 bp, Homo sapiens
cagctgccacctggatgtccccactcaaatgaacgggacacatccccagtggaggccctgggcacgctctggcctccccctcacagctctgggcctaggttcctgcaggacaaagtggcagcaggacagatggccgagcagacgagctcagagctggccatggcgggtgtgactctgccagtggcccaggcagtagagacaggaggggccgaggaagtcgcatgaagtggtacttggtgtcagcgccccacactgctgggaggcccccagagccagggtggtgccaggggaccagctcccaggcccacagcagggaccgcctgcaatatcaccaaggcaacgaggaccccacctccccagggcctctgacttctcagagttgtgcctggtcccctgygggagcaggtcagaccagtgggctgggcagggccaggatgagacagccccagtggatggcgagcaggaaaggccgccagaggcccacccgggtctcctcgtccaaagcagcactggcccgggcggtgctcaaacaccggtgaagggcccaggcaagcgcagggctgggga

SEQ ID NO: 544923 - DNA, 574 bp, Homo sapiens
gccaacaagtcaataggagtaaggcatattgtggtrtatccaagaggtgacactggccagaagggggagagcaataggaagcccttagggagttgtaagcaaggaagacacggagtctgatgggagacttaggagaaaagtccagcttctccaaagaagatgaaaaaggaggggagagagtgaaagtggagggtctaattaggagacggtagctttctccacatgagagatgaggtctccagcaagtgatgaagcagctgaggtggtgaaatatgcgtgacccacaccatggtgagtaagaccaaaggaaagaggtcactaggttgaggcccaaagcttgttcctgtgatataaacctgacaacatcctcttgccgttactgagtgtctcacacaccttttttctttggatatctcctgggactcaggactcattgctgcccttccctcgtattcagtgagattcatttcgaacatcacttttcacacccagagagagacctggctcctttgtatggagcaaaagcactgagggtcaggacagaacattctacagaacatgggatgatgcctta

SEQ ID NO: 544924 - DNA, 622 bp, Homo sapiens
ggctcaactattcaaaagcaccctcttttcctcacttgctttacctttggttctgggcctggagcctttcagaggttactcaggaaatggactcctgtttcctgtgactaatctggacagcggcttcctatttcattcttcagcatcttccaaaaatttctgaagataatttcttcctttgtgaccacccatactcttggtttactttgcagttaacaatttcatgccttcactagattatctgtgtgaaggtgtggggtgtatgtgttcatactctggagggagcagaggaaaatagccacagccaaaggagtaatcttgcactaaatactcattataagaatgttgatacgttcatagatggtaaatctgtcagtaatttttrcttgtatgattcttggttaagactgcactcactggtgataagcgtgctgaagggatcataggtgctatacttatgtgtgggaattgcattcaaaccaccaatgcctgtctactcaagttttgttgccttttgattaaaaactcttgggaatgtttccctggcatgcaaatatgggaactgcagtttgattctaggtagaaactctttggtagttgaaatgccataataagagacaca

SEQ ID NO: 544925 - DNA, 486 bp, Homo sapiens
actgacgaggggaagctgttggcatcagggcctcaaaaatttgactcaggattttcccacgtcccctccccaagtccaggcgggttccaggacactcagaagagctcatcattatgggtctaggacttccctggtcctgctcttctttcttccttccccagtggccttaagattgtcactccctgtcacaggcccttcctttccttgtcaagtgcactccctgaattctctgctcctgggtcaggaaagctctggaacttcagggaaagcagtgctgggtgacccaatggggacccagaaagctggcccagggccagatacacaggcagcagggtgggtccctacagtgctgcctggtgggcatcrggtagaggggagtgaccaggaccaactcccctgagtgtcttcagggccaggtgaactagggagggtctgggacctggtgtggacccatgcactgacccaggaataggacaggaaactcct

SEQ ID NO: 544926 - DNA, 592 bp, Homo sapiens
taggaaaggctcccctttctttgagagcaaaaacaaaagcaaacaaacaacaaacctgaccttccctctggctcctgtccwacactcttactggctcctccttcagcctttcctataatgtggcccatccttaccctctccccttccacatctctgattcctgaattcccttctttgttctctttccctttgctaccacccacttctcccctctaatctcttgagttaattatcaagggctttataacaggaaactcattggcattttttctgcatctgtccttgaagttgacactcatacttttatctctttcttgaacctctcagatatgcttagaactgaagaagcccgaagttgattgattctgttttttcacctcagccagcaccttcttcttctcctttccaggagaatctgtatttctctgtatttccagaattctctgtatttccagtgaatctgtcagacacagtaagtactcttcaaaggtttaatttctgacttcattgttctttgttctcgagatgaacttccttgtcccttctcctaagctacctgctctgtaaacaacttctcccaccagtcccaatc

SEQ ID NO: 544927 - DNA, 592 bp, Homo sapiens
taggaaaggctcccctttctttgagagcaaaaacaaaagcaaacaaacaacaaacctgaccttccctctggctcctgtccaacactcttactggctcctccttcagcctttcctataatgtggcccatccttaccctctccccttccacatctctgattcctgaattcccttctttgttctctttccctttgctaccacccayttctcccctctaatctcttgagttaattatcaagggctttataacaggaaactcattggcattttttctgcatctgtccttgaagttgacactcatacttttatctctttcttgaacctctcagatatgcttagaactgaagaagcccgaagttgattgattctgttttttcacctcagccagcaccttcttcttctcctttccaggagaatctgtatttctctgtatttccagaattctctgtatttccagtgaatctgtcagacacagtaagtactcttcaaaggtttaatttctgacttcattgttctttgttctcgagatgaacttccttgtcccttctcctaagctacctgctctgtaaacaacttctcccaccagtcccaatc

SEQ ID NO: 544928 - DNA, 592 bp, Homo sapiens
tgcagactcagggcctccccagaaattgctgcagcctgagttctggacctgggaccgcatgtcctgtcacaaccagatgcaaaagggctctttagtccctacacagaatggcttcagccaggagagcataaataacatgtaagattagaagagctcagaggggctctccttctgtcccatgacagatgaaacttcagggctctgatgcttgtcagggaatctccttcagtgaggccaagatcccaggactttactaaaattagcagagtggaccagacaggcatgtcatggtacaggaattgtgttcagaacaataagtgcagatgcatcttaacaagggccttcacgttctatctttggtgaaaaaggaaatagacaaaggcatggagaaactgaaggactcaatgggtctgggactgaggtagcgctgagtgctttgggcttgtcctggagcagtctgcagatgataacagctgggaagtccacccstgctgtgaccttgtttcatctgcccactggatcagtggctgtgtcctcacaggaaagctggctgtagccagactggccttctccatcccacctgggaaatgta

SEQ ID NO: 544929 - DNA, 592 bp, Homo sapiens
tgcagactcagggcctccccagaaattgctgcagcctgagttctggacctgggaccgcatgtcctgtcacaaccagatgcaaaagggctctttagtccctacacagaatggcttcagccaggagagcataaataacatgtaagattagaagagctcagaggggctctccttctgtcccatgacagatgaaacttcagggctctgatgcttgtcagggaatctccttcagtgaggccaagatcccaggactttactaaaattagcagagtggaccagacaggcatgtcatggtacaggaattgtgttcagaacaataagtgcagatgcatcttaacaagggccttcacgttctatctttggtgaaaaaggaaatagacaaaggcatggagaaactgaaggactcaatgggtctgggactgaggtagcgctgagtgctttgggcttgtcctggagcagtctgcagatgataacagctgggaagtccacccckgctgtgaccttgtttcatctgcccactggatcagtggctgtgtcctcacaggaaagctggctgtagccagactggccttctccatcccacctgggaaatgta

SEQ ID NO: 544930 - DNA, 362 bp, Homo sapiens
ttactgcttagcatgggataccagcctgagagcttgcacagtgctccaggccaatggggaactgagacaagaacccycttcctcctccgccaggagggtgagtgcctgcagctgctgctcacacctgacctgtagcttctgctgctgtagcttcccccatgggcctcggggcatccagggccttgcctaggagtggaggctccaccacttttgtcctcagagtcaggaacagggaccccaggagacagaatatcctgctcctcagcttgggacacagggtctctgcactgaaatcgtgggctgaggtggcaggtccaactgtgtcttcacagtccttcctgtgcctgcccatggtgtgggga

SEQ ID NO: 544931 - DNA, 597 bp, Homo sapiens
gggaggatcccaaatcccagcactttgggaggccaaggtgggcggatcacatgaggtcaagagttcaagatcagcctggccaactggtgaaaccctgtctctagtaaaaatacaaaaattagctgggcgtggtggtgcgtgcctgtagtcccagctactcgggaggctgaggcaggagaatcgcttgaacctgggaggtagaggttgcagtgagccaagatcgttccactgcactcyagcctgagcgatagagtgagacttcatctcaaaacaaaaaacgaattcccaacaatgcctcagacatggcttaagctgcccactggggctctgcaggtgggatgtgcaccaccaagctctcaggtggggcattacctgacagcccagaaggactccgggccctctgcaaagtgcctgatctcttgcgcaccttaaaaggtagcttttcaggctgttcttgttcttttcatgctgacgtaggagattttatcctctgctttttaagtagaagcttccttaccctcctcatcatcctgagtagatgcctaggctggtttcagagaaatcaaaccagggtggattatgagttatattagccac

SEQ ID NO: 544932 - DNA, 597 bp, Homo sapiens
gggaggatcccaaatcccagcactttgggaggccaaggtgggcggatcacatgaggtcaagagttcaagatcagcctggccaactggtgaaaccctgtctctagtaaaaatacaaaaattagctgggcgtggtggtgcgtgcctgtagtcccagctactcgggaggctgaggcaggagaatcgcttgaacctgggaggtagaggttgcagtgagccaagatcgttccactgcactctagcctgagcgatagagtgagacttcatctcaaaacaaaaaacraattcccaacaatgcctcagacatggcttaagctgcccactggggctctgcaggtgggatgtgcaccaccaagctctcaggtggggcattacctgacagcccagaaggactccgggccctctgcaaagtgcctgatctcttgcgcaccttaaaaggtagcttttcaggctgttcttgttcttttcatgctgacgtaggagattttatcctctgctttttaagtagaagcttccttaccctcctcatcatcctgagtagatgcctaggctggtttcagagaaatcaaaccagggtggattatgagttatattagccac

SEQ ID NO: 544933 - DNA, 552 bp, Homo sapiens
gagagttccatgacccaaagggcctcctgagggaggaatggcagctctactttccagccaaagcaggaatattgagggcactaagaaacaagggaatttttacagtgtgtttcacacttcttcccttctcaaagacattaaatataacttcaattttaaaggtgaacctcggccatcaaaggcatgttttctattggtctctttccggtggaatgaatggcaatgrtccctgtaaattgtgctccaaggatccctttcagtgggaagattcttgtgataagcccaataacaagtaagaaagcaattttttatacatagatctagaacaaaaagggctcatgatgaagaatattttattgaagcttagtgtattgctatttttcataaattgctgtttttgcctatcccacaagcactgatcacttttatgaaggtacattctccaagggtcgtcttagcatgtcaggacccacaagcaaaggtgttacaagtgacctgcacgagtggccagcaggacacctggaggagcccagtgagatgaggagtggatgc

SEQ ID NO: 544934 - DNA, 601 bp, Homo sapiens
ataaaaacttgatagaatttaccagtraagtcatttgtactaggtgggcttttcttagcaggaagattttaaattgctaattcaatatatttatgtgtcatagatctattcagattttctcctttatgaatcgattttgataatttatgtatttccagatacttatccacttcatttaagtcatccataattttggcatttattgttcgcattattccctataaccattgtaccttttgtaaggtcagtggtgatgtcactctttaagtcatggttttgacaatttgggtcaggagaagatttggaggaggagagaacaaggttgtcttgatgttgtcttggctggagtgtgacttggagaaaaatgacttgaatgaaaatacagtcagagggagatatctgtcaagtggttctggtgcctggatttccacatgtgtggtgacggagcccagcccagtgctctactcatgcccagatgtcctggattattcccctgaaatactcaggtgaagctccagctacaccatggcatcctgatattttaaacagagaagaccagtgtcatgggcactggtgatctgctcctcagggcagactcact

SEQ ID NO: 544935 - DNA, 451 bp, Homo sapiens
gagggtggggtgaagggaggagctcaaggtggagatttgcatgcaggccccaccctcctctttggcagaggagataagacagggctgggggcaggcccagtgctggggtctcaggaggcagcgctctcaggacatctccaccatggcctgggctctgctgctcctcaccctcctcactcagggcacaggtgaygcctccagggaaggggcttcagggacctctgggctgatccttggtctcctgctcctcaggctcaccggggcccagcactgactcactggcatgtgtttctccctctttccagggtcctgggcccagtctgccctgactcagcctgcctccgtgtctgggtctcctggacagtcgatcaccatctcctgcactggaaccagcagtgacgttggtggttataactatgtctcctggtaccaacagcacccaggcaaagcc

SEQ ID NO: 544936 - DNA, 451 bp, Homo sapiens
gagggtggggtgaagggaggagctcaaggtggagatttgcatgcaggccccaccctcctctttggcagaggagataagacagggctgggggcaggcccagtgctggggtctcaggaggcagcgctctcaggacatctccaccatggcctgggctctgctgctcctcaccctcctcactcagggcacaggtgacgcctccagggaaggggcttcagggacctctgggctgatccttggtctcctgctcctcaggctcaccrgggcccagcactgactcactggcatgtgtttctccctctttccagggtcctgggcccagtctgccctgactcagcctgcctccgtgtctgggtctcctggacagtcgatcaccatctcctgcactggaaccagcagtgacgttggtggttataactatgtctcctggtaccaacagcacccaggcaaagcc

SEQ ID NO: 544937 - DNA, 620 bp, Homo sapiens
agctccaccatggcctgggctcctctgctcctcaccctcctcagtctcctcacaggtcagggtgggcagtgggctgggcccccaaagggacccccacctcccagcctccatctccccatccctgctcttcctcctccaacagctcatcagccacccaccaacaggagccctcatgggtgtctgtgtttccagggtccctctcccagcctgtgctgactcagccaccttctgcatcagcctccctgggagcctcggtcacactcacctgcaccctgagcagcggctacagtaattataaagtggactggtaccagcagagaccagggaagggcccccggtttgtgatgcgagtgggcactggtgggattgtgggatccaagggggatggcatccctgatcgcttctcagtcttgggctcaggcctgaatcggtacctgaccatcaagaacatccaggaagargatgagagtgactaccactgtggggcagaccatggcagtgggagcaacttcgtgtaacccacagtgacacaggcagaggggaagtgagacaaaaacctcccggctgatctgctctgtccacacttccttcccactggcctgactcacatttcagagggc

SEQ ID NO: 544938 - DNA, 604 bp, Homo sapiens
tttggtattttttagtagagatggggttttaccattttgctcaggctaatcttgaactcctgggctccagtgatccaccgaccttggcctctcaaagtgctgaaatcaaggaagtgagccaccacaccgagccgggcagttcttgtttaatggttgcgaagttttagtttgggaagatgaaaaatttctgaagatgaatggtagcagtgtgattgtacaagttgatttacttagtgacactgaagtgtacacatgaaatggtgaaggtaacaaattttatgtttgaatattttaccacagtcaaaaagaggaagatttatatttggcaccattgctctacttccaagaacagtagaaagatacagtagtaggagagtgtgcacaagtatccaggacgtctttcattttttgccagccctgcagcatcctaacaatccaagagagcaggaggtgyctcattacaggggactcagaataatgtgaagaaatctggggcggggtgggggcataatgatagcacacaggtgccggacccagtccaggagtggccacaaatgcaagggctgcagaagagggggagatgaagctggtggcagtggtagca

SEQ ID NO: 544939 - DNA, 645 bp, Homo sapiens
cttctacggccctgaaagagtcgtgtgtcatgacttgacactggtcctcttccctgtgctgaatgagacgtgaaggaaaaatgamcccaaatctgcccaggatcccctgcgccacacgtgagatgctccagttccctcggggattcagaagcatccctagctggcatcaacggaggccgggaagactaggtcttttcccaaaatgcttagttatgcaaacacctcaaaaggcacccgtacctcttgtaacaacccaagcgtgaggactccctctttctggggtgatctggggaaactgctctcctacatggtcatcttgaggattgcagatgggccacggaaatgtcaacacagtgacatcagcaggggcagtagggtcaggatcagggtcagtctttgtcacttggtcacttgggaccacatcaaacctgaccctgtttggccagtaatttcacaagggtggtctccccaggaaacacgtgggctgggcaaggtctgaggggagggggatgacctgcatcctgcattttccaggacattcccagtttgtgccactgactctggaagctgaggtggatgctagagcagtgtccagcccctggtgaccctagccccatccaggtccccagaccactggccaccaat

SEQ ID NO: 544940 - DNA, 520 bp, Homo sapiens
gacctgtgaggggtataggtgagcwgcagctaagtgagaaaacattaaggaccctgtgtagttgacacaagattattgacatcttaagtcttcaataaatacaatcagcgctgacaaatgtggccgtgcctcagaagagctagaaatgtttatgtctaggtaactctcatgttctgtagaacttcacttgtatttttttggttttaaaggattattataagagcagacgtttatgaatatactccattcttttatcctcaatattgcccatctcttaaaatcctttggctttacacacacctacaacaaactgatcttcaaaaattgataaaaataaacgatgtgtaaaggataccctattcaataaatgatgctgagaaaactggcctacaatgcagaaaagtaaaactggacccctacctcttaccatataaaaaattaattccagatgaatgaagacttaaatgtaagacctccaactattaaaatcttagaagaaaagttggaaaatactcttgtg

SEQ ID NO: 544941 - DNA, 520 bp, Homo sapiens
gacctgtgaggggtataggtgagctgcagctaagtgagaaaacattaaggaccctgtgtagttgacacaagattattgacatcttaagtyttcaataaatacaatcagcgctgacaaatgtggccgtgcctcagaagagctagaaatgtttatgtctaggtaactctcatgttctgtagaacttcacttgtatttttttggttttaaaggattattataagagcagacgtttatgaatatactccattcttttatcctcaatattgcccatctcttaaaatcctttggctttacacacacctacaacaaactgatcttcaaaaattgataaaaataaacgatgtgtaaaggataccctattcaataaatgatgctgagaaaactggcctacaatgcagaaaagtaaaactggacccctacctcttaccatataaaaaattaattccagatgaatgaagacttaaatgtaagacctccaactattaaaatcttagaagaaaagttggaaaatactcttgtg

SEQ ID NO: 544942 - DNA, 485 bp, Homo sapiens
tgcttggaggacagactcctaggagtgagaagttgaccacagcatctgaatagctattaccccaagtctgtggaaattagagaacaaaattttaccagaaatgccccccagagcttctccccataacctcaccacccttagagaagagagctcctgttctcctcagygctgcagggtccacagaggaggaagagctctggccagcagggaggagccacagaagaaaggacctggtgtctcccgtgaccagggtagtgagtcatgggaaccagtcactgctctggacttgacctgacctaagaggacttggtatagagtcaccacttcagtcctcaccaaggaacatccaaaaagccctggacagattcacccttaaggagaccagtaaagcatgaactgccctgagttaatgagaaggtcacaaaaagggtctgtctggcctggtgctgagcctgggggcagtgatcagagcagggggaatgcac

SEQ ID NO: 544943 - DNA, 485 bp, Homo sapiens
tgcttggaggacagactcctaggagtgagaagttgaccacagcatctgaatagctattaccccaagtctgtggaaattagagaacaaaattttaccagaaatgccccccagagcttctccccataacctcaccacccttagagaagagagctcctgttctcctcagcgctgcagggtccacagaggaggaagagctctggccagcagggaggagccacagaagaaaggacctggtgtctcccgtgaccagggtagtgagtcatgggaaccagtcactgctctggacttgacctgacctaagaggacttggtatagagtcaccacttcagtcctcaccaaggaacatccaaaaagccctggacagattcacccttaaggagaccagtaaagcatgaactgycctgagttaatgagaaggtcacaaaaagggtctgtctggcctggtgctgagcctgggggcagtgatcagagcagggggaatgcac

SEQ ID NO: 544944 - DNA, 449 bp, Homo sapiens
gccatgggatctaactgtatttaagaaaggggtgagtaggaaggcggctgccaaatccaggaacacagatgtcattttgagtgaccaaggtgagccaagggaggacagctttagtcagaagagcatagaccaggagcagaactcacatatctgaagctgatgggcagagtgtgggtgcaataggcctggcattgggtgctgctgagctgaaattatgctgtcacctgmggtgcgcccctggggtgacatggttctggttgttcttcaccccagggaaggacactgtgacctgttatctgttggaggatgaggactcagaaagctctttataagagagggcaccagtgtgatatgagggtccctgattgtctttccaaaggttggaaattgaacccgcatctttcatttttgtgtagagaacccaagatccttttctacataatcaaggg

SEQ ID NO: 544945 - DNA, 449 bp, Homo sapiens
gccatgggatctaactgtatttaagaaaggggtgagtaggaaggcggctgccaaatccaggaacacagatgtcattttgagtgaccaaggtgagccaagggaggacagctttagtcagaagagcatagaccaggagcagaactcacatatctgaagctgatgggcagagtgtgggtgcaataggcctggcattgggtgctgctgagctgaaattatgctgtcacctgargtgcgcccctggggtgacatggttctggttgttcttcaccccagggaaggacactgtgacctgttatctgttggaggatgaggactcagaaagctctttataagagagggcaccagtgtgatatgagggtccctgattgtctttccaaaggttggaaattgaacccgcatctttcatttttgtgtagagaacccaagatccttttctacataatcaaggg

SEQ ID NO: 544946 - DNA, 573 bp, Homo sapiens
agttcttgcctacctctgtgaatacctgagacatgaactgagatgtgtgtgtgcatatggtgcgggcagcacttcctcactcaatactagggagagtgtgaggaaactggatacagacctggagatagggcacatttttacactctctattaagccctgtccttctgtgctcaccaaggagtcacccaacaaggccacaacaggaagagaagcaggtttctatgaagagacttctctttttgtgatgrgggcccaggaagtccactgtctagctatgaactcagaggcagaactctgatgcatctccaccatgacctgaatccctctcctctactcacccttcctgctgtcggcacaggttctgccttccagggctcagccccataagactagggatcagcctggccctgaccttcagctcagcacagggagtgacgcagtgtgtggggctctgagaatgagaccctcatcttcagactcacctctcctgtcctatcttgtaggctcagtggcctcctctgagcggactcagttgcctgcagcgtctgtggctttgggacagagggccaggat

SEQ ID NO: 544947 - DNA, 573 bp, Homo sapiens
agttcttgcctacctctgtgaatacctgagacatgaactgagatgtgtgtgtgcatatggtgcgggcagcacttcctcactcaatactagggagagtgtgaggaaactggatacagacctggagatagggcacatttttacactctctattaagccctgtccttctgtgctcaccaaggagtcacccaacaaggccacaacaggaagagaagcaggtttctatgaagagacttctctttttgtgatgagggcccaggaagtccactgtctagctatgaactcagaggcagaactctgatgcatctccaccatgacctgaatccctctcctctactcacccttccygctgtcggcacaggttctgccttccagggctcagccccataagactagggatcagcctggccctgaccttcagctcagcacagggagtgacgcagtgtgtggggctctgagaatgagaccctcatcttcagactcacctctcctgtcctatcttgtaggctcagtggcctcctctgagcggactcagttgcctgcagcgtctgtggctttgggacagagggccaggat

SEQ ID NO: 544948 - DNA, 583 bp, Homo sapiens
ggcaacaattttttataaatatagtcaagaaaatagaaataagagtcttcactgctacctccccttcagaattattttctcctagtattgtggttcctgatagcctttattcctatagaaatggcaattcgaaaaattccttctgtgaatctgagggctctacaaagggagagcttctttgatagtgctttggtgtaagttatttaagaaggacaatctacccaggcttatcaagcaaataacctggaatttaaacctggagtattctttagtgttccaagyctgcaggaaaagaagtaatcttggcttaaactaaataagttaacagaatacaatttgaacaatgaacaagaatgctgtttgaaaattatcttgggtttttatgtcaagttaatattctcactgaatttctattatgtttgtaaagcagctttctcctagaccaaaaatcctagtaataaaaccacaacagtatgagagttataagcacacagtaaaggctgatgagtaaatgttatgacactttgaaaggaaataaaccagacgatataatgtaaatatcctttgtgcttatcaaaaataa

SEQ ID NO: 544949 - DNA, 598 bp, Homo sapiens
ggggatcatgatgcaatgctgatgcaggacagacagaaagtagatctcttccatttctattttttttttttctgttgagttgaatgatcttcagactgaaaatgaaagaaaggtcactggaaataaaggccaaagatgagtgacaggattatagaataagtcttagctgttctaaagaaggacatattatgtacccccacccccaaattcatatgttgaagtcctaacccgacagtgtctcaaaatgtgaccatatttggagatagggtcaaagatgtaattaaggttaaatgaggtcattagcatggatcctaacccaatatctgctgtccttataacaagaggagattagggcacagtaagacacagagggaagaccatgtgagaatacagggagaaggtggccatctgcaagccaaggagagaggcctcagaagtaaccaactcagccaacacctcgatttcagacttccagcctcctgaaatgtgaggaaatacatttctggtgtttgatccatccagtctatggtaagttatggcasccctgcagggttcatctggctcagacttaacgattgcttttggtgatatttatagg

SEQ ID NO: 544950 - DNA, 555 bp, Homo sapiens
cagcaaacaaagcacagcagtgcctgcacaaagcagaaactgcctgttagatgagttgagcaaaaccatttcctttgcccaactttctcctctaaaatacataactgaacatgggattcccagacacgaattgtttctcaacctttctttttccattctacagttgtatgaaattaaaattaaataaaaagcaaacaacagaggtagtctttttaatcttaccgagttggaaggtatactatatacattatcctrtggtagaaggtctggtacattcttgaccattattactttgctatgggcacccttcacccttgtaggctgaaaattggcaaatcataggcacgtatacattgtggttttggaatttgaaagatctcaaattcatattgagtgagacagtttttgaatggagggatcaggctgtctatatgtggatatattttatgcatttctggtctgtataaatgtaaggattgctttactgaccgtagatttcttctagggttaaaaagttgaaggcagtttggatattttaaaataagaaaattagcc

SEQ ID NO: 544951 - DNA, 519 bp, Homo sapiens
caagagcccaccccaccggtgggggcagcctgggctcttcggggctgggcaggagggtgggcggaggcaggtgtgtctggatgacagccgtgtgtgggagagacttcatctggcatcctcgctgcctcctgttccagcccagccttggctctgatgctggcccagcctttcccatgatcccctggggggaagagagctgwccttagtgggtgcctcctaggtgctgagtaccttcatttactcctcccaattcttctccagggaaggtgcaatgcttcccatgttagggttgagaaaggcagtttctgaggagtgaacttatttctggagtcacacagctcctaaggggaggggctgcagttcaaacactggggactccagggtccacgcttccagggggagcccggggaaaatgctggagctccacgctgctggcccggggaggccgaggccccagcgccctgcggagagcctgctagggcctggtgggttgggttatagcacccctctgtggacaca

SEQ ID NO: 544952 - DNA, 527 bp, Homo sapiens
gcatggggctggggagggagaactgcagggagtatgggaggggaagctgaggtgggcctgctcaagagaaggtgctgaaccatcccctgtcctgagaggtgccaggcctgcaggcagtggctcagaagctggggaggagagaggcatccagggttctactcagggagtcccagcatcgccaccctcctttgaaatctccctggttgaacccagttaacatacgctctccatcaaaacaaaacgaaacaaaacaaactagcaaaataggctgtccccagtgcaagtgcaggtgccagaacatttctctcattcccaccccttcctgccagagggtaggtggctggagtgagggtgctggccctactcacacttcctgtgtcayggtgaccctctgagagcagcccagtcagtggggaaggaggaaggggctgggatgctcacagccggcagcccacacctagggagactcttcagcagagcaccttgcggccttactcctgcacgtctcctgcagtttgtaaggtgca

SEQ ID NO: 544953 - DNA, 527 bp, Homo sapiens
gcatggggctggggagggagaactgcagggagtatgggaggggaagctgaggtgggcctgctcaagagaaggtgctgaaccatcccctgtcctgagaggtgccaggcctgcaggcagtggctcagaagctggggaggagagaggcatccagggttctactcagggagtcccagcatcgccaccctcctttgaaatctccctggttgaacccagttaacatacgctctccatcaaaacaaaacgaaacaaaacaaactagcaaaataggctgtccccagtgcaagtgcaggtgccagaacatttctctcattcccaccccttcctgccagagggtaggtggctggagtgagggtgctggccctactcacacttcctgtgtcatggtgaccctctgagagcagcccagtcagtggggaaggaggaaggggctgggatgctcacagccggcagcccacacctrgggagactcttcagcagagcaccttgcggccttactcctgcacgtctcctgcagtttgtaaggtgca

SEQ ID NO: 544954 - DNA, 555 bp, Homo sapiens
ctatgctgaacaagaatgtctttaaagctgattactggatgaaattatttaacagatgacgaagaagaagggattcttggcaattcgctggccggtgtcatactctattaggcctgcaacatttccagaccttaaactgatagaacattttaattgttttaattgtttttggaaatgatgggagagttcctaagtggagtataaactgtggagagatgaaccatcttgagtaggcactgaagtgtgctttgggtcatgatagattaattaatctcatctaaacattgatgtctttttcygttgctgtctagactgtgaacaatgtctaacaccttagggaagaggtggggaggaatcccaatgtatacattgcccttaagcagtgtttgattcattcatctttggactccatgaatcgaaatctggtagaatacatgatcttagtggaggaggccaaatgcgtgactcactgagcctggcagagcagaaatactctgctgtctgcaccctctgggtctggtgtggctctgcttcttggtgcttcaactctgactg

SEQ ID NO: 544955 - DNA, 617 bp, Homo sapiens
ttcattcattcattcactcagtccaggtctccacaattccgaggaagcttcctggagggggaggcttgtttgggacatttgtgttggggagagggcatttcaggtggcaggagcagcgtgacsagaggctgggagaagggatggggaggagaggctcatggccccttcctcctttgctgtgccccaggagacagtgttggacatgctccgggatgccatggtggccaaagtcaatacttccaaaggcttcctgattgatggctacccgcgggaggtgcagcaaggagaagagtttgagcgacgggtaaggcactgacccaagtggggatcctggtgggctggggcaggataagactcccatccccatgggcgggcctgcgggggctgtgatgcaggtcagagttctgagcagaggctgattcatggagtgtgggtgaggaggaaaaccaggaagactttctggaagtgtagaagaaaatgtgtagaaggggaagcgccaggaggggcagttgccaaacctgggctcagattccagctcaacggcttgagatcttgggccagtcattctgcctcctgaacctcagttttcccatctgcaaaatgcagggagtgggagg

SEQ ID NO: 544956 - DNA, 678 bp, Homo sapiens
catgatgggacaagcaggaggccactgcacgtttcaaatgaggaactttcagtgagagggcctcagggggacactctcacagtggcatctgatggggtttcgggaataattgccgaggtcagatgtgggttagtgcaacctgtgcttctcatgggagggtggagactgagaggcagaagtgatgatatagagggttagaatcacttaattttasttacagaaaaacctaggctcaaagtgttgaagccatttgtgcaggagtgagtttgtagcagagctagaactggagcccggatttcctttgctgctatattttccctttagaaatgcccatttcagaactgaaatagaaatactgtccataggcttctctttcacctacagagaagaaaagcagatttcctccttctgccctggacactagttcatcatctgtcggaagcagtcataaacaagcacacatttactatgcatacaatgtaccgttatgacaaaggaggaccaaaatccaaacaatatcaaaccacaccaaaaaccacaaggagcctaataattactaaggtgatacttccaaagggaggactttatttcttagatgagaatgaaaatggacacattggaaattattggagagccctctggctatgagtccttccacaaccatatggtaccaccgac

SEQ ID NO: 544957 - DNA, 511 bp, Homo sapiens
ctcgtcattcccggctccagttcatacagatcacacaacacacccacatgcactcacctatgtttacacacacgggcctcctcctccagcccctgcccctcctgcgtgttcctcccctcccggggacgcggccctcacgccagctcactcctcctttctccctcccagcgctgctgcagctgaaatcggattcgtcccgctgtgcccaggagagcagcgtggtccgcactgtgtgccttcccccggcggacctgcagctgccggactggacggagtgtgagctctccggctacggcaagcatgaggcctgtaagtggaaggaagyctcggccccatcctgtctgcgggacagcaggggaggctgcggtccaccagaggaaaatggggtcaggagaccgaagttccagccccgggtcaggcactgacgccagtcccgtctccctgtgtcgtgggggcccgtctctgctgtctctgcctcacagggacactgcaggccaggaaaggacacaac

SEQ ID NO: 544958 - DNA, 588 bp, Homo sapiens
ccttctgaagccaggcaaagcttcctggggacgctggcaatggggacaattttcatccaaggccttttagccacaatggatatggagtgaaatcagtacagaggagggaaggagtgtgaggtgtcggggtsgctcgctttggaggccagaactggcattcacctctcttctcatccgcctactctctccagggtcctgtcggtcctgctggtggtcctggcttccctggtgctcctggagccaaggtacgtgccctgttgtccagtcaggaacttctgggtgccgagaagctgtcctttccccgtaacccttgctcattgctccctcaacaaccacctgctcccttctgagaagtagctccccaccaccccacccactggcccctccatccaggcagggcaaaaagccagacactcgcagtctcacctggagggaagtaagacagaagataaaatgtgggagatccagttacaactttggagtggggaaaggtggacagagaagaagacggggatacaccataggcctggcaggggcagaaggccaggagtggcagcacagggaagcaaacctaggggagacccaaca

SEQ ID NO: 544959 - DNA, 622 bp, Homo sapiens
agctgctgtccctcccagctctgcccagctctttcccacagtcggtggccccaaggaaattcggatgtcacttcctagctgtggaggaactctsacagacagcccaatgtggcaaggaccaccagggactctgtcctaacagcccctttggggtcaccccagcctgtgctatctgctgcaatcccactatgatctctgcacctttgctctgaccttcccatctttcttcttcatagaagaactggcattccaaaactacaatgtcaaagttttgtccattgcttaggtgtcttcccactataaccatctcttaaactatcttcctttgtttgtaagggtcccatgggtccccgtggtcctcctggtccccctggaaagcctggtgatgatgtgagtatacacgagtagacaaatgaggagctgcctcctttgaaagggcctggagagggtgtgtgcttggggagtgacagggaggcacccagggtggaggtatcttgaggagcaagactgggcagtcccaaaccctgacgccatctcctatctatatggccactgtgactgtgctggcaagttccctggggaccgctttggatccaaggggaagacaaataattaaaacatc

SEQ ID NO: 544960 - DNA, 558 bp, Homo sapiens
attataaagataggacctaatagttgccatatcaatagcttctgactcactagttgacatgtatcattgactcasctacgttcagtattagtttactctctccttttgttctgctggtgactaaaatataacagaatgtcataaaattgtggcctgttatgagagaagagctagaaaggcccccaaaatatgaaattgcatatagacattgagaaaatacgactttcattgtaggccacgtggaagatcactttatacatgtacatgtaacataatattcatcaaaaggggacacatacaaatttttctatttctgcctcctaggccgggattatgaaaagaataaagtctgcaaggaattctcccatctgggaaaggaggacttcacatctctgtaagtgtgcagcagccactcactctgttggtgatttgatcttgaacaaaactgagtgtgaggtaactttgattcagcatggaggttaatccttaatccttgccaagagtaagaggacagagccccaggcccaaggtaggcacaggagtcaagcaaattaagga

SEQ ID NO: 544961 - DNA, 558 bp, Homo sapiens
attataaagataggacctaatagttgccatatcaatagcttctgactcactagttgacatgtatcattgactcagytacgttcagtattagtttactctctccttttgttctgctggtgactaaaatataacagaatgtcataaaattgtggcctgttatgagagaagagctagaaaggcccccaaaatatgaaattgcatatagacattgagaaaatacgactttcattgtaggccacgtggaagatcactttatacatgtacatgtaacataatattcatcaaaaggggacacatacaaatttttctatttctgcctcctaggccgggattatgaaaagaataaagtctgcaaggaattctcccatctgggaaaggaggacttcacatctctgtaagtgtgcagcagccactcactctgttggtgatttgatcttgaacaaaactgagtgtgaggtaactttgattcagcatggaggttaatccttaatccttgccaagagtaagaggacagagccccaggcccaaggtaggcacaggagtcaagcaaattaagga

SEQ ID NO: 544962 - DNA, 593 bp, Homo sapiens
actcaaaattccacctgaaaacatcttccatcakactgtgtgtcttcttcagtgtcttctattttggatattggcattaatatccatccacttgcacaagctagaaacttgggcataatttctcactcttcccccctcagccaaagtctagtcaattaccactctctgatgattctgtgtcttaaaccatctcacgcctctgccagcaccacaggccacacttctgtcatcccttgcttggacttctaaagcagtcttcaagctactctcactgtatctactcttacccctcccattctctgcaccctcacaactcagcacacttgtcattttgtcttcaacatgtgtcttcccagctagactaagaaggtccatgaggggaagagccatgtagatcttttgatatggtagtaccaatagcttgcatgttacttggtacaaagtggtatgaattaaatatatgttaaatgaataaatgaaagactgacagacgagggacaacagacacgtaaaatagagtaagggaagaaagaagaatgtgaacaaagacagtggaaagctcaatagcacaatgtgttcagtgaaccacaagt

SEQ ID NO: 544963 - DNA, 631 bp, Homo sapiens
attttatattatcacttaaaaaatgaaataaaaagtaagaaacagaagaactggtgaatatgttggggagagggataaggaccagagaggcattaatcagagctccacgatgccatgtaatgttgaattggaattgacaaaaaaaatcaacacaagaatcttgttaaagaaagtaaatggaatgatataatttgtcaattatctcttcctcctttgttgataagcaagacctagagagaataatttaaaattagacatttgctaattgttacaagataatgcaaataaagactgtgatccaccattaagcatttattcagacttcaaatatttattaccattgagtgtaatataccatgccaatgatgcatgatgtcaacttagagatttctttgatccccttagaggaatcttatacatgcagtatttgaaaatgcattgtatttttaaaaatatccctcacataaaatttttctatagctatgaaacataaccacaaataagataattcagttatatttttcattgaaattattcttcagatggtgtgttcatctttgggcaatgtttaaaaattttttyacatgataaagactgagattatgggaagtatacaactttatgaattcta

SEQ ID NO: 544964 - DNA, 593 bp, Homo sapiens
actcaaaattccacctgaaaacatcttccatcatactgtgtgtcttcttcagtgtcttctattttggatattggcattaatatccatccacttgcacaagctagaaacttgggcataatttctcactcttcccccctcagccaaagtctagtcaattaccactctctgatgattctgtgtcttaaaccatctcacgcctctgccagcaccacaggccacacttctgtcatcccttgcttggacttctaaagcagtcttcaagctactctcactgtatctactcttacccctcccattctctgcaccctcacaactcagcacacttgtcattttgtcttcaacatstgtcttcccagctagactaagaaggtccatgaggggaagagccatgtagatcttttgatatggtagtaccaatagcttgcatgttacttggtacaaagtggtatgaattaaatatatgttaaatgaataaatgaaagactgacagacgagggacaacagacacgtaaaatagagtaagggaagaaagaagaatgtgaacaaagacagtggaaagctcaatagcacaatgtgttcagtgaaccacaagt

SEQ ID NO: 544965 - DNA, 593 bp, Homo sapiens
caccgtgcccggcctgttcatttatagttttttaatgtttgagttactggggcttaaaaatggatagatcactatttgttgaattaggcttttcattattatcagtatcatrgtaaatgtttgtataattcttaccacaattcttggttctttgtagatgattctcacatgtttgctgatgaatgaatcataaacttgaattttgttgccagttgtttctactgaggaagagccatagcagagggactgtttgaacaggaagcaagataattgaatactgcattttttccagatattaaatttggcctctaattaaggaaccaaaggggaatttagaaactttgaaaaattcttaggttagaattggaaaaatacagagtaactacttgcaaagggaggtaatgaatccatataatcaattatatttaatagatacttttgtatttgataaactcaggcaaactgttattttaatgtgagatctctacacttctggaacttaactctgagaatcaacttatttcttatatggattttttggggggagcgaaaattaaacagagccagatagatgttaaaatggtgaacacagg

SEQ ID NO: 544966 - DNA, 623 bp, Homo sapiens
tgaggttgctaactatgaaacactggcatttaatgatttaaagtaaagaattctgtaatttgtagacttctgagaagttccagaaaataaatcagatggtatgtaacagcgaccgtgtgctcaaaagaagtgctgaaggaagcaaccctcctaaaccactgaaaaaactacgctttgatattgaaggatcagatgaagcagatggaaggtaggaaccagttttgaatgttttccagtagctgagatggtcatctggggaatccagagtctcagcactgctcctggcttataccaatttctttcatgccaagtttatttggaagttgtgagaatggctcaaaataatagatatgagtgtagtgcaaagttaaaaacatcttacaaattgcataccaacattcagtgaagatatctaataaaccctgatcttttttacaaagctattgataaaattttgttattcttaacattaaatttaaaaatgtttactcttgaaaaatattaaccactgtattttgtgagaaccactgaaaaaatrcatagcatcataaatttgtgacatttatgttttagatggttagtttttaaattttaaaattaaaagctactcactaaaataatag

SEQ ID NO: 544967 - DNA, 336 bp, Homo sapiens
caaggtgatccaggtggcagaggcagcatcagacccagtctcctgtcaggcaccaccttgggtgccggtccccagatgccctggcggggagtgtgcatgctcccggaggcccccaggtcaccccatgtgagccaggcccacagagcttggctctgcaatgcctgctgggctgctgccatgctccaccccttctgggaagctaaaagacagcccttcagtgtccagagacctgcctggccttggagcctgggtttcacatgcccaccrggctggcaggggcactcagctgcctccagccccggcggtcaccctggcattgggtccatctaactgctc

SEQ ID NO: 544968 - DNA, 650 bp, Homo sapiens
tgggcctgaagggaagccggtgagtggtggctgaagcacctggccccaggctccggaccctccgctaggtgctgctgctgctgtgtgtgtgcatgtctgtgtgtgtgtgtttgtgtgtacctgtgtctgtgtgcctctckgtgtgtgcctgcttgtgtgtgcctgtgtgctgtgtgtgcctgtgtgtgcctgtgtctgtgtgtggttgtatgtggatgtgtgtgtgcaggcccgtgtgtgctatctatgagaggcagtccatgggtaggtattatctgtgactggaaagggtgaggtatggaaattgacccccaaggaaaaagcccccagaggttgggaacaggcccaagtgaggcccagattgaggctcatcagtgccctctctatgtagggtctgcagggtccaagaggcccccctggcccagtggtgagtacccaagaaccttcacctgtcttgcccccatcctgtgccctgccccagtgaccagtactgccttcagtttccttggtggggtgcggctaactcccccctcatcagactcttttttcgccacaacagggtggtcatggagaccctggaccacctggtgccccggtgagtgaccagggaacactgcctggtgagggtctggaagggctgggataggcat

SEQ ID NO: 544969 - DNA, 558 bp, Homo sapiens
aactgaaaatacataagttaatcataacattcactatatagaatttgataattttgttgcagggacttcttttatgacaaagtgcgatatgtgaataccagccttttcaagttgtttaaccctactttacttttctcccatagcattattttcccctcaagacaacagaaaccattcagagcagaggggactgtctcagccatgcaaacctcatggagcattttggaaagttaaaaattgattcttatttttgtcatgtttactttcaaacatgaaataaaattgagttctgttttcatgcatcaaaccagaatctgaattctttttattaaaaacagttcctacagaatctttaaaaacatgcctaaaacaccggtggcattcagatcctaaaaagttacatgatttttgcaacttgggttattgtatcaacrtatacttctgttggtactaaataagacagatgttccatattgttattcacctgtcagcaagcagagagaaaaaccccaatgatcatatgttgcagtgtgtgatactttgtttattttgaggaaa

SEQ ID NO: 544970 - DNA, 631 bp, Homo sapiens
ttccagagcagacataagacgataaccctctcatcttccctcctttcaaagctattcagcagtattaaattgtggagtgggattatagtacataacataaatycctataatgctttgagtttagatagtgaaaaaaatagtaatgtgggagaaaaaaacatgcgtttgtccactgccttgtgtgaactagttctgagttacataggaaacttctctcagaaaggattgaattatgggaattttttgcctgtaactggactgatggcaacagaattgaaatgatttctgcttattctttaacttattacccccaattgcatcattccagttttacgtgtgggactggatcatatacagtaaaagtacatgggaagggaatactttccatccagtataaaatggccaactcaataataaactaagcacagtagcttttatcacacagacatttggcacagtgtttatcaaacaaggcaccattaatattttgggagggactgtttttcattgtgcagggctgtctcagagaaattgtttagggtctctgccttcagggcactaagtgtcaatagcctaactccatcttctggagaagcaggataggtgagggctctgcctcatccatggcatg

SEQ ID NO: 544971 - DNA, 328 bp, Homo sapiens
taacctctctgagcctctgctgtcacatcagtaagctggggactgtagatcttctgccctgatgtcctgagactggtacaagaagagccaaagcgaaaggactgccttcagaaatggctgccaaccctgaccatctcaggcagatccggatggtgtggccttgggcagtggtcatgtgacccccatgctcctcagtgtccacatggggtgttgctagatgacataaaataatgggtgagacgtgctcagtataatgagagcttgagarggcagatcccaccccccatccccacccccaccccttgccgccttgccaatgctttggcag

SEQ ID NO: 544972 - DNA, 596 bp, Homo sapiens
gcccctcactgcccacacggcagctccagtggagggggaggcagggaccaggacaggaagcaggctaagggcgggatagaaaagcaaaccccagtctggtggaatcgcttctggtgtagtcttcccggtgccatgtgtttgtcctctctgccttggcaggaaccaaggccaggaactgctgccaggcctgagagcygggcacagtcccaagcactgggtcgctaccccgccccactcccaccagccccactgagtgcagagaagggttcccagaagccctttgctggaaaagcaggcactgcacgggcagcccgtgttgtagaggcaagtcctctggcatcttgggggggacacagaccagaaagtggacttggagcttgtgctcccagacagagctgccttggtggttgagaaggggagagagatggcagcagttgagcagagatggccgggctcccctcactgtgtggggtgaggcttcaagcactggactgggagtcagacctggatccgagtcacaacctgacaccaaccggctgagggtctcagagcaagtcatgccttttctgggtctgggggccttcatgttattccct

SEQ ID NO: 544973 - DNA, 519 bp, Homo sapiens
ggagtgcttagggatgaagtgtactgatgcctgcaacttactttcattaaataaacaaagatggttgatgaatggatagagggataggtagagaaataggtgataaagcaagtagagtaacatcttaattgtagactctaggagcagggtctatggggatccactgtacctttcttcacactgttctaaatatttggagattttcataataaaatattgggggaagataatttttaaatacagaggtacttttcaagtacaaatccagcaattkgaggtggaagaaaacagccagagaccaagtttgtatttgggagaagaaagagggatggcatttaattttcctacaaccgcttttctgaagccagtataacttagcatgaaaccaggggaagaattcaacagctacttgtgaatggatagagggataggtagataaatagatgaaatgaaacacccaaacagaatagttcacctattctgacaacattttacagaaactgactcaacccgttgttc

SEQ ID NO: 544974 - DNA, 519 bp, Homo sapiens
ggagtgcttagggatgaagtgtactgatgcctgcaacttactttcattaaataaacaaagatggttgatgaatggatagagggataggtagagaaataggtgataaagcaagtagagtaacatcttaattgtagactctaggagcagggtctatggggatccactgtacctttcttcacactgttctaaatatttggagattttcataataaaatattgggggaagataatttttaaatacagaggtacttttcaagtacaaatccagcaatttgaggtggaagaaaacagccagagaccaagtttgtatttgggagaagaaagagggatggcatttaattttcctacaaccgcttttctgaagccagtataacttagcatgaaaccaggggaagaattcaacagctacttgtgaatggatagagggataggtagataaatagatgaaatgaaacamccaaacagaatagttcacctattctgacaacattttacagaaactgactcaacccgttgttc

SEQ ID NO: 544975 - DNA, 535 bp, Homo sapiens
ctcacagaattgacattacagggacatggtgatccaaaggagattcatcctgaggtcccacagtgagcccagaggcagagcaggcactgacagtggcctctctctctgcccacagttggagaaggaggagcagatacacagtgtggacattgggaatgatggctcagctttcgtggaggtgctggtgggcagttcagctggaggcgctggggagcaagactatgaggtaagcagggctatgagatggatcccatactgacctctgcccctcatgctcgcatcaccgtctcccccaggggctggggctgggaagacatggggcagatgtgagtcacacctgattgctgccctctggaggatcacccagtgtacggaggagacagaaggcagacacagggcggtaaactgcacatcagggaagasagcaagtttggatcatggcttaaaatgacacaaatgtattattcgactgttctggaggtcagaagtctgaaatcactctcactgggctaaaatctaggtgtaggcagagccc

SEQ ID NO: 544976 - DNA, 455 bp, Homo sapiens
tatagttatgttctgtttttctcagcaaaaggctttattgtccaattttataatttcacagcatgtcagttagaaaagagactaagtcagtaacaaaatatacccaaccaaaagtggctgcattcatcttttttttttttttttttttttttgagacggagtctcgctctattgccaggctggagtgcagtggcgcratcttggctcactgcaacctccgcctcctgggttcaagtgattctcctgcctcagcctcccgagtagctgggactacaggcacgcgccaccatgcccagctaatttttttgtatttttagtagagatggggtttcactatgttggccaggatggtctcgatctcctgacctcgtgatttgcctgctttggcctcccaaagtgctgggattacaggtgtgagccactgtgcccagtctttttgtttcgttttttgtttt

SEQ ID NO: 544977 - DNA, 628 bp, Homo sapiens
gggatcagccagataccaagatatcacagacacacagggaaaaagatcatcctgaaatttgctcagattaggaaccattattcagtgttctgttatcaataagaccaagaataggggctgaggctgatccattattcaggtagtattggcagcatgaccaaaggcggtgccaaggaagggtacaatgtctctggaaacaarctcaagcattttccctcaaccctggagtctactagcaccagccagacctctgtacctctgtggcagtgcatccgcagccctgcacagccagctgctctctgcacaaaaaagggcagccacaggctggaggtgggcactccttcccaaggcctctatctcaaccaggagataaagatgccttttttgaagctcttctcagatgtcccagcaatgggctcccagtctgtgcatcctcctgcagcaggaacttcagtgtgagctgaggtccatcactgtgatgtggatgcacgaatgcaaacaacacttaatgttattttactcaattcagaatattctggcagttgcgtaaaataggaatagtagctcccaaaatgaaatttgtgtctcattttctttatgagagaaaagaaaaaaaaacagaaagcag

SEQ ID NO: 544978 - DNA, 610 bp, Homo sapiens
gagcctggcacaaggggagatgcatttcagagaatggatgagtcagtgatggagtgagtgatgagtggatggatgaatccataacaggagcaccctagatccattttacccttgcggagatctggctgtaagtacaagaactcttacccttttgattgctgggctacgggargtccttgaaattaatggggagtcactatcatgggcggccccaccttggtcaaagattcctcctgagtctgcagcaccagacctcctccaggtctctgtgctctccttcagactctttcccacaacaactctacacagatcagagatccctttccagaaacccatgcatagagttgtgttattttggaaccacttctggtaccaaaaactccattaggtttacatcaataaaacagaatcactaaaagtactatggagaggaggatttatgacaggagttagaccttatataaatgtagggggagctgaggaagagaaggtctggaggggagatatagctaggcagatttaattcatgattaatgtgaccgtgacctcttattctactcaaaggagagcatatgatttcaacaaaaaaatattgattttcctttgtaaa

SEQ ID NO: 544979 - DNA, 610 bp, Homo sapiens
gagcctggcacaaggggagatgcatttcagagaatggatgagtcagtgatggagtgagtgatgagtggatggatgaatccataacaggagcaccctagatccattttacccttgcggagatctggctgtaagtacaagaactcttacccttttgattgctgggctacgggaagtccttgaaattaatggggagtcrctatcatgggcggccccaccttggtcaaagattcctcctgagtctgcagcaccagacctcctccaggtctctgtgctctccttcagactctttcccacaacaactctacacagatcagagatccctttccagaaacccatgcatagagttgtgttattttggaaccacttctggtaccaaaaactccattaggtttacatcaataaaacagaatcactaaaagtactatggagaggaggatttatgacaggagttagaccttatataaatgtagggggagctgaggaagagaaggtctggaggggagatatagctaggcagatttaattcatgattaatgtgaccgtgacctcttattctactcaaaggagagcatatgatttcaacaaaaaaatattgattttcctttgtaaa

SEQ ID NO: 544980 - DNA, 155 bp, Homo sapiens
ctgctgaaaggccctgaggcacatgctgtcaggagctggctctgtcctgggcagatatcaccatctgtaccttggttcaggctgccgtgggcaccaggccctgtgctgggggagtgctgaggrgcctgaagggactcagggtcccgtgatgaggc

SEQ ID NO: 544981 - DNA, 534 bp, Homo sapiens
gcagcagcagcagcagcagcarcaacaacaactactgtgccttgggctgctatgggggatggcacctctcagccctcccaggaaacacacagagctctgggcccatcccagccctggcctgtggcctttcttgtgaccatcagggcctggagacccagcaaggagttgcctgggtgctggctggtcactgccagaggcctgggctgcatgaggacctccagggcatgttgctcccttctgtcctcagcaaggctcggtcctggacattctaggtccctgactcgccagatgcatcatgtccattttgggaaaatggactgaagtttctggagcccttgtctgagactgaacctcctgagaaggggcccctagcagcggtcagaggtcctgtctggatggaggctggaggctcccccctcaacccctctgctcagtgcctgtggggagcagcctctaccctcagcatcctggccacaagttcttccttccattgtcccttttctttatccctgacctctctgagaagtggggtgt

SEQ ID NO: 544982 - DNA, 534 bp, Homo sapiens
gcagcagcagcagcagcagcaacarcaacaactactgtgccttgggctgctatgggggatggcacctctcagccctcccaggaaacacacagagctctgggcccatcccagccctggcctgtggcctttcttgtgaccatcagggcctggagacccagcaaggagttgcctgggtgctggctggtcactgccagaggcctgggctgcatgaggacctccagggcatgttgctcccttctgtcctcagcaaggctcggtcctggacattctaggtccctgactcgccagatgcatcatgtccattttgggaaaatggactgaagtttctggagcccttgtctgagactgaacctcctgagaaggggcccctagcagcggtcagaggtcctgtctggatggaggctggaggctcccccctcaacccctctgctcagtgcctgtggggagcagcctctaccctcagcatcctggccacaagttcttccttccattgtcccttttctttatccctgacctctctgagaagtggggtgt

SEQ ID NO: 544983 - DNA, 503 bp, Homo sapiens
tttgggggatttgcagtagtcccmaaggaggaccaggatgtagtgtgtggtggctgcatggaattcagtagctgtgccacataacttggggccttactgtttgcagacagcatctgtctgggaagttcagggtgggagggttgaagttatattggtggtacccaacttttatccgcatattcttcagcccccagagtgtgaaaggccggaatgacaccttttacctgacacctgagccagtggtggcccccaacagcccaatctggtactcagtccagcctatcagcagagagcagatgggacaaatgctgacgcggatcctggtgataagagaaattcaggaggccatcgcagtggccaatgcaagcactatgcactgagatgccttggccatggcacaagagaaaccagccaggaaaaaccagacagactttcacactaaagaagaggcctccatttttttttttcttttttttattggtgtagttacgaagcctttcagg

SEQ ID NO: 544984 - DNA, 376 bp, Homo sapiens
gctgagatgggtgcagagggctgaggcccccaggcctctcctggcttggtttccccagatgagtgttcatttgggtcttccatcagaaagtcccctcctgacctctgggagtggggagctcaagggtgggaggccatagcttggggatgctggcaatgtgtgggatgggcccagggawggcctctggcctactaggggctctggccctgacccacggccactcactcctcagagacgtctcccacaacctgctccgggcgctggacgttgggctcctggcgaacctctcggcgctggcagagctgtgagtgtcccccagtcgtgccagcatgcggggctcactccgggtgggctggcggcaccgcctcttgctgct

SEQ ID NO: 544985 - DNA, 502 bp, Homo sapiens
cccgcgcgcaccgcggcgacacccgggccgccctcggaaggcacggacgtcgcgccgcgctcccggggcgcttcacttgcgcccacggccgacgccccggcagcggcgggcaggtgccacgacctctggacgtttstcgccccttctcgggaatggaacgcttagagaagcgcaggtccacacccaaaacacaaggcggcactgttgcgtgtgcaccggcgactctgcggccagcgccctgggtctcgccccgggaacgcctaggagcctgagagcgccgcgccacacccggcagggccgcagcggcgcgcacgcgacggggtgtcgtccactgggcagcaggagcgtcagtcaagggcgaggggcgggaattccgtgcaatctgagcatggtcattggcgaggacaggcgaagaggaggacggataggcggggctgggcggggcttcccgtgggcgcctggagcttaccaggagcgaccgaagcggaggcggggagcgagg

SEQ ID NO: 544986 - DNA, 632 bp, Homo sapiens
ttctcagcttctcctcctgcagtacaggaaggacaatcccttccgactgcttctcacagggagagggcagtggtgagcctagaaaataaaggcccgaagccagccccgccccatttgtgcctctccctcctctccttttctgcttcgcagagcagacaatgcaacagtcgcccccgcccagctcagcctgaagaccccttctccactcccatccctttctggctcagccacccggcagtgggccaggttcggatggagggagggagaggagctggagagagttttaagtactctctgggcttctcacattgctggcttcagtggttgctggacgcaaattgatgtgatgtcagacaccggcagcagagaaggaagctaaggcatttgggtctgtgctgctgtggcacctgggactcagtgtgaagggatcaggctaggtttgaaattctcttccggcttaataatttgcaggtctgggctgggaggtaaagctctgagtacactgcgagtgtcaggggtccggcaggggrgctttttccagctcctacccactcccgcgtggggtgaaaccttgagagatgagacaccaatccagggcctctgaagacccacgaggtagagtgcacttaaca

SEQ ID NO: 544987 - DNA, 632 bp, Homo sapiens
ttctcagcttctcctcctgcagtacaggaaggacaatcccttccgactgcttctcacagggagagggcagtggtgagcctagaaaataaaggcccgaagccagccccgccccatttgtgcctctccctcctctccttttctgcttcgcagagcagacaatgcaacagtcgcccccgcccagctcagcctgaagaccccttctccactcccatccctttctggctcagccacccggcagtgggccaggttcggatggagggagggagaggagctggagagagttttaagtactctctgggcttctcacattgctggcttcagtggttgctggacgcaaattgatgtgatgtcagacaccggcagcagagaaggaagctaaggcatttgggtctgtgctgctgtggcacctgggactcagtgtgaagggatcaggctaggtttgaaattctcttccggcttaataatttgcaggtctgggctgggaggtaaagctctgagtacactgcgagtgtcaggggtccggcaggggggctytttccagctcctacccactcccgcgtggggtgaaaccttgagagatgagacaccaatccagggcctctgaagacccacgaggtagagtgcacttaaca

SEQ ID NO: 544988 - DNA, 420 bp, Homo sapiens
ctacagagagccaagattgcaccactgcactccagcctgggtgacagagcgagactgtctcaaaaaaaaaaaaaaaaaaaaaagaatatgaatgatgaatgtcacctcctttctcttytccatgagacagccaatatctgatcaaggccctgggaatgggaatccatagctcgccacccacgtctgccccctgcctagccacgctgcgctcagggaccattccgacaggagaggacgccccacttcagctccccccagtgccccgggtgaatgaacggcatgaagggttaggcgggcacacgtcgtctctgcacgcatcgcacggcgccctctgcccgcgcccactggcgtgcccgtcggcatgcccgggccccttcgaagactgcttgcttctggagtgccagcggcctcctggcccag

SEQ ID NO: 544989 - DNA, 443 bp, Homo sapiens
gggcgctgggcctagcccagagtagtgcttgctccccctgccttgtcccaccagggaggcagcagactcaggccctccatggtcctctttgtcattttgttgacatgcattcctccttttgtcatcttgttggggggaggggattaaccaaaggccaccctgactttgtttttgtggacacacaataaaagccccgtttatttgtaatgcgttggctcttcctggaggagagggttgggctcccatggcaagggcctctgcgtcttggggctccaggattgcaatcyggctttgttgggtccgcatttttgctttagtctggggataggaatcaaatgttacccagagatgtttgtgttttgtttgggagttttattccctaactcattccccaaagcacgtgtaactgcttatacatataatcgtggtacaacaaggtatat

SEQ ID NO: 544990 - DNA, 492 bp, Homo sapiens
cctcgctccccgcctccgcttcggtcgctccyggtaagctccaggcgcccacgggaagccccgcccagccccgcctatccgtcctcctcttcgcctgtcctcgccaatgaccatgctcagattgcacggaattcccgcccctcgcccttgactgacgctcctgctgcccagtggacgacaccccgtcgcgtgcgcgccgctgcggccctgccgggtgtggcgcggcgctctcaggctcctaggcgttcccggggcgagacccagggcgctggccgcagagtcgccggtgcacacgcaacagtgccgccttgtgttttgggtgtggacctgcgcttctctaagcgttccattcccgagaaggggcgagaaacgtccagaggtcgtggcacctgcccgccgctgccggggcgtcggccgtgggcgcaagtgaaagcgccccgggagcgcggcgcgacgtccgtgccttccgagggcggcccgggtgtcgccgcg

SEQ ID NO: 544991 - DNA, 611 bp, Homo sapiens
tgcatcacacagcacccacaagggccctcttgtacaactccacctcacccccgcggggagatgttcaggccaagcagaggatgttaatgccttcagggtcttgggggtccctccaggcagcccaacctgtctagcwgatgcccagatcccggtctgagaatgatactaagaaacctctcaccagcagaaaaaacacagtttctttttcctctcaagtgatcctcccacttcagcctctaaagtagctgggactacaggtgcacacaaccgtacccagctttgaaacaaatgttttgaatgtgatttatttatttttttcctttttttttttccgagacagagtctcactctgtcacccgggatggaatggagtggcgtgatctccgctcactgcaacctccgcctcctgggttcaagcgattctcctgcctcagcctcccaagtagctgggattgcaggagtgcaccactacacccggctaacttttgtattttcagtagagatagggtttcaccatattggccaggctggtcttgaactcctgacctcaaatgatctgcccacctcagcctcccaaagtgctgggattacaggtgtgagccaccacgtcc

SEQ ID NO: 544992 - DNA, 595 bp, Homo sapiens
cccagcctcaggcacagcctctggaggacagctttgtcctcccacccagcagccccccrgtgtggagggacactgacaacattccactcaggggcagctttcactgttgtggcccagcctctagctgcagcctctcctccacagggcccctagagacagagatggccatcacaccctgcccaagctgctcttctacaggggccacaagtccaggggcttccaaaagtccccatcatttcattcctactgtggcacccaagaaagaaagaaactcatacttttgatttacatttctcttgagatctgaattcacacagagctgcagctacaccggtgtgcagaatgacaaagcatgcccgtggagtgtgaggggtgttaacatctcagagagcagtggcccacctgctcctctctttttgcaagtggaagggagaggatcaccctgagatcagattccctgtagtgtctaccttaaagcccccgcctggtggtgaggagtctgatctcgaaactgagaataatacttcatctttttctcgaagattctaaggtaaaaatggatgactgtaagcaatgacaactgtcactaccctcc

SEQ ID NO: 544993 - DNA, 624 bp, Homo sapiens
tcacaactgggcttgtgggggccatcttcagtgcaaccgttgtgacaaagtcaagaggctgcctccctgaagcagacccactgcytacgccacactgacggtccagaggccccctcctgagggcggccagcaaggggcactgtggcagctcccactgtgcctgtcccagactgggtcagcaggtctctctggacagcacactgcaccaagtaagcccaccaaaaacgcatcaggtgtggccatggcccacagtaccttcttcattccctgcctctaacatgtgcggtctgaatgaattttgtcactcttctgccatttataaaggagaagacagtgatccaaagctatgcatgtttctgaagccctcaaggaagctcggtgcaggccatcacttcttttggcagaaggcgggctgtggtctctatgtacacacgcgagcccgccagtgacgtgcggcagtgcgtggcgtccaggctgggacaggggcctttcaagtctccccagggaccggtgttttctacaacagacaggtgctcccagaccgttggggtacaggccaggccgtctacaccacagtattgagggagctgcggctgtggcggccaccccctggcagtgcctctg

SEQ ID NO: 544994 - DNA, 624 bp, Homo sapiens
tcacaactgggcttgtgggggccatcttcagtgcaaccgttgtgacaaagtcaagaggctgcctccctgaagcagacccactgcctacgccacactgacggtccagaggccccctcctgagggcggccagcaaggggcactgtggcagctcccactgtgcctgtcccagactgggtcagcaggtctctctggacagcacactgcaccaagtargcccaccaaaaacgcatcaggtgtggccatggcccacagtaccttcttcattccctgcctctaacatgtgcggtctgaatgaattttgtcactcttctgccatttataaaggagaagacagtgatccaaagctatgcatgtttctgaagccctcaaggaagctcggtgcaggccatcacttcttttggcagaaggcgggctgtggtctctatgtacacacgcgagcccgccagtgacgtgcggcagtgcgtggcgtccaggctgggacaggggcctttcaagtctccccagggaccggtgttttctacaacagacaggtgctcccagaccgttggggtacaggccaggccgtctacaccacagtattgagggagctgcggctgtggcggccaccccctggcagtgcctctg

SEQ ID NO: 544995 - DNA, 609 bp, Homo sapiens
tatgtatacattttcttcccaatgattaacagagttaattagtaccactagatgttagagacccaytggtgcttcttagatccttgtaaccaggcctccattggtttctcttgggaaccagatctatgagtcatattaattttctcaagagaaaaaatatcagaagagttacttggtgatggaaagtaaggaaaaaaagaaaaatgcaggaaatatgttccctctaggacaggaaagtgataccatgagcttacttagattaactgagttgaggaaactaagacgtcatccaccattgttgaagatgccctcattcatggtgtgggggtcagtgagcttaatgtgtgtcaagatattcttttagaaacaaggaagagagctttaatgcaatggtgatattcgtataactattcttgatttcttcccattcaacacttttttttttacttcattggatagggatgactgaaaccaacacttttatcatctgttaactattccaaaatttatcattcaacactgaaaatgtgttgtataaatgaatgaatgtatgtcttcgtgtaaccattctttccttaaaacataccgagttctgactaaatataaggg

SEQ ID NO: 544996 - DNA, 611 bp, Homo sapiens
ctggacagacgctggtgttccctaaacaggttttaagatgtgggaagattccatgtctcttggctctgccttctgggcttctgcctctgggtcatccttcttttctcacgaaagatccacgtgtttgcagccaagtagttttatcagccttcttcttgacagcagagtttggggtctctgacagtcttctttcattttgcactctgtcccctacagaccaatctgccagcactgtgggtgaaacagctttcccaaaccctttgcctgtcctctgtgggtttcagtggggctcatagtcgatttgtcaagagccatacccatgaatcttttagagataaactctacctttctaccttcagctcctgccaagatggcccccagggtaactcactgaagcttcccaagggccctaagktttggtggagaggttctgcatggtacacccttgtaatctcttgcaacagacctctgtgtgactcattgctactcccatcctttgatctttatgcataatcacaaaagactgtacagttacaccctatgccacatgctcagaagccatttgttaatttcagcatctttttccatgtggggagactgacaattttcaa

SEQ ID NO: 544997 - DNA, 648 bp, Homo sapiens
tgcttagcactgtaataaatataatcatactaatcattgacagtacaaatgataggatttttattgtgagataatttctgtcctgactggttggttggactgtttcttttgaatcaaagtgtgcaatttagaatagaccttaaatatgcattgacataaaattaattcatttcattgataggcaaggacaatcttgaagttatatcttcacatgaaatatgccaaggatgaggttgacccgagggttctcatctgtagcaaaagactttctatcatggctgttagtaagaattcaggaatgctattctttagcaaaaggaatttcttgctaacgtagttaagacatctctctcctgaatttgtgctgctgaggggatccttcaccaccataattctttcaaagctcatttctgacttttyaaaaattattcaaaaaaatttagaagaattgtatttattctaagttgaacattaagtttaggcttattaaaggagttcttcagaatcttacacactcattgtagcaaccatgaagagccagccactgttgacaggtaaaatctttcatgccatagattattcttggaattcaaccattagaattatatataatatatatatttatataatatataaatatatttatat

SEQ ID NO: 544998 - DNA, 648 bp, Homo sapiens
tgcttagcactgtaataaatataatcatactaatcattgacagtacaaatgataggatttttattgtgagataatttctgtcctgactggttggttggactgtttcttttgaatcaaagtgtgcaatttagaatagaccttaaatatgcattgacataaaattaattcatttcattgataggcaaggacaatcttgaagttatatcttcacatgaaatatgccaaggatgaggttgacccgagggttctcatctgtagcaaaagactttctatcatggctgttagtaagaattcaggaatgctattctttagcaaaaggaatttcttgctaacgtagttaagacatctctctcctgaatttgtgctgctgaggggatccttcaccaccataattctttcaaagctcatttctgactttttaaaaattattcaaaaaaatttagaagaattgtatttattctaagttgaacattaagtttaggcttattaaaggagttcttcagaatcttacacactcattgtagcaaccatgaagagccagccactgttgacaggtaaaatctttcatgccatagattattcwtggaattcaaccattagaattatatataatatatatatttatataatatataaatatatttatat

SEQ ID NO: 544999 - DNA, 662 bp, Homo sapiens
aatccaactcacttataatcctgatgaatcatcaaaaccaagtgagaaaataaagactactgaccaaaaaataataataataatctgtgaagttcttttgctgttgttttagttgttctatttgcttaaggatttttatgtctctgatcctatattacagatatgatagacgctgctactttgaagtccaggawaatgttagaagaaattatgaaatatgaagcatcgattttaacacatgactcaagtattcggtaaggatttttgttttaatttgctctgcaagactgatttagtttttatttaatattctatacttgagtgaaagtaatttttaatgtgttttccccatttataatatcccagtgacattatgcctgattatgttgagcatagtagagatagaagtttttagtgcaatataaattatactgggttataattgcttattaataatcacattgaagaaagatgttctagatgtcttcaaatgctagtttgaccatatttatcaaaaattttttccccatcccccatttatcttacaacataaaatcaatctcataggaatttgggtgttgaaaataaaatcctctttataaaaatgctgacaaattggtggttaaaaaaattagcaagcagaggcatagtaaggattttgg

SEQ ID NO: 545000 - DNA, 559 bp, Homo sapiens
cagctgcccgcgccctcccctgcccgcagaggtgagcttcctcaattgctckctggacaacggcggctgcacgcattactgcctagaggaggtgggctggcggcgctgtagctgtgcgcctggctacaagctgggggacgacctcctgcagtgtcaccccgcaggtgagaagcccccaatacatcgcccaggaatcacgctgggtgcggggtgggcaggcccctgacgggcgcggcgcggggggctcaggagggtttctagggagggagcgaggaacagagttgagccttggggcagcggcagacgcgcccaacaccggggccactgttagcgcaatcagcccgggagctgggcgcgccctccgctttccctgcttcctttcttcctggcgtccccgcttcctccgggcgcccctgcgacctggggccacctcctggagcgcaagcccagtggtggctccgctccccagtctgagcgtatctggggcgaggcgtgcagcgtcctcctccatgtagcctggctgcgtttttctctgacgttgtccggcgtgcatcgcatt

SEQ ID NO: 545001 - DNA, 418 bp, Homo sapiens
aaagaaagccccccagctgacctcgtcrgagctgatggccatcaccagaaaaatggcagccacagcagccacttgttgccaactcagtgaggacaaactattggcctgtggcgagggagcggtgagtgtctgcttggtttggtcccatctcatttctgccctgtttgacttgaaatagcctcataattcccctctagggaagacggtaaaaaccaatgtagagatggccttaggaggcttgtttgattagtcacggttggaggggtgtgagaacccagctctggatggctggcatgtggccatgcttcctattcctccagggtggctggtggaagttcagccagtttagtcaacaatatctgagccaactttatatatcagaaagacagaacgaccaacatgtaactcataattcata

SEQ ID NO: 545002 - DNA, 641 bp, Homo sapiens
agacaaggaataacaatcacacatccccccccgggcatttattgagtaacctttatgtgccagtcctctaagccaattagtgagaacacaaaaataaagatggaatagactctgcctttatggggctctcccatctattttgagggactgatgtctaaacaaaataattagataagtgatagttacccttatagtggtatgaacatgaggagccacggaggcagtatttaattcagcccagaagattaggaagggttcaggaaaatcttttacagacaaactgacgcttgagctgagacttgaagaaagggtaaaatttctctggttgaaaaataaactggtgtctcattgagaaggatcaatatgttgaaaaacaagaacaacatgaaataacattgtgcatttgggaaatgacaagcggttcggcgtgatcaatcagaaagcgtggggacagacagcggaggccaggtctaggatgccgcgctaagggatcaatattggatcctgagacaatggagtccagtaaattttcaagcaaatgaacagcatgatttgatgtgttttrgttctcatcactccagcatctgtctgagtgcagcttggaggaagacaacactgggcagagtcaggaggctgttgaa

SEQ ID NO: 545003 - DNA, 641 bp, Homo sapiens
agacaaggaataacaatcacacatccccccccgggcatttattgagtaacctttatgtgccagtcctctaagccaattagtgagaacacaaaaataaagatggaatagactctgcctttatggggctctcccatctattttgagggactgatgtctaaacaaaataattagataagtgatagttacccttatagtggtatgaacatgaggagccacggaggcagtatttaattcagcccagaagattaggaagggttcaggaaaatcttttacagacaaactgacgcttgagctgagacttgaagaaagggtaaaatttctctggttgaaaaataaactggtgtctcattgagaaggatcaatatgttgaaaaacaagaacaacatgaaataacattgtgcatttgggaaatgacaagcggttcggcgtgatcaatcagaaagcgtggggacagacagcggaggccaggtctaggatgccgcgctaagggatcaatattggatcctgagacaatggagtccagtaaattttcaagcaaatgaacagcatgatttgatgtgttttarttctcatcactccagcatctgtctgagtgcagcttggaggaagacaacactgggcagagtcaggaggctgttgaa

SEQ ID NO: 545004 - DNA, 637 bp, Homo sapiens
acaataggggagaggaagcaatcagagatgcatttgtctcaggtgagcctcagagggatgactttgaatagaatgggagacaggtttgccctaagcagttcctggcttgacttttccctttagcttagtgattttgaggtcccaagatttattttcctttcactgtatatacataatatgacatttaactttccaatgactctcagttttctcctttgagaaaggctttctcaaataacaggcactaaagtgatgtgatattttattgtaagcaaatcttaattcccaaagccctagctctgcccatgaatcattagactcagcggtgggtgactggggagtgtgacagcyccttaactttgcaacagggttgttctagaagcaaacttggcctgggagaacttctgggcaggtgtggccagggaggtgtagggactggagctttaatttccatctgtttttgtttgtttactcttgcgttttctgtctgccactccagcactctggcgcttacagaatgaagatctacgacagagatgaattgaggggacaaatgtcagagctcacagacgactgtctctctgttcaggaccgcttccacctcactgaaattcactccctcaatgtgctggagggc

SEQ ID NO: 545005 - DNA, 468 bp, Homo sapiens
atggtagctcagaggggttatcatttggtcaaaatcacagagctagtaaatagcagagcaggattcaaacagttttcaaaaaacttctctttctcctaaacctgtttgcaaagtccttaatttgtgctgaatgttggctttagaagttgatgagtttgatctgtggctgtttctctgaaccatccttgtatctggttttgatcaccacawttggaacttctgtttaatcctgcatatctccattgaaaggacaaaatcattggtgccaactgattttctttaccatagttgtgacacaaaggaagaaagaaaaatcaagggtgttatttccataccccgtttgcaagcagaagccagaagtgagatcctcgcccactggtcgcctgccaaactgcttctccaaatggactcatctgctacagcttatggctccacagtttccaagagggtggcatggcattatggtat

SEQ ID NO: 545006 - DNA, 468 bp, Homo sapiens
atggtagctcagaggggttatcatttggtcaaaatcacagagctagtaaatagcagagcaggattcaaacagttttcaaaaaacttctctttctcctaaacctgtttgcaaagtccttaatttgtgctgaatgttggctttagaagttgatgagtttgatctgtggctgtttctctgaaccatccttgtatctggttttgatcaccacatwtggaacttctgtttaatcctgcatatctccattgaaaggacaaaatcattggtgccaactgattttctttaccatagttgtgacacaaaggaagaaagaaaaatcaagggtgttatttccataccccgtttgcaagcagaagccagaagtgagatcctcgcccactggtcgcctgccaaactgcttctccaaatggactcatctgctacagcttatggctccacagtttccaagagggtggcatggcattatggtat

SEQ ID NO: 545007 - DNA, 491 bp, Homo sapiens
gagaccaactgcttcaagtttcatttaacacatgggaaactaaggcsagagaaatttcaagacttgcccaagattagacctcttgttaagtaatgaaagtgttttaaaaacaggtgggtcaaattctgtttttaaaatttccattatgatgaaaatttcagtattacaggcttccaaatcccagcagatgggccacttgtttaaaggagagtttgatataataaagcatctaaaaacaagagtttggataattccttagggttgttatgatgtgatttgacttataattggaaataccgttttattcattgtactgattttcatttctctttttcttctagaatgtcttgattgtggaagtaagttcacatttacttttaatataacatttatgacttttctaacttagtatgcaccatcctaaaggtaagccagggagagaaattcctctgcatcagttttaatggtgggcttgtgttctaaaggagtga

SEQ ID NO: 545008 - DNA, 551 bp, Homo sapiens
caaagatctccaaaccccgggtgttcaaaatcaaaccaaaggggattatagtcccagctctactcwcaactcactggttactttagccacgagattgccctcgctgagagtcggtttcactgtccataagatgaagaagtacatcacggtggtctgtgaggtgtcattgaggaaagatggtccagtgcccccatgccacatggccttcgggcagtgctcccagcgccggcgccagggcctgggatacgctggaatctgcgcggcgctcacccagctttcctatgcagagtggccatcgtggtgggcgccccgcggaccctgggccccagccaggaggagacgggcggcgtgttcctgtgcccctggagggccgagggcggccagtgcccctcgctgctctttgacctccgtgagtcccaggcaaggagagcaaggttggggtcagagggacgtggactgcccgggcttcagcgccccaccccttcttgtgccttccaggtgatgagacccgaaatgtaggctcccaaactttacaaaccttcaaggcccgc

SEQ ID NO: 545009 - DNA, 551 bp, Homo sapiens
caaagatctccaaaccccgggtgttcaaaatcaaaccaaaggggattatagtcccagctctactcacaactcactggttactttagccacgwgattgccctcgctgagagtcggtttcactgtccataagatgaagaagtacatcacggtggtctgtgaggtgtcattgaggaaagatggtccagtgcccccatgccacatggccttcgggcagtgctcccagcgccggcgccagggcctgggatacgctggaatctgcgcggcgctcacccagctttcctatgcagagtggccatcgtggtgggcgccccgcggaccctgggccccagccaggaggagacgggcggcgtgttcctgtgcccctggagggccgagggcggccagtgcccctcgctgctctttgacctccgtgagtcccaggcaaggagagcaaggttggggtcagagggacgtggactgcccgggcttcagcgccccaccccttcttgtgccttccaggtgatgagacccgaaatgtaggctcccaaactttacaaaccttcaaggcccgc

SEQ ID NO: 545010 - DNA, 500 bp, Homo sapiens
caaagtgctgggattacaggcatgagcaccgcactcggccaggagaagctgttatagccaaggaatactacgactactggtggctgctatttattgagtacctaccatgtgctgggagttttagataatttttctcagcaaggtagttatcttgccattttacaaatgagaaaaatgaaacttcgagagtctgagtaactttatcccaaggctacacagttggtacaaacaagactggacttcagtgtcacctcaaagcctttttttttttttttttttttgagatggagtctcackctgtagcccaggctggagtgcagtggcaccatctcagctcactgcaacctctggctcccaggttcaagcgattttcctgcctcagcctcccaggtagctgggattacaggtgtgcgccaccacacccggctaattttttttgtatttttttcagtagagacagggtttcaccatgttggccaggctactctcaaaactcctga

SEQ ID NO: 545011 - DNA, 639 bp, Homo sapiens
cagagatggcagaccaggctgcggcctggctcacccgtcagggcagcttccaagggggattccgcagtacccaagtaggggccgtccccgggctctggsgggggtgggtagtcctcagaccaagggcttgcttgagtcctggctcaacctccctaggacacggtgattgccctggatgccctgtctgcctactggattgcctcccacaccactgaggagaggggtctcaatgtgactctcagctccacaggccggaatgggttcaagtcccacgcgctgcagctgaacaaccgccagattcgcggcctggaggaggagctgcaggtgaaccactccctggtgaaccactccctcgcctgggtagccaggacacctgggcctcgtggccaggccagaagccgtccccaccctcccacccgtggaatccccgcagcacttcttcctggggtcttcgggggaagactgacttcctggctgcgtgacctggagctctgagcttcagttttctcacttgtagagtaacatacacagagttcaccctacagggtcgttagaaggctgaagtgagataattcatgtgctggtataaactttgtggaaatgtgaggtggggagaggaggtggggcctgttttgagga

SEQ ID NO: 545012 - DNA, 415 bp, Homo sapiens
acttgaacccgggaggtggaagttgtagtgagccaagatcacgcaattgtactccagcctgggcgacaaaagcgaaactccatctmaaaaaaaaaaaaaaaaaaaaaagctatgtgtgttggtgtgcacctgtagtcccagatactcaggaggctgaggagggagaattgcttgagcccaggaggcagaggctgcagtgagctgcgattgtgccactgcactccagcctgggtgacagagtgagaccaaaaacaaacaaaacaaaacaaacaaacaaacaaaaaaacgaaagaaaagaaaggaaagaaaaaggaaatccagaatcctaggttcttagtattgtttcttgcaatgttagaagatataggggccaggagaggtgctcacgcctagtaggaaggaaggagaatcagtc

SEQ ID NO: 545013 - DNA, 661 bp, Homo sapiens
atacttataaatctatatataaattattttatccaattgagaatcatgtttattsgaattatttttaatttatttttatttatagtgtttttaagtatatataagtgtatgttttaagtcttgagctctttcaaccttttgttagtagtttccacctttcaagtaattcttaggagtcgattcccattcaaattcagatacagatacatattcacatagaattttgctattggtctcatatttttataaatgtttttgatattaagtttttgatgctttggttgatattgcattgagtggagatatagtaatctctaaggacaaagcctagattaaaatatttatggcaaagctggtaatgaaacaagctcataaggaaataacaacatttaaggaaatacatcattctatatctggaacaactgcctcaagagagttaggtttggtcctaatgaatcaaagcaaataccaaatgaagattaatcattgttatcagggcaagagaaaggggctttgtatatcttggtaactattgaaactggaaaggctatcagtacaaattcacaacagtatgataaagcgtagaattttctctgtaggaattattattccagacattaagagtctctctaacctctccatactctcttccctgctctaa

SEQ ID NO: 545014 - DNA, 661 bp, Homo sapiens
atacttataaatctatatataaattattttatccaattgagaatcatgtttattcsaattatttttaatttatttttatttatagtgtttttaagtatatataagtgtatgttttaagtcttgagctctttcaaccttttgttagtagtttccacctttcaagtaattcttaggagtcgattcccattcaaattcagatacagatacatattcacatagaattttgctattggtctcatatttttataaatgtttttgatattaagtttttgatgctttggttgatattgcattgagtggagatatagtaatctctaaggacaaagcctagattaaaatatttatggcaaagctggtaatgaaacaagctcataaggaaataacaacatttaaggaaatacatcattctatatctggaacaactgcctcaagagagttaggtttggtcctaatgaatcaaagcaaataccaaatgaagattaatcattgttatcagggcaagagaaaggggctttgtatatcttggtaactattgaaactggaaaggctatcagtacaaattcacaacagtatgataaagcgtagaattttctctgtaggaattattattccagacattaagagtctctctaacctctccatactctcttccctgctctaa

SEQ ID NO: 545015 - DNA, 464 bp, Homo sapiens
tacgaagttatgcaaagcttccctgaaaaagtggtctgctaaattttatcatgactgttggatgtttaaagtcatttgcagatcaattatgataaaaggactscttgagttgtcacaaaagtaccttaaaaatttaagtaagaaaaataagtactagttgaagtgtctctaaaaacttttagtttgtattgtcacctgattacaaatttatgtttttagatttgtttttccattttcagcttgacatttactcatttcagagaaaccctgtggttttcctcatgtggaaaatggaagaattgcccaatattactatacttttaaaagcttttactttccaatgagcatagacaaaaaattgtcatttttctgcttggctggttataccactgaaagtggaagacaagaagagcaaaccacgtgtacaacagaaggctggtctccagagccaaggtgcttcagta

SEQ ID NO: 545016 - DNA, 344 bp, Homo sapiens
ctctgactctctcgggtctgcattctttctttgagaacacacagttccccattcttatcctgacctctgggctttcaggactgccaagaacattggggatcctgccagaaatgaggggagcttgagctttcgttggcttctatttggggtagaaggagattgatrtgcagagcagcttccactcatctgacttttcatgggtctctgggaacaatttccaaatggtaaactctctggcttctctctctttgcagatgaccgcttcccgaagccccctgagattgcaaatggctatgtggagcacttgtttcgctaccagtgtaagaactactacagactgcgca

SEQ ID NO: 545017 - DNA, 268 bp, Homo sapiens
tctaaatagtatctcttctctttgtctttttctgtttcaggcctccagttaccaactcctgtctggtttcatgtccttttctatctggcagtgggaataatgtttttagtgaacactgttctctgggtgacaatacgtaargaactgaaaagaaagaaaaagtggaatttagaaatctctttggattctggtcatgagaagaaggtaatttccagccttcaagaagacagacatttagaagaagagctgaaatgtcaggaacaaaaag

SEQ ID NO: 545018 - DNA, 655 bp, Homo sapiens
agggtttctctctgactttccgttaggaatgttaatcaggtgaacattcattcattttgaaagcctaggaatcctgtagcctcattttaagtgtctttgcataacaccatttaaacaggtttccagttgaaccctctctgagaggctgtatcatgttacctttggtcctctctctgtagaagctccccaaatacaaggagcaattctgtggagtctactggaagtatctagattgctgaaaataagcagttaaaaatcattataacttgactctactggatttaagctttataatgccatctgagattgtgtaaatggctttgaaaggtaagctccagttcctaagcagtgtatctcctagctgccttctctccaaattgccactgaatagttgctgtgtgatcctggggcacgtgaggttataagataaaggaracaggagggtggaatctttaaggtcccttaagaaacattttcaaaacgtcttttgcacacatttcctataaatgatagagtaaccaaattgtcattttcatcttattaaagctggcccagagcagacattcataaaattctactttagaaacttgcttgatagtcaccagttgacactgttggaaatgctggggggtttttgttggttgggttttggtgc

SEQ ID NO: 545019 - DNA, 609 bp, Homo sapiens
ggattaagagatactcttaaataaacaaggagatagggtgtttattttatggacaagtttcttttgtaacttgtaactcccttgaaagtcagccagagtatgtctcaaaccaaagtcaagatagtgagcaagaagtgttgcacttatgaagggaggtgagtgagcaatgcatgtggtttccaaccgttaatgctagagttatcactttctgttatcaagtggcttcagctatgcaaggaaaccaaacaggggaagttttctcaagcaggttgaaagcaggttccaagaaagccctttgaaaaatgtctaatcctttcaattgtctagaactaaagccaaaaacataaggaaccagattcttaggaataagtttcctgccctgagtgactgaaacagaatcagtcttttagttgagcttctcagcagaggaaacggggagaatgatgatggtagtgatggggggtttctctgaatagttgattttctaggaaaaccatgatcaactttggtccatttacaaagccgtgatcagcagaaacttcctgactagcaatcgcyccctctcaaccagatataaccagttgatctggcagtagctctgctgctgtg

SEQ ID NO: 545020 - DNA, 498 bp, Homo sapiens
tcccaggacagatcaggctggatggtgacasttccacagccttgagtgggactgccttgtgctgctctgggattcgcacccagcttggactacccgctccacgggccccaggaaaagctcgtacagataaggtcagccacatgagtggagggcctgcagcatgctgccctttctgtcccagaagtcacgtgctcggtcccctctgaagcccctttggacctaggggacaagcagggcatggagacatggagacaaagtatgcccttttctctgacagtgacaccaagccctgtgaacaaaccagaaggcagggcactgtgcaccctgcccggccccaccatcccccttaccacccgccaccttgccacctgcctctgctcccaggtaagtggtaacctgcacaggtgcactgtgggtttggggaaaactggatctccctgcacctgagggggtagaggggagggagtgcctgagagctcatgaacaagcatgtgacct

SEQ ID NO: 545021 - DNA, 653 bp, Homo sapiens
ctggaagtacctactacttaagacccttagactagtaaagttagcgtgcataatcttaggtgttatatacacattttcagttgcatacagttgtgccttttatcaggactcctgtacttatcaaagcagagagtgctaatcaatattaagcccttctcttcgaactgtagatggcatgtaattgcagttgtcaatggtccttcaattagacttgggtttctgacctatcacaccctctttgctttattgcatggggtactattcacttaaggcccctttctcaaactgttaatgtgcctaatgacaattacatcagtatccttccttttgaaggacagcatggttggtgacacctaaggccccatttcttggcctcccaatatgtgtgattgtatttgtcgaggttgctatgcactagagaaggaaagtgctcccctcatccccacttttcccttccagcaggaagtgcccaccccataagacccttttatttggagagtctaggtgcacarttgtaagtgaccacaagcatgcatcttggacatttatgtgcgtaatcgcacactgctcattccatgtgaataaggtcctactctccgaccccttttgcaatacagaagggttgctgataacgcagtccccttttcttggca

SEQ ID NO: 545022 - DNA, 434 bp, Homo sapiens
gcaccgtttgctgacatcagtcttcaggggcacagtccagggcagtaaggggcaggcaggcgagagtcggttgtggggaactttgggtgtgcatgtagaacagccagcacagcagctaccaagtgtatgatgtgccatttgcagatgcatgtgcaagtacacggtggacagagaccaacttaattctacatcttttatgtgaacttagagaaaattgccttgttgattgctaataacaagcaacatcgttaatcccattttctctgggccatataccaagtacattatttcaattaatttcttaagaacttcaaaagggagaacaatttactcccatattacaggtaaaaaactgttagagaatttagattttctaaaggaggtacagctaacaaatatagaacttrgactcacacctaggccatactgacttt

SEQ ID NO: 545023 - DNA, 527 bp, Homo sapiens
cccacacagttcatcaatttacaagccagtctcctccagaaataccctcacagacataccaagaagtgttgctgtaccagctatccaggtatgccttaatctagtcagattaacacctaaaattaaccatcaaactaccagcgggaacacacagaggtctgagctctgatgaggagtctcctgtgaggtgaactaatgtgacagrgcataaaacaatatacaaattgtattgatcctgaccttaagactttttgaaaccttcccagatgtcaggtggctcttttaacagaggccagcactgtaggctgacatccagttatccagagtttgagaaaagataaaatctagtaaaaggtacttagaggcaaatttgaggagatgagttataaaggacaccagactgccacgagaatgtcccttagactacataaatattagaaacaattaaaacagcatataaatgaggaattgtatcctaatgggaataaaatatgcagagaggaatgcattttctttctaataacctg

SEQ ID NO: 545024 - DNA, 607 bp, Homo sapiens
cacttagaatcagagtattccaatctgaaacagtaaattatgaaygcaaacttatcagattttgaagactggaaagtcttcaaagaaatgatagtcccaaatatgagaaaagatgtggactagtggaactgtattatactacagaagaaaattataactgatatggttttgttctgtgtcgccaccctcatctcaaattgtaatccccatgtgtcaagggagggaactggtgggaggtgattggatcatgggggtggttttccctgtgccgttctcctaatagcgagtgaattctcacagggcctgatggtttatgagtggcagttttcccttctctttctctgtcctgctgccatgtgagacgtgccttgcttcccttctccttctgccatgattgtaagtttcctgaggccttctcagccatgtggaactgtaagtcaaataaacctctttcctttataaattaaattacccagtccctggtatttcttcatagcagtgtgaaaacagactaatacaataattatatcagaaaaccctttctgagatatattctgacaagcaacattttgaaacaaattagcaatatagttgaccctctatatca

SEQ ID NO: 545025 - DNA, 607 bp, Homo sapiens
cacttagaatcagagtattccaatctgaaacagtaaattatgaatgcaaacttatcagattttgaagactggaaagtcttcaaagaaatgatagtcccaaatatgagaaaagatgtggactagtggaactgtattatactacagaagaaaattataactgatatggttttgttctgtgtcgccaccctcatctcaaattgtaatccccatgtgtcaagggagggaactggtgggaggtgattggatcatgggggtggttttccctgtgccgttctcctaatagcgagtgaattctcacagggcctgatggtttatgagtggcagttttcccttctctttctctgtcctgctgccatgtgagacgtgccttgcttcccttctccttctgccatgattgtaagtttcctgaggccttctcagccatgtggaactgtragtcaaataaacctctttcctttataaattaaattacccagtccctggtatttcttcatagcagtgtgaaaacagactaatacaataattatatcagaaaaccctttctgagatatattctgacaagcaacattttgaaacaaattagcaatatagttgaccctctatatca

SEQ ID NO: 545026 - DNA, 607 bp, Homo sapiens
cacttagaatcagagtattccaatctgaaacagtaaattatgaatgcaaacttatcagattttgaagactggaaagtcttcaaagaaatgatagtcccaaatatgagaaaagatgtggactagtggaactgtattatactacagaagaaaattataactgatatggttttgttctgtgtcgccaccctcatctcaaattgtaatccccatgtgtcaagggagggaactggtgggaggtgattggatcatgggggtggttttccctgtgccgttctcctaatagcgagtgaattctcacagggcctgatggtttatgagtggcagttttcccttctctttctctgtcctgctgccatgtgagacgtgccttgcttcccttctccttctgccatgattgtaagtttcctgaggccttctcagccatgtggaactgtaagtcaaataaacctctttcctttataaattaaattacccagtccctggtatttcttcatagcagtgtgaaaacagactaayacaataattatatcagaaaaccctttctgagatatattctgacaagcaacattttgaaacaaattagcaatatagttgaccctctatatca

SEQ ID NO: 545027 - DNA, 416 bp, Homo sapiens
gtctagtgctaagcagcccggacccctgcacccagcacacctctctttggcatgataggaggatgagggatccaggtcttctcctcccatgctgcccttggcctttatgttttgcctttcattagtaaggcttctcccttaattatcaccctatgacaggaaattcatcctaagcctggacacgtgagagatggtaactctgaagcagccccctgsggatgacaccaaatgaggccacacccagaacaaattgcaagaaataacaaggtatttcttacagaatccctaagagaacatgtctgtctgcatttaagtgtctacagtcataaatgcacagcatatgattggatcagatggaactgaaagactttcagtgcttcatggtgcccataactctcattgtcctgaagtggtgt

SEQ ID NO: 545028 - DNA, 416 bp, Homo sapiens
gtctagtgctaagcagcccggacccctgcacccagcacacctctctttggcatgataggaggatgagggatccaggtcttctcctcccatgctgcccttggcctttatgttttgcctttcattagtaaggcttctcccttaattatcaccctatgacaggaaattcatcctaagcctggacacgtgagagatggtaactctgaagcagccccctgcgsatgacaccaaatgaggccacacccagaacaaattgcaagaaataacaaggtatttcttacagaatccctaagagaacatgtctgtctgcatttaagtgtctacagtcataaatgcacagcatatgattggatcagatggaactgaaagactttcagtgcttcatggtgcccataactctcattgtcctgaagtggtgt

SEQ ID NO: 545029 - DNA, 601 bp, Homo sapiens
aagttaatactatagtaacctcactcatttatccatgaggaaactgaggcacagacaagtaactagccctttatcacgtatctcgtttgtggtggagccagtatcaaaatgtagacaatttactgctggagctcattctgtcttcggagtttacatggattctaagtcagaccttcagataggaaggtaaatggttataagccagaagatttccacactctcaccaacattgcactggcttttctttgggtcttggccagagggtgagcccttgtgactatgcttcactggttgactagstttgagttgcaccgaggaccaacatagagaaagaaggtctttgggataaacctgggaggatgaagggtaaaaaatgcagaacttaaatcttgatcccaagggatcatttaaagatgaatgagtctcccttagaggatgagaaattaaacataaactctttaacttgcagagatgctgaagtgttttcctcaagtagtaaactttgaatcatggttatatgcatgggagggagcctatggggatggaacatggatgaaaaagtgacaggatgttcagggggcaggtgcgggcagaaaatcag

SEQ ID NO: 545030 - DNA, 434 bp, Homo sapiens
gcaccgtttgctgacatcagtcttcaggggcacagtccagggcagtaaggggcaggcaggcgagagtcggttgtggggaactttgggtgtgcatgtagaacagccagcacagcagctaccaagtgtatgatgtgccatttgcagatgcatgtgcaagtacacggtggacagagaccaacttaattctacatcttttatgtgaacttagagaaaattgccttgttgattgctaataacaagcaacatcgttaatcccattttctctgggccrtataccaagtacattatttcaattaatttcttaagaacttcaaaagggagaacaatttactcccatattacaggtaaaaaactgttagagaatttagattttctaaaggaggtacagctaacaaatatagaacttagactcacacctaggccatactgacttt

SEQ ID NO: 545031 - DNA, 522 bp, Homo sapiens
ttttctgtggcctgcagagtttgcagccccaggggagtraggaaagctctgctctggcctgatttttgctggagaagagaaatgtggaagtcagggtggtggcctttgcagtgggtcagctttgggctgctgagacgggcggcgtgaaggccggcttccagagccctggctggcctttgtagtggatgagacggaccagattgccatgctagggtcacccgctgacctgcagtggcctgagcagatacatggctctgccagatttcctgaagtggagccctcagcctcacactgcatcccccagaagccaggcaagaggaggtcataaggtttttctggaaaggagcgaaagagtgcgctgctaaatgttgcaggtgggagtgcgtgaacaggtgaggcttccggtaattatgacaagtgatgcttgtgcttctcagtgccgtttcctccctctgatggggcctgcttgacacctcgcagggagcgtgggtggagagtgtcattatccccatttcattggtg

SEQ ID NO: 545032 - DNA, 640 bp, Homo sapiens
actttcttccctgaacatgccatgaattcctgatgattacacagttccccaacaagtgctgctcaaaacctggaactaatcagaaggaagcaccagccttgactgttagtgggacacggggaagatggctgtgaaccraatatgcggtgcctttgggggagaatggttttagtatttagtaagtgtcagtatgtaagttttatgttgaaaaatgaactaagtcacaacaaggtctataaatttaattattgaaaaggataaagttgggccattcagtgaaacctcctgtaactgaagtctctaacacagtagccaatgggggaatcaaatgagcccaagaagaaattctgcgtaaactaggacttaggggagcccttagcattccactttggagtgaaggaacccgatccgccagttggggaacgctcctttgaggcccatgtgcttcctgctccgacgggagagagggataatgagacttgctcccaggtgccctgccctggagcccagcaggccacacgggctctttgactctgtactgtgccagtgatttccaagatgggagtggtgctctgattgcaggaatgtcttcttggaatggcttttctcacttctctagagtccttggtagggagcacat

SEQ ID NO: 545033 - DNA, 384 bp, Homo sapiens
gtggccgcttcctcgtgtcagatgtggacggtcaccccgccctcccagcgctaagcgctgagactgcgtgtccagagtcggctcctgcacgtgaggccaattggtcacactgggccagtgtggaggaagaygcctctcatctcccaaatggggatctttcatgggtgtcacctgagcttatagagcttagtttagtctagccattccaagacagtggtttcttaaccttttctaggtcacaaaacctcctgagaacctaatgaaaactggatcccagccccagaaaaatgcacctgtgtgcacacacccagcagtttccaggtcatttcgagtcctgccttcgaggtccattgttattatttacaaaacaccagcctaaggtat

SEQ ID NO: 545034 - DNA, 384 bp, Homo sapiens
gtggccgcttcctcgtgtcagatgtggacggtcaccccgccctcccagcgctaagcgctgagactgcgtgtccagagtcggctcctgcacgtgaggccaattggtcacactgggccagtgtggaggaagatgcctctcatctcccaaatggggatctttcatgggtgtcacctgagcttatagagcttagtttagtctagccattccaagacagtggtttcttaaccttttctaggtcacaaaacctcctgagaacctaatgaaaactggatcccagccccagaaaaatgcacctgtgtgcacacacccagcagtttccaggtcatttcragtcctgccttcgaggtccattgttattatttacaaaacaccagcctaaggtat

SEQ ID NO: 545035 - DNA, 263 bp, Homo sapiens
tgtgggatgagaaggtgaactcggagatgcagcgtgaggcctccaagtccagacagcatgggagcccaaactgcgatgtcccatgcaataacgttgtttacaaggagcttataaatatttaaactgttacgtcacccaagtgtggtctaatataaatcctgtgttcctgaggtcatgcagattgagagaggaagtgatgtcactgtgggaacttccgtgtaaggacrgggcgtccctcctcctctgctcctgctcacagtgat

SEQ ID NO: 545036 - DNA, 632 bp, Homo sapiens
aatgaaagttatgaatcccctcccagcattgcttcattagaatccccttacaaaataagaaataagactcatctcatcagctcgattttatggcatctgattagaccactattttctcagcaggtcccttttctttaaactgttgactatggatggcctgctgaatagaatgaactttggaccactaaattgcagcattatggttattttgtgtaatttatgaaaagcgggagaagccatgatcacttacttcttgttgctaatgatatcaccatttatctgaacaggtgtgggtttggaatattcctcccactcccgatactcaacctggaacactgcccaagtagagaccccaaaaatgatatttggaggtactgactctacagatggcaaattaaaaattaatggcacctgcacaagtcttcatgaatgtctactatcagcagcctttcaggaagctatgcattttaactgtgtttacctaataagtccctctatttgttgtttgacttacaattcaacaaatttggtgaaagcctaagtgggctgtcrgtgtaacaacctctgttagtacatcatcatctccctattttgagatataaggcaaggtgttgaaattatgtagtaattat

SEQ ID NO: 545037 - DNA, 606 bp, Homo sapiens
aagggcaaagatatgcatatagcatgatggttaacaggtcagrctcaggtagaaaggcccatttgaaccccagctctgccacactcagaaactgtgtgacccgaacaagtcacttaacctctctgagcataggtaaaataagatcatcataccagattgttttgaagattaaatcaagtgttattcacgagaggtgcacagcatagcatgcacaacaaataaggacctggtaagtatctaattaataacaatggctaagatccaaaaaacagctacctactaataaatagatggggctgccttgtaaggcagtgagcatcatgcaaccaggattcaaatgaaggacagttgctacctctgaggttcccgagaaggatttctcgatccattgagagactgaatgacatgaactctgcgatcccatctcttgtggggagggaacctagaatgaagggaagattgtgggccataaaggcagacatctggttcctgggcacagaaccatatgtgtgccaccaaagccacccaccggaccccacttggcccctggagtctatttttactcctctcatcttacaagatctattttgttaatctccttatatt

SEQ ID NO: 545038 - DNA, 606 bp, Homo sapiens
aagggcaaagatatgcatatagcatgatggttaacaggtcaggctcaggtagaaaggcccatttgaaccccagctctgccacactcagaaactgtgtgacccgaacaagtcacttaacctctctgagcataggtaaaataagatcatcataccagattgttttgaagattaaatcaagtgttattcacgagaggtgcacagcatagcatgcacaacaaataaggacctggtaagtatctaattaataacaatggctaagatccaaaaaacagctacctactaataaatagatggrgctgccttgtaaggcagtgagcatcatgcaaccaggattcaaatgaaggacagttgctacctctgaggttcccgagaaggatttctcgatccattgagagactgaatgacatgaactctgcgatcccatctcttgtggggagggaacctagaatgaagggaagattgtgggccataaaggcagacatctggttcctgggcacagaaccatatgtgtgccaccaaagccacccaccggaccccacttggcccctggagtctatttttactcctctcatcttacaagatctattttgttaatctccttatatt

SEQ ID NO: 545039 - DNA, 606 bp, Homo sapiens
aagggcaaagatatgcatatagcatgatggttaacaggtcaggctcaggtagaaaggcccatttgaaccccagctctgccacactcagaaactgtgtgacccgaacaagtcacttaacctctctgagcataggtaaaataagatcatcataccagattgttttgaagattaaatcaagtgttattcacgagaggtgcacagcatagcatgcacaacaaataaggacctggtaagtatctaattaataacaatggctaagatccaaaaaacagctacctactaataaatagatggggctgccttgtaaggcagtgagcatcatgcaaccaggattcaaatgaaggacagttgctacctctgaggttcccgagaaggatttctsgatccattgagagactgaatgacatgaactctgcgatcccatctcttgtggggagggaacctagaatgaagggaagattgtgggccataaaggcagacatctggttcctgggcacagaaccatatgtgtgccaccaaagccacccaccggaccccacttggcccctggagtctatttttactcctctcatcttacaagatctattttgttaatctccttatatt

SEQ ID NO: 545040 - DNA, 606 bp, Homo sapiens
aagggcaaagatatgcatatagcatgatggttaacaggtcaggctcaggtagaaaggcccatttgaaccccagctctgccacactcagaaactgtgtgacccgaacaagtcacttaacctctctgagcataggtaaaataagatcatcataccagattgttttgaagattaaatcaagtgttattcacgagaggtgcacagcatagcatgcacaacaaataaggacctggtaagtatctaattaataacaatggctaagatccaaaaaacagctacctactaataaatagatggggctgccttgtaaggcagtgagcatcatgcaaccaggattcaaatgaaggacagttgctacctctgaggttcccgagaaggatttctcsatccattgagagactgaatgacatgaactctgcgatcccatctcttgtggggagggaacctagaatgaagggaagattgtgggccataaaggcagacatctggttcctgggcacagaaccatatgtgtgccaccaaagccacccaccggaccccacttggcccctggagtctatttttactcctctcatcttacaagatctattttgttaatctccttatatt

SEQ ID NO: 545041 - DNA, 381 bp, Homo sapiens
ggccccgtcccgagcttccgcgtcggggcggsgcggctccgccgccgcgtcctcggacccgtccccccgacctccgcgggggagacgcgccggggcgtgcggcgcccgtcccgcccccggcccgtgcccctccctccggtcgtcccgctccggcggggcggcgcgggggcgccgtcggccgcgcgctctctctcccgtcgcctctccccctcgccgggcccgtctcccgacggagcgtcgggcgggcggtcgggccggcgcgattccgtccgtccgtccgccgagcggcccgtccccctccgagacgcgacctcagatcagacgtggcgacccgctgaatttaagcatattagtcagcggaggaaaagaaactaaccagga

SEQ ID NO: 545042 - DNA, 381 bp, Homo sapiens
ggccccgtcccgagcttccgcgtcggggcggcgcggctccgccgccgcgtcctcggacccgtccccccgacctccgcgggggagacgsgccggggcgtgcggcgcccgtcccgcccccggcccgtgcccctccctccggtcgtcccgctccggcggggcggcgcgggggcgccgtcggccgcgcgctctctctcccgtcgcctctccccctcgccgggcccgtctcccgacggagcgtcgggcgggcggtcgggccggcgcgattccgtccgtccgtccgccgagcggcccgtccccctccgagacgcgacctcagatcagacgtggcgacccgctgaatttaagcatattagtcagcggaggaaaagaaactaaccagga

SEQ ID NO: 545043 - DNA, 381 bp, Homo sapiens
ggccccgtcccgagcttccgcgtcggggcggcgcggctccgccgccgcgtcctcggacccgtccccccgacctccgcgggggagacgcgccggggcgtgcggcgcccgtcccgcccccggcccgtgcccctccctccggtcgtcccgctccggcggggcggcgcgggggygccgtcggccgcgcgctctctctcccgtcgcctctccccctcgccgggcccgtctcccgacggagcgtcgggcgggcggtcgggccggcgcgattccgtccgtccgtccgccgagcggcccgtccccctccgagacgcgacctcagatcagacgtggcgacccgctgaatttaagcatattagtcagcggaggaaaagaaactaaccagga

SEQ ID NO: 545044 - DNA, 552 bp, Homo sapiens
acaagcatggtcagtgtgggtggccagggccctcgctcagcaagtgggagcaaagtggaggattccaggactcactacctcatgatcttccaccagcctcccactacctctagtcacccctacctaagctgcccctctgtatgaaaatgctggggttggagagtggggcaggctagggaaagaagacaatgtgatttaacctgtccctaaatggttagatagcatctctggagttaaagatctcagctatcagttaaaatgcaaactgagctactatctgtcatttagagatgacgcagatgaagaakctgaggatgtgacctagaaaaaagcaggaaggacctagggacttagcaagggacaaaggaccagaaacaggcaaagagaaacaaaatttaaccttctctacagtgtcgcttagggctgggctggctatctccatagatatccaattccttaacacctaagggcgtaggagaggaatgagaccaaggtttaggatgaataatctaggaaatcccttgaaaggaagaaaagaggatcatcagagac

SEQ ID NO: 545045 - DNA, 552 bp, Homo sapiens
acaagcatggtcagtgtgggtggccagggccctcgctcagcaagtgggagcaaagtggaggattccaggactcactacctcatgatcttccaccagcctcccactacctctagtcacccctacctaagctgcccctctgtatgaaaatgctggggttggagagtggggcaggctagggaaagaagacaatgtgatttaacctgtccctaaatggttagatagcatctctggagttaaagatctcagctatcagttaaaatgcaaactgagctactatctgtcatttagagatgacgcagatgaagaatctgaggatgtgacctagaaaaaagcaggaasgacctagggacttagcaagggacaaaggaccagaaacaggcaaagagaaacaaaatttaaccttctctacagtgtcgcttagggctgggctggctatctccatagatatccaattccttaacacctaagggcgtaggagaggaatgagaccaaggtttaggatgaataatctaggaaatcccttgaaaggaagaaaagaggatcatcagagac

SEQ ID NO: 545046 - DNA, 579 bp, Homo sapiens
gaaccagctcatcccatctgacctgtcccctagctgcccacccgggtttatttcagcccaaagctgaaatttccactcttcaacaaaggaactcttaggttataacttaaatagattaagccagtcaccatcaggaaaattaaattcaaaactgcttattcctcactctgtgccagaagttttcatccccatttgggtacagagataacttgtccaggtagcagtggagctgaacttttcacatttaatcaagcaccattaaggaagtctcttatctgccatcctgtaaactcaaacatttttgttaaccaccggtttctttactctttggggcacggtttcacaacgttatgtccaccgaagaaacaaaggttaacttgtccatctggtcggatctaagtccacactcaagctgcttgatataccacctatactaaaatttctaaggcaagagtttaagaccccagtgagatctggggaaggacataagaagtcctgctgggcactggtctmcttggctcacccacagcctaagaaagcccacctctccgattccttgacacaggccctgggtcacag

SEQ ID NO: 545047 - DNA, 604 bp, Homo sapiens
agactctgtctccctaaaaatgaaaaaattagctgggcatggcaatsggtgccacctacatgggaagctgagtcaggaggattgcttgagcacagtgggggtggggtgggggtgtcaaggctgcagtgagctgtgttcacgccactgcaccccagcctgagtgacagagggagacccagtatcaaaaaataaaaataaaaataaaaaagatcccaaagaacagaccaagctggtgcctgggttacctagagggaggaaaattgaaggaaaaagaggataaaaaaggaatgagcatcagtgaatgtgtctaatgggtgctcagcgaagctctgttgaatctggagaggcagtaaaggcatgtggatataacatcagcccctgctctgggcttgctggtttgggcaaggtgacccagaacgctctcccacagagggactcattactccagggcaggcagaggtccagtccagccctctcccttcctccagacgagtctcctcctagaagccactagggctgccttggggtgtccggcttacctttggcctcatgctctgcccagggcctcacattcttgtcatgctctgcccggaatatgttctcc

SEQ ID NO: 545048 - DNA, 604 bp, Homo sapiens
agactctgtctccctaaaaatgaaaaaattagctgggcatggcaatcsgtgccacctacatgggaagctgagtcaggaggattgcttgagcacagtgggggtggggtgggggtgtcaaggctgcagtgagctgtgttcacgccactgcaccccagcctgagtgacagagggagacccagtatcaaaaaataaaaataaaaataaaaaagatcccaaagaacagaccaagctggtgcctgggttacctagagggaggaaaattgaaggaaaaagaggataaaaaaggaatgagcatcagtgaatgtgtctaatgggtgctcagcgaagctctgttgaatctggagaggcagtaaaggcatgtggatataacatcagcccctgctctgggcttgctggtttgggcaaggtgacccagaacgctctcccacagagggactcattactccagggcaggcagaggtccagtccagccctctcccttcctccagacgagtctcctcctagaagccactagggctgccttggggtgtccggcttacctttggcctcatgctctgcccagggcctcacattcttgtcatgctctgcccggaatatgttctcc

SEQ ID NO: 545049 - DNA, 636 bp, Homo sapiens
agatggcagaccaggctgcggcctggctcacccgtcagggcagcttccaagggggattccgcagtacccaagtaggggccgtccccgggctctggcgggggtgggtagtcctcagaccaagggcttgcttgagtcctggctcaacctccctaggacacggtgattgccctggatgccctgtctgcctactggwttgcctcccacaccactgaggagaggggtctcaatgtgactctcagctccacaggccggaatgggttcaagtcccacgcgctgcagctgaacaaccgccagattcgcggcctggaggaggagctgcaggtgaaccactccctggtgaaccactccctcgcctgggtagccaggacacctgggcctcgtggccaggccagaagccgtccccaccctcccacccgtggaatccccgcagcacttcttcctggggtcttcgggggaagactgacttcctggctgcgtgacctggagctctgagcttcagttttctcacttgtagagtaacatacacagagttcaccctacagggtcgttagaaggctgaagtgagataattcatgtgctggtataaactttgtggaaatgtgaggtggggagaggaggtggggctgttttgaggaa

SEQ ID NO: 545050 - DNA, 472 bp, Homo sapiens
ctgcagcaacaagaagggggctgttctagggctcactctcgaagaccaggatgcttgggtccttaaaggaggtggcaggcgcccggcctccctgggctagggacgggggaggggtgcctgccggcgggaggtccattagccggctaagtgctcccagggaggggggaccgcgcggcataagagtgggtgaggcgaagccagggcagaggggggcggaagaagcttttcctgcattcagctaagtgcggcagaagagggtgggcgacagggctgtgcagcgaccccccggcccaagtctagccctccgctggtactgcagccctagtcgctmggaaacctcagtgggctgatcccggaccgccttaagcagcgccctctacacccagtccctccagctgctccccaacagccacttcggcccccagcgccctccttccaccacaggcctgaagaatcaggttctgctgagccc

SEQ ID NO: 545051 - DNA, 502 bp, Homo sapiens
ggccgggcggggtcgggaccccagtgaggaggggccgggggctgccccgcgggcgcgtgacggtctcgggcctgcccggctgcgctggtctccgctcgggtgaggcggcttggcttcgcttttcaggttaggaaagctccctttactgcgcgttggggggctgggggagctggcggagccmcgttagggaggtcggtggcgccggggtgtctcagcgccccctgcaccccgcgcgggtccggcccagcgggcgatcgctggcgcccagggaactccgggagggccgccagcgggctccgcaggcgcggggcggggaggggcgcctgggggccgcggggctcgcgctccccgcccgttggccgcccctcggaggccgagatcggggcccagaacgccccttggcaaagcctggcgcttccgcgatgcccagagggtgcttggggggatggagagaggggcgcccgccggggtagttccgggagcctcggtgcctcccgccgca

SEQ ID NO: 545052 - DNA, 502 bp, Homo sapiens
ggccgggcggggtcgggaccccagtgaggaggggccgggggctgccccgcgggcgcgtgacggtctcgggcctgcccggctgcgctggtctccgctcgggtgaggcggcttggcttcgcttttcaggttaggaaagctccctttactgcgcgttggggggctgggggagctggcggagccacgttagggaggtcggtggcgccggggtgtctcagcgccccctgcaccccgcgcgggtccggcccagcgggcgatcgctggcgcccagggaactccgggagggccgccagcgggctccgcaggcgcggggcggggaggggcgcctgggggccgcggggctcgcgctccccgcccgttggccgcccctcggaggccgagatcggggcccagaacgccccttggcaargcctggcgcttccgcgatgcccagagggtgcttggggggatggagagaggggcgcccgccggggtagttccgggagcctcggtgcctcccgccgca

SEQ ID NO: 545053 - DNA, 502 bp, Homo sapiens
ggccgggcggggtcgggaccccagtgaggaggggccgggggctgccccgcgggcgcgtgacggtctcgggcctgcccggctgcgctggtctccgctcgggtgaggcggcttggcttcgcttttcaggttaggaaagctccctttactgcgcgttggggggctgggggagctggcggagccacgttagggaggtcggtggcgccggggtgtctcagcgccccctgcaccccgcgcgggtccggcccagcgggcgatcgctggcgcccagggaactccgggagggccgccagcgggctccgcaggcgcggggcggggaggggcgcctgggggccgcggggctcgcgctccccgcccgttggccgcccctcggaggccgagatcggggcccagaacgccccttggcaaagcctggcgcttccgcgatgcccagagggtgcttggggggatggagagaggggcgcccgccggggkagttccgggagcctcggtgcctcccgccgca

SEQ ID NO: 545054 - DNA, 504 bp, Homo sapiens
cagcgttcctcccgggaggcggcccagcccttcatcctcgccgcctgagcttctccgaggggggctgcagccttgcggccgttgccaccgcctggagaagcggcccacgcggactgacgggcgggggcggggcctcgggcctcggcgggggcggggtccggggaggccccaccctctgttctccagsggcggggagagaggagctgcaggtctgcggcctggccccaggtgcgatggcggaccccagcttggccagtcacattcctcccagtccccctggagggagaacgctggccatggggggctccaaggaacaaccagcctcggatgacgacccttgggtcaccggtctccccacctgtgcggcaggcgccttcacgtttcattattaaacaatggggagaaatccatgtttactgtcctttttaggaattttttgctcttctctttgaggtggctgtaggaaatagattttttttttaacctcgcaattccaccacggtc

SEQ ID NO: 545055 - DNA, 531 bp, Homo sapiens
gctgcatggacataatgagggaatacgtagaaagtgctcaggccgggctcatctgtcacgcctgtaatcccagcactttgggaggccgaggtaggtggatcgcctgaggtcaggagttcgagaccaacctggctaacatggtgaaaccccatctctactaaaaatacatagctgagtgtgatggtagtcacctgtaatcccagctactcaggaggctgaagcaggagaatcgcttgaaccgggaggcagaggttgcagtgagctaagatcgtgccactgcactccagcctgggcaacagagactccatctcamaaaaaaagaaaaaaagaaagtgctcaaggcaggcacatggtgagtgttctataaatctagcagttgttgttctaacggggcccatgacagagaagaaaggggaagaggccacacagcatcctggcagttgaggggagctaggatagggaccctgtatcctgatgacccagcacctccacctggctaggggagttgaacttggaggccgaaggctgacc

SEQ ID NO: 545056 - DNA, 441 bp, Homo sapiens
gaactctgcacacatttcataacytttctgggcctacgttctcacctttaacgtgaggataatatatctacttcatagacacctttttatgttgtctccaagttttctaacagctctagttctgtacccaagacatggcaggtggccaacgacatccttctaggctgtggtgatgtgtttggagcttgttccacgggtcttgtgtggggccagccctgttcagataaggccttgtggggtggcctggggtagggggaggggttgggcaaactctcccttaaaacgctttgtaaccatctgaggcaccagcaagagcggcccccgagcctggacaaaatccaaacggcttcctacttcaagcactgatgtctagtgagtgaaggaacagctctgggtccaggatattataggtcacattaaactaaaggggcttggccatca

SEQ ID NO: 545057 - DNA, 511 bp, Homo sapiens
acccagggaaggaaggtccccctggaaccaaaggaaaccaggtgagatcttccatgtctttatcccctgagggagtctccactcagactctagagcctcaaagtccttgggattcccttgtctcattattcatatggctctgccacattctcaattcctgtgccctgtaaccctacccagacagcaatgttgttacttccatttcttccacccctggaggcccccacagtgacactctgaggcccctttataaatgcctctcttttatcttccagggtccctctggacctcagggwcctctaggatacccaggacctcgaggggtcaaggtaactgaccaccaggctgggagacaaagggctgtggtcaggggagctatatggggtcttaggagcttggtccttccaacccacctccatcccctgatcagtctacttctatcccctctctaattctagggtgtggacggaattcggggtctgaagggtcataagggtgagaaggtgagcac

SEQ ID NO: 545058 - DNA, 572 bp, Homo sapiens
tgccacctctccatcctgctgcccttaggccacatgggagcagtccatgcatgacagcctctatcctacaaggcctatgagtatggattggggggggcaaaaggaaaaagctccatgtgcctctttgtctgcgtgggtcagaagagttgtgcacgcagattagcaggccaaggtctgagccacagcagcatttttatttcagattttgataactgtttatatgtgttgaaaaccaaaatgacatctttttaaagcttatccataaaaaaaaatagatgtcttttatagtggaaaaacacatggggaaaaaaatcatctattttgatgcagcatttgataatgataaaacacctcacacctcactctttatagtgcacaaaatgaatgaggtctgggctaggtagaaaaagggtcaatgctatttttgtttttagaatcattaccttttaccagcttttamccatctgatatctatagtagacacactatcatagttaacatagttaagttcagcacttgtctcattttaatgtaaagatttgcttccattttcctacaggcagtctctctct

SEQ ID NO: 545059 - DNA, 529 bp, Homo sapiens
atacttagcaaaaagtggggcagagcctcccaaggagaacaaatattcagaatattcatattggaaaaatcacaatttttaatggcagcagaaaacttgtgtgaaattttcttgatttgagttgattgagaagaggacattggagatgccatcctctttctcttttctagtttgctcatactacattgagtagacacatttaaggatggggttatgaacccttcctgagctttatggtcctaaaagcaaaataaaaactattygaatgaaaagacaagaaaatcaggtattaatcttggatagctaataatgagctattaaaactcagcctgggacagtttatcatgaagcctgtggatgatcaatcctttattattatttttttttttttgaaaaaagctcatttcatgctctgcaaaaggagagactcccatgaagccttttgaaagggatcatcatgcagctcaactttctgttggattccatgctaagcaagctaaccttatcctgcattgttagcactaggcac

SEQ ID NO: 545060 - DNA, 487 bp, Homo sapiens
ccacctctccatcctgctgcccttaggccacatgggagcagtccatgcatgacagcctctatcctacaaggcctatgagtatggattgggggggscaaaaggaaaaagctccatgtgcctctttgtctgcgtgggtcagaagagttgtgcacgcagattagcaggccaaggtctgagccacagcagcatttttatttcagattttgataactgtttatatgtgttgaaaaccaaaatgacatctttttaaagcttatccataaaaaaaaatagatgtcttttatagtggaaaaacacatggggaaaaaaatcatctattttgatgcagcatttgataatgataaaacacctcacacctcactctttatagtgcacaaaatgaatgaggtctgggctaggtagaaaaagggtcaatgctatttttgtttttagaatcattaccttttaccagcttttacccatctgatatctatagtagacacactat

SEQ ID NO: 545061 - DNA, 529 bp, Homo sapiens
actacgccgccgccatgcaccgggacgtgttcgccgacgatcccgcagaggccgaggctggggccggggctggggccgaggccgggggcggggccggtgggatgggagaccctgagctcagcgatcctctggccgccccgcaagaaaggctccgtcagccactgtctcccgcgccctcctttgtctcctgggcctgtgcggtccctggggatgggacggcggtgacggctgtggatggctaattaagacagatcacgttagcccgttatatctgcgcggctaggcgcgatggctgtcgcctataatcccagagctttggaaggccgaggcaggaggatcgctccaggccaggagttccagaccagcctgagcaacatagtgagacaccccatctctaaaataaaaaaattagcacagtggcaccattccttgagctcaggagttggaggctgcagtgggcatgatcgagctactgctctccagcttgggygatagagtgagacactgtcaattaattaatctaatcaac

SEQ ID NO: 545062 - DNA, 638 bp, Homo sapiens
  misc_feature (1)...(638): n = A,T,C or G
ctggtaccatctcacccacctcctcactggnagaagagaagggcttcacatcaccaccctgtgaggacttctctgtgactggggagtcagagaagagaggagagatcatagggaaaggcttgtctggagagagagctgtggaagaggaagaggaggagacagcaaacgtagagatgtctgagaaactttgnagtcaatntggaactccagtgtttagtgcccctgggnatgccctacatccaggagaaccagcccttggagaagcagaggagcggtgccttagcccagatgacagcacagtgaagatggcttctcctccaccatctggcccacccagtgccacccacacaccctttcatcagtccccagtggaagaaaagtctgagccccaagacttyaaggaggcagactcctggggagacactaagcgcacaccaggtgtgggcaaagaagatgctgctgaggagacagtcaagccagggcctgaagagggcacactagagaaggaagagaaagttcctcctcccaggagcccccaggcccaggaagcacctgtcaacattgatgaggggcttacaggctgtaccattcaactgttgccagcacaggataaagcaatagtctttgagattatggag

SEQ ID NO: 545063 - DNA, 638 bp, Homo sapiens
  misc_feature (1)...(638): n = A,T,C or G
ctggtaccatctcacccacctcctcactggnagaagagaagggcttcacatcaccaccctgtgaggacttctctgtgactggggagtcagagaagagaggagagatcatagggaaaggcttgtctggagagagagctgtggaagaggaagaggaggagacagcaaacgtagagatgtctgagaaactttgnagtcaatntggaactccagtgtttagtgcccctgggnatgccctacatccaggagaaccagcccttggagaagcagaggagcggtgccttagcccagatgacagcacagtgaagatggcttctcctccaccatctggcccacccagtgccacccacacaccctttcatcagtccccagtggaagaaaagtctgagccccaagacttcmaggaggcagactcctggggagacactaagcgcacaccaggtgtgggcaaagaagatgctgctgaggagacagtcaagccagggcctgaagagggcacactagagaaggaagagaaagttcctcctcccaggagcccccaggcccaggaagcacctgtcaacattgatgaggggcttacaggctgtaccattcaactgttgccagcacaggataaagcaatagtctttgagattatggag

SEQ ID NO: 545064 - DNA, 481 bp, Homo sapiens
  misc_feature (1)...(481): n = A,T,C or G
gatgatgagcaagaagtacccctgcgggaacacgcaacccggagcccctgggcctcagacttcaaggatttccaggaatcctcaccacagaaggggctagaggtggagcgctggcttgctgaatcaccagttgggttgccaccagaggaagaggacaaactgacccgctctccctttgagatcatctcccctccagcttccccacctgagatggttggacaaagggttccttcagccccaggacaagagagtcctatcccagaccctaagctcatgccacacatgaagaatgaacccactactccctcatggctggctganatcccaccctgggtgcccaaggncagacccctccccnctgcacccctctccccagctcctggtccccccacacctgccccggaatcccatactcctgcacccttctcttggggcacasccgagtatgacagtgtggtggctgcagtacaggagggggcag

SEQ ID NO: 545065 - DNA, 604 bp, Homo sapiens
tgtaaaatttagaagctgaaacgccaactgggagcagtggctcacgcctgtaatcccaacactttgggaggccaaggcgggcagatcacgaggtcaggagttcgagaccagcatggccaatatagtgaaaccctgtctctactaaaaatacaaaaaattagcccggggtggtggcaggcccctgtaatcccagctactcaggaggctgaggcaggagaatcacttgaacccaggaggtggaggttgcagttagcagagattgcaccattgcactccagcctgggcaacagtgtgagactctgtctcaaaaaaaaaaaaaaaaagaagaagctgaaacaccacagcattagcccactactagctcaactcaattacaaagagacctctttaaaaactgaactataaagcaaatctataaagtttgamgtcaccaggcaagtaagaaaacatgttacggggaaattatctgaaaagaaacaacaaacaatgataaacatggaaaaccagagtccaagatcatcaaccgcttagattccacacagtagtctttctagggaaagaaagtagagtcttttttacagaaatgctgaagaagcaattcaga

SEQ ID NO: 545066 - DNA, 620 bp, Homo sapiens
tgcaggggtccacgtggcaaatctaataatcttcttctctatagaaaatcctctgctggctctctagtgcccaggatccagtcccagcatctcagcacggccttcaagcatttccacgtcctggcctggctccatggtctccccgccaatttgccaccttctccatgcatccttttctgatcccctcctcactcatcccagcaaagaaccccctcctggcctgagcatagcatttcgtggtgtgtatctcagagcatccagttaggggtgtgcaagtttactttgttactggctgatgttgtgaagtcccaagttgttggtgccgcaaacaaaaaattggacatgacacacacaaatagcaaagcagcaaaagtttattaagcacagtacgatccactatggatcaaggatgacctgcgaatggtatcagcatcactttgctatatttcatggccttttctatgtgttttttttctctttttcctcaagctgcctaagctttagccagcatgtgccttttgrttgacaggtgggttgcttagtttcttggcctctgtgtgtttacgtgtcatttccttcccatagttttaagtacatgcatgatatgcactctgtaggca

SEQ ID NO: 545067 - DNA, 500 bp, Homo sapiens
gattctcaaggaaagcccggctttccttcctttcttctgcactgagttgcaacactaaatcccttatagcttgtgacccctgaatttttattcattcaatccacaattattgagaatgtgctatgtgccaggccttgtgctgtgttttggggacatttaaagcaatmagaggctgggcatggtggttcatgcctgtactcccagcactttaggaggaaggatcacttgaggccaggagttcaggaccagcctgggcaacctagtgagaccatgtttctacagaagtgaaaataatggcccggcatggtggctcacacctgtagttctagcactttgggaagccgaagtgggcagatcgttggagcctaggagttcaagaccagtctgggcaacatggcaaaatcccatctctaccaaaaatacaaaaattagccaggcatggtgacaggcacctgtaatcccagctactcaggagacttaggcgggaggatcgctggagc

SEQ ID NO: 545068 - DNA, 512 bp, Homo sapiens
ccagactcctccccttcctcgccggcgtccgcgtccccgcgccgagctgctcgggctccctgagccccagatctgaccccttcccttcggcaacctgarcgactcccgccttccacggaagggaccgagcccgtgccaaacaggctgagcgatttgggagtgaggagccatcctaccgctttccccaacctggaaacagcaaagcgcaaggcctctgagtcagttaggtctctgccacccacgggcaaaggatgctctcctccatcctccttcctccctccaccgaaatcggagagccgcgggcctgatccaaagaggcatccccttctcgttcattccccagaggcctcaatacaaaccccaggagttggcccctctccttttgctacaaatccttgccttgcaaaggggaggtgaggatgggctattttagaagggaagcagggttgctccctggagaatgctgagtctgtgaggtgcctatgccgagaatagctcgaggaaattggagc

SEQ ID NO: 545069 - DNA, 512 bp, Homo sapiens
ccagactcctccccttcctcgccggcgtccgcgtccccgcgccgagctgctcgggctccctgagccccagatctgaccccttcccttcggcaacctgaacgactcccgccttccacggaagggaccgagcccgtgccaaacaggctgagcgatttgggagtgaggagccatcctaccgctttccccaacctggaaacagcaaagcgcaaggcctctgagtcagttaggtctctgccacccacgggcaaaggatgctctcctccatcctccttcctccctccaccgaaatcggagagccgcgggcctgatccaaagaggcatccccttctcgttcattccccagaggcctcaatacaaaccccaggagttggcccctctccttttgctacaaatccttgccttgcaaaggggaggtgaggatgggctattttagargggaagcagggttgctccctggagaatgctgagtctgtgaggtgcctatgccgagaatagctcgaggaaattggagc

SEQ ID NO: 545070 - DNA, 586 bp, Homo sapiens
gaatctcttacatttactcatgctcaactcatatctcactcctcctataatccttttttttctttctttctcacccaggattcataaagcattcccaacttaatcccattctaaattagattattgtcacatgcacgagtaacttccattagagagcagcttaggaacctgatgtcaaggggagatattttagtcattgttgattgcttcacagggtccagcacaacactttgcaaaaaataaatgtagcttatgtgaacaaacataaatatgctccaattagtrtatgctcattgggagggaatccatgattttaggtggatctggagatgacctaaatagctgtgactgagtagcgctaaaaactatgctgaccaccagcatgctacagcatctctcatcaggctctgttatggcattgaatcagccattagttaatcttcatatcacttctctagtcataaatgatagacatttagcatggtaatgtatttgacatttctatctggggagccatcaatggcaaatttaaagtctagtcagattaagatttatttaggtcaattcaatttggtaaatatttctt

SEQ ID NO: 545071 - DNA, 544 bp, Homo sapiens
aatcttagtaaaaaatgatccagttgaagaattagtcttaggctgaatctaatatctatctcaaataaatatggctgggttcattaatttattgattaattgtttcattcattcaaaacatactgtgtgtcagatactgtgctcagtgttcaggatataactatgatcaagatatggaccctgcttacaagaccattatattaacgaattttatcttctaattrgtaagtcctagagcagaggtgtgtacatggtgttaaattggtaggatgcacagtagaggaaataatatactcttcccaaggggaagttgctgttttcacctcaggcagacattcaattacaggatgtttagcaaaacatctgtttttaatatagtgctgtcattgcagaaacagactttttctggaaggttggtatgctccttgaaatctaaatctaaatcacaaatttatctgaaaaaaagtaaacaggacccctgaatctcagatagagtgtgtatagatagctgttctttgaacatggaagagagaactgctgacca

SEQ ID NO: 545072 - DNA, 534 bp, Homo sapiens
agggtatgtcaactccatgtagatttattttcaatttccaagcagctaagattctagtggacgtcagtttgtgctggctttattttcacaaatgctccattgggtgccacatgcgaatgtggctgttggccgcaggttaggtggcacacgctcattttgtgggcaagttctggaaaagtggttagcatagggttttgcaacgtagtgatctactttatagatttatatgtaagtacccagattggtggtaggtgaatttggtggaatcattttctaccagcatcctaaaatcatatttagaattgtattttagcaaaatgaatgtagtctggctggatataaaacaaaaatttccagttgggggtgaaagtgaagggaagggctatttagagggagtgtccccagccggtggggacctggctccctgggggttgkggatgggggtataagaggctcgattttgcccatctctgctaatgatgtggagctccagtaaacagcaagttaatggacttcccagatatgtgaatttca

SEQ ID NO: 545073 - DNA, 496 bp, Homo sapiens
gggcttcagacagggcggcaagagcttaggtgggttcaagggccttagccccctgtggcagtaaaggccaacatctcctcacacctctcccattgtactgagttccaccagtggggagartaggccagcgtgctctttatcagctgttaggtcttagactgttcatttaacttctaaaactcaacttgctggctcatccctaggttgggaggtgattgcaggtcagggaacatggacagtcaggtagctgccaagacatagttttacaaattctagaccagcactttccagtagaactttctctgttgatggaactgtcctctgcctgcttggtccagtgcagtaggactgaccacttgaggacttgaaatatggctgctgagactgaagaactgaacatttcatttaccttagtttaaatttaaatagtgagctaagggctagtggctacacattggaaagcttatctgaaactgttttgatcatacacccgtca

SEQ ID NO: 545074 - DNA, 162 bp, Homo sapiens
ggggcagggtgaggcgaggcarggcagggcgggtctggggcggggaagggcgaggcagggcaggatgtgggcggtgtaggcgcctggctaggggtcagcacagcctccgctccccatctctgccaggtcccagatggagcaacagtggggctcgtccctcag

SEQ ID NO: 545075 - DNA, 491 bp, Homo sapiens
ggtgtgcctcgagtgccacctgcgggcatgggcctctctgggccccaatagcgtagccaggcagaaagccgccccagttcgccatgctccactcagaactcggtacccagtgcagtggctcgcacctgcaatcccagcgctttgggaggcccaggcaggaggatcacttgagcccaggagttccagaccagtctggacaacatagggagaccctgtctcaacaamaaaaaaaaaaaaattgattagccaagtgggtggtgcgtgcctgttgtcccaactacttggagggctgaggtggaggatcgcttgagcctgggggttgaggctgcagtgaactgtgattgatccactgccctccagcctgggtgacagagtgagaccctgtctcaaaaaataaataaataaataaacaacccaccagaaatctgtgcccaggcccgatgccaggcaccctggagcacagaggcatctgcagtgcccatgccctcacc

SEQ ID NO: 545076 - DNA, 491 bp, Homo sapiens
ggtgtgcctcgagtgccacctgcgggcatgggcctctctgggccccaatagcgtagccaggcagaaagccgccccagttcgccatgctccactcagaactcggtacccagtgcagtggctcgcacctgcaatcccagcgctttgggaggcccaggcaggaggatcacttgagcccaggagttccagaccagtctggacaacatagggagaccctgtctcaacaaaaaaaaaaaaaaaattgattagccaagtgggtggtgcgtgcctgttgtcccaactacttggagggctgaggtggaggatcgcttgagccygggggttgaggctgcagtgaactgtgattgatccactgccctccagcctgggtgacagagtgagaccctgtctcaaaaaataaataaataaataaacaacccaccagaaatctgtgcccaggcccgatgccaggcaccctggagcacagaggcatctgcagtgcccatgccctcacc

SEQ ID NO: 545077 - DNA, 531 bp, Homo sapiens
ggctggcagggtcaggctgccccactgttggggaggctgtttgatcacatggtccaggtggcagctgccagatctctcctctgtaaagacgcagtttcccttcctgattcacaggtaatttggggtaatattkggagactttgtgaatattctgtccccaacgaccttacatctaatggttttggcatccagtgatgatttttgcctgaattaattactgcattggtggctgcaaaatgtctccaccaacatgttagaattctagcagggacaaagaggtgacaggcccggcaagtagcatggctgcccacgcccccaactgtggcctcctgggcaagccacaccacccgcttccataactctgtgcccaccctttctgcctgggggcaggagagacagaaacatgggagggcttcatctcaaaggcctttgagcacttagtcgggggaggggtgtctgggcgtccatgagagacatgtataccggtaggggtgccggtgacagggaagggggtcagttagctgcacatgg

SEQ ID NO: 545078 - DNA, 531 bp, Homo sapiens
ggctggcagggtcaggctgccccactgttggggaggctgtttgatcacatggtccaggtggcagctgccagatctctcctctgtaaagacgcagtttcccttcctgattcacaggtaatttggggtaatatttggagactttgtgaatattctgtccccaacgaccttacatctaatggttttggcatccagtgatgatttttgcctgaattaattactgcattggtggctgcaaaatgtctccaccaacatgttagaattctagcagggacaaagaggtgacaggcccggcaagtagcatggctgcccacgcccccaactgtggcctcctgggcaagccacaccacccgcttccataactctgtgcccaccctttctgcctgggggcaggagagacagaaacatgggagggcttcatctcaaaggcctttgagcasttagtcgggggaggggtgtctgggcgtccatgagagacatgtataccggtaggggtgccggtgacagggaagggggtcagttagctgcacatgg

SEQ ID NO: 545079 - DNA, 654 bp, Homo sapiens
ctcacaggaagcccccatgcaagcaggagggagccagagaagccacctggcttggtgggtgggagagcagtttggaggaagacgtcgctgaagaggggacactggctgccagccacgctcccgcactcaagcagtactttctctcccccgcagttgcctacatgttggcgatggtctcccccttacaaaaaggggagcctggggccaggcgtggtggctcactcctgtaatcccagcactttgggaggccggtgtgggtggatcacctgaggtcgggagttcaagaccagcctgaccaacatggagaaaccccatctctactaaaaatacaaaattagccaggcatggtggcgcatgcctgtaatcccagctactcgggaggctgaggcaggagaatcgcttgaaccctggaggyggaggttttggtgagcccagatcgtaccattgcactccagcctgggcaacaagagcgaaactctgtctcaaacaacaacaacaacaacaacaaaaggggagtctgggggaggggcaaggccctgtctgcagtgtctccctgctgaatgccacgcacccaggatggctgccagcaccatgggggctcacatgcaggtgctttaggcaagaatgcctgggagatcaccagaagggctggcc

SEQ ID NO: 545080 - DNA, 521 bp, Homo sapiens
aagcgctcgccacaagcccctgcctgggcctggccatggctgcctgtctcgtgtcttatcttgttacctgtggtgagacaccctgactggagaagcatgttcctggaagggggrcggggtgggggatgctgaaatgcggccagaaaggcaggtgggcctttcctcctgggccaggcggggcaaaggttggggggatctgcagcaggggagccaggtggactgggaacatccttggcacccccaatctccccagacccatcgtttcacccttggtggctcccctctctcctggttcccttagccctggacgtccctgggccacgcgggaaagtcacctgctgccctctctcctcctcttcccctgcatggggtctggacagaggctccttgtctcccctcacttcccttcccctgtctagcccagggctgtgggtggctggctgtcccggtaaaaggattatatcatctgtaatgtatatccagacgcacatgcactgctgctcgggaggacaagacaagga

SEQ ID NO: 545081 - DNA, 613 bp, Homo sapiens
agctccccctaccatgcccccaccacctcgaactccccatctgcccattacagacaccccacccacgttgccagcccagagacactgcagtccacccatcctggagcgaggtcccgtcagaaacccacatcccagtggctgacgctccccacgtcccaggcacacacctccagcatctccaacgcgcactctcatccaccccagcacgcgcgcacacctgctggattcacgctctccagcatcctgccccgcccccatcacaaatagccttcgacaccccccagcacatctctgagtccctccctccctcacccccaacacctggcacgcgggctctagaggctgcagcatttggtggcatccctgccaggcacctctggctccccttcggcagaggctcagcagccttggrccccccaggtgcctccctaaacagaccttgagactccccagcgactagcttggcctcttccctaagaaataaagaaggcactttggggtccaaggtagggtacttagatgtggaagcaaggggccccggggaggggcggggaggcggcggagagagcccggcgctgaaatggaggcggcccaggtgggaccaaaggggcgc

SEQ ID NO: 545082 - DNA, 609 bp, Homo sapiens
atatcaaagtcatggcgacagacacttggtcgagtccactcttctatcaccagcacaggtgcttcaatatgtgttgaatgaatgaatgaatgaatgaagaggttcagtatttcctgcagggagcagagggtggtctgggcagcctctgaaatggacgactgttgttgaggcatggctggcgtaccctccccctctttgaagggtagacggggtacccgggggaaagagccttccactcactgccctggagccaaatctcttcctcttggtcagtcttctcgcgccacccctccgggcattggcccagaagccacttgcaaagcggccactgcccggcaggtcagcagtccagggggtgagacagcccctggcagagccaagggaggagaaagagctggagtgtgaaggtgggtgaggaggggctggggaggaagagtcggggggtctgggagyggggagttcccctctcctccctgggtcccggccaccccctcccagtctggctggcctggctgccccccagctccagtctcccgttctcctcttgtcccaggctggcccacgatgggcaggcgaggtagccggggcacaggggagcaagcgccgtcc

SEQ ID NO: 545083 - DNA, 668 bp, Homo sapiens
ctggccaggctggctgcgggatcctgggggcagaggcctttcccacactggcatctagttgaaaaaggaggttcaatgagtttaagcgtcctgatctggaggacagggacgttagggctttgcattcaccaggcaccggtgtccccttaatataccgagggttcagcgctcccatgtcccagccttgcccacccagccctggctgctgggagctgagcatgagttaggtgcccccttggcccctgagaaaccagagctcaggggtttcttttcttcagagaccctgggccctggccaggagcacttggcccacagcaaggagccctcagcaggcctgtgctcccaggacgaaagccgtccacccagggcttaggggaagggcggggatgccgctcagggaacctccggctgcagggagcagggcccccagggggcccagtgcagggacagsttcggagcccctttcctcaagcagaggcagggaggtgcccagtggccttcggctgtgtgtcctggtgcccaagcttgccccttcaccggggcgctgtggctggggcctgggctgttgagacgttgtggggtgactggtttgtgcccccactgaaagatacatccatatcttaacacccaggccctgtgatcagggccttatatgcaaataaagggtg

SEQ ID NO: 545084 - DNA, 643 bp, Homo sapiens
ttttctgtgatacatctaccttgttgaagctggcctgctccaacacgcaagtcaatgggtgggtgatgtttttcatgggcgggctcatccttgtcatcccattcctactcctcatcatgtcctgtgcaagaatcgtctccaccatcctcagggtcccttccactgggggcatccagaaggctttctccacctgtggcccccacctctctgtggtgtctctcttctatgggacaattattggtctctacttgtgcccattgacgaatcataacactgtgaaggacactgtcatggctgtgatgtacactggggtgacccacatgctgaaccccttcatctacagcctgaggaacagagacatgagggggaaccctgggcagagtcttcagcacaaagaaaatttytttgtctttaaaatagtaatagttggcattttaccgttattgaatttagtaggtgtagtaaagttgataatgaaatatcactctaaatcagtggcttaaagattttttaagaccactaaacctttagtttaaacaaaactctatgctaaaggctaacaggaaaaatatgacaacagacctgtgtttggagtgaagttgggggcaggaagccaggtgctaagtatgcttcttccttcctt

SEQ ID NO: 545085 - DNA, 602 bp, Homo sapiens
tggctctttacttcaagcctcaaggagagatttcggtcttggccttgccactagggtggaatggagccactgggtccagcatcatagacaatggccamaggcctgattcccaggtccctgttcaccctccaggatcacacggtttctttatcaatttgggagattccatttcatttggaatttttctccccttttatatttcaaactggaaatctccttgctacttaaaaattctattatccatgtaatacatcatgttgtaaatgtacaaacagtacagaacatcaccacccttccgcaccatccgcacagtaatcttatctttaaaagtaactactgttaatagtttcatgtttagctttccaaatgaacacacacaaacacacactcacacacacaaacacacccacattcaaaaccatactgtgttgtaatctgacttttctctgtctatattgcatagtataattcttacatgtgagcctacaaatctatcttacccattttaaaggctgcataatattccatttatgtaaaattataatctatttaaccacaccccattgatgtaatttagttcctatttttgcgactgccaataa

SEQ ID NO: 545086 - DNA, 570 bp, Homo sapiens
catgcagtcacaggtaatcttgatgcctcttaggtcatgcatcgctgtgtagaaagagtttatggaaaatatacagtgtatttctgaactctgtcgctgtatcgaactcacaaggaaaatgcatgagaaacatagatttgctgtgttgcacggaagagaatcttaagcaagatctatgatttttcccaaaaaaattataaaaacagtttgtamttgctcgtttaaaaaaattaggcaataaatgtaggccaatggggaaaatgaaaattttccccaaaatccaatccggaaggaaaaaaaacggtaacaaagtgaagaacctcaaattccaaggcccctgcttcctgaattctgggcaggctggtgactgcttcaaccaacggaagcaggctggaagggaggctctgtgacttctgaggctagccataaaaggcagatgctgatctgcccttctcgttggaacccttgctctcagagcccaccacggaaggggtctgactgctctgaggctgccatgctgtgaggatgcccctgctccgtgtcgaggtcgcatgtaggcacgttggttaa

SEQ ID NO: 545087 - DNA, 570 bp, Homo sapiens
catgcagtcacaggtaatcttgatgcctcttaggtcatgcatcgctgtgtagaaagagtttatggaaaatatacagtgtatttctgaactctgtcgctgtatcgaactcacaaggaaaatgcatgagaaacatagatttgctgtgttgcacggaagagaatcttaagcaagatctatgatttttcccaaaaaaattataaaaacagtttgtaattgctcgtttaraaaaattaggcaataaatgtaggccaatggggaaaatgaaaattttccccaaaatccaatccggaaggaaaaaaaacggtaacaaagtgaagaacctcaaattccaaggcccctgcttcctgaattctgggcaggctggtgactgcttcaaccaacggaagcaggctggaagggaggctctgtgacttctgaggctagccataaaaggcagatgctgatctgcccttctcgttggaacccttgctctcagagcccaccacggaaggggtctgactgctctgaggctgccatgctgtgaggatgcccctgctccgtgtcgaggtcgcatgtaggcacgttggttaa

SEQ ID NO: 545088 - DNA, 570 bp, Homo sapiens
catgcagtcacaggtaatcttgatgcctcttaggtcatgcatcgctgtgtagaaagagtttatggaaaatatacagtgtatttctgaactctgtcgctgtatcgaactcacaaggaaaatgcatgagaaacatagatttgctgtgttgcacggaagagaatcttaagcaagatctatgatttttcccaaaaaaattataaaaacagtttgtaattgctcgtttaaaraaattaggcaataaatgtaggccaatggggaaaatgaaaattttccccaaaatccaatccggaaggaaaaaaaacggtaacaaagtgaagaacctcaaattccaaggcccctgcttcctgaattctgggcaggctggtgactgcttcaaccaacggaagcaggctggaagggaggctctgtgacttctgaggctagccataaaaggcagatgctgatctgcccttctcgttggaacccttgctctcagagcccaccacggaaggggtctgactgctctgaggctgccatgctgtgaggatgcccctgctccgtgtcgaggtcgcatgtaggcacgttggttaa

SEQ ID NO: 545089 - DNA, 570 bp, Homo sapiens
catgcagtcacaggtaatcttgatgcctcttaggtcatgcatcgctgtgtagaaagagtttatggaaaatatacagtgtatttctgaactctgtcgctgtatcgaactcacaaggaaaatgcatgagaaacatagatttgctgtgttgcacggaagagaatcttaagcaagatctatgatttttcccaaaaaaattataaaaacagtttgtaattgctcgtttaaaaaaattaggcaataaatgtaggccaatggggaaaatgaaaattttccccaaaatccaatccggaaggaaaaaaaacggtaacaaagtgaagaacctcaaattccaaggcccctgcttcctgaattctgggcaggctggtgactgcttcaaccaacggaagcaggctggaagggaggctctgtgacttctgaggctagccataaaaggcagatgctgatctgcccttctcgttggaacccttgctctcagagcccaccacggaaggggtctgactgctctgaggctgccatgctgtgaggatgcccctgctccgtgtcgaggtcgcrtgtaggcacgttggttaa

SEQ ID NO: 545090 - DNA, 551 bp, Homo sapiens
ggattgagattggttaaaaaggcatatttttctctgtagggaaaatttctgtgaagaatctatgagttgtcattggagcattacaaatgttcttaatgacttcataattcttcgagtaatctgaagtgcaagctaagatagatgtaaaaagaacatcctcacaaaaaataagagcaataaattgggatagtttaaattccctgccattgttcggcagctactgaagcagttcagtaatgtgggaaaatgttcaaaacctaatgtggagggaaaagaggatactcaactattaaaagccygcttctaactatagaactatagatagtattaacagggcttctgtatcttagtgatgatgggattctaggtcatgttttgttttctttctgattttctgcctttttaaaacatttttggggccgtgcacggtagcttacacctgtaatcccagcactttgggaggcctaggcgagtggatcacttgagctcaggagtttgagaccaacctgaacagcatggtgaaaccctgtctctactgaaaatacaaaaat

SEQ ID NO: 545091 - DNA, 492 bp, Homo sapiens
ggccagctgcccatagagggcagtggtgctggagtgaagacctctcagcgcatccctcttcatctgtaggatgtgcatggcttccaatgctgtctgttctgctcctgagacactcgctggctacaggattataaaggtgatgaggtttcagcctaaagactctccattcaataacacttcctacaagatatcttttttgtttttttgagacaggatctggctctgtcacccaggctggagtgcmacagcgcgatctgctcactgcaacctcagcctctcgggcttaagtgattctcctgccttagcctcctgagtagctgggaccacaggcgcccgccaccacacccagctaatttttggattttttttttttttttttttagtagagatggggttttaccatgttgcccaagctggtcttgaactcctgagctcaggcaatccacccgccttggccacccaaagcgctaggattacaggcatgagccacca

SEQ ID NO: 545092 - DNA, 492 bp, Homo sapiens
ggccagctgcccatagagggcagtggtgctggagtgaagacctctcagcgcatccctcttcatctgtaggatgtgcatggcttccaatgctgtctgttctgctcctgagacactcgctggctacaggattataaaggtgatgaggtttcagcctaaagactctccattcaataacacttcctacaagatatcttttttgtttttttgagacaggatctggctctgtcacccaggctggagtgccacagcgcgatctgctcactgcaacctcagcctctcgggcttaagtgattctcctgccttagcctcctgagtagctgggaccacaggcgcccgccaccacacccagctaatttttggattttttttttttttttttttagtagagatggggttttaccatgttgcccaagctggtcttgaactcctgagctcaggcaatccacccrccttggccacccaaagcgctaggattacaggcatgagccacca

SEQ ID NO: 545093 - DNA, 616 bp, Homo sapiens
cacttctctcattgcatcctgctgtctttgtgtatctctgtatttctcccactatcttcagagggaattctttagtctttagaaagctctctgctgggtgcagtggctcatgcctgaaatctcagcactttgtgaggctgaggtgggaggatcacttgaggtcaggagttcaaggccagcttggacaacatagcaagacccctatctctaaaaagaataaaaaattaaacaaattttaaaataaaaaataacttttaaaagaaggctctcatgcccccttagtaatgctttctkatcactgtggtgagttctagaatacttggctttctctgactcaagtaaatgggtttttgagcaccctgaaaccctctacgcctgggagggggcctgcgtctggatcccctgcacctacagagccctagatggtgacctggaaagcttcatcctgttccacaatcctgagtataacaagaacacctcgaagtttgatgggacaagactctatgaaagcacaaaggatgggaaggttccttctgagcagaaaagggtgcaattcctgggagacaagaataagaactgcacactgagtatccacccggtgcacctcaatgacagt

SEQ ID NO: 545094 - DNA, 505 bp, Homo sapiens
aaacagtggcaatatataattccttcagctgttatataatgacaaaataaaataatacatggtagatgtgtagtacagcacttgggaagtagcaggatctaagtcattttttttctgtttgtagaatgaaagatgttgctctatgttctgggattgctggcctttcaggagcagagasgtatgatagaaaataatgccttcaatataaaattttaatgacttacatacagagtaatccatcaaccagattccaaaacatactttgaggggcaagtatctgttaaaggcttaattttatttgttcccagatagttcgaattgcctttgacagtcctttttctatcataaaaaccatctctttcttttacaagtctcagctgcttatatccaacaaaataaaagcatctcattaaacctcagccctctttgatgactcaacaaatattcattcattgaacctattaaatgtaaacatattacttttaaaaaacatatcttcaaggtc

SEQ ID NO: 545095 - DNA, 627 bp, Homo sapiens
tctggtagtacagtgcgaccaggtggtgagccagacgcctgtcataggcttcgtcctgagggtccagcaagaggaagatcaaatcaaacctaagaaaacaaagtaaaaatactgtttttccagcaccttgtgaggccgaggcaggtggatcacctgaggttggtagtttgagaccagcctggccaacacggtgaaaccttgtctctactaaaaatgcaacaattagccaggagtggtggtgcctgcctgtaatcccagctacttgggaggctgaagcaggagaatcgcttgaacctggaaggcgaaggttgcggtgagccaagttcgcgtcactgcactccagcctggccgacagagggagactctgtctcaaaaaaacaaacaaaaaaacccaaaacaacaacaaaaaaactgttttcctagttgagacaccaatacacctacaaacgacgtactraagactgcttgagcaccacagatgtgcagtcaatgtgcaccctgtgagcgccatcagggagaagcatctttgcctggtgtggaaagggccttcgtgtccatccactcaccccactcaccctgtgctgtccctagtccttaggtcggcccagggaacggctggggaccaat

SEQ ID NO: 545096 - DNA, 590 bp, Homo sapiens
agaagttaaggcagtagtaattgtttctctatcagaaggccataatgttatcattcctgcctctatctgtttgcttgttcttctctctcagcagaatggtcttctctgcttctctgtgcacctgcagaaggtgaccaccctaaggcttatggattcaggagtcctcagtttgagagcagttaccaaatgcctcgcccctgtgaactctagtcccagtttcttattcctggtactggcttagtttgaggcagctgcccaccgttaagtccagtgagccatggcctggggacaaggtcaggtacatgtgtaatcagctgggtctgtgagttgtggtggtggcgatggaggtagctcccagaaaaatggattacaggttaagaagagtctatatatcttgaccacatttgatgtgacttggaagtttcaatgtgtgaccacttacaaagttakgatcaggtgtctcatttatttatggtgatgtatgagtccgtgtgtgagtgtgtgtgtgtcctgtgttttgtgtgtgtgtgtgagagagagagagagaatgagaatatgagtggtggtttcccatttatttttctatgggc

SEQ ID NO: 545097 - DNA, 562 bp, Homo sapiens
tcccatcctccttcagagtgtcttcctccaccaagtgctgatccttgggtccagtgaaggtcaagaagtaagaactaggagcttcaaatgtcatgctttggagcagtagctgttcctttagctcccctaggatactagagtagcagagcccaggtgttctttattatgtagtttttctccttgggcaaagcatggcatgaagaacatggcagagcacacttttatggataatggagtttcaccacctgtccttgctttacttctcccatttcaaatctcatgtccataaagtctaatattcctgcatccctaatacttgaagtctcacatattatctgaagtatgtatgacattcattctctcatgtggctcttcatgtaactatttctcagacagctttgaattttcccyagtgacctgcagttagtgggctttagcaagtaagtggtgcaagactatctcacaatctaatggtttcattctctcagcagtctttagagacttgcagtctggaagacatagatttcaaactctacaatggaccatttctggagggacacac

SEQ ID NO: 545098 - DNA, 562 bp, Homo sapiens
tcccatcctccttcagagtgtcttcctccaccaagtgctgatccttgggtccagtgaaggtcaagaagtaagaactaggagcttcaaatgtcatgctttggagcagtagctgttcctttagctcccctaggatactagagtagcagagcccaggtgttctttattatgtagtttttctccttgggcaaagcatggcatgaagaacatggcagagcacacttttatggataatggagtttcaccacctgtccttgctttacttctcccatttcaaatctcatgtccataaagtctaatattcctgcatccctaatacttgaagtctcacatattatctgaagtatgtatgacattcattctctcatgtggctcttcatgtaactatttctcagacagctttgaattttccccagtgacctgcakttagtgggctttagcaagtaagtggtgcaagactatctcacaatctaatggtttcattctctcagcagtctttagagacttgcagtctggaagacatagatttcaaactctacaatggaccatttctggagggacacac

SEQ ID NO: 545099 - DNA, 580 bp, Homo sapiens
ggccttatacaatatcactacgacctattgaaatcttaggaccagctcaagttgggagacatctttagaggctaaggtgctcctctgaaaaatggtctccaaaccattttcctctccaaactaaaatttcagttaataaaatatgtgmaaatgaagctgtcacagttgcacttaataattcgcactcccaatttagcttctcaatactgcaagctaggcgttactgatttaggggttttagagccctggatagatgaagttttcctactagaacttctgcttcctgagggggttctcttcttccctagctgggctgaaagactccagtagtccacttgtagcagccacaggctgaactctctaaaatctgttcttgtttttgtttttttaaatactcagtcaactggccaaaaaaacacctctccacttaaaactatcaattaaaactctcagggggtaacagactgcagggtgaagtgaagagagaaggaaggaagagaggaaaatactatagagtgagaaagtggagttcctgggcaactagctttatataaaaggcaagtatgtactaggaaaatct

SEQ ID NO: 545100 - DNA, 580 bp, Homo sapiens
ggccttatacaatatcactacgacctattgaaatcttaggaccagctcaagttgggagacatctttagaggctaaggtgctcctctgaaaaatggtctccaaaccattttcctctccaaactaaaatttcagttaataaaatatgtgcaaatgaagctgtcacagttgcacttaataattcgcactcccaatttagcttctcaatactgcaagctaggcgttactgatttaggggttttagagccctggatagatgaagttttcctactagaacttctgcttcctgagggggttctcttcttccctagctgggctgaaagactccagtagtccacttgtagcagccacaggctgaactctctaaaatctgttcttgtttttgtttttttaaatactcagtcaactggccaaaaaaacacctcyccacttaaaactatcaattaaaactctcagggggtaacagactgcagggtgaagtgaagagagaaggaaggaagagaggaaaatactatagagtgagaaagtggagttcctgggcaactagctttatataaaaggcaagtatgtactaggaaaatct

SEQ ID NO: 545101 - DNA, 661 bp, Homo sapiens
aaaacccaaaaaccttgaagcactccttcagtgaggtacagagaaaaggaaaggggggaaagaggttagaagaaagcttcactaggccgaattgaagaagccaagagtcgcraaggtgtagaagcatgtctaattctgagagaagaacattgtcttgaactcacagatatcacacacattgtagctccaggtagagacagagcacatggtattttcagagatagtttggtagggcaggttggctaatttcacatagtcattgagttcagcctctgttttcagcttgattagcatgatgtcatgatcaatagaagtgactgagaagtgtggatgatgaatcatcttctcatagccaatcacttgcagatgcttttcattagagtctgctgggattgtaacccccaatatcacccgaagctttctggaacaatatagacgtttatgagaggacttaacagagatggcttctccatcattatgagcctctattatccctccccacagacctttttctgtaccctcgtatgtctcccaaaggcctttctaatcccatttaattgggagatggtctcagacaggggtgagagtctgtgcccaacctgagaacccaaagaatggagtgcctttgaaggcttatcactcacggtaaattgcagtgtgc

SEQ ID NO: 545102 - DNA, 661 bp, Homo sapiens
aaaacccaaaaaccttgaagcactccttcagtgaggtacagagaaaaggaaaggggggaaagaggttagaagaaagcttcactaggccgaattgaagaagccaagagtcgcgaaggtgtagaagcatgtctaattctgagagaagaacattgtcttgaactcacagatatcacacacattgtagctccaggtagagacagagcacatggtattttcagagatagtttggtagggcaggttggctaatttcacatagtcattgagttcagcctctgttttcagcttgattagcatgatgtcatgatcaatagaagtgactgagaagtgtggatgatgaatcatcttctcatagccaatcacttgcagatgcttttcattagagtctgctgggattgtaacccccaatatcacccgaagytttctggaacaatatagacgtttatgagaggacttaacagagatggcttctccatcattatgagcctctattatccctccccacagacctttttctgtaccctcgtatgtctcccaaaggcctttctaatcccatttaattgggagatggtctcagacaggggtgagagtctgtgcccaacctgagaacccaaagaatggagtgcctttgaaggcttatcactcacggtaaattgcagtgtgc

SEQ ID NO: 545103 - DNA, 682 bp, Homo sapiens
agcatgggtcctgaggcttgtgtcagttacatcacagaggccatggctgctgacccagagtgaatgaaggggagcagaggaggaaaggggctcaaagaagaatggagggttttgtagaccatcgtaagaactcggccttgtttcctgagtacaaatggaaccactcaaggatttgtgcaaaggagtgatgacagtctcctcatggagaacctgtagagtgtagaagtatagaggtagaggggtctgttaggagaataatttgctaatccaggcaagaggtggtggcttagatcattgtgagcagtggagatggtgagatgtgattgaatttaggatacatttagaagayaaagccaacatttttctaagagatcaaacgtggggtatgagagaaagagaggatttatgaataagcctgggtttatgcctgagtaactggaactgtgccaggagatatctgattcttcaatgttctgctgtgccctctgtggtgcagaacatcaatcctgttgcagacaggtccagagtcaggtcttaggagtgggtctggtatttgagtgacaatgtccacgcctcccacaaaagcacacaagcaaacctcctgcggcaggcaggcaggcactatcacaggaggaaacttgatgggaacggggcagtggagagggacagaggaccatcctac

SEQ ID NO: 545104 - DNA, 576 bp, Homo sapiens
tgttatagcagttatcaaaaggtattgtagttagctaactgatggccaaggtcatgtcatagtcactcaggcatccttagcaaaggccgtgcctactaaacagctagtggttaatwtttgaatgaataaatgaatgaacaaacacaaggtgaagaggttgctaaatttctcattatcctcaaagtttacatgacaaagacagcaggagtcatggcacaggttctcagctactcattttttttttttaatcagatgtttcctctttggattttgttccaaaataacaaagatgaagagagttgtagatccagtgtagaaattatgaagaggtggtactgaggggatatgggaacagaggcgcctcagtgggtatccataattttcaagatccatcttgcatagctatgaacacctgtgaagaatccttcacttcctagggtgacacttccttctgcccaggacaagattccatgcaacctcccattgcagatggctggggcagccgaaacatccttatagagagaaggaacagaaggtcaatgtgtccttgtccttatggaacaagagtaaatgcca

SEQ ID NO: 545105 - DNA, 576 bp, Homo sapiens
tgttatagcagttatcaaaaggtattgtagttagctaactgatggccaaggtcatgtcatagtcactcaggcatccttagcaaaggccgtgcctactaaacagctagtggttaatatttgaatgaataaatgaatgaacaaacacaaggtgaagaggttgctaaatttctcattatcctcaaagtttacatgacaaagacagcaggagtcatggcacaggttctcagctactcattttttttttttaatcagatgtttcctctttggattttgttccaaaataacaaagatgaagagagttgtagatccagtgtagaaattatgaagaggtggtactgaggggatatgggaacagagrcgcctcagtgggtatccataattttcaagatccatcttgcatagctatgaacacctgtgaagaatccttcacttcctagggtgacacttccttctgcccaggacaagattccatgcaacctcccattgcagatggctggggcagccgaaacatccttatagagagaaggaacagaaggtcaatgtgtccttgtccttatggaacaagagtaaatgcca

SEQ ID NO: 545106 - DNA, 603 bp, Homo sapiens
gcttcaccgcatcacatatattttatgttcatttcccccactgttcttccattgtgtgatgggctttcagcaactatcaatgggtgtcaccctcccgcaggctgycttcatactgtctttgtgcacgaggactcctatttctcccacctgtatttcaatccagttctctggactcttgtcttcaatattctagagatatgaaaattactgtctgctccatttgttggtgtcagagtggctgccctttatcagtctctttgaattttatctttgacctccagtgatggtggtttgggtccctggcaggaatccctctatggtggacaacattgtctcatagcagcgatttccattagggacatccctctacattttctcccagctccaacctcctcagcataaagaacacagcatccaacacatacggtttttatattcattccaggtccaggttggaataaagcaggattcattaaatggaatgggttccaaggctatggctatagtccccacatgggggttgagtgaagcaggtgttgatagcttgatcatcattaggtcatcgttcaaggattttgcatcaaagtcagggtaggtcacaat

SEQ ID NO: 545107 - DNA, 603 bp, Homo sapiens
gcttcaccgcatcacatatattttatgttcatttcccccactgttcttccattgtgtgatgggctttcagcaactatcaatgggtgtcaccctcccgcaggctgccttcatactgtctttgtgcacgaggactcctatttctcccacctgtatttcaatccagttctctggactcttgtcttcaatattctagagatatgaaaattactgtctgctccatttgttggtgtcagagtggctgccctttatcagtctctttgaattttatctttgacctccagtgatggtggtttgggtccctggcaggaatccctctatggtggacaacattgtctcatagcagcgatttccattagggacatccctctacattttctcccagctccaacctcctcagcataaagaacacagcatccaacacatacggtttttatattcattccaggtccaggttggaataaagcaggattcattaaatggaatgggttccaaggctatggctatagtccccacatgggggttgagtgaagcaggtgttgatagyttgatcatcattaggtcatcgttcaaggattttgcatcaaagtcagggtaggtcacaat

SEQ ID NO: 545108 - DNA, 603 bp, Homo sapiens
gcttcaccgcatcacatatattttatgttcatttcccccactgttcttccattgtgtgatgggctttcagcaactatcaatgggtgtcaccctcccgcaggctgccttcatactgtctttgtgcacgaggactcctatttctcccacctgtatttcaatccagttctctggactcttgtcttcaatattctagagatatgaaaattactgtctgctccatttgttggtgtcagagtggctgccctttatcagtctctttgaattttatctttgacctccagtgatggtggtttgggtccctggcaggaatccctctatggtggacaacattgtctcatagcagcgatttccattagggacatccctctacattttctcccagctccaacctcctcagcataaagaacacagcatccaacacatacggtttttatattcattccaggtccaggttggaataaagcaggattcattaaatggaatgggttccaaggctatggctatagtccccacatgggggttgagtgaagcaggtgttgatagcttgatcatcattaggtcatygttcaaggattttgcatcaaagtcagggtaggtcacaat

SEQ ID NO: 545109 - DNA, 561 bp, Homo sapiens
gtaacttaaaagcttgtatgtggtgaagattttttaacaaataatatataatgaaaatgtcaataacgctctcaaatccaatcccaccttccactggtcaccaatattaacactctggtgtgcttcttttcacctctcttttctgtgttcatgcacacctttctacccaagtacacctacagaaaatgggttcacctgtacactttacctgtcacatgcatactcttttctgttaatataccctggtcttattgttccagattggtcaatatagatctaacttgctcctattagctgcttcatattgcataatgagggtagacaggtacaattgtgctctattgtctaattcctgaattctgccagatcttttctaaagagactgaatggcctctttaggcttccaggttstcctcaccccagcccccagttgatgattccagcatttccatcactcatagtcctggcaggtttgagagctccattggtttctcctgcatgaggagacagggagggataaaaggatagacctttatcaatcctaccagacactacacagta

SEQ ID NO: 545110 - DNA, 612 bp, Homo sapiens
gctctcagagcaaccctggctccaacccctcttccctttccagaggacctgaacaaggtgttcccacccgaggtcgctgtgtttgagccatcagaagcagagatctcccacacccaaaaggccacactggtgtgcctggccacaggcttcttcccygaccacgtggagctgagctggtgggtgaatgggaaggaggtgcacagtggggtcagcacagacccgcagcccctcaaggagcagcccgccctcaatgactccagatactgcctgagcagccgcctgagggtctcggccaccttctggcagaacccccgcaaccacttccgctgtcaagtccagttctacgggctctcggagaatgacgagtggacccaggatagggccaaacccgtcacccagatcgtcagcgccgaggcctggggtagagcaggtgagtggggcctggggagatgcctggaggagattaggtgagaccagctaccagggaaaatggaaagatccaggtagcagacaagactagatccaaaaagaaaggaaccagcgcacaccatgaaggagaattgggcacctgtggttcattcttctcccagattctcagcccaacagagccaa

SEQ ID NO: 545111 - DNA, 429 bp, Homo sapiens
gaatgggaaggaggtgcacagtggggtcagcacrgacccgcagcccctcaaggagcagcccgccctcaatgactccagatactgcctgagcagccgcctgagggtctcggccaccttctggcagaacccccgcaaccacttccgctgtcaagtccagttctacgggctctcggagaatgacgagtggacccaggatagggccaaacccgtcacccagatcgtcagcgccgaggcctggggtagagcaggtgagtggggcctggggagatgcctggaggagattaggtgagaccagctaccagggaaaatggaaagatccaggtagcagacaagactagatccaaaaagaaaggaaccagcgcacaccatgaaggagaattgggcacctgtggttcattcttctcccagattctcagcccaacagagcca

SEQ ID NO: 545112 - DNA, 555 bp, Homo sapiens
taataggatctcggaagatacagcagggatcaggtcgcccagtgtgggctgcaccctgcttccccacagccttctccaccctcaccctccacatttcctaccgcagtggcttcctaatgtcagcatgtttcagagctgcctgaaagccttgtgataaaacaggttactgggccacatctccagagtttctgattcaatgtgtatgaggtgaggcccacagattccccctgttaaatgatgttgctggtctgaagaccacattctgaaaatcagtcatctttagaaaagtatgtaaaaagcagcagctagccctcaaaccatagctcagaatagggaagacaaactagtgtcaaggaacttgaaatcaaggaagatgaagatcaactcacaccagttaagaaaaacaamaataacaaaaacataaaacacccatcttaatagtgagcaggataaaaataaaaggcatgactaccatgcaaacttactacctgaatgaggagagggtggggaatggcagaaagaaaataacagaatgtaaaagacagatgaagaact

SEQ ID NO: 545113 - DNA, 506 bp, Homo sapiens
taaggctcaaggcttaggtttggtgcaggtcagccccaggtgtctctcatcctcctttgatcagtgrgctagcaggagcatgtgcttgcaatgatggtggaaatagaaaaacgtgcaatcatatgtgagtttcaagcctctccttgcatcatgtcttgtaatgtcctattggtcagtagggctgggaaatatatccctccctcagagagtcaggagtggaaatgaaaatgtttttaacaatagcctaatcaccataaaggctttgggtggcacactgggcccttgatcttggagatcagtgatagactgtaacagacctcagaaaccccttggggttattcagagcatacttctagagggtctggggttgtcttgccattcaagcccatcccacacccatctgcccccacatatcctaagcacagttatgtcaagtgagaacagaggcatttgagtggagcacagatttcaaacacataaaggcagggcatggccatctcccgcag

SEQ ID NO: 545114 - DNA, 463 bp, Homo sapiens
aaggctcaaggcttaggtttggtgcaggtcagccccaggtgtctctcatcctcctttgatcagtgggctagcaggagcatgtgcttgcaatgatggtggaaatagaaaaacgtgcaatcatatgtgagtttcaagcctctccttgcatcatgtcttgtaatgtcytattggtcagtagggctgggaaatatatccctccctcagagagtcaggagtggaaatgaaaatgtttttaacaatagcctaatcaccataaaggctttgggtggcacactgggcccttgatcttggagatcagtgatagactgtaacagacctcagaaaccccttggggttattcagagcatacttctagagggtctggggttgtcttgccattcaagcccatcccacacccatctgcccccacatatcctaagcacagttatgtcaagtgagaacagaggcatttgagtggagcaca

SEQ ID NO: 545115 - DNA, 601 bp, Homo sapiens
tgcctctgctaggacaccccagccccacctctctggatcatcagcctgagaaagcaaaacctcatagtcacccatttaaggtgatcggttaatcaaaagccagacattacctggggaattatttgaataatatctcctaatcatcgtgatttgtcactcatcatgtcagaatgcttattattcactaggagcctccccaaaaggcttcatcatctcctgccagttctgtcaccacaagaccttggaaggagatccttaccagggaatttatcacaatgataatcgcatatgagcatcagctccaggtcttgagcagyagttagtggggagagaggaagcgcaaagccccaagctgggcagactgaggcccgattggggcagtgtggacacagcagcaggggacatgagaacacaactatgggccccaggagaaggaaacttgcaatcccaacaagggcatttgactgctggctgccagcctccaattcaaggacacatcgtggctcttaaaatactgatgggtcatgcttcagggcccaaagggtgcagatggcaatgcaggaattcctgcagtcagcttcctacggggtgttgcttcctg

SEQ ID NO: 545116 - DNA, 579 bp, Homo sapiens
cttttctccccatcacagtgccaacrgctttcagtccagtgcttgctacagagagtgctgtgccgcaaagcgtgggcccagcccagagagtgctctttgtggttgttctgtcagggtagtcaggactctgcggcccagctgcttctgtgcacaggaaataacttcattttacaaagccctctgtctataaaggtaatcattataatgggattttacttgtgtccattttcctctcagcctcagagttaggccttttcctctcacctgcctaattaccttatcttaatttttttttaattcagcctaactgctgttagcaaaaaccattaaaaatgcttcctagctaagattcaggaaaggcagaatgagagggttgctttctggcccctggtctagccagcttgttgtcacaggaactgccgcacttggtttgattctgcacacagggaatggcaatgacagaagtgacctgctggagccgcggtgaaggagtccactctgaggaggtaggggagggaggggactgcagataagtgcccagccgacattccagctgcaagcgggcctggagccacacgc

SEQ ID NO: 545117 - DNA, 437 bp, Homo sapiens
gctgacctgtttttcacagcaagactctcattgaaagaagcagtgtgctgatttttccccgtggcacaagctccttaccacatcttggagcagcatttttttgagaccgagttttactctgtcacccaggctggagtgcagtagcgcgatcttggctcactgcaacytccgctagagttcaagcaaatttctcgtgcctcagcttcccgagtagctgggattataggcgtgcgctaccacacctgactatttttttttatttttagtagatacggggtttcactatcttggccaggctggtctccaactcctggcctcaagtgatctgcccgccttagcctcccaaagtcctgggattacaggtgtcagccactacgtctggccttggagcagcaatatgagtactactcttccagaagccagttgggccgcattat

SEQ ID NO: 545118 - DNA, 557 bp, Homo sapiens
ggttatcacctgaggggaaacaggcccagtgaatgcagccctagacccagtgagtgggtgctggtaggggagaatccttaggctgaggccagggatcctttgtccgccccccagcaggggaaacccagagtgagctcatctyggggctgttgctgcatttccaggcattcatctcagcctgtggctggccttccggctttggagagcaatggccgctcgggaatctaagagcagccctctgccttcctgctagccctcccgccagcgtccttctcccagccacaacttcctgtggccaaagaaggggcctggaatccttctcgaaggcaccaccttctctgggatcttgggcccgatggttgctggggtgggacaaggtacagagctacctggactggctccaactcagtgaccgccactagaatggcccacaggagtgcaaagataagcctgggcaggtgttcacctcctagacccttccagttggcaaagccctggggggcccttgggctctcacccccaccctagcaccaggcagccctctggcctcttcctct

SEQ ID NO: 545119 - DNA, 585 bp, Homo sapiens
ggtgaggcctcagaagaaattatttctttcttcagcaaacattccctgccttacagatgagaaaatcaaggcacagacacgttaagtcacttgcctgtggtcacagctcataactagtagatccatcatcactgatcttacagcctatagacattatgctctattattattttattatcattattattattatttgagacggagttttgctcttgctgcccaggctggagtgcaatggcgcgatctcagctcaccacaacctccrcctcgcgggttcgagcgattctcctgcctcagcctcctgagtagctgggattacaggcatgcaccaccacgcctggctaattttgtacttttagtagagacggggtttctccatgttgatcaggctggtcttgaacttccgacctcagatgatccacccgccttggcctcccaaagggctgggattataggcatgagccactgcgctcggcctatgctctacttttaagagagacaaataattcttcaaggaactataagtaattttacttacagttttaaacctctaggtatatggtgggaggataggtgggactggag

SEQ ID NO: 545120 - DNA, 521 bp, Homo sapiens
cattttaacatggagactctggcttaagactcttgtgggtctgtctctctctctctctctcttttccttgaaacggtctcactttgtcacctaggcttggagtgcagtgggcatgatcacagctcaccttgcagcccgaccattccaagggctctcrcaatcctaccacctcagcctcccaagtacttgggactacaggcacacaccaccataactggctgtttttttttttttttttttgtagatatgaggcttcactatgttgcccagctggtcttaaactcctgggctgaagcgatcctcccctttcggcctctcaaagtgctgggattattggcttaagccaccatgcccagccaagaactttgtctcttgtgatgcaccccagaacaaaacatcactgcaaaaacacaccaaggcatgagtttcagtcctaattcccatttatccaccatacactatgtgccaggcacaacgctaagtgcttctatggatgagcttcccttaatctcagcagtaac

SEQ ID NO: 545121 - DNA, 501 bp, Homo sapiens
gagtgaaaaacttttgcagaagtagaacacgctaaagcagcaatacattaaagtcacgtcaatgtggcaagtgcagtccctggcacgtactaggtccttaacagatttttcttgttgaagtcgttgcacatatggttacagctaagggacacaggaagtgatgagtgcataaacctaaaggaaggggcagataagagaaaggggactcccatgactccaactcctttctgatgcttggtgctatggaaatcccttgagcaggcctgtgcrttttgtctttttgcagatgttcacccttcctcaaaaggacttcagggctcccaccacctgtctgggccccacctgcatgcaggacctgggcagtagccatggggaagatctggaaggagaatgctccagaaaactggaccagaagctgccagagctccgtggagtgggtgatcctgccatgatctcctctgatacctcctacctgtcctctagaggaagaatgattaaatg

SEQ ID NO: 545122 - DNA, 592 bp, Homo sapiens
cagccccggaagtggcccaggcacttcctgggtgctttgmtaggtcaggcaggtgggtggagctccaggagggaagaggtggtgagcccaggcctttggcaacactggccaggcccagaggcctcttcccacaagtttggaagcattctccctgcccagcttccgccaggccagcactgggcactcctgtgaccactcttgtgcctggggacctgagtgagggtgcgctaagccacaggccaacagttgctctttttttttttttttttgagacagggtcttgctctgttgcccaggctggagtgcaatggcatgatctctgctcactgcaacctccgcctcctgggttcaagcaattctcctgcctcagcctcccaagtagctgggactacaggcggctgatttttgtatttttagtagaggcggggtttcaccatgttggccaggctggtctcaaactcttgacctcatgatctgcctgccttggcctcccaaagtgctgggattacaggcgtgagccaccgcacctggcccagttgctctttttactgtcaactagaggtgtctcaaaggggccaaacatgggacacta

SEQ ID NO: 545123 - DNA, 596 bp, Homo sapiens
aacagtatcttatttctctaagcacgtggttcaatttctggtactcgttgagccttactattgagtaaattctcctgctagactgagttttttgagaatggggaccttgttcatctttttatctttagcagtgctgacatggtgtcctttttgttgtgtggaatttagttgaaggcatgaagttggtgagataacaccagttataacctttctcctttcctccgtctctgacttgcctttcytttttagtcatccctcctctgtgttgccatgggaattcaaggcctggccaaactaattgctgatgtggcccccagtgccatccgggagaatgacatcagagctactttggccgtaaggtggccattgatgcctctatgagcatttatcagttcctgattgctgttcgccagggtggggatgtgctgcagaatgaggagggtgagaccaccagccacctgatgggcatgttctaccgcaccattcgcatgatggagaacggcatcaagcccgtgtatgtctttgatggcaagccgccacagctcaagtcaggcgagctggccaaacgcagtgagcggcgggctgaggcagagaag

SEQ ID NO: 545124 - DNA, 500 bp, Homo sapiens
tcaatgcctcatggacccctaaatccatggmagtagagccccagctctccctgctcagcctccttagggctgcagagtcctggccacctaccaggcctgctggaggttaatggcagccgtcacagggacagcggcctgaggcatcctattacaccacaccagcatggcatggcctcatctgaccccatggtgatcccaagaggcctgtaggtttgttcttacccactcttgctgtgcagggaaactgaggtttagagagccccatcattttctaaaggtcacaataaccatgtgacctcacccccaggctcccagggtcctggacctctgaccctgtgtcagcccttgtttggtggccctgagcagggtaagtgggcttccagggatgagccaagaggggctcacagttgtgaccgagttccccagagtggacctccctgcacttagcaggctgtctctggggagggggcaaggtaaggaaggtcaggggccagaacccc

SEQ ID NO: 545125 - DNA, 595 bp, Homo sapiens
atataagaattttgggaagacacaaacactcagatcatatagagcttgcaggaaggcctggatgtaattctggagcatagtgattctggagcaggtgtagatgcagtctgctctcacagcctcacataattttctgtggttctttagtggggggaatttagaaacatcagaagctgcatgtgctcactggagtttgtcacttggaatgaggcttacgttaattgcatagttatctgtaatgtgttctccttctccaggatgggtattggcattttctttccattctttggttgtctctagaaagtctcagacatagctcaaaaacaacaggtccaaagcaggattcctgatttcttccccaaacctggcccctgtaccctcaccccagacttcctccctcccacactatcatccacccagcactctggccagaaactaagtgtcgtcttcagacttccatccccctcacccctttccctgccarctcttgctcctcatcccacctgcatcttgcatttccacagccatcaccgtctctcgatgcactgccagcatggcatgatgtctggtacccacagccaattcttcacacggc

SEQ ID NO: 545126 - DNA, 600 bp, Homo sapiens
gctgctggaggtggggagactcactctctgggtctcgggggtctgggtccctgtcaccttgtaaggtgctttgcctgcctgggcccacacccaggcccgggaactgcagggtaggatcccaaaccaagcctaccagcagcccctcctaggcatcaatcctctttaataaggaaatttgaaagtgtaatctaactctgcagaatctctttaaatctcgttttctcagaagtaacttcatttcgcacggacacatccagccttgtgagaaggcctccatttcacaccagttttatctccacaatttctcgtctcactgcactcctattccagggccttgccatgcagcaggcgaggcctgaactaatagcatttcctactcatttggaatcaaaagccaacgagaacaactgttgaaacgcgcggctacagccacccagagcacgctcattaccgcccctytgcacaccctcttgcaggcagcgtgttcactgtgaggatgaaggagagagcacgggctcctatggcctccagctccccacgagggcaggggagaggaaggctgagaggctaggctccgcccatggggtggcattcagctca

SEQ ID NO: 545127 - DNA, 593 bp, Homo sapiens
agtgcccgcctcctagagttatttttgaggatagataacaggatacacatgaagtgcttactgtggggtttggtgcttactaagtgttgagccagtgctaactactgttaccacagttgttaccattgtcatcagtatcatccttattgattcttcgtcacttccccaggtcctggttggctcccttccccctcccccgcattggggtgttattggcgacccgccccatttcctgcttgtcctctgccctcaccttctttgcagtgattttcagagtccccgtttgcgttcgcagtggggagtttgacttcatttcataccaggaaggccagcttgcagtgggggattgggagggcagagcgctttataagctcgcgatgaaagctgtaaaacgagatggtcaaggatctggccaggcctggttcgggattatggccggcccctggaatgctgaggggggcctcttttaagaagccagtgtctatttacagtgtatctctcataaaccccaacgctggggcgagggcaggggractcgccctcctggcatgtgattgattatctggtatttatgccattgaggacttgtcagc

SEQ ID NO: 545128 - DNA, 615 bp, Homo sapiens
gagcgagggggtctccccggagcacagtgtgctagcaagtaccagagaagaggcaaagatggctttctctagccctgcctgagctcttggctgaggccccggggacagagcaagctccaagtcctcccccagccctctacttcctaaatcaagcaaataactaacaatgcaaggaggtgtgggggagtaaggcccagccactgggtagctattttctcaaaatacatggcaaatctctgcgccaaatgctggctaagccaaagaataaacaaatccttttatttctctgagatgagagctatcaacttcccctttcatcctctccttctgctggccagatccatctgtcccatggccctctccctgtgggataagcagtgtctgtccatatcttcctgaccacagctctggccagctcctacccccgccggaggcactgcggagggaagccagcaggtggagaacaggagcacatggcctgtccacacctcccccagaagctctcagccagttctccatgatgcattgtgccactaattcattcctctgccctcctttctccaagttagagrgcactgaattaagtcttgctggacaaggagaccatcatcaccc

SEQ ID NO: 545129 - DNA, 606 bp, Homo sapiens
aaaaagaaaaaaaagaaaagaaaagaaaagaaaaatgttagtcatgmcattaatttttaatttaaaaaaacttacagataagctcaatgtcaaacacaagtagattggacagatagggatgcatgtttgtgatgctatccttaaaattaactatgaaaaccaacacttattgttatagagagatcagatattgttaattatcagaatatataggatgacttaaatgtatgtgtgtatctatctataatatatatagaaaaaatagcttgaaggatataaaccaaaatgctaatatggggtggtattatgaccaatttcgttttcttttggctctttatattttctaatttttatacaatgcccatggataatttgtgttaaaaaaaaacaacagtcaaacaaattatgattactgataactttctcttcacattattagttaattctaatttactaaagagaagacatatgtaagagaactctaaaaagcaaaaatactatacaaatgcaaagtgtcatcaattatccagcaaatactttttgagcaccaactatgtgtaaagccttgtagaaagtacactgagaaaataaaagagaaattaggat

SEQ ID NO: 545130 - DNA, 606 bp, Homo sapiens
aaaaagaaaaaaaagaaaagaaaagaaaagaaaaatgttagtcatgccattwatttttaatttaaaaaaacttacagataagctcaatgtcaaacacaagtagattggacagatagggatgcatgtttgtgatgctatccttaaaattaactatgaaaaccaacacttattgttatagagagatcagatattgttaattatcagaatatataggatgacttaaatgtatgtgtgtatctatctataatatatatagaaaaaatagcttgaaggatataaaccaaaatgctaatatggggtggtattatgaccaatttcgttttcttttggctctttatattttctaatttttatacaatgcccatggataatttgtgttaaaaaaaaacaacagtcaaacaaattatgattactgataactttctcttcacattattagttaattctaatttactaaagagaagacatatgtaagagaactctaaaaagcaaaaatactatacaaatgcaaagtgtcatcaattatccagcaaatactttttgagcaccaactatgtgtaaagccttgtagaaagtacactgagaaaataaaagagaaattaggat

SEQ ID NO: 545131 - DNA, 606 bp, Homo sapiens
aaaaagaaaaaaaagaaaagaaaagaaaagaaaaatgttagtcatgccattaatttttaawttaaaaaaacttacagataagctcaatgtcaaacacaagtagattggacagatagggatgcatgtttgtgatgctatccttaaaattaactatgaaaaccaacacttattgttatagagagatcagatattgttaattatcagaatatataggatgacttaaatgtatgtgtgtatctatctataatatatatagaaaaaatagcttgaaggatataaaccaaaatgctaatatggggtggtattatgaccaatttcgttttcttttggctctttatattttctaatttttatacaatgcccatggataatttgtgttaaaaaaaaacaacagtcaaacaaattatgattactgataactttctcttcacattattagttaattctaatttactaaagagaagacatatgtaagagaactctaaaaagcaaaaatactatacaaatgcaaagtgtcatcaattatccagcaaatactttttgagcaccaactatgtgtaaagccttgtagaaagtacactgagaaaataaaagagaaattaggat

SEQ ID NO: 545132 - DNA, 606 bp, Homo sapiens
aaaaagaaaaaaaagaaaagaaaagaaaagaaaaatgttagtcatgccattaatttttaatttaaaaaaacttacagataagctcaatgtcaaayacaagtagattggacagatagggatgcatgtttgtgatgctatccttaaaattaactatgaaaaccaacacttattgttatagagagatcagatattgttaattatcagaatatataggatgacttaaatgtatgtgtgtatctatctataatatatatagaaaaaatagcttgaaggatataaaccaaaatgctaatatggggtggtattatgaccaatttcgttttcttttggctctttatattttctaatttttatacaatgcccatggataatttgtgttaaaaaaaaacaacagtcaaacaaattatgattactgataactttctcttcacattattagttaattctaatttactaaagagaagacatatgtaagagaactctaaaaagcaaaaatactatacaaatgcaaagtgtcatcaattatccagcaaatactttttgagcaccaactatgtgtaaagccttgtagaaagtacactgagaaaataaaagagaaattaggat

SEQ ID NO: 545133 - DNA, 624 bp, Homo sapiens
ggaaaattaatttgcttgattatggagtctagagagttccaatataggctgtctctaagctggtgtcctgagaataccggtatcctggctaagctcaagtctgaaaggttcagaacaagtttcaggagagagacggaggaagttgccttttttctgcctttttctttatatctgaggtgtcagctgattggatggtgcccacacacattgagagatgaggctcccactcagctcaccagctcacatgtctctctcctctagaaacaccttcacagactcacccacaaacaatgcttcactagttccctaggtgttggttaatccagtcagactgatacctaaaaytcaccatcacactatggaaatataattacacctctctgagtttaacaaaaacctcctatatgttagttcagagcttgcacagccctaggggaagttaatttaatccgcaagaaaataaaaagacccaatatctttaataatttttcttttccctactagtgaaacttgattagtttaattgcagtctttttctttgtttatttggttggttggcttttttttaaattttgttttgatttgggtctttgtttttaatttaatttaattttaagtcctggg

SEQ ID NO: 545134 - DNA, 624 bp, Homo sapiens
ggaaaattaatttgcttgattatggagtctagagagttccaatataggctgtctctaagctggtgtcctgagaataccggtatcctggctaagctcaagtctgaaaggttcagaacaagtttcaggagagagacggaggaagttgccttttttctgcctttttctttatatctgaggtgtcagctgattggatggtgcccacacacattgagagatgaggctcccactcagctcaccagctcacatgtctctctcctctagaaacaccttcacagactcacccacaaacaatgcttcactagttccctaggtgttggttaatccagtcagactgatacctaaaattcaccatcacactatggaaatataattacacctctctgagtttaacaaaaacctcctatatgttagttcagagcttgcacagccctaggggaagttaatttaatccgcaagaaaataaaaagacccaatatctttaataatttttcttttccctactagtgaaacttgattagtttaattgcagtctttttctttgtttatttggttggttggcttttttttwaattttgttttgatttgggtctttgtttttaatttaatttaattttaagtcctggg

SEQ ID NO: 545135 - DNA, 634 bp, Homo sapiens
ctggcgagaggtcgaggagactcactgcagccacggctgtcataaaaccctagctcacctgtrgcaggtgggacctgggtaggggcagatgactttaacaaagcctccaatagggctggggaggaacatgtgtgactcagatgtgctgacccagagtggcggccctgccaaagaccagcaaaccaccccctcaagaacgaagtggggaggagggtaagcagaaaccagcaagctgacagtggcggacggacctcctacttcctaaaaaagcagtgcttaaccttggaaacatgcacattccacttagacacaaaatattttgagcataatttcagggagtttggggactctgtaaagccccctatgaggtgtatgttttctagattaagagcctttatcactgatagagcattctatcaatgaaaaaatcatatttaatcctagattttgcccaaaagctagaaacaatccaaatgtcccttttaagttccttccagccctgcttctgaacgttcatccctaggttctcactcacctccaagtttccagtcaccaatcccctgccttaccttcaaaacaacactgctttctcaaggaattccaaaggcctgggattcctcacaccttcctcctg

SEQ ID NO: 545136 - DNA, 467 bp, Homo sapiens
aatgtgattctaagaataaatgcaaaggcagcagattccttagttgcataaatcatggccaggaagtcatgcatcataattcccacctttagttttatcttaggaaagtgaaaatgttcccttaatcatgaggattcttgatgaatatagttatattaagaatcagcttcctgttacgctgtgatctgtcacttacgaggaccataccccagggtggaatcttccccagagcagctcttttttctactgacctacagggwttatgtgacttatgtggatcctcacgtacctctctttggtaaattcttgaaaggccagggtgtttatagccatatattttttgcccctttatgaagcacctttaatctatttcagaaatgcttcagatatttactttttgtgcaaggtaaattagccaagtatgttaacagtttaattttttgttgatagcctggctactttcaaaa

SEQ ID NO: 545137 - DNA, 619 bp, Homo sapiens
aatttgcatctgattaatcacaagactgatgtggtctcagaacattgagaaaaagactacttcatctacctgacagtcaaagggtaacacattaggacttgagagataataaattcaaaggaagttcacacacagaaaaatttaagattaaattgtcattttcagataaatttgttagggatattggttcagtattctgcagcagatgcataaaatatttccatgcctttaagaatccatttgtagtctcagataccacatgtgttccaggagtgtagatgtcctgcacagtactcttttatgagtcactcaagcttctcctgtggcatcagattttgcagtgattttgtaatggacatttcctaattgagaaattatcagctatttttgaattatgaaatggctacattacttagaaataggcccttgggtgcacatgagatatttcattaccaggcgtaagatttattttattaatagraaaataatataaaatgtcacttaaaggatcttatcaaaattatgaaccttccacttctgaatgtctgtattatacatccattcctaggtcacctaaacttacccctttgactcaacctgctacaaagagccaaccact

SEQ ID NO: 545138 - DNA, 552 bp, Homo sapiens
  misc_feature (1)...(552): n = A,T,C or G
ctcccttcaaggggggcacagaagcactctcctttctgcccacctgcaagagaacaggtccccttagcttacggagaccctggggcgagggaaataggagagaacagcagtccctgttaatgggtgagagggnttttgcgctctccggggagaragccccaccccttcctggggacccttgaccctccgacacaaacaagcgctccaggagtcccctgccagcccctcggcctcaccccattcccactccgtgtcctggggcccgcccagcctccttaggcgccgcgcctgctcgcggtctccgctgacaccccaggtgcgcgcctccaccctccgcgcccggccaggtgcccaggcctgacctgctccgggccctggaagcagatccggcactgaggggttcggagtccgctgtccaggctactgctgagcgacagggcgtccagcgcgcccggnggcggcagcggcggcgcgggcggcggcaggggtccggcccgcggctccttgtcgncggcaggcccggggccgcgggtccgacccgtagtactcntc

SEQ ID NO: 545139 - DNA, 514 bp, Homo sapiens
atttcaccttcaggcagcaaaatcatctgcttagaaactaattagagcattttccccaggcgttggtgatctacttctacmtgcctatgatctcttagacagtagttgtaccatgttcaggaactggccataaagcagccctctccctagcctgtctccctctaatagaagaaggctgagagtggctcattccttcagatgaatctcagaccttttatttcagattcatttaagggcatttacttctctgtgatgctccttactttctgttctttaaaatcttctttgcttttggatcccagggtagacaaggaaaatgttgcaccatcatatataggtaggtaggagactttaaggtgctcaaagcctggtcgacattttctggtggcacagatgaagccattttctatggaagcctcctaggcaagactctgtcctgcatcccactgagtatagacctaatttctttctcatatggatggaggaataagcatggtcatttatcatgctgagg

SEQ ID NO: 545140 - DNA, 606 bp, Homo sapiens
tatttgtgcacaccaggaaagagctgggggcaaggtgggggcacagggttgctgagagtaactcacacagcagttkcatttttttcaccaatttttaaaacttgccctttggtgtggatctcccagccaagtgattcagtgtcagatgaagccccgtaaggtgtgccatatagaaatgacatgtttgttctatgtgaatactactttagagacaatcctggagcttgttttcaggtaagggtccaccacttccatatttgttgttagatgtgtgttgggaaccaatctccgtgtgtatttgttgaatagaatgagtgtgcatttactcagggttcccacgccaaaagggacccagcttaaagactgttcactgccaaacctagtatttggggacagaaagactagactaaattagtaaaaagttagaattatagcctattaaaaaacaaacacatttttattgattttccaaacatacaggaaccaaactaataaagtgttgcttactggggcatctcagggaacgttccaatgaataggcaagaatgtgttccacattatccattgggtagaaactagtgctacgatgtgcttggaactgttcct

SEQ ID NO: 545141 - DNA, 606 bp, Homo sapiens
tatttgtgcacaccaggaaagagctgggggcaaggtgggggcacagggttgctgagagtaactcacacagcagtttcatttttttcaccaatttttaaaacttgccctttggtgtggatctcccagccaagtgattcagtgtcagatgaagccccgtaaggtgtgccatatagaaatgacatgtttgttctatgtgaatactactttagagacaatcctggagcttgttttcaggtaagggtccaccacttccatatttgttgttagatgtgtgttgggaaccaatctccgtgtgtatttgttgaatagaatgagtgtgcatttactcagggttcccacgccaaaagggacccagcttaaagactgttcactgccaaacctagtatttggggacagaaagactagactaaattagtaaaaagttagaattatagcctattaaaaaacaaacacatttttattgattttccaaacatacaggaaccaaactaataaagtgttgcttactggggcatctcagggaacgttccaatgaataggcaagaatgtgttccayattatccattgggtagaaactagtgctacgatgtgcttggaactgttcct

SEQ ID NO: 545142 - DNA, 637 bp, Homo sapiens
gttctgtctttcatgagctttcatgccctttagagaccattttgcacaccttgattgtcagaaaagggtctgggatgtttttggagtggtacagagatgcatacagcaacttacactgtcatgactttttttttgagatgcagtctcgctctgttgcctaggctggagtgcagtggcgtgatcttggctcactgcaacctctgcctcccaggttcaagtcattctcctgcctcagcctcccgaatatatgggactacaggcatgtgccgccacacctggctgatttttgtatttttagtagasatggggtttcaccatttggccaggctggtctcgaacccctgacctcaagtgattggcctcccacagtgctggtattaacaggcgtgagccaccgcacctggccctgctatgactttcaatgctctgttgtagttttttcttaaaatttaagtttgcttggcaatacctttttttttctttcttttctattttagacagagtgtaactctcacccaggctggaatgcagtggcaaaatctcagcttactgcaatctccgccttccaggttcaagtgattctcctgcctctgcctcctgagtatctgggactacaggcgcacaccactgcacccag

SEQ ID NO: 545143 - DNA, 654 bp, Homo sapiens
ctgtactgggcctttcccatttcccatgctgatcacattctctcgcctctttcttctggctacaacacacttcttcattccaaacccttccccctgacccacctccaccccccaccctagcaagattaattccctgtaattctagttcatccttttggccccagtttaagccatttattcatgccaggctttacagaagactcaccagcacctccaatgggcttccaaggtgctctcaacttcccttaacacaggttcccagtttatcctcaccactgaagcccaagagctgggactgtgccakattgatcaccagtgcattcccccagcacacagcacgactcggctcaccctggatggttcttaagcatttatgaatgggtggatctcacctacgtgacctggaacttctctgttctcagagcaagccatgtcaaatagcagaaaatgcaccggctttggagcctactgcaggactagatgtctcagggtcgcagtttcctcatccctaaaaaggggaatcacgatgcttatctcatgcagttattgtgaggttacaagagttactgcttatgaagggccctgtccagcatctggcacgtggcaggtcctccgtgaatgacagcgccttcctgggcagcctggcgagcgcac

SEQ ID NO: 545144 - DNA, 654 bp, Homo sapiens
ctgtactgggcctttcccatttcccatgctgatcacattctctcgcctctttcttctggctacaacacacttcttcattccaaacccttccccctgacccacctccaccccccaccctagcaagattaattccctgtaattctagttcatccttttggccccagtttaagccatttattcatgccaggctttacagaagactcaccagcacctccaatgggcttccaaggtgctctcaacttcccttaacacaggttcccagtttatcctcaccactgaagcccaagagctgggactgtgccatattgatcaccagtgcattcccccagcacacagcasgactcggctcaccctggatggttcttaagcatttatgaatgggtggatctcacctacgtgacctggaacttctctgttctcagagcaagccatgtcaaatagcagaaaatgcaccggctttggagcctactgcaggactagatgtctcagggtcgcagtttcctcatccctaaaaaggggaatcacgatgcttatctcatgcagttattgtgaggttacaagagttactgcttatgaagggccctgtccagcatctggcacgtggcaggtcctccgtgaatgacagcgccttcctgggcagcctggcgagcgcac

SEQ ID NO: 545145 - DNA, 530 bp, Homo sapiens
ggtaaccacagcctgacgtgacaaggaatcacagttttactttctgcttactatccatgttagaaatatctaaggaaattcaggaaaaaaaaaaaagagagaatttcatggcatgtcaagaatggaaagtatcttaattaaaatgttttaaaatgggaacaataaagaagtcgatttaagttttttgctttggtgcttgtctttaaagaaattgctcctaattctagaaactagtgctttttctaattatattcagtagaaccctaggatcctgtgaggaggcataggggagtaattgataaagaaggggactgtggtgtccgtgttttatttggagctsttctacccacactgtaatttataagctctaacttaccaggggagataagattgtatagaaccagcatcttgcagttatacggaacctttaagttctcctactccagctccttcccagtgcaagcacgtgttttagagtaactgttcagcctcagcattaagtcagctttaggagaacagtaaatcgccca

SEQ ID NO: 545146 - DNA, 373 bp, Homo sapiens
catttacccctcagtctgtgctacccataggataagcaacatgcataagaaggtaggtgccttggcttargcagctctgttgagtcaccctcaagaatcctgctggaattctgtgaggagtgaggatgcagagcaacgaaatattcgaaggctgctatgatttttacaagcttgaacctgtctcttggaattccccattgtgaagtcattgttgactggttggcattatgaagcagttcagagaagtaaagttagatcagtctgcacgcaaataccagccacaccatctcccaagctagtgactggaactgcggttttcaagtcagtttcctcattgcggaatggagataacgatgccttccttgcagggtca

SEQ ID NO: 545147 - DNA, 616 bp, Homo sapiens
atattcaacctatagcaattattctgtcagaatactaactagtctttctgcttcttgtatcttttccctcttattcatcctacatagtattatmaaaatcaccgttccatggcaccgtggtgctgtgtcccattgctagggtcccagccatctcctgtcacctccatctggctgtggtttattctcaaatttacctgcagactctcctaacagaaacagcagagagggcacattagtctaggggaacacggccccaggcactgtgcactgatacaatctgccagattgggtctggtcagagctctcaaatactgaatatacctgtagtatcaacatctgagttattttttccattctggtctgcagacaggtaagacaggtaaaacttccagggcacacagaccttgtcttgcccatgccctgtgtacttctttaagtcagctttcacagcttgaccttgcactgtgtcatggttaagtcttcttgaggtcaactccagctctgctagatgagtgaccttgggcaagatactcattcctcccacagtcactaaaagccagagtctccttaatgcaccctgcagaggtgcccaaattgctggccccattagcctacc

SEQ ID NO: 545148 - DNA, 616 bp, Homo sapiens
atattcaacctatagcaattattctgtcagaatactaactagtctttctgcttcttgtatcttttccctcttattcatcctacatagtattatcaaaatcaccgttccatggcaccgtggtgctgtgtcccattgctagggtcccagccatctcctgtcacctccatctggctgtggtttattctcaaatttacctgcagactctcctaacagaaacagcagagagggcacattagtctaggggaacacggccccaggcactgtgcactgatacaatctgccagattgggtctgrtcagagctctcaaatactgaatatacctgtagtatcaacatctgagttattttttccattctggtctgcagacaggtaagacaggtaaaacttccagggcacacagaccttgtcttgcccatgccctgtgtacttctttaagtcagctttcacagcttgaccttgcactgtgtcatggttaagtcttcttgaggtcaactccagctctgctagatgagtgaccttgggcaagatactcattcctcccacagtcactaaaagccagagtctccttaatgcaccctgcagaggtgcccaaattgctggccccattagcctacc

SEQ ID NO: 545149 - DNA, 616 bp, Homo sapiens
atattcaacctatagcaattattctgtcagaatactaactagtctttctgcttcttgtatcttttccctcttattcatcctacatagtattatcaaaatcaccgttccatggcaccgtggtgctgtgtcccattgctagggtcccagccatctcctgtcacctccatctggctgtggtttattctcaaatttacctgcagactctcctaacagaaacagcagagagggcacattagtctaggggaacacggccccaggcactgtgcactgatacaatctgccagattgggtctggtcagagctctcaaatactgaatatacctgtagtatcaacatctgagttatttttyccattctggtctgcagacaggtaagacaggtaaaacttccagggcacacagaccttgtcttgcccatgccctgtgtacttctttaagtcagctttcacagcttgaccttgcactgtgtcatggttaagtcttcttgaggtcaactccagctctgctagatgagtgaccttgggcaagatactcattcctcccacagtcactaaaagccagagtctccttaatgcaccctgcagaggtgcccaaattgctggccccattagcctacc

SEQ ID NO: 545150 - DNA, 620 bp, Homo sapiens
tatctcatcccagtctcctcatggagctcccactcagcaatccaaccaatgactccacatctcagaggtccagtaaccatcacaaataaaacaagcccaaaacaggccacctttcatccccctaaaactccccttcacatcctctgccattttggtgaatgtgccactttgtatgtggtcatgcacgtaggtcactgaagccctttggttacttctgaatgtgaaacgtttattccagcctcctgtctctccttgtttttttttttttwaattaaaaaaatatattttcatagatttaggtggtacaagtgactatgttacatgggcgtgttgtgtaacggtgaggtgtgggcttttagtgtaactgtcacccaatagtgaacattgtacccaacagataatttttcaaccctcaacccctctcctaccctcaggccctcttgaccttccaagtctctaatgtctagtattctactctctgtgatcatatccacacatggttgaactcccacttccacatgaaaacatgcagtttttggttttctgattctgcactaatgtacttaggggctgtgatgaagagcctgctcccagacaaatctccaggtgcatggatgagg

SEQ ID NO: 545151 - DNA, 620 bp, Homo sapiens
tatctcatcccagtctcctcatggagctcccactcagcaatccaaccaatgactccacatctcagaggtccagtaaccatcacaaataaaacaagcccaaaacaggccacctttcatccccctaaaactccccttcacatcctctgccattttggtgaatgtgccactttgtatgtggtcatgcacgtaggtcactgaagccctttggttacttctgaatgtgaaacgtttattccagcctcctgtctctccttgttttttttttttttaattaaaaaaatatattttcatagatttaggtggtacaagtgactatgttacatgggcgtgttgtgtarcggtgaggtgtgggcttttagtgtaactgtcacccaatagtgaacattgtacccaacagataatttttcaaccctcaacccctctcctaccctcaggccctcttgaccttccaagtctctaatgtctagtattctactctctgtgatcatatccacacatggttgaactcccacttccacatgaaaacatgcagtttttggttttctgattctgcactaatgtacttaggggctgtgatgaagagcctgctcccagacaaatctccaggtgcatggatgagg

SEQ ID NO: 545152 - DNA, 524 bp, Homo sapiens
aggggcctttttggcgggggtgtgagggaggatgactttgctsggaaacaggatcaggttctccaggcgcactgcagcccggtaggacccactttggaaatgaaaagccagttccgaaagctgggctggaagcttccgtgttgggttcaagagcaagttcacgttgcgctgtgtagactcctggctgctcccaaactctgagggttttctgaggttcccttcataggggcaccggccctgggccatgcacagtgcgtaagggtggctgtgggccgagggacccagcacgtgttttgcccacaacagccggagtgactggttcactcaccgccttggcggaggacgcctgttctctggacgaatcatttctcttgggtggtgactgccttgtgggtcaaggtgcaggttttctgccacagaaaacctgttaggaggaattaagcgactaagactgtcagggaggtggtggtgggggagaggagggggtggtgtccagattaccaggcataggctaaactgcctgc

SEQ ID NO: 545153 - DNA, 626 bp, Homo sapiens
gtcttatgttctttacgtactgaaaacaaaggagggtttactgcactaaaaatttaccagaaacattcattttctctaagagcagtttacttttcctttcctcttactgactaacgtgggggttcccataagtaaattcaagactatcatggccagtcatcccgtaagattttccaaaagaaatatttcactgaactatttctccactctgacacaacagtgattttgtaaaagaaatagcgaaaacaattgcactaaaatagataacttatttaaaacataaggttatccctttctacataatggaatatygttaaggatctaaaactaaacgttgaagacatttacctcacatttagctagcatatttctagaaattgataaaaattaattatacaggaagactattgctatctggaaggcgaaaagaggtcatcttcattggcttctacgtaatatctcataattttgttaaactgaggttataaaactaaagaaacttacctgcttagggaacaatcaagtgaaatacgttgttcactggagacgccaataagtacaggacactgaaatgatttgcaccaacgaatacaaagaaatgatataaatatcattgtgcaaaaaag

SEQ ID NO: 545154 - DNA, 264 bp, Homo sapiens
gccacagcaacaccaaaagagccaggagacctccaccacctgaagcttctccctgggcagccrttaatttcagggcaaggccagagacctcagatctatttgagaagtctccagagatctggccccagataaatagtcaatggggtctagagtacattttagatcccacagggtatgccccatggtgatgaaaataaaatgaacttgttgtaaaatgatgtgtgggtctgctccttctcggatggtgggaagagaggaaggagg

SEQ ID NO: 545155 - DNA, 571 bp, Homo sapiens
ccatgtttctttcatcattttacggccgttggagcttcaactactatttgcttgggaacccatcttaactagctcttgcattcgggcttcctgttttattgtgatgattggcagacccatttcaggcatgttcagctttggaaaggaattacgattttgaacttatacaagcaaaaaatgtaactgagtttattttcacaaactgctttaatttgttaacaacaagtcactaaaaccagraatcaatcgtttaaattaccttttaatttgttggagctttcgtaaatgctatgctttcatttaagtctttatttattctacatgttatatacatagttaaattagttgatcagagtttaaatattttctctccttctccaaggacccacaagctcaggcttaaaataaagagtgggatgagaaaagtaaaggcccgaaatattatacaaccaaagctgtagaggacctttataataaaataatggatgtcaaagctttctgacctttttaggcaaatcttcctgtgtccctaaagaaaaaacccccttgccaacagccaccaacaacaggt

SEQ ID NO: 545156 - DNA, 571 bp, Homo sapiens
ccatgtttctttcatcattttacggccgttggagcttcaactactatttgcttgggaacccatcttaactagctcttgcattcgggcttcctgttttattgtgatgattggcagacccatttcaggcatgttcagctttggaaaggaattacgattttgaacttatacaagcaaaaaatgtaactgagtttattttcacaaactgctttaatttgttaacaacaagtcactaaaaccaggaatcaatcgtttaaattaccttttaatttgttggagctttcgtaaatgctatgctttcatttaagtctttatttattctacatgttatatacatagttaaattagttgatcagagtttaaatattttctctccttctccaaggacccacaagctcaggcttaaaataaagagtggratgagaaaagtaaaggcccgaaatattatacaaccaaagctgtagaggacctttataataaaataatggatgtcaaagctttctgacctttttaggcaaatcttcctgtgtccctaaagaaaaaacccccttgccaacagccaccaacaacaggt

SEQ ID NO: 545157 - DNA, 571 bp, Homo sapiens
ccatgtttctttcatcattttacggccgttggagcttcaactactatttgcttgggaacccatcttaactagctcttgcattcgggcttcctgttttattgtgatgattggcagacccatttcaggcatgttcagctttggaaaggaattacgattttgaacttatacaagcaaaaaatgtaactgagtttattttcacaaactgctttaatttgttaacaacaagtcactaaaaccaggaatcaatcgtttaaattaccttttaatttgttggagctttcgtaaatgctatgctttcatttaagtctttatttattctacatgttatatacatagttaaattagttgatcagagtttaaatattttctctccttctccaaggacccacaagctcaggcttaaaataaagagtgggatgagaaaagtaaaggcccgaaatattatacmaccaaagctgtagaggacctttataataaaataatggatgtcaaagctttctgacctttttaggcaaatcttcctgtgtccctaaagaaaaaacccccttgccaacagccaccaacaacaggt

SEQ ID NO: 545158 - DNA, 636 bp, Homo sapiens
gttttcttttacttatttgttcactcattcttcggcttcattactgatgccccarttctgcggtagctcaaagtattgaaggaacgcggaatcagtctttagacttcccttttttgtttacagtcattccctaggtgatctctcctagtctccttgattaaacgcaatctgtgtgatattaattcccgctctggtgtcctcagctcctaccactctcctgaacatgaggctcatatatccagggtatattgcttatccccacttgacatccgccctcaggtgcttcatatgcacctcaactttaacatttccaaaactgagctgatcaaccaacactcataatttctttatatgaacaatccctttgcttttggataagaaatgtgtgaccatggtacagtcaaggcatgggtgaaaaaagaaggctagtaaatgtaagacggaagctatcttaacatgccttagctaatataaattaaggaagatttattgtattataaattttccagaaaaaaaatgcatttttctctgcaagtgttttagtttttattttctctttttgagtagtatataagttgagatatcacaaatagacttaatttggatattacactcctttatcatctatgatttcca

SEQ ID NO: 545159 - DNA, 631 bp, Homo sapiens
catgtgctccccacgacccggtgcaaggagataagacagaccgtccccttgggcgggcacctgtttccttgacccttcattccagttttacgtccatgccccgtttcctgggctaccataaactgagtttacagcagggccttgtcagcctccctgacgcacttcccgtccatacgcaccatggctggccgtcctgggaggctagagacgactcctgaaccttgtgagtgcaaagacacactaaggaacccaggtgtgttaaatgagagccaacggggaggtccccaggttgaagaagagtggggctggcatgctccgtgtctactgctgaaggagcaaaggacaagggagaagaggccagcgtccccacctgtcccgttrtgtcccatccagcccttccctggggctgcctgcagagctcacacctgctccgcacacctgaactccaggtcctctgctgaattcttgccgtgcccttgggacagagattgcccctgccccgggtccccaagtgaccccgtgttggtcgggagagctgtagggtgacacaggacctccccagccatctgcatgggaatgaacctctgtgtacccgtcctcgacagtcaggtgctggcatctgccctctcac

SEQ ID NO: 545160 - DNA, 505 bp, Homo sapiens
gagctgtagggtgacacaggacctccccagccatctgcatgggaatgaacctctgtgtacccrtcctcgacagtcaggtgctggcatctgccctctcacctgcctggacgcccagcagacccccggtgaccaagggtcccatccagatgggtggccgagcaagagggacacacgcggactctcccccagcctccagcacatgcacagaacccagtgatgctcccgggcactggggaccacctggacccctcgatctcccttccctggcccatgccagcctgcccctaggggactctccctgacccaggccccaggtgacgctggggagatttcctcacaggtcagcctgagctgccccaagatccacactctcgtcctctgaggacctcggactacacggtcccagtctcccctccggccaggtcctctcctgaggtaccctcgacctctcctcctcacaggacctccaggacctggcaccttgatgctcctctgagggcctggg

SEQ ID NO: 545161 - DNA, 505 bp, Homo sapiens
gagctgtagggtgacacaggacctccccagccatctgcatgggaatgaacctctgtgtacccgtcctcgacagtcaggtgctggcatctgccctctcacctgcctggacgcccagcagacccccggtgaccaagggtcccatccagatgggtggccgagcargagggacacacgcggactctcccccagcctccagcacatgcacagaacccagtgatgctcccgggcactggggaccacctggacccctcgatctcccttccctggcccatgccagcctgcccctaggggactctccctgacccaggccccaggtgacgctggggagatttcctcacaggtcagcctgagctgccccaagatccacactctcgtcctctgaggacctcggactacacggtcccagtctcccctccggccaggtcctctcctgaggtaccctcgacctctcctcctcacaggacctccaggacctggcaccttgatgctcctctgagggcctggg

SEQ ID NO: 545162 - DNA, 610 bp, Homo sapiens
ggtcctctgctgaattcttgccgtgcccttgggacagagattgcccctgccccgggtccccaagtgaccccgtgttggtcgggagagctgtagggtgacacaggacctccccagccatctgcatgggaatgaacctctgtgtacccgtcctcgacagtcaggtgctggcatctgccctctcacctgcctggacgcccagcagacccccggtgaccaagggtcccatccagatgggtggccgagcaagagggacacasgcggactctcccccagcctccagcacatgcacagaacccagtgatgctcccgggcactggggaccacctggacccctcgatctcccttccctggcccatgccagcctgcccctaggggactctccctgacccaggccccaggtgacgctggggagatttcctcacaggtcagcctgagctgccccaagatccacactctcgtcctctgaggacctcggactacacggtcccagtctcccctccggccaggtcctctcctgaggtaccctcgacctctcctcctcacaggacctccaggacctggcaccttgatgctcctctgagggcctgggtccttggtcctcgcgagagca

SEQ ID NO: 545163 - DNA, 505 bp, Homo sapiens
gagctgtagggtgacacaggacctccccagccatctgcatgggaatgaacctctgtgtacccgtcctcgacagtcaggtgctggcatctgccctctcacctgcctggacgcccagcagacccccggtgaccaagggtcccatccagatgggtggccgagcaagagggacacacgcggactctcccccagcctccagcacatgcacagaacccagtgatgctcccgggcactggggaccacctggacccctcgatctcccttccctggcccaygccagcctgcccctaggggactctccctgacccaggccccaggtgacgctggggagatttcctcacaggtcagcctgagctgccccaagatccacactctcgtcctctgaggacctcggactacacggtcccagtctcccctccggccaggtcctctcctgaggtaccctcgacctctcctcctcacaggacctccaggacctggcaccttgatgctcctctgagggcctggg

SEQ ID NO: 545164 - DNA, 616 bp, Homo sapiens
tgggcagccacccattcccagcattggctctgaggctgctttgggggagcctggctatcatctgagccatggggatggccggaggctctgtgctccagaacagccggaggaagtgtgtggacacagactgagtgagccccgggagaccctcgccacgtccaagtcaatgatcccgtcccctccccacacatgtgcagggaggggcctatcacttgtcccagttctgtcgcccacagactctgcgttagttaaatggctgatcgaggactaccctccatttgtagcgagctccctggcctgttgggagagagagccagtcccaggagggctcaggagggcgggttccaggatcctcaggcccccatcaagaactgcgcctctggccacagtgctcaaggaggattgctgccctggggattcaatcagccactgcccatgaaaaccaacatcctgtcgccaggctccatgcagcccaaagaaccccacaggccttcagggaccctgccctgcacacaccccagtgtcagcctggccactgtggccctcaccccacccaaccccatscccagcaaacctcatccccagtctcccagagcagaggcgaggccggctggaa

SEQ ID NO: 545165 - DNA, 616 bp, Homo sapiens
tgggcagccacccattcccagcattggctctgaggctgctttgggggagcctggctatcatctgagccatggggatggccggaggctctgtgctccagaacagccggaggaagtgtgtggacacagactgagtgagccccgggagaccctcgccacgtccaagtcaatgatcccgtcccctccccacacatgtgcagggaggggcctatcacttgtcccagttctgtcgcccacagactctgcgttagttaaatggctgatcgaggactaccctccatttgtagcgagctccctggcctgttgggagagagagccagtcccaggagggctcaggagggcgggttccaggatcctcaggcccccatcaagaactgcgcctctggccacagtgctcaaggaggattgctgccctggggattcaatcagccactgcccatgaaaaccaacatcctgtcgccaggctccatgcagcccaaagaaccccacaggccttcagggaccctgccctgcacacaccccagtgtcagcctggccactgtggccctcaccccacccaaccccatgcccagcmaacctcatccccagtctcccagagcagaggcgaggccggctggaa

SEQ ID NO: 545166 - DNA, 527 bp, Homo sapiens
tagtcccagctactcaggaggctgaggcgggaggktcacaagcttgggaggttgaggctgcagtgagctgtgatggcaccactacactccagcctgggtgacagagtgagaccctgtctcagaaaaataaaaatagagttggggcctgaattctcagaaggagccatccatgagaagcccatggtattctcagcagtttcagaggccttgaaggccacagtcttggcctatcgaggattgaatgaaggccagtgtgtctggatgtcactgcgatgtggcagggcaagataaggaattggggggctgggccagggcattgtcagaaggctaagttcttaggtctctggcctgaggtcagcgagaagaggtctctaacaggtcctctttctcagaaggtgtatccacaatatccccctctacattctgtttggcagccaaacgtcaatgtcaattggaagtgaatttttttaaatgaattgtgtaagtaattcatgaccagttcattttgtactggaagccaaagtcaa

SEQ ID NO: 545167 - DNA, 527 bp, Homo sapiens
tagtcccagctactcaggaggctgaggcgggaggttcacaagcttgggaggttgaggctgcagtgagctgtgatggcaccactacactccagcctgggtgacagagtgagaccctgtctcagaaaaataaaaatagagttggggcctgaattctcagaaggagccatccatgagaagcccatggtattctcagcagtttcagaggccttgaaggccacagtcttggcctatcgaggattgaatgaaggccagtgtgtctggatgtcactgcgatgtggcagggcaagataaggaaytggggggctgggccagggcattgtcagaaggctaagttcttaggtctctggcctgaggtcagcgagaagaggtctctaacaggtcctctttctcagaaggtgtatccacaatatccccctctacattctgtttggcagccaaacgtcaatgtcaattggaagtgaatttttttaaatgaattgtgtaagtaattcatgaccagttcattttgtactggaagccaaagtcaa

SEQ ID NO: 545168 - DNA, 573 bp, Homo sapiens
gctgtagtcccagctactcaggaggctgaggcgggaggttcacaagcttgggaggttgaggctgcagtgagctgtgatggcaccactacactccagcctgggtgacagagtgagaccctgtctcagaaaaataaaaatagagttggggcctgaattctcagaaggagccatccatgagaagcccatggtattctcagcagtttcagaggccttgaaggccacagtcttggcctatcgaggattgaatgaaggccagtgtgtctggatgtcactgcgatgtggcagggcaagataaggaattggggggctgggccagggcattgtcagaaggctaagttcttaggtctctggcctgaggtcagcgagaagaggtctctaacaggtcctctttctcagaaggtgtatccacaatatccccctctacattcygtttggcagccaaacgtcaatgtcaattggaagtgaatttttttaaatgaattgtgtaagtaattcatgaccagttcattttgtactggaagccaaagtcaaatcagacatcgaatgtataccagaggaatccaacggaccagc

SEQ ID NO: 545169 - DNA, 573 bp, Homo sapiens
gctgtagtcccagctactcaggaggctgaggcgggaggttcacaagcttgggaggttgaggctgcagtgagctgtgatggcaccactacactccagcctgggtgacagagtgagaccctgtctcagaaaaataaaaatagagttggggcctgaattctcagaaggagccatccatgagaagcccatggtattctcagcagtttcagaggccttgaaggccacagtcttggcctatcgaggattgaatgaaggccagtgtgtctggatgtcactgcgatgtggcagggcaagataaggaattggggggctgggccagggcattgtcagaaggctaagttcttaggtctctggcctgaggtcagcgagaagaggtctctaacaggtcctctttctcagaaggtgtatccacaatatccccctctacattctgtttggcagccaaacgtcaatgtcaattggaagtgaatttttttaaatgaattgtgtaagtaattcatgaccagttcattttgtaytggaagccaaagtcaaatcagacatcgaatgtataccagaggaatccaacggaccagc

SEQ ID NO: 545170 - DNA, 590 bp, Homo sapiens
ggacccaaggtgtgcccccttcatgaggactggggatacccccggcccagaaagaagggatgccacagagtctggccgtcccttgttcttagctctgggggaacctgatcagggatggccctaagtgacaatctcatttgtaccacaggcaggaggttggggaaccctcagggagataaggtgttggtgtaaagaggagctgtctgctcatttcagggggttgggggttgagaaagggcagtccctggcaggagtaaagatgagtaacccacaggaggccatcataacgttcaccctagaaccaaaggggtcagccctggacaacgcacgtgggggtaacaggatgtggcccctcctcacttctgtttccagatctcagggagttgatgaccttgttttcagaaggtgactcaggtcaacacaggggcccccatctggtcgacagatgcagtggttctaggatctgccaagcatccaggtggagagcctgaggtaggattgagggtacycctgggccagaatgcagacagggggccccatagaaatctgccctgcccctgcggttacttcagagaccctgggcagggctg

SEQ ID NO: 545171 - DNA, 579 bp, Homo sapiens
gtcacctgggacatgggaagagcttgaggccctggggcggcccagcctggggcagtcctcacttgctggccgtgccgttggacaccacatttgctcatgctctccagctgggccccccacccctgactcagggctcttgaacaagtttgccttttccctcttccttgccctacatctcacccatcatgatgtcttctaccttctaccctttcaaactaggggctcttgaagaggactgggacccagacaaagagtatgacacagcctaagtcatacagtaaacatgtttaggaggtaagatgccaagccaaatccatggccaccagtagccacagtggaggaggggaggtgttagttgctggccaccagacaggggcatacaatattggaagcagaaaaatgcttgttggcaagagacggacatgaacagaagtgactttatatacaaccccctaagcacacacagggtcgccttctccctatctcatgaaccccaagaagaaaaggatgaggacagcttccacagcctcactcacccatccatcacttscttctgcaaattcttcggatgccctgtgc

SEQ ID NO: 545172 - DNA, 292 bp, Homo sapiens
tggcagtggggtgatggggcaaggacaggctgagcactggtgatctcactccaggaagggccgtgatttgtcttgatttctgatccctgagaatctgggcagataatggtgctctcttgtctgtggacaactaataccttcttgtactttgtgcagaatggtgctaagtcctgcagggagagccaccacctgctgttgctgctgtttaaagtgcctgcctggattgagacctttgctcaaatctagktctcctaagagctgcatctctgtagcacccttggaagacccctgc

SEQ ID NO: 545173 - DNA, 623 bp, Homo sapiens
taacaatatattatttttattcaatatacaagaacaatgacatacatactgatctgcttttatcactttataaaatgcatgtaggatctttcgacaacagtatagatgatagatagatagatagatagatagatagatagatagatagatagagacaggtagatctttctcacttttgaaaccactttctataattctaaagtagacatgcaccaaaattaattaaactctttcttcctaatggacatataagttgtttcccatttgctatatgataaatagaataaaataaacatctctgcctatgaattttaggcaaacatggttttcttataagaaggctatattaacatggacattgggttaaagtgaaagggtgaaaatagtttaacatttaaaatatttctaaaatgttattacaaaartgctgtaccaattcaaattctcataaaaatcacaattgatttaaaattctgaagtgtggacaggatatttcttctctgctttgagaaggatttggtgagactgaagaggaaccagggaaggagagcagacaggagaccctcagcctgtgagggaggatccagggaggatccaggagagagccattgctagtgtcaatg

SEQ ID NO: 545174 - DNA, 661 bp, Homo sapiens
tgagctggtgctgctggtggtgaaagaagcaggaggagcagggctgcgctgagggcaaggatttcaagcagcactgctgtccagagtgaaccctgggccagcagcaggatggtgggccacacccaagctgcccgtgacacttctgggtcctccgacagagctaacgtggatctagattgttaatgtccccccrccccttgggcttctgtcagaagcagacccaaatctctggaagaaagtaccctgaattttggcttgtaggatcagatcaagcagttactttgaggaagtgcagtctgaggaagaaaagcagaggtgactctcagaaacaggcatcctggaactggaaagatgctcaacccaggagtcagtatctagaacttcagtgtcggatctgagtaggctctacagacagagcatgaagggtgggtccaggagtataggcaggggcagagctcagttggcccaggcgtgaggagaagggccatcaagacggggccaggcagggcacacaatgacatgtctcctgtaggagaaggcattggtcttcctgctctagagggtagcaggccccagcggataatctaagcagaaggtcagggggaggcaaactgtctggaataagtatcatatcaggacatctacaggagacatgtcattg

SEQ ID NO: 545175 - DNA, 538 bp, Homo sapiens
atgagcaacaaccaagacaggccaggaatatttatgaggtgtaaaaggtggcagcaaggctgcatggaggggaagttggaggaagagtgccctgagactagtaagctcctactctgtagatgaaggattggctgtggacatgcaatgaaaatgatccaggtggtgaccatgtctcagatggactcgtgaggcttctgagctctcggcacatgaggagacaggtgtactggggcactgatcacaggcctgtgttgccaccagacaggktctggggtagagggttggcccaagctgtgtatgtgagcaggttggatggcaaggcagtggagttggcacccttccctgttaaactgatggggatgtgtttggtccaatagaggaagcgtcatgcaccatcctgttggaagcatccttacctccatgataagtgtttgagcctggggagaaggtgtctgcagtgaccctctccgtggtagttgccatggaatttctgaactcaagtgagcacaagtgaaagaactgtgggtttcttcatgta

SEQ ID NO: 545176 - DNA, 392 bp, Homo sapiens
tgcaagtactcggaggctttgctgaagatcacaggaaagaagtcctggaaatttctgatgacactccccagcatttctgcctttgtgaatggctccctggctcgatacttgaggagcagaaaatgaaccaactcagccatcttcctactgagtgctacttggaagctcgtctccaggtcaggaaaggtgcttggcccttcctgttcttcgttgctggagccctcatcggattgactccagagagtatagttgatggtagtggggagggtggaggctccctgaggactgtggggaggacttggkgactcggcagcaggcacctcccgcagggtgacttccactagagtagaggaggaggaggcagtctcctgctcctcagtagcaggagcctg

SEQ ID NO: 545177 - DNA, 452 bp, Homo sapiens
gctgtgtggtcaaacagtagtctagatgttgctgtgaaggtattttgtagatgtgatcaacatttacaatcagttgactttaagtaaagcaatttaacttccataatgtggataggcctcatccaattagttgaaggtgttaaaagaccaaggtttcttggaaaaggaattctaccacaagactaacataataatgtcgtgtgagtttctagcctgctggcctgccttcactgtcctgggggaagctcggggagaccaggtggactggagtagactgtwcagagacactggtctggtgaagatgtccaggaaaccacgagcctccagcccattttccaacaaccacccatcaacaccaaagaggcgaggaaggggaaagcatcctctcatccctggcccagaagccctatcaaagtgaatggcccacccaagctctgactcctaccctgtcc

SEQ ID NO: 545178 - DNA, 452 bp, Homo sapiens
gctgtgtggtcaaacagtagtctagatgttgctgtgaaggtattttgtagatgtgatcaacatttacaatcagttgactttaagtaaagcaatttaacttccataatgtggataggcctcatccaattagttgaaggtgttaaaagaccaaggtttcttggaaaaggaattctaccacaagactaacataataatgtcgtgtgagtttctagcctgctggcctgccttcactgtcctgggggaagctcggggagaccaggtggactggagtagactgtasagagacactggtctggtgaagatgtccaggaaaccacgagcctccagcccattttccaacaaccacccatcaacaccaaagaggcgaggaaggggaaagcatcctctcatccctggcccagaagccctatcaaagtgaatggcccacccaagctctgactcctaccctgtcc

SEQ ID NO: 545179 - DNA, 623 bp, Homo sapiens
ctgtcattgacactagcaatggctctctcctggatcctccctggatcctccctcacaggctgagggtctcctgtctgctctccttccctggttcctcttcagtctcaccaaatccttctcaaagcagagaagaaatatcctgtccacacttcagaattttaaatcaattgtgatttttatgagaatttgaattggtacagcacttttgtaataacattttagaaatattttaaatgttaaactattttcaccctttcactttaacccaatgtccatgttaatatagccttcttataagaaaaccatgtttgcctaaaattcataggcagagatgtttattttattctatttatcatatagcaaatgggaaacaacttatatgtccattaggaagaaagagtttaattaattttggtgcatgtctactttagaattatagaaagtggtttcaaaagtgagaaagatctacctgtctctatctatctatctatctatctatctatctatctatctatctatcatctatactgttgtcgaaagatcctacatgcattttataaagtgataaaagyagatcagtatgtatgtcattgttcttgtatattgaataaaaataatatatt

SEQ ID NO: 545180 - DNA, 595 bp, Homo sapiens
cagccctgcccagggtctctgaagtaaccgcaggggcagggcagatttctatggggccccctgtctgcattctggcccaggggtaccctcaatcctacctcaggctctccacctggatgcttggcagatcctagaaccactgcatctgtcgaccagatgggggcccctgtgttgacctgagtcaccttctgaaaacaaggtcatcaactccctgagatctggaaacagaagtgaggaggggmcacatcctgttacccccacgtgcgttgtccagggctgacccctttggttctagggtgaacgttatgatggcctcctgtgggttactcatctttactcctgccagggactgccctttctcaacccccaaccccctgaaatgagcagacagctcctctttacaccaacaccttatctccctgagggttccccaacctcctgcctgtggtacaaatgagattgtcacttagggccatccctgatcaggttcccccagagctaagaacaagggacggccagactctgtggcatcccttctttctgggccgggggtatccccagtcctcatgaagggggcacaccttgggtccggcag

SEQ ID NO: 545181 - DNA, 533 bp, Homo sapiens
tgtggtcaaacagtagtctagatgttgctgtgaaggtattttgtagatgtgatcaacatttacaatcagttgattttaagtaaagcagtttaacttccataatgtggatgggcctcatccaattagttgaaggtgttaagagaaaagaccaaggtttcctggaaaaggaattctaccacaagactaacataaaaatgcgctgtgagtttctagcctgctggcctgccttcactgtcctgggggaggcttggagagaccaggtggactggagtagactgttgagagacrctggtctggtgaagatgtccaggaaaccacgagcctccagcccattgtccaacaaccacccaccaacaccaaagaggcgaggaagtggaaggcatcctctcaaccctggcccagaagccctatcaaagtgaacggcccacccaagctctgactcctaccctgtcctcccctggcacaacccccaccccagcctgcaccatttctctatgaagcccctgttctcacccctcctccatcctcttccc

SEQ ID NO: 545182 - DNA, 581 bp, Homo sapiens
aacatttatcttccaaattttaaaaaaatatagccatcatagtgtgtgtgaagaggtatctcattgcggttttcgtttgcacttctctaatgactagtagtgtggaatatgttttcatgtatttattggccatttgtatatcttctttggagaactgtctattcagaacttttgcccaatttttaattgggttgtttgtctttttatggctgagttgtaatgtttctttatgtattctggatactagatcctttcagatatattatttatgaatattttcttccattctatgtgctttgttttcactttcttgacagtgtcctttgatacacgaaaagttttagttgcgatgaaatccagttaatttctcttttcttttgttgcttgtccttttagtgtcatctgactgcctttttaaggcagtggttcttgatctttcctatcctatraccactccaaccccaactccaatcacactattgaagatctttggtcccaagcaaataaattaaaagctgacttttctgagaacttgttgatatgcttcccggccttctgctatgatgtggttaattgacggg

SEQ ID NO: 545183 - DNA, 596 bp, Homo sapiens
agagtgccctggaaggcccacggaggggagcgycccctcactgctccatgggcggggctgggtgcctgagcgcctgctgagcagagcagggggcccagggatctgcagggcacagggtacatcagtctccagtggtctgtcttggtgggcaggcctctctcctgctgtcctggctgccagactgctcaggtcccatcctcagggggtcctgtttctgggccctcgcccctccctggcctgccagctctctgccctatagcaactaattggaactgagacaagctggagatgctcagcccccctgcccccgtgccagaaaggctcccggggaccagcgcccaggggtgcgggtgagcacctcctggtgacacccagccgccggtgccagccgcaccccaggagagctggtgtatgagcatggatgtcttggtgcggagcatgcccatgtatggccactgtgggccagcatggtgagcctttgagggcaagcccgtgtgggtatattgaaaggaagatgcagggctgcctccaagccaccagggctgggcggtgggagcaggttgcgagccagggagcagagagggctcccatggcaa

SEQ ID NO: 545184 - DNA, 596 bp, Homo sapiens
agagtgccctggaaggcccacggaggggagcgccccctcactgctccatgggcggggctgggtgcctgagcgcctgctgagcagagcagggggcccagggatctgcagggcacagggtacatcagtctccagtggtctgtcttggtgggcaggcctctctcctgctgtcctggctgccagactgctcaggtcccatcctcagggggtcctgtttctgggccctcgcccctccctggcctgccagctctctgccctatagcaactaattggaactgagacaagctggagatgctcagcccccctgcccccgtgccagaaaggctcccggggaccagcgcccaggggtgcgggtgagcacctcctggtgacacccagccgccggtgccagccgcaccccaggagagctggtgtatgagcatggrtgtcttggtgcggagcatgcccatgtatggccactgtgggccagcatggtgagcctttgagggcaagcccgtgtgggtatattgaaaggaagatgcagggctgcctccaagccaccagggctgggcggtgggagcaggttgcgagccagggagcagagagggctcccatggcaa

SEQ ID NO: 545185 - DNA, 546 bp, Homo sapiens
aaatgtgtatgtgtgcgtgtgtgtgcgtgtgtgtrcatgtgtgtatgtgtgcatgtgtgcatgtgtgtatacatgcatgcatgtgcgcatgtggatgtacatgtgcatgtatgtgtatagatgtgtgcatgagtgtgtgtgcatctgtgtatatatgtgtgtatatgtgtatcatatgtgtatgtgaatgtgtatacatgggtatgcatgtgtgagtgtctaggtgtgtgcatgtatatgtgtgtacatgtgtgtataggtgtgtgcacgtatatgtgtggatgtgtgcatgtatgtggatgcatgtggatgtgtgtacatatgtgttttgtataggtgtgtgcatgtgtgtgtgcacgtgtgtacatatgtgttttgtataggtgtgtgcgtgtgcacgtgtgtgtatgtgagcgtgtatgtgtgcatctgtgtgtgtgtttgtgtgtgtatgtgtgtacgtgtgtgtgtgtgcatgttctggcaggagggaggggcttggtgtgaggtggtggggagaaggcaggggccaggctttgggaggac

SEQ ID NO: 545186 - DNA, 632 bp, Homo sapiens
cagacaatgcgaaatgagggggtgaggctgtgtcccaataaaactttattcacaagaacactgggctgccagatttggcacttaagctgtaatttgccaaacctgttgaatccaaatgagatgtgtcttaggggatagtttgaggtgaggatctaaggtgcatcctttgcagattgctaaccagttgtccccatctctagtagcaaatcggttgttccctggctcatttgcacgcactgacactggtctgcagtcagacctggtgctggctgcctgtcctgacccacgggcccatctgtgtgctgctstaccggtgatgtgcttttgcctcttgtacctggtatcatttaatacctgacctgccggccccacctcagcaatcctaaagcttgcttctctgtccagtggacttcagaaccactttgtcaagacccccttcctccctccccgccaagataaagcactgggtgatacattctctggacatcctcagagttccgaagccgcagatgagtccggtccccatggggtggggtggcggctggctctgtgcagatgctgtggatttgactctccgcagatgggaggcgggtgtgggcagtacagcgccatcctgagtgaaggcccccagc

SEQ ID NO: 545187 - DNA, 617 bp, Homo sapiens
aagcctatgatcactaggtatacatgatcaacatgaacacaacaatgggataggtgagatttggtgatctttaaaggtactgttagctctgacgttatagattctgargattttcattagcacatgtttcaggtttgtgtgtcaccacaactatccagttgtttttatgtttccttataagtgagaataagagaacatttcacttaggcaaacgataagacaacataggacttgatcactaaaaatgacatgtctgtacactacgcccacacgtggaaatataaacatggaattatgtcaaaataaaaaaagattagaaaatatccagaagacactgactgacactacagaaaactgaatgcgccctacaaataaatgatttcaaggtaatgtggaggcaaggagaactgttagactctagtgacaattagtctcacttttttttttctgtagaattgtttccatttataatcaaagtcttaaataaatgttcttgtgaccttggctaaaactcgtatctttctctgttatcctctttgttaaatgggagactataaataatttgtaagtgccctcctcctcaaaacaactgccctgtttccagagctgacattgac

SEQ ID NO: 545188 - DNA, 561 bp, Homo sapiens
acctggctgtgatggcaagtctggatttgagsaaatgggtgtgtgaccagaagtagctaggtctcttaagactgtgttgcaacattctgggacagaaatattgagaatttgactgaggtcagggcagaggggaaggagaaaaagggccgaaagtctgtcagatattcattccaacctggtagttgttggcagattgtatgtaagctgggaaaggaaggttccactgacggagtccattaggtttcaggttccataccccgacactctgattgtctctgatgcccttcgctgaaatgggctgcacagagaagacaggaagccatgtactagaagatgggggttttgaaaatttgggatatgttgactctgagtccaagtggaagtttccaggaggcggttgaatatatcaggctggagcgtaggacagatatttaggttatagattgacttgttaatattaggaatagtattgtacagaactatgtgatttacagagcagctctatcttcatgattttatttagctctcacccaaactctgtgaggtagacattatctttcc

SEQ ID NO: 545189 - DNA, 394 bp, Homo sapiens
cggcagggccatcgccgtccccctgctcttgccgcagccccgtcaggctccgcgtttcggggcctcctggccggggaggctgcctgtggctgcccgcgcgcccccggggctgtggctccgccggcccccgctccggccccgcgcagcccctccgagaacgcagccgtctggtcccgaactcgcggcctctkcccgtagccgccgccagcgccttcgctgtggccgctcctccccctccccgagcccgagctggcccagcggagaaggagggcggagaagctggaacccgaacgcggagctgcaggcggcaggtgcgggaacgggagaagctatggcctcgcccaggacggctgctcagagcgacacgagcaaccgccaggagctccgcacgcag

SEQ ID NO: 545190 - DNA, 584 bp, Homo sapiens
acggtggctcacacctgtaatcccagcgctttgagatgcaaagtgataaacagagcaagactccatctcaaagaaaaaaaaaatgctttcctttctctagaaactccaatctaagctataatatagtccagccaaagaaaagtactattataaaatttgaaggcccactggaatacaaggaggaggatataacttatgagtggaagaataagaaaacttcttgtaggaataaagatttttcytggacctcaaagttagcataaaacatcagtttaccaatatggaggaggaaggctatttcagatatgagaataactcaagcaaaggctcagaggcggggaagtataatgtttaaggaatgacaggtaaattaatggggccggaagagaaaagggaggtagagatatgttgggagatgaggtatgttggtaccagattgtggggaactttgaattccaagctaataggtatgggctttatttatatgcagtggaaagccagtaaatatttatagggacaggaaataaaatatttagttgtatgtttcagaaagaaaactccggtagttgtatggaggaaagtgg

SEQ ID NO: 545191 - DNA, 584 bp, Homo sapiens
acggtggctcacacctgtaatcccagcgctttgagatgcaaagtgataaacagagcaagactccatctcaaagaaaaaaaaaatgctttcctttctctagaaactccaatctaagctataatatagtccagccaaagaaaagtactattataaaatttgaaggcccactggaatacaaggaggaggatataacttatgagtggaagaataagaaaacttcttgtaggaataaagatttttcttggacctcaaagttagcataaaacatcagtttaccaatatggaggaggaaggctatttcagatatgagaataactcaagcaaaggctcagaggcrgggaagtataatgtttaaggaatgacaggtaaattaatggggccggaagagaaaagggaggtagagatatgttgggagatgaggtatgttggtaccagattgtggggaactttgaattccaagctaataggtatgggctttatttatatgcagtggaaagccagtaaatatttatagggacaggaaataaaatatttagttgtatgtttcagaaagaaaactccggtagttgtatggaggaaagtgg

SEQ ID NO: 545192 - DNA, 584 bp, Homo sapiens
acggtggctcacacctgtaatcccagcgctttgagatgcaaagtgataaacagagcaagactccatctcaaagaaaaaaaaaatgctttcctttctctagaaactccaatctaagctataatatagtccagccaaagaaaagtactattataaaatttgaaggcccactggaatacaaggaggaggatataacttatgagtggaagaataagaaaacttcttgtaggaataaagatttttcttggacctcaaagttagcataaaacatcagtttaccaatatggaggaggaaggctatttcagatatgagaataactcaagcaaaggctcagaggcggggaagtataatgtttaaggaatgacaggtaaattaatggggccggaagagaaaagggaggtagagatatkttgggagatgaggtatgttggtaccagattgtggggaactttgaattccaagctaataggtatgggctttatttatatgcagtggaaagccagtaaatatttatagggacaggaaataaaatatttagttgtatgtttcagaaagaaaactccggtagttgtatggaggaaagtgg

SEQ ID NO: 545193 - DNA, 584 bp, Homo sapiens
acggtggctcacacctgtaatcccagcgctttgagatgcaaagtgataaacagagcaagactccatctcaaagaaaaaaaaaatgctttcctttctctagaaactccaatctaagctataatatagtccagccaaagaaaagtactattataaaatttgaaggcccactggaatacaaggaggaggatataacttatgagtggaagaataagaaaacttcttgtaggaataaagatttttcttggacctcaaagttagcataaaacatcagtttaccaatatggaggaggaaggctatttcagatatgagaataactcaagcaaaggctcagaggcggggaagtataatgtttaaggaatgacaggtaaattaatggggccggaagagaaaagggaggtagagatatgttgggagatgaggtatgttggtaccagattgtggrgaactttgaattccaagctaataggtatgggctttatttatatgcagtggaaagccagtaaatatttatagggacaggaaataaaatatttagttgtatgtttcagaaagaaaactccggtagttgtatggaggaaagtgg

SEQ ID NO: 545194 - DNA, 522 bp, Homo sapiens
ctcatttgttgccatattcccatccccccaaactgtacacgcccatccgctcagcaaatgaaattgtttcctgcatctatgcctttgccagcattgtcccctcagcatggaatgcccatccccaattaaccacttgcctattatttgaaaggttcgcaaacctcccctcttctctgaatccttgtcctgaccsttttgcactggtagaactgatcactttctcctttatctcctaactgaaaccctaagcatatttctaacgtggcaaatccaacaccttatggtgtttacaggtatttttcactgtctccccactaaaatgcaaactgttagttaccaaggacacagttttacccatttcaatagcaactgtgcctccaacaatctttaattcacagaaatgattcttaagttttttgaatgaaggtaattaattgatgggcattttcctcattaaacattatagagtaaaaatggataaattttctattttgttatctcctccatagttgtgttaactca

SEQ ID NO: 545195 - DNA, 596 bp, Homo sapiens
acagaattcatcattggacataatatagcttctttattggggacacagtttacatattacctcatgttctatgagatgctataagaaaaatttctcttaagatttcctacatggataatttgtacctacacttgtagtttgtttttatcatatggatgaggtaattatcacaggactgattgttttccttctttacattgactgctaataagttcagagccaatgttagcttaactccaactatagaggctgattgcatataytttaattccaaatctaattcaaggtttatgttcctgcccttatttttttcttcttgatttttgtatttctttgctgttgtttttgtagatttttctgtgccttatacttttttcaaagataattaaaacagtgtgtgaattcagtggggtggatgaatgaatgaggcagagaaaaaggaaattgacatggtaggataacaaactcacataatatgtagatacatataaaaagacacacaaagaaaaaaatttctctaatatatctaatcttctttatgaatgatcccatctaccaaatagtcaagaaacttaaattttgtaaattgcaattaa

SEQ ID NO: 545196 - DNA, 596 bp, Homo sapiens
acagaattcatcattggacataatatagcttctttattggggacacagtttacatattacctcatgttctatgagatgctataagaaaaatttctcttaagatttcctacatggataatttgtacctacacttgtagtttgtttttatcatatggatgaggtaattatcacaggactgattgttttccttctttacattgactgctaataagttcagagccaatgttagcttaactccaactatagaggctgattgcatatattttaattccaaatctaattcaaggtttatgttcctgcccttatttttttcttcttgatttttgtatttctttgctgttgtttttgtagatttttctgtgccttatacttttttyaaagataattaaaacagtgtgtgaattcagtggggtggatgaatgaatgaggcagagaaaaaggaaattgacatggtaggataacaaactcacataatatgtagatacatataaaaagacacacaaagaaaaaaatttctctaatatatctaatcttctttatgaatgatcccatctaccaaatagtcaagaaacttaaattttgtaaattgcaattaa

SEQ ID NO: 545197 - DNA, 629 bp, Homo sapiens
atcagtccagttactatatatccctgctcttaacaaaactatttcaaataccttaagacaataaatcagcttttcttcttttcagatatatttaacatgatttataaattactgaaacccattataaagttctgttacaatggacatttttcactctaactgctgttacatttaccccatttcatgtcttgcataatggggagggaatatattaatgctgtctttatccttctaaagcaacgtagaatcataccagaaaaaggaatactacatycaatctcatccctgtctttttgttcaagctcttcagactgcttcaactttcacatttcattcattcccacagttatctatttacgttcttttcttatctaatatatttgggaaacagcattgggaaaacatactttctagcattgttctagccataagtgtgttgtatcttcttgagcaagtgaatcaacttcttaacattgtatatcaggaccttcatctgtaatgcaagggcaatgatttccagctaacatcggtctcaagttttattcattttatcaattagcaattgttaactggttgcctgctgagttccgcataaatgttacatgctgggaaaaaaagagctatggaaa

SEQ ID NO: 545198 - DNA, 629 bp, Homo sapiens
atcagtccagttactatatatccctgctcttaacaaaactatttcaaataccttaagacaataaatcagcttttcttcttttcagatatatttaacatgatttataaattactgaaacccattataaagttctgttacaatggacatttttcactctaactgctgttacatttaccccatttcatgtcttgcataatggggagggaatatattaatgctgtctttatccttctaaagcaacgtagaatcataccagaaaaaggaatactacatccaatctcatccctgtctttttgttcaagctcttcagactgcttcaactttcacatttcattcattcccacagttatctatttacgttcttttcttatctaatatatttgggaaacagcattgggaaaacatactttctagcattgttctagccataagtgtgttgtrtcttcttgagcaagtgaatcaacttcttaacattgtatatcaggaccttcatctgtaatgcaagggcaatgatttccagctaacatcggtctcaagttttattcattttatcaattagcaattgttaactggttgcctgctgagttccgcataaatgttacatgctgggaaaaaaagagctatggaaa

SEQ ID NO: 545199 - DNA, 629 bp, Homo sapiens
atcagtccagttactatatatccctgctcttaacaaaactatttcaaataccttaagacaataaatcagcttttcttcttttcagatatatttaacatgatttataaattactgaaacccattataaagttctgttacaatggacatttttcactctaactgctgttacatttaccccatttcatgtcttgcataatggggagggaatatattaatgctgtctttatccttctaaagcaacgtagaatcataccagaaaaaggaatactacatccaatctcatccctgtctttttgttcaagctcttcagactgcttcaactttcacatttcattcattcccacagttatctatttacgttcttttcttatctaatatatttgggaaacagcattgggaaaacatactttctagcattgttctagccataagtgtgttgtatcttcttgagcaagtgaatcaacttcttaacattktatatcaggaccttcatctgtaatgcaagggcaatgatttccagctaacatcggtctcaagttttattcattttatcaattagcaattgttaactggttgcctgctgagttccgcataaatgttacatgctgggaaaaaaagagctatggaaa

SEQ ID NO: 545200 - DNA, 629 bp, Homo sapiens
atcagtccagttactatatatccctgctcttaacaaaactatttcaaataccttaagacaataaatcagcttttcttcttttcagatatatttaacatgatttataaattactgaaacccattataaagttctgttacaatggacatttttcactctaactgctgttacatttaccccatttcatgtcttgcataatggggagggaatatattaatgctgtctttatccttctaaagcaacgtagaatcataccagaaaaaggaatactacatccaatctcatccctgtctttttgttcaagctcttcagactgcttcaactttcacatttcattcattcccacagttatctatttacgttcttttcttatctaatatatttgggaaacagcattgggaaaacatactttctagcattgttctagccataagtgtgttgtatcttcttgagcaagtgaatcaacttcttaacattgtatatcaggaccttcatctgtaatgcaagggcaatgatttccagctaacatcggtctcaagttttattcattttatcaattagcaattgttaactggttgcctgctgagttcygcataaatgttacatgctgggaaaaaaagagctatggaaa

SEQ ID NO: 545201 - DNA, 462 bp, Homo sapiens
tgggaaggcccgtttgagagccagatatgtgttgggaaaaaaaatgacaatactttgttttaatgtgacaattctgctgcctaggggaagtggggagggggagaaaaacatcatccctaccatgaccatgaaaatcttatgagggtcttctgtattttctttacattgtctttttgaacaggggtcagtagccaagaactggagcagagtcctcagtccttgatcgtccaagagggaaagaatctcaccataaactgcacgtcatcaaaracgttatatggcttatactggtataagcaaaagtatggtgaaggtcttatcttcttgatgatgctacagaaaggtggggaagagaaaagtcatgaaaagataactgccaagttggatgagaaaaagcagcaaagttccctgcatatcacagcctcccagcccagccatgcaggcatctacctctgtggagca

SEQ ID NO: 545202 - DNA, 425 bp, Homo sapiens
ttttttttttttttgagacagagtcttgccctgtcactcaggccagagtkcagtggcacaatctcagctcactgcaacctctgcctcctgggttcaagcgattctcctgcctcagcctcccaagtagctgggattacaggcacccaccatcacacccagctaatttttgtatttttagtagaaatggggttttgctatgttggccaggctggtctggaactcccgacctcaggtgatctgcctgccttggcctcccaaggtgctgggattacaggcatgagccaccgtgcccggcctgaacttttatacaacaatgaaataattctctattttcaccaatcaagacaaagccaccttataagtgaagaagttctcactctgtccccaaaataaagagagccctagtcattatatagctcaataca

SEQ ID NO: 545203 - DNA, 594 bp, Homo sapiens
acttactgaatgctgcactgaatgtcagcaaaggcataagagaatgtctggatctgtagtttctgatgtaatcgaagcagaaacttgtttcccagccatgcccacattagttttttaaatgacaaaaaataaaccctactaagacagatggcgcctcagggtagaaagaacatgggtttggatgtgaataactcacatctgaaacacacttagtagctatatgaacttgtacaagtgactcaacttctctgagctccacatctcactgtgggtggaggtaatggtaycctcctcctgggggtattttaagtgagacagtgcacgctgagttgaggtcctgctccacacactgaggcatggtcaagtccaaaaacaagtaaatgaaaaagacaaaaatccttgactttgtggaattggcagtcagtaaataagaaatataaattaaatatatgttagttagatggtgagaaataataaggagaaaagccaatgggggtggggaacatgagagaaggcttccagttttgaaatggggtagccaaggaaggccttgattaggtgccttttgagatgagggacagagccacgaagaca

SEQ ID NO: 545204 - DNA, 386 bp, Homo sapiens
tgcaggtatgtttgtacttgtggatgagcacacattaatatatttgtaagtgtacatgtgtacacatctttgtgcaagcattcccagggtgtgggagtgattagcatggccttagacacaaagtgacaggatttgagggtcggtcagagcccatctcttacccaaggctacactccaggctgasagaagggctggggagacaggaaagggcagctctctgtatgccaggcctctcggcctgggctttcttgggtggggagcctcttggtgtggaaacactctgtccctgttcagctccctttccgtctcttgctggctggtagcagaatgtgatggctggtagccccaattactcctttttctctgatccaggagaaaagtttaag

SEQ ID NO: 545205 - DNA, 497 bp, Homo sapiens
aggggaatctcttttttcctttgctcacagaaacaaagacacacctttctcaaaaataacttttactataaggggaaagattwaaaaattaaaagtagagaaatagatagttttccagaacatggtttctgtaattccaccaagctcagcctcatcatgacttggttgatttcatttccagaaccttccaccctcaatttattttctttgcctcagtcagccctgagaagagggagacggcaaagccaccctgagtggctgtccttggggcctgaggttgtagggtggaggctggtgccaggcccagacatgctgccaagtctgctcctggagtgaccctccctctgccgctctgtcccagggacccacactgggctctgtgaggccctgtgcctggtccctggggtaaggatgggctctgtcaggcactgaccaagtcggtgcagtagagataaatggagtttgggaatctgacaaactgagttccttcctgtctt

SEQ ID NO: 545206 - DNA, 606 bp, Homo sapiens
ttcagatgacctcagtgaatccccagaataaatgatagagatgaaaaatatagatatatgcggattcactgacaataataagatgaataatgcatgcagaaatttcacagatcaggtcattatagcgaaataataggacaacatgttatgtaactctggacaagtaagaaaaataatatttctagggcagtccagtttacaaaatactgaaatggacctgcagagtacctaagtctgttggagcatagatgaagagtcaagaaaatgcaggatggagagacagagctatagcaatgctaacaagaacagaacactaagaattgtagttttgtggtcagcaataggggtcatgatgtgataaatgctattatccagactggagcacagtctctgtgagttacccaaaaaaggtttcacaggaagagattcccactggtccagtacagtaacttctcctagccatttggataaaaatttacttgctaaaggggatctcaaaatatagacmcacctttaggtttttttaaattgtttttatataatttgcatatattccccttaagagtctgttcttaacccatttattatgcctagtgatccgttatt

SEQ ID NO: 545207 - DNA, 601 bp, Homo sapiens
taacctcctgtatgatgactgtttacccattttcagttcatagtttaatgtgacttccctacaggaatttttccctacttcctactctgaggagtgatgcttctrttgcagttagttgccaaagactttaatttttttttctttgtctgtccacattactgtgtgagttccttgaagaaagagactatgctacatttatttttgtagctcccttaacaatgtctgcaacatagtcgccactcaatatttgttgactaagtaaataatttaatggaggaatgcatcattgaatgtatgggaaagtaaaggtgtgttttggtcttttaagtaagttaattgaactggtttattaagaagtaaagccaaaaatatttcagaagccattaccaagctgctttagttcctgactggggtttggatttcattttcagatagtaggggattattgaggattttaagtaagggagtcagataatataccctgtttctaccaataacacttgataaactcaggggaccagctaggaaatcctgtgaacaagccttaaacatcccaagccatcttggatacaatgccatctctatcaggggaggcctacct

SEQ ID NO: 545208 - DNA, 370 bp, Homo sapiens
cctgtctcctggcagagtctgaccaagccccagtgggcgcttctcttcctaagtcctctggtgtaccccattcttcaagggaaacggtccccttaagaawctatgtgaaagggttctgaaattgctgtaccagttaatgaattatttactctaaacaatgtcttgataaagggggaggatgaagttagctgatgttgactaaggagagacggagttgccaaggaaattcttctaaatgaaaaaaaaaaaaaagtaaaagcagtcagccggttttgtctgactatgaaacgtgtcacagagcatgcacctttggccatcttttgcatttatgatttggaagagagatgtagcagtgagtgtggggccaggg

SEQ ID NO: 545209 - DNA, 561 bp, Homo sapiens
gtggggattcaggaagtgtgtgttagttggtcatcttgtcagtcatggtgacaaagtggctgtggtggggctactggagaccgggcagyaggggcatctgaagacaccactttgcagtgatgcagactgctccttacttgctgtgtcctatcaggcaagttactttgcctctctgagcctcagtttctttattcattaaattcaaatatgagccaggtatggtggcccacgcctgtaatcccaccgctttgggagggtgaggcagtaggatcgcttgagcttgggagtttgagaccagcaacataggaagaccccatctctacaaaaaataaaaaaattagctgggcatggtggtgcatgcctgtggtcccaggtactcaggaggccgaggtgggagatttgcttgagcccagaaggttgagactacggtgtgctgtgatcgtgcactccatcctgggggacagagtcaggccctgtctcagaaaaaaaaaaaaaaaagaaaagaaaaattaaatatgacttctacctctctgagtcattgcaggcaggtgataccatcag

SEQ ID NO: 545210 - DNA, 561 bp, Homo sapiens
gtggggattcaggaagtgtgtgttagttggtcatcttgtcagtcatggtgacaaagtggctgtggtggggctactggagaccgggcagcrggggcatctgaagacaccactttgcagtgatgcagactgctccttacttgctgtgtcctatcaggcaagttactttgcctctctgagcctcagtttctttattcattaaattcaaatatgagccaggtatggtggcccacgcctgtaatcccaccgctttgggagggtgaggcagtaggatcgcttgagcttgggagtttgagaccagcaacataggaagaccccatctctacaaaaaataaaaaaattagctgggcatggtggtgcatgcctgtggtcccaggtactcaggaggccgaggtgggagatttgcttgagcccagaaggttgagactacggtgtgctgtgatcgtgcactccatcctgggggacagagtcaggccctgtctcagaaaaaaaaaaaaaaaagaaaagaaaaattaaatatgacttctacctctctgagtcattgcaggcaggtgataccatcag

SEQ ID NO: 545211 - DNA, 568 bp, Homo sapiens
atgagtgtctggcaaggcacagtggctcacacctataatcccagcacttttggaggctgaagtgggaagttctcttgagtctggaagttcaagaccagcctaggcaacatagcaagaccccgtctctacaaaaaaataaaaatacaaaataaaaaagatacacatctatagatagagagatgcatacatatatacatgtatacacacagatacacacatatgtgtattttttgtagacttatacagaatcactttagaggaagagtaattggaaagattgggtttagaaaaatggaccattttctactgaatatatggartgaaagaggaagtgagttatttccatgttattgaaagctccattatttcaaataaagcctagaaagaataaaataaagctttagccttcttaaattacaattttccagagcatccctcaaaatgtatgagaaaagaaattgatggcagcttatccctccggcaggaaggtgtggtttgaaagtgggccggccacaccgagttgcctgggtcattgaggcacagttctcccctgaactattttgcccca

SEQ ID NO: 545212 - DNA, 486 bp, Homo sapiens
ttctatttggacagagctaacttgtagttggtgtggggagtgcaaactttgcaaagaatttggttcttttctggtggtcttagcctgaggatgtcaagtgtgagcctagagggtgacgtttcctctcctggctccttaccacctgccgtgaagatgatctactctggcctttctctgtggaaaatggctgcgaaataatgaaacaggctgtcacggaattttctcctcctctttctccaggggtgttgaaatagtcacttcctacagcgatggggaaacatcttgggctttggggtcacacttcccctgagttcagagccttcatagatgtgtggcagccttcttagctgagtgaccttgggcaagttactcttagtctcttcgtgyttgactttcctcgtctataagacggggtgatgatcccgaccttgccagtggtagaaagcaaagcagccgcgggcctcatgcaatgtgcatggtgcctgg

SEQ ID NO: 545213 - DNA, 515 bp, Homo sapiens
tgtctctcttaatgtgtgggattcagccatctgcaacaactaccacaaaatcccggagtatgcagggaacttcccacagagctaacttccttttttgttctgtctcctraaacaccaagatccggtgaggttaagcaacgtgtccaaggtcatcactatttgaaggcagggcagcatttaacccaattttatctaatcctatgcaggctcatttatctagaccagagtttctcaaatgaggcatcccaggctctaagggctgcagagaagtttccagagatgccactgagggcaggagtggacagagtggataactccaaagatcttaacaccctctggatgactaacagtgcttgagcacttcccatttgcaagacatttgcaagttcttttccataaatcatccttttttttcatccccataagctatgagctggggctaatgacatccccactgaacagatgagaaaactgaggcccaggaaaggaattgctcaggttatatagtaagtgag

SEQ ID NO: 545214 - DNA, 515 bp, Homo sapiens
tgtctctcttaatgtgtgggattcagccatctgcaacaactaccacaaaatcccggagtatgcagggaacttcccacagagctaacttccttttttgttctgtctcctaaaacaccaagatccggtgaggttaagcaacgtgtccarggtcatcactatttgaaggcagggcagcatttaacccaattttatctaatcctatgcaggctcatttatctagaccagagtttctcaaatgaggcatcccaggctctaagggctgcagagaagtttccagagatgccactgagggcaggagtggacagagtggataactccaaagatcttaacaccctctggatgactaacagtgcttgagcacttcccatttgcaagacatttgcaagttcttttccataaatcatccttttttttcatccccataagctatgagctggggctaatgacatccccactgaacagatgagaaaactgaggcccaggaaaggaattgctcaggttatatagtaagtgag

SEQ ID NO: 545215 - DNA, 606 bp, Homo sapiens
tttatctcctctacactgatattttatacttctttcagccacgcaatattgtgcatccccaagaagctctctgcttcttattcaatgcttgtcaacctctgcccctctggcaaatttcttctaatgggtagcatccaggaagcccctgttccctttgtgtgcccccgctattttccacattatgtttgatctcaacattccactgaaaattggatattgatagtagcctgctatgataatgaacaattcatgtctcaatgtgaaaaggcatttaagacacctgttttcatgagtaattatagataattgctatggtggatgaagttttttaaaattattattgcacagaaaaggtcttgagaaacagagcaattaatttcctgataccttaccaagagtgagtgcgacgttaaccctcactttgggaagtatttgtaggtaattgggcttggctgcttgcaaygaggggaacgtgaattatattccagagtaggctcctgacatatcccagccatggataactttctttttaacgttttgttcagcatttactccttccttcattcattctaggaacacttgttagatacctcctattggtcaatt

SEQ ID NO: 545216 - DNA, 577 bp, Homo sapiens
aaccttggctgataaattactatcctggctgggatttccctcaccaattgctaagcaaaaggaacacataaattttggagcaaccacctttttaggtgtgagtttggagccttgtagaatagaagactgggccaggtgcagtgtctcacacctgtaatcccagcactttgggaggccgaggtgggcagatcacttgaggtcaggagctcgagaccagcctggccaacatggtgaaaccctgtctttactaaaaatacaaaaattcgctgggcgtggtggggcgagcctgtaatcccagctactcaggaggctgaggcaggagaatcacttaaatgcaggaggtggaggttgcagtgtcytgagatcatgccactgcactgcagcctgggtgacagagtgagactccgtcaaaaaaaaacaatagaagactgatagtgtcaacagtttagcattgatctggtgacatcatgatcatcatccttattttcctcatcatcacaataacatcagaaccactatttgttaaaggcctagcaaatatcaaatcttatgccatgtgccttgcatgtactttcca

SEQ ID NO: 545217 - DNA, 577 bp, Homo sapiens
aaccttggctgataaattactatcctggctgggatttccctcaccaattgctaagcaaaaggaacacataaattttggagcaaccacctttttaggtgtgagtttggagccttgtagaatagaagactgggccaggtgcagtgtctcacacctgtaatcccagcactttgggaggccgaggtgggcagatcacttgaggtcaggagctcgagaccagcctggccaacatggtgaaaccctgtctttactaaaaatacaaaaattcgctgggcgtggtggggcgagcctgtaatcccagctactcaggaggctgaggcaggagaatcacttaaatgcaggaggtggaggttgcagtgtcctgagatcatgccactgcactgcagcctgggtgacagagtgagactccgtcaaaaaaaaacaatagaagactgatagtgtcaacagtttagcattgatctggtgacatcatgatcatcatccttattttcctcatcatcacaataacatcagaaccactatttgttaaaggcctagcaaatatcaaatcttrtgccatgtgccttgcatgtactttcca

SEQ ID NO: 545218 - DNA, 621 bp, Homo sapiens
tgaactttgtaaaaacattatgcagtatgaactctgttgtgtccaactctttttcctcatccttgcatctgtgacattcatccatgacgctgcgtgcagcagaagttcagtctttgttgcctctctgtagtatttcatgggatgaatatgccacaattcattcacttattccaccrttgaatgacattcaagttgttttcaacttttgactcttatgaaaaatagtttctggccaggcacggtggctcacgtctgtaatcctagcactttgggaggccgaggtaggtgtttcacctgaggtcaggagttcgagaccagtctggccaacatgaggaaaccccctctctactaaaaatgcaaaaattagcagggcatggtggcgggcacctgtaatcccagctcctcgggaggctgaggcagagaattgcttgaacccggggatgggggtgcggaagttgtggtgagccaagatggcgtcacttaactccagcctgggtgaaagagcaaaagttcgtctcaaaaagaaaaaaaaaaagaaaggaaaaagaaaaagaaaaacagtttccgtgaacatttttcttatcttttggtagaaatactcatttattttgggccaataca

SEQ ID NO: 545219 - DNA, 561 bp, Homo sapiens
gaaagtcctgtgaggggtgcttaggggtgccaccccatcctcctcttcacaagtggaatacagatgtgatgctggagctgtggtagccatctkatgaccatgaggcaacaagactaagagccgaaaaagccaatatgtgaaggatgagtgtgcagagaggaagtgcctggtccttgatgacattgtggaaatactggactacctctgtgactgcccatctctactttcttgtgtccttgtgttttaagctgttctcttttatttgagacagagtctcactctatcgcccaggctggagtgcagtgacacaatctcagctcactgcaacctcgtgctcctggattcaatcgattctcatgcctcagcctcccgagtagctgggatgacaggcaggtgccaacatgctggctaatttttgtatttgttagtagagatgaggttttgccagtttggccaggctggtctggaactcctgacctcaagtgatccacccaccttggcctcctaaagtgctgggattacaggcatcagccacagtgcctggccttaaacagttcttac

SEQ ID NO: 545220 - DNA, 561 bp, Homo sapiens
gaaagtcctgtgaggggtgcttaggggtgccaccccatcctcctcttcacaagtggaatacagatgtgatgctggagctgtggtagccatctgatgaccatgaggcaacaagactaagagccgaaaaagccaatatgtgaaggatgagtgtgcagagaggaagtgcctggtccttgatgacattgtggaaatactggactacctctgtgactgcccatctctactttcttgtgtccttgtgttttaagctgttctcttttatttgagacagagtctcactctatcgcccaggctggagtgcagtgacacaatctcagctcactgcaacctcgtgctcctggattcaatcgattctcatgcctcagcctcccgagtagctgggatgacaggcaggtgccaacatgctggctaatttttgtatttgttagtagagatgaggttttgccagtttggccaggctggtctggaactcctgacctcaagtgatccacccaccttggcctcctaaagtgctgggattacaggcrtcagccacagtgcctggccttaaacagttcttac

SEQ ID NO: 545221 - DNA, 629 bp, Homo sapiens
tgaattggtctctcccaagagtattctcatctcaaagtcttaagagtagagtttggaaaggggaggagagaacagtagctttgggccataagttccatgatgagctcaatagtcagtgaaactctctaggttaaggatatgtactgaacctctgaatgtcctatcccccttgagaaatttccttccttcctaactctgggcactttgtttagtgttgcggcatgctggaaatttatcttgagttgaggagagggagtctgactgtattgctgcagagtctaggctactctctttaaatagatgtccaatgtgggaatatggctgaaaaccatcagttcctcccttatcatagttaggcartggcaaatattagaatttcatgcaagcttttccttcttcagtttgctcagagaggacgcctagttcaaggtgaagattaagtgtttgtgtatgttaaactcagtaagttttattttaaatatacttcagtctgctctaatgtaacaaagttcttcagtctgattgttctagcagctatcactcaaacattaattgctgtcagtgtgaaaggatatcctcctacatcttttctggagtacttgaaaccatcccacttcctttttctttta

SEQ ID NO: 545222 - DNA, 431 bp, Homo sapiens
gtaatgtcatgattatagctcattacagctttgaactcccaggctcaagtgatcctcccacctcagcctctcaagtagctgggactagaggtgcacaccaccaagcctggttaatttttgtatttctttccagagatggggccttgctatgttgcccwgtctggcctcaaactcctggggctcaaatgatcctcccacccagggctcccaaagtgctggatgagccactgtgcccagtcctaagaatcctgtcttaacagggcttcagtgttgttaagcactaaaaagaaagcagaggtcaggctgcccatcagtgcccaaatgtcagcagcaagcatcttgttccaacctgctttcaccccaactctcccaagcaccatgaggcctctcgtggaaggcccgtcctatgaagctgacactcaccctcgttt

SEQ ID NO: 545223 - DNA, 509 bp, Homo sapiens
tttcttgggaacaagcccttgggaggtggggggatgtgaatggtgaggggagggtagaaatggtggagtagggtcaggggcaagaaagggactttctgctaagaattaatcgggtgtccatttactcttagcagaaaactaggattagattctggattgtactcctgactccaaattttacaagtgggggtcttgcatttaccttccaggacctcggtcatcttagcaggaaaatagcaatagcaggtgatgccaccttacagagcgcttaggagacagtgagatggtctatataggaagctgtctggcctgatacctgatgaatacaaggggcccaataaatacagtggctgttatgaataatagatctaaactgcctttttggtactactggggacctgccaagcaggtgcatttagagtgcccagtgcctctccctgcgacacatttgatgcctccctacacctggaccaggccttgagcraggatttccactgcagaggtccttc

SEQ ID NO: 545224 - DNA, 554 bp, Homo sapiens
tggtggatgttcaacaaacttgggcttttattaatcggaagcatttacttatcgactcccacccattaggaaccaggctaatgtggtaccttggtttttccattttgtttttgttggggtccccagaaagcgatcctgagataggaattcatatgcaaggaaggaattttggaagaaactggtaaggggatggcagaagttacgtagaagaaggaccaaaacaaggatctacttttaggcaacgccacagagagggtagaccttatgtgcattactctagaattggcatcaaccccaagcaagggagcagggctttcattcttatgtgcctaygagtcgagtcattcaccaaagagatggaaacttctagctactctggctcattgcatgttgagggaaaatttctccaagagtctcaggtgctggtggttggaaacaaatactacagaatctggaaaagaggtgcatggaaacaagaaaaaggatgtgaggacatctaggtgaagcaccatgttggttatacttcacttttctgacttctcagagacattagt

SEQ ID NO: 545225 - DNA, 571 bp, Homo sapiens
taaaaaagcaaagaggaatgagatattgcctctacattccagaaactcacaatctagtccaaggaggccaaaacgtagacaaataaggtgagcagtcccccagactgggactacagagctaggtggaatcttagatatgtttttatttttctggatcttgatttctaccaagtataaagggattttcattgatgtggaggaaagtgtgcaaatgttgaaattcctagcctctctcatgatgaaatgtccataagattataatcaaaggctcaagaaagagaatttgctcacaaggaatgtccataattttcatttctcattttcttgaaaaaagyaatagtttggtaagtagtgggctgtttaaacttggctcattgcccagtggtgtctttatcaattcaggttcccagttccttcccgaatgctccttacatttctatagctctggccattggcataggcagggcaccagggtgagatatttctctgtccccacatctcaggttgatgagtgatgcaagccccattgtatatgaaaagcggactattttcttcctttcctgaatgccag

SEQ ID NO: 545226 - DNA, 618 bp, Homo sapiens
cactcttcacatcctcattctctcacacatacacaagcacacacacacacacacacacacacacacayatcatgactataccctgcatatagaccatacttatttcccagggatcataattcaacattgaaaaattgcctgaggccacacacaatcctagcctagaatcaccaaaaaaaaaaaaattttaagtctaaaaagtttatggggaaataaaattctatttgcctatttttagctcccccgaggttaaatatggccttattccatgctcaagcagcttctgggattatgtaactccaacagctctgatgtctgacgtcagtgccttctctaccctcagtgacggaagtgcaacaccctttcatccaccaccagcagcagcaggtgttctaggcaaagggatatttactgctgtggtgaagggatggagtggaataaatgtggggaagtggtgccctcagccagtgagatgagtctccttgacaccaaaaaccctgcttggtaaggactgaggcccagaccaacatctgaaaaatgatcctatcttgccatatgctccttctgaaactctcttgatgggagacaagtgtttggggaaaagggctgggactccag

SEQ ID NO: 545227 - DNA, 305 bp, Homo sapiens
acaccgcaggccctgacagcggaaacgccgagagagaaggcgggtcctcgcgtcacttccgggaagcgccgactaactacactgggagactacaactcccagtggccttcgcgccayaagggggcggggacaagcctgagggaaccgggcgctgagaccttggctgcaggcgtcgcgaatcctaccgcgcgttggtgtcgggatttaaaacacgaagatcggcggggcgcagtggctcacgcgtgtaattacagcattaataggcattaataatatagaagtagataatcctgccgggtgcggtg

SEQ ID NO: 545228 - DNA, 305 bp, Homo sapiens
acaccgcaggccctgacagcggaaacgccgagagagaaggcgggtcctcgcgtcacttccgggaagcgccgactaactacactgggagactacaactcccagtggccttcgcgccacaagggggcggggacaagcctgagggaaccgggcgctgagaccttggctgcaggcgtcgcgaatcctaccgcgcgttggtgtcgggatttaaaacacgaagatcggcggggcgcagtggctcacgcgtgtaattacagcattaataggcattaatartatagaagtagataatcctgccgggtgcggtg

SEQ ID NO: 545229 - DNA, 585 bp, Homo sapiens
tttcatgtgccactattgcaaacctcttgctgttgcctcttccctgcttctttttacctggtaaacttatattctgattttagattgtattctctactttaaaagcagaacctaaaattttgggaaaagaaagagagaaagggagagaagaagagaggtggagatatttattgtcttggttggggtcagaagtaatgtttgccaggcattgttctaattgctttataaccattagtactgyccctagtcactgccaagaggagcttgataagttatgcttatttataaaaacacattgatgtagatatgtccatgaggaactgttaaataaaaaatacatagaattgaaaaaaaccacattgatacctctgccacttgggatttgatgtttagggctggcacagtacaatctgtgactctaaacattttctccatcattaatactattcaggacctaggaaatgcttctccacagcttttgctctctctcctcaaatctagacatgactatatctgaatactgtaaaggtttgtgtattgtgcctttgctgatatcagatgcacctatttcatggttcagagagg

SEQ ID NO: 545230 - DNA, 557 bp, Homo sapiens
ttaactgtgttgttcttcctagggtttttctcataagctagtgctttccttagccaggagggttaggggaaagggctggggatttctgaagatattggtattgtttttttatcggcatgtttcctagaaacatcttgcagccatatccactatactgtctccttcatgccaggctggcacagggaaagctacatggttatctagcaaagcttcattgaggaggtggggcagactgtgcctytattctagggctcctagatatgtctgcagcttctactcccatccctttccccattgtcactaaccctatgtgaggaatgagtatttgttccttttcagatacccacattattgtcttattctaatgtttttctgacttccatttcttttcctgcctaaggaaattttattccttcagggtgaggaggggagaggaaggcttctactgtcatcattcttcacaaatttaaagttttgagaataacttttcactattgatatttttgagattcaaatttcctttatcccaacccatttctctgtcatacttttaaaag

SEQ ID NO: 545231 - DNA, 628 bp, Homo sapiens
tccagtccaaccctttattttcagccctagaaagctcaggaaagggttatcaggtttagtgtccccctctcttttttatataagatctaagagaggtgagattcttagtctgacggtgtagccaccactcagcagaagggggctggtgccaagccctacatgaagccaaggtggggaccttgaatgagagctgaagactctaatgattccaagacatcaaagaccccactgaactctcagcactgggtgtcacttctcagggtggtggttgaggcaccccttcaatttcttctcatgagtcccagggtgctttgaggtgtcaaattcacagtagcggaagggagtggctcaggcctgcaagacttcatatgataatcctaaaagttaactgataaaaccccaaacaccagaagacaggaggcckcactgccagtacctcctgtcaccatagtaagcccaaggaagggctgacagaatgcagtctgaaactcactgtaggggttctgtggttcttctctggtgtctcaggggaaaggataaccaggacgacaggagccttgtggctttctagaacagtgccttcagggaaacttgcaaaggcaggcttccttcagtaaagctaagatgg

SEQ ID NO: 545232 - DNA, 601 bp, Homo sapiens
gcttgcagaaaaattgagcttctcctcttccttgccccatgtcaccttgaggtgaccacagccctgccttctatgtaatcctgcttggtcagcaggcacatcagagctcagtggcttgtgacatactttccttcaagcctgctcgaagggccatactcatcattgagactgggaaccttagaaaccatgaacccagtgccaatgggtagatacagaattctcaaactcatgaaaaaacatcctttttaactctctccgtgtgcataaagaattctaagatgtactkatcaagattcccaattttctaactatctattaatatatggacgaggtaagaagaaagttgcaagaaaaaaatttgtttgacttgacggttgtgtggttatttgccacactcccccagatccactctgagtcccaggatgctgattttaggggctacattgcctagactgtccattattccctcttcccatctggttcagtcactgggaagcactggtaggaggtcagagtgggagaaggaggttaggatactttctgcccctgctgtcctactgctttgctgaacttctagcagtggctgagccatcaacctgca

SEQ ID NO: 545233 - DNA, 601 bp, Homo sapiens
gcttgcagaaaaattgagcttctcctcttccttgccccatgtcaccttgaggtgaccacagccctgccttctatgtaatcctgcttggtcagcaggcacatcagagctcagtggcttgtgacatactttccttcaagcctgctcgaagggccatactcatcattgagactgggaaccttagaaaccatgaacccagtgccaatgggtagatacagaattctcaaactcatgaaaaaacatcctttttaactctctccgtgtgcataaagaattctaagatgtactgatcaagattcccaattttctaactatctattaatatatggaygaggtaagaagaaagttgcaagaaaaaaatttgtttgacttgacggttgtgtggttatttgccacactcccccagatccactctgagtcccaggatgctgattttaggggctacattgcctagactgtccattattccctcttcccatctggttcagtcactgggaagcactggtaggaggtcagagtgggagaaggaggttaggatactttctgcccctgctgtcctactgctttgctgaacttctagcagtggctgagccatcaacctgca

SEQ ID NO: 545234 - DNA, 601 bp, Homo sapiens
gcttgcagaaaaattgagcttctcctcttccttgccccatgtcaccttgaggtgaccacagccctgccttctatgtaatcctgcttggtcagcaggcacatcagagctcagtggcttgtgacatactttccttcaagcctgctcgaagggccatactcatcattgagactgggaaccttagaaaccatgaacccagtgccaatgggtagatacagaattctcaaactcatgaaaaaacatcctttttaactctctccgtgtgcataaagaattctaagatgtactgatcaagattcccaattttctaactatctattaatatatggacgaggtaagaagaaagttgcaagaaaaaaatttgtttgacttgacggttgtgtggttatttgccacactcccccagatccactctgagtcccaggatgctgattttaggggctacattgcctagactgtccattrttccctcttcccatctggttcagtcactgggaagcactggtaggaggtcagagtgggagaaggaggttaggatactttctgcccctgctgtcctactgctttgctgaacttctagcagtggctgagccatcaacctgca

SEQ ID NO: 545235 - DNA, 608 bp, Homo sapiens
aaaaattatagggaaaagtgtcactaattcaagggaattgcactgaaaattattcattcattcaacagatatttattgagaagcaagtatgctggtgctagggttacaacagcgcacaaattcttgtattcaaggaatgaggtaagagtatgcagataggagccagagaggtcaagaggcaattgcaacatagagtgacacgtgctccagaacacataggagggcttccaggccccatgctgggctatcagagctggcttcctgcaggtggtgtggctcagctaaaacctgagaaccaagaatgagccttctgatatctcagggttaaatcggcacaaatgaaaccattttataaccaaacaacattttccctcctgaactgcactttttctagaacccatttaatccttcctaacatgttcaatccagccccgtgatttttcagtcaaatgcaagatgcgtaggattccttttctgttcagtgctccccagccaatctttttcccttctcccaccccacagttactaattccagcgtttcagttctcagcagaggatgacagttccaccaggagacatcagtgttayctggagacattttagttgtc

SEQ ID NO: 545236 - DNA, 578 bp, Homo sapiens
ggagacctctattaggatgcagtcactggggactaccattaggacgcggtcgctggggaccaccgtcaggacttggtcactggagaccaccgtcaggatgcagtcactggagttactgggggaccaccgtcaggatgcagtcagtagggggccactgtcaggatatggtcactggaatcaccgatgaccactgtcaggatgtggtcactagaggaccactgtcaggatgcggtcactaggggaccactgtcaggatgcggtcactggagtcactggggaccactgtcaggatgcggtcactggagtcaccggggaccactgtcaggatgcggtcactggagtcaccggggaccactgtcaggatgcggtcactggagtcactggggaccactgtcaggatgtggtcactggagtcactggagtcaccgatgaccactgtcaggatgtggtcactagaggaccactgtcargatgcggtcactaagggaccactgtcaagatgcggtccctggatctctgggggaccactgtcaggatgcggtcactggatcaccggggaccactgtcagatcactggg

SEQ ID NO: 545237 - DNA, 578 bp, Homo sapiens
ggagacctctattaggatgcagtcactggggactaccattaggacgcggtcgctggggaccaccgtcaggacttggtcactggagaccaccgtcaggatgcagtcactggagttactgggggaccaccgtcaggatgcagtcagtagggggccactgtcaggatatggtcactggaatcaccgatgaccactgtcaggatgtggtcactagaggaccactgtcaggatgcggtcactaggggaccactgtcaggatgcggtcactggagtcactggggaccactgtcaggatgcggtcactggagtcaccggggaccactgtcaggatgcggtcactggagtcaccggggaccactgtcaggatgcggtcactggagtcactggggaccactgtcaggatgtggtcactggagtcactggagtcaccgatgaccactgtcaggatgtggtcactagaggaccactgtcaagatgcggtcactargggaccactgtcaagatgcggtccctggatctctgggggaccactgtcaggatgcggtcactggatcaccggggaccactgtcagatcactggg

SEQ ID NO: 545238 - DNA, 578 bp, Homo sapiens
ggagacctctattaggatgcagtcactggggactaccattaggacgcggtcgctggggaccaccgtcaggacttggtcactggagaccaccgtcaggatgcagtcactggagttactgggggaccaccgtcaggatgcagtcagtagggggccactgtcaggatatggtcactggaatcaccgatgaccactgtcaggatgtggtcactagaggaccactgtcaggatgcggtcactaggggaccactgtcaggatgcggtcactggagtcactggggaccactgtcaggatgcggtcactggagtcaccggggaccactgtcaggatgcggtcactggagtcaccggggaccactgtcaggatgcggtcactggagtcactggggaccactgtcaggatgtggtcactggagtcactggagtcaccgatgaccactgtcaggatgtggtcactagaggaccactgtcaagatgcggtcactaagggaccactgtcargatgcggtccctggatctctgggggaccactgtcaggatgcggtcactggatcaccggggaccactgtcagatcactggg

SEQ ID NO: 545239 - DNA, 578 bp, Homo sapiens
ggagacctctattaggatgcagtcactggggactaccattaggacgcggtcgctggggaccaccgtcaggacttggtcactggagaccaccgtcaggatgcagtcactggagttactgggggaccaccgtcaggatgcagtcagtagggggccactgtcaggatatggtcactggaatcaccgatgaccactgtcaggatgtggtcactagaggaccactgtcaggatgcggtcactaggggaccactgtcaggatgcggtcactggagtcactggggaccactgtcaggatgcggtcactggagtcaccggggaccactgtcaggatgcggtcactggagtcaccggggaccactgtcaggatgcggtcactggagtcactggggaccactgtcaggatgtggtcactggagtcactggagtcaccgatgaccactgtcaggatgtggtcactagaggaccactgtcaagatgcggtcactaagggaccactgtcaagatgcggtcmctggatctctgggggaccactgtcaggatgcggtcactggatcaccggggaccactgtcagatcactggg

SEQ ID NO: 545240 - DNA, 598 bp, Homo sapiens
ctggcagaggaaggtgccaagggcctacragggggagacacacagttacaggggtgagttaaggtgctgtgaggtgacagagtaacaaagataataaattataccagcagccactgtttgctgaacactcaatacattaattttctcaagaaaatatggagctttttgtccaaggtcacctgaccaagaagagagagagtcaggaacggaaccaaagccacagtcattccagagcttaggctcctaaccactggctggcatcaggagctgccagccgtatgctggcccatcccatagatgctggccacatggagccgctgaacacttgaagcatggctggtctggattgaggtatcctagacgtgtgacaggcataccagactttcagactcagtctagaaaaatatgtaaaatatttcattatttatatttaatactgatttcagattgaaatgatatattgggttaaataagagacatttaaaagtaaatttcacttatttcttaactttttaacattactacaaaatttaaactgacacgtcctgttacatttctatttgacaaggctaacctaggcctcaagtgcaggttaaca

SEQ ID NO: 545241 - DNA, 588 bp, Homo sapiens
gcgcacaattacctactggggaacacacattcaaatgacagatttctcatctgaaaccattgaagccgaaaggacattgcacaatatttttcaactgcagayagaaaaatctgtcaacctcaagttctatatcctgtggaactatctttcaggaattaagagaaaatgtagacattgtcagacaaagaaaaacaaataatttgttgttaacagactaactcttaaagattgcctaaaggatgttcatcaaattgaaataaaatgaaaaataaaaaaacccttgccacatcagaaagaggtaacaatggacagagcagaaatatggctacatacaatagacatacaattattttcatacatacaattattttcctcataagttttataaatcatattaaatgatcaaaacaaacattataaaaccatttgatactcaagacacgatgtttaaaattgaggaaggtaaagagatctaattggaaatgaggttttgacacttaacttgaaatggtaaactattgatacccttagactgttttaagtcatatgtgatattgtgatttctaataagagaaacaactatgaaaa

SEQ ID NO: 545242 - DNA, 466 bp, Homo sapiens
tttcttgtttaaccccacagtaatattccagctcccaagagtttatataataaccaagtcataaaatgtagaataatttcaactttcttttactcgatacccctgtatgcattagtcacatagtgatatttctttaccagaaagagacttgagaaaatgttgtcatttgtttcataaactttgctcagaacttcggtgcttcagagagctatctctcctattctgcatgtacaatcgcatttctatcaggatgacrtttttgctcaaatgttgctaaacactttgggggtaaatataaaaataatatccatgaaatgttttatatttccactcttcctatgatgttatctcatttgattgtcacgaccactcactgagctattcttttacccattttagagatgagaaaactgaagttcagagaaagttaattgacttgtccaattaatgccaagttgtcaaagca

SEQ ID NO: 545243 - DNA, 643 bp, Homo sapiens
gtactggtacagaatagaagaagcaattttttaagaaaaatttcccaaactgacaaactagcaaaccatagaggcaagaaactctatgaacctcaagtaggaataatacaaaaactgaacaaacaaacttcctaggcacatcatggtagagcttctaaaatctaacggcaatgagaaagttttaaaagcagccacaggaaaaattaggtttaccttcaaaaaaacaacaataagaattattgatgacttctcaacagtaacaatgaaagtcaaaagacaatggaataacatcttggaagtgctaaaacaaattcccattgacaaaatacttttagactttctttgaccaaatttccatccctgtggagggtwgggcactacagaatgaaagttttccaaagaaaacaggggctaggaacagtataagaaatagaaaagaaatatgtagggcaaacagaaataggcattatctatgtactgatttaatcctcacaaatttctatggaaggcagagaggtagtttgccaaagggcattcagtgagctgtcaagatgggactcatatccagatctaacttccaactcattcccttaacctttatttcccgtagaatgcctttaagaaagaagaaagctagcagtca

SEQ ID NO: 545244 - DNA, 467 bp, Homo sapiens
tccaagtacttgtgccttggatggtgattcctcttggccaccttctcacaaaaacctgcagattagaaaaagacccattagctttccctgccttgaagtcaaaaacctgctcttccttagccctgcaagaaagagatgaatgctgagcagtggaaattacaggggtggtttaatgatgaacttgctccgggttaagactggatagcaatcatttcctctaggtttctgcggacgactccacaaatggagaatatctatcataggcagaggcatgtggaatgacaacgtgcttgtgcgataatgattttccttcctgtttatcacaaagaagatgatcaatcaaggtgggaacactcaagtsgggcccgtcagagagggtttgccatcaaagagagcaatcagacaaactgctaacagacctggccaggagctagggcctcctttgtgtggatctggttatctgttca

SEQ ID NO: 545245 - DNA, 474 bp, Homo sapiens
tgggagttgggccagaagctggggttcaggactccccacgacctatgagggtggacttcagatggaaggttctgaggtgatcttgtgagccaggcagaccacccaaaagctctaccctgcaccacttaaccccccagacctcaaggaagccagcccctgcccctcctccagccaagccagcctcttggcagacacacagatggctctgaattaacaagagccaaaattaactttccaggaaaatgyttccaccttccgaaaaggacactgagaaaatattgcatatagcaaagggtttcaaacttttttaaagcaggtgattctgtcactgaacaaacatgctcatcatttaatgatttggcaatcagagtttcaaaaaaagtatttgactagagcatagtgagtgcacaaagatgcatttttagattaatgtatatgtaaaaaaaaataaagtcctgctgctcatgaaaattg

SEQ ID NO: 545246 - DNA, 604 bp, Homo sapiens
gagcaaaccctccacacaacacactcccttccaaaccttggaactcaaccccctccatgttcccctgctaccctgcaagatgccaaaacagcttcaaggaagtctgctgagaattgctcatcatttttacacttggttggataaagcccagagcagaaaacaaaacagagacccaaatccccttttgaaagccccacagtaaccagagatcaggtccaaagacagaatccagcctttctgtgctgctgtatgcccaggaagctcgggtgggctgttttcggccatccatcaagcacagactggaattataatgtagagtgttggctccttctcccccakgttgagcagcaaaggtctttccttccgcaaattatgcccctttcttccaatgctatcttcctgcttcctattggttagaaggcaacagcatcttgcacaataaaattcaattttagcaatttctccgctgcctcccagaaagggatgaaaattctcagtatgagggcagcttttctttatcggctcctgctttggaagatgacaacaccattctttagatttcttaaggaaatagagcagagccaaagtaggctgtggcatccag

SEQ ID NO: 545247 - DNA, 521 bp, Homo sapiens
atcagctagtcctgtctgttctacctgcagaatgtatcttcratcagagcacttcttcctacatccaacgcaagcactaccaagccaccattgcttcttaccccactactgacatagctgacataaactcctccacttccctgctttcacccacactccctactgcccatgctcaatactacagagagatcttttcaaaacataaatctgatcttatcacttcccttctccacactctcctctcctagctccagtgctttcccttcacacttagaaaaagaatcctaaatcctctccaactcagttcttttcctccattctccccccttgcatatagaactgtaattatcctttagccagcatcctaagtatattttatatccttcttggttacactaatgtaattccatcctacaatccaccagatttctcttctaatctgtattacccattaaacaataataactacagttactatttgttgagtgctgactgtgtgctatttctcttgcttgatcagc

SEQ ID NO: 545248 - DNA, 573 bp, Homo sapiens
aaccaaacttaaacgaaactaagggtaggaaaaattagatacaatgtattaatacaaaatccaagccctgaagtcctgagctcctcccctcaaagtagtgactatttttttaaatgtcaaacctgcacaacacccacatatattgatttatcaactgtgaactttttgccacatttgctttatccagacatctcagtattgtaaagtcataactgactaggaaaaagcaaatgtaaattaccaaaaacattcacattgtctctagcctgtgatcctttgttcttctctagttggagttaccaatgctgctgttaaaaagagtgtgagggccaggcacagtggctcacgcctgtartctcagcactttgggaggccgaggcgggtggatcacctgaggtcagcagtttgagaccagcctggccaacatggtgaaaccccgtctctactaaaaatacaaaaattcgccgagtgtggtggcaggtgcctgtaatcccagctacttgggaggctttggcaggagaaccactggaacccaggaggtggaggttgcagtgagccgagatcgcgccattg

SEQ ID NO: 545249 - DNA, 539 bp, Homo sapiens
tgggcaacaagagcgaaactctgtctccaaaaaaaaagtgcatggacaaaaacagaagccatgtctcaaggtgtagatcactttctttgtgaaattgaccacaactaaatgcaatatgataccacggattggatcctggaacagaaaagggacatgaytggaaaaactagtgaaatctgaatgaagtctggagtttagttgattgtcattggcctgatgttaatttcttagttgacgactgtgccagtcatatcagatgttaactctggggacatagggtgaagaggccatggaaactctgtactgtctttgcagcttttctttaaatctaaaattattccaaaataacaagtttatattttaagaaaaaatgtattgagaaattctaaagtttaaaaacatacaagatacatctcttctctgtaggcactggatttcattcacagtgaaattcactggcgggaaatttttaaataaacttcagtatttaatatttgcactgctgccactaggtggcaacagatgccaccgtatgctct

SEQ ID NO: 545250 - DNA, 477 bp, Homo sapiens
agtgttagtgtcttcctaatacaaccaggtctcttcaattaaagatgaggtcttcaaggtgaagagagtttggcttctgtttggggtatgtcctattctggccacatccccactcttagggtgacttcatttgcacttcaaggtgttgcccagggccctctcatgcacaacatgtggcaacaggattgagcctatcacaggccattgctttatccatgaaacagccttccagagcagtgcttcctttggcctggttgatatttagggtctgtgaagtctgggtgtctagcctctggatgctggggtggggcaaggaggcctgggcagcaggcacagtgtctgagacgttacaagatgccatctagtcataactgtctttgctattgccttgaatgggcctgacactgggagatgaytgtcaagtgttgtgctgcaggggagactcttggttcaacacgtacacttgaaagaaagctt

SEQ ID NO: 545251 - DNA, 527 bp, Homo sapiens
ctgggtcacagtcctctctcaggtgtgacttttgcaggtattttctcccaatccgtggcttgtcttctttgttggtattttagatccagtcccgctcaccctcccgtactttggttcccccttcagcctgggcaggctcacatttctttgtattttttctatattttccagctcattcagaccaataagctgaagcactaccccagcatccacggagacttcagcaacgactttagacagccctgtgtggtgttcaccgggcacccttccctccgcttcggggacgtggtccacttcatggagctctggggaaaatctagtctcaataccgtcatattcacgggtaagtgaaaaaaataaagaaacaaattggttctctccactgaggccatgagtgaatgcacctacaaggtagagacccagggaaggattttgcagtgagacataaatacaaacattrttctactgtaggtaccaaagaatgaagaaaccgcagagaaagagtgaagcagtgtgtgccattggac

SEQ ID NO: 545252 - DNA, 574 bp, Homo sapiens
gggttggccagccttgccttgaccaatagccttgacaaggcaaacttgaccaatagtcttagagtatccagtgaggccaggggccggcggctggctagggatgaagaataaaaggaagcacccttcagcagttccacacactcgcttctggaacgtctgagrttatcaataagctcctagtccagacgccatgggtcatttcacagaggaggacaaggctactatcacaagcctgtggggcaaggtgaatgtggaagatgctggaggagaaaccctgggaaggtaggctctggtgaccaggacaagggagggaaggaaggaccctgtgcctggcaaaagtccaggtcgcttctcaggatttgtggcaccttctgactgtcaaactgttcttgtcaatctcacaggctcctggttgtctacccatggacccagaggttctttgacagctttggcaacctgtcctctgcctctgccatcatgggcaaccccaaagtcaaggcacatggcaagaaggtgctgacttccttgggagatgccataaagcacctggatgatctcaagggcacctttgccc

SEQ ID NO: 545253 - DNA, 614 bp, Homo sapiens
caaatatctgtctgaaacggttcctggctaaactccacccatgggttggccagccttgccttgaccaatagccttgacaaggcaaacttgaccaatagtcttagagtatccagtgaggccaggggccggcggctggctagggatgaagaataaaaggaagcacccttcagcagttccacacactcgcttctggaacgtctgaggttatcaataagctcctagtccagacgccatgggtcatttcacagaggaggacaaggctactatcacaagcctgtggggcaaggtgaatgtggaagatgctggaggagaaaccctgggaaggtaggctctggtgaccaggacaagggagggaaggaaggaccctgtgcctggcaaaagtccaggtygcttctcaggatttgtggcaccttctgactgtcaaactgttcttgtcaatctcacaggctcctggttgtctacccatggacccagaggttctttgacagctttggcaacctgtcctctgcctctgccatcatgggcaaccccaaagtcaaggcacatggcaagaaggtgctgacttccttgggagatgccataaagcacctggatgatctcaagggcacctttgc

SEQ ID NO: 545254 - DNA, 608 bp, Homo sapiens
tctgtctgaaacggtccctggctaaactccacccatgggttggccagccttgccttgaccaatagccttgacaaggcaaacttgaccaatagtcttagagtatccagtgaggccaggggccggcggctggctagggatgaagaataaaaggaagcacccttcagcagttccacacactcgcttctggaacgtctgagrttatcaataagctcctagtccagacgccatgggtcatttcacagaggaggacaaggctactatcacaagcctgtggggcaaggtgaatgtggaagatgctggaggagaaaccctgggaaggtaggctctggtgaccaggacaagggagggaaggaaggaccctgtgcctggcaaaagtccaggtcgcttctcaggatttgtggcaccttctgactgtcaaactgttcttgtcaatctcacaggctcctggttgtctacccatggacccagaggttctttgacagctttggcaacctgtcctctgcctctgccatcatgggcaaccccaaagtcaaggcacatggcaagaaggtgctgacttccttgggagatgccataaagcacctggatgatctcaagggcacctttgc

SEQ ID NO: 545255 - DNA, 606 bp, Homo sapiens
taaaaaactccagttgacacaaaatagactacgaaagtggctttaacatatctgaacacacaatagctaagacccaaactgggattagataccccactatgcttagccctaaacctcaacagttaaatcaacaaaactgctcgccagaacactacgagccacagcttaaaactcaaaggacctggcggtgcttcatatccctctagaggagcctgttctgtaatcgataaaccccgatcaacctcaccacctcttgctcagcctatataccgccatcttcagcaaaccctgatgaaggctacaaagtaagcgcaagtacccacgtaaagacgttaggtcaaggtgtagcccatgaggtggcaagaaatgggctacattttctaccccagaaaactacgatagcccttatgaaacttaagggtcgaaggtggatttagcagtaaactragagtagagtgcttagttgaacagggccctgaagcgcgtacacaccgcccgtcaccctcctcaagtatacttcaaaggacatttaactaaaacccctacgcatttatatagaggagacaagtcgtaacatggtaagtgtactggaaagtgcacttggac

SEQ ID NO: 545256 - DNA, 647 bp, Homo sapiens
acttactaaagtgtgttaattaattaatgcttgtaggacatartaataacaattgaatgtctgcacagccactttccacacagacatcataacaaaaaatttccaccaaaccccccctcccccgcttctggccacagcacttaaacacatctctgccaaaccccaaaaacaaagaaccctaacaccagcctaaccagatttcaaattttatcttttggcggtatgcacttttaacagtcaccccccaactaacacattattttcccctcccactcccatactactaatctcatcaatacaacccccgcccatcctacccagcacacacacaccgctgctaaccccataccccgaaccaaccaaaccccaaagacaccccccacagtttatgtagcttacctcctcaaagcaatacactgaaaatgtttagacgggctcacatcaccccataaacaaataggtttggtcctagcctttctattagctcttagtaagattacacatgcaagcatccccgttccagtgagttcaccctctaaatcaccacgatcaaaaggaacaagcatcaagcacgcagcaatgcagctcaaaacgcttagcctagccacacccccacgggaaacagcagtgattaacctttagcaata

SEQ ID NO: 545257 - DNA, 647 bp, Homo sapiens
acttactaaagtgtgttaattaattaatgcttgtaggacataataataacaattgaatgtctgcacagccrctttccacacagacatcataacaaaaaatttccaccaaaccccccctcccccgcttctggccacagcacttaaacacatctctgccaaaccccaaaaacaaagaaccctaacaccagcctaaccagatttcaaattttatcttttggcggtatgcacttttaacagtcaccccccaactaacacattattttcccctcccactcccatactactaatctcatcaatacaacccccgcccatcctacccagcacacacacaccgctgctaaccccataccccgaaccaaccaaaccccaaagacaccccccacagtttatgtagcttacctcctcaaagcaatacactgaaaatgtttagacgggctcacatcaccccataaacaaataggtttggtcctagcctttctattagctcttagtaagattacacatgcaagcatccccgttccagtgagttcaccctctaaatcaccacgatcaaaaggaacaagcatcaagcacgcagcaatgcagctcaaaacgcttagcctagccacacccccacgggaaacagcagtgattaacctttagcaata

SEQ ID NO: 545258 - DNA, 647 bp, Homo sapiens
acttactaaagtgtgttaattaattaatgcttgtaggacataataataacaattgaatgtctgcacagccactttccacacagacatcataacaaaaaatttccaccaaaccccccctcccccgcttctggccacagcacttaaacacatctctgccaaaccccaaaaacaaagaaccctaacaccagcctaaccagatttcaaattttatcttttggcggtatgcacttttaacagtcaccccccaactaacacattattttcccctcccactcccatactactaatctcatcaatacaacccccgcccatcctacccagcacacacacaccgctgctaaccccataccccgaaccaaccaaaccccaaagacaccccccacagtttatgtagcttacctcctcaaagcaatacactgaaaatgtttagacgggctcacatcaccccataaacaaataggtttggtcctrgcctttctattagctcttagtaagattacacatgcaagcatccccgttccagtgagttcaccctctaaatcaccacgatcaaaaggaacaagcatcaagcacgcagcaatgcagctcaaaacgcttagcctagccacacccccacgggaaacagcagtgattaacctttagcaata

SEQ ID NO: 545259 - DNA, 611 bp, Homo sapiens
aacatacttactaaagtgtgttaattaattaatgcttgtaggacataataataacaattgaatgtctgcacagccactttccacacagacatcataacaaaaaatttccaccaaaccccccctcccccgcttctggccacagcacttaaacacatctctgccaaaccccaaaaacaaagaaccctaacaccagcctaaccagatttcaaattttatcttttggcggtatgcacttttaacagtcaccccccaactaacacattattttcccctcccactcccatactactaatctcatcaatacaacccccgcccatcctacccagcacacacacaccgctgctaaccccataccccgaaccaaccaaaccccaaagacaccccccacagtttatgtagcttacctcctcaaagcaatacactgaaaatgtttagacgggctcacatcaccccataaacaaataggtttggtcctagcctttctattagctcttagtaagattacacatgcaagcatccccgttccagtgagttcaccctctaaatcaccacgatcaaaaggracaagcatcaagcacgcagcaatgcagctcaaaacgcttagcctagcc

SEQ ID NO: 545260 - DNA, 414 bp, Homo sapiens
tccccctctattgatccccacctccaaatatctcatcaacaaccgactaatcaccacccaacaatgactaatcaaactaacctcaaaacaaatgataaccatacacaacactaaaggacgaacctgatctcttatactagtatccttaatcatttttattgccacaactaacctcctcggactcctgcctcactcatttacaccaaccacccaactatctataaacctagccatggccatccccttatgagcgggcrcagtgattataggctttcgctctaagattaaaaatgccctagcccacttcttaccacaaggcacacctacaccccttatccccatactagttattatcgaaaccatcagcctactcattcaaccaatagccctggccgtacgcctaaccgctaacat

SEQ ID NO: 545261 - DNA, 647 bp, Homo sapiens
acacaaactaggctgtcaaaattttgcctggatattttactaagtataaattatgaaatctgttttagtgaatacatgaaagtaatgtgtaacatataatctatttggttaaaataaaaaggaagtgcttcaaaacctttcttttctctaaaggagcttaacattcttccctgaacttcaattaaagctcttcaatttgttagccaagtccaatttttacagataaagcacaggtaaagctcaaagcctgtcttgatgactactaattccagattagtaagatatgaattactctacctatgtgtatgtgtagaagtccttaaatttcaaagatgacagtaatggccatgtgtatgtgtgtgacccacaactatcatggycattaaagtacattggccagagaccacatgaaataacaacaattacattctcatcatcttattttgacagtgaaaatgaagaagacagttcctccattgatcatctgtctctgaatcaggtaagcaaatgactgtaattctcatgggactgctattcttacacagtggtttcttcatccaaagagaacagcaatgacttgaatcttaaatacttttgttttaccctcactagagatccagagacctgtctttcattataagtgagac

SEQ ID NO: 545262 - DNA, 647 bp, Homo sapiens
acacaaactaggctgtcaaaattttgcctggatattttactaagtataaattatgaaatctgttttagtgaatacatgaaagtaatgtgtaacatataatctatttggttaaaataaaaaggaagtgcttcaaaacctttcttttctctaaaggagcttaacattcttccctgaacttcaattaaagctcttcaatttgttagccaagtccaatttttacagataaagcacaggtaaagctcaaagcctgtcttgatgactactaattccagattagtaagatatgaattactctacctatgtgtatgtgtagaagtccttaaatttcaaagatgacagtaatggccatgtgtatgtgtgtgacccacaactatcatggtcattaaagtacattggccagagaccacatgaaataacaacaattacattctcatcatcttattttgacagtgaaaatgaagaagacagttcctccattgatcatctgtctctgaatcaggtaagcaaatgactgtaattctcatgggactgctattcttacacagtggtttcttcatccaaagagaacagcaatgacttgaatcttaaatacttttgttttaccctcactagagrtccagagacctgtctttcattataagtgagac

SEQ ID NO: 545263 - DNA, 461 bp, Homo sapiens
gctcaccaaggtgagcgggcagcactggggcttcggtcatttctgtctaaattttgagcctcgaaggggttgttttgcacaagaggccctggattcactggggaagtgtaagtccctgaccgcaggcctggcttgctctaaccttgatgyagcttcctctcttccttcccctacgttgagctggcttgcagcaaggcctctctgtgctttttctgtgcctgggcaaagtgctgggagtgtaaggatgagtgaccggtcacgtgcctgggagaagctcagaatcggtactcgcctccacactgtgccatctggctctgggttctgagagtcagggagaggaatgagggtcagtctgtttgccttcgacctatgcagcctcctctcagggcccgagactgggcagcagcatggccccccgaaggtcgaggactcgggccgtgaagtcagcctgcctaggttga

SEQ ID NO: 545264 - DNA, 317 bp, Homo sapiens
ggcagcactggggcttcggtcatttctgtctaaattttgagcctcgaaggggttgttttgcacaagaggccctggattcactggggaagtgtaagtccctgaccgcaggcctggcttgctctaaccttgatgtagcttcctctcttccttcccctacgttgagctggcttgcagcaaggcctctctgtgctttttctgtgcctgggcaaagtgctgggartgtaaggatgagtgaccggtcacgtgcctgggagaagctcagaatcggtactcgcctccacactgtgccatctggctctgggttctgagagtcaggg

SEQ ID NO: 545265 - DNA, 410 bp, Homo sapiens
agctgtccaaagactgacctgtgtcataagtttatattatgaagaactctgaacatataaataaggagacagaaaaataacagtgtcccatgttctcatcacccagcactcaaaataagcaattcacagatgatgccgacccacccacagcaaaataaattctcccttacacaacatttagaaagaaatacaagacatcagatctgttcagctgtaagtactccattactgtcctggaatgacatggaccttaaaataactataatatcactaccaaacctaaatagwaattatcactaattccctaatatcgagaaataagcagggtctcctcaaatgcatcagaaacaccagaagtgctttggcttagttacatgttggtgctgttggtatttgggggtttaagttta

SEQ ID NO: 545266 - DNA, 604 bp, Homo sapiens
gggatctttctttgggtcattgttatgtccttattgaccagaataatgcctggcacayagtaggcactcaataaatacttgttgaatggaggaatctgcaaagctgctcagtcttcagacagcagcaagcagcaaggaagagaatcatgatgtaaccaagagcaggtgctggaggagctagggagtgagtggggatctttaaggacagcaggccctctgatctgtctgagctgtgaggcaaagcctagttagggaggtgagttctatctgcaatgagagggggcatgggtggagaacagtaacaccaaacaccaacagaccagagcctcccaaacccgaaaggagagaaacaaagtgtgattgatttcccaaatgcagaaaagactacccaagtccccagccaaggaaggaggctggcctgtggtgaagacactggctttgaaatggctcaacatcgtcccaagcaccctttgtgcatcttaattgccctgggaaacatgggaggggtggcagtttggagcttggaaagctggaaggtggggacgaaaggagtttttgcccctcatcgccaatccttgaggttcctacagggaacctcagacaa

SEQ ID NO: 545267 - DNA, 524 bp, Homo sapiens
tgaggcctggcctgggagatatttttgctgcactttgagccaccccgccccctggaactcagaccctgcacagtccatgccataacaatgacgaccacttccaattgtttcctagctcgagagagaggcggggaggggagcactgtttgggaagggggggagcctsggggggatgcttctagtgacaacagccctttctaaatccggctagggactgggtgccgttgggggtgggggtgcctgctgccccatatatacagcccctgagaccaggtctggctccacagctctgtcctgctctgtgtctttccctgctgctctcaggtaggagcgggagctggaggctttactctgggataaggggggctccaggcttaggaaagggattcctcttggaatagcaagcttcatgcaggacttcatgcagagtaccaggtccagtcactgggcacacatgtgcaggtctaaacatgggcgtatgtgccacaggagttcctaggggaagatatctgcatctgagcata

SEQ ID NO: 545268 - DNA, 651 bp, Homo sapiens
ctgtggaatgtgaggcctggcctgggagatatttttgctgcactttgagccaccccgccccctggaactcagaccctgcacagtccatgccataacaatgacgaccacttccaattgtttcctagctcgagagagaggcggggaggggagcactgtttgggaagggggggagcctcgggggratgcttctagtgacaacagccctttctaaatccggctagggactgggtgccgttgggggtgggggtgcctgctgccccatatatacagcccctgagaccaggtctggctccacagctctgtcctgctctgtgtctttccctgctgctctcaggtaggagcgggagctggaggctttactctgggataaggggggctccaggcttaggaaagggattcctcttggaatagcaagcttcatgcaggacttcatgcagagtaccaggtccagtcactgggcacacatgtgcaggtctaaacatgggcgtatgtgccacaggagttcctaggggaagatatctgcatctgagcatatgggaccaatatgcattacagggtgtgtgtgtgtgtgtgtgtgtgtgtgtgtggacaagcctgcatagtctgaatgtgagaaagggtatgtacctcactgactgatacagaaatatc

SEQ ID NO: 545269 - DNA, 432 bp, Homo sapiens
tgtgccctgccctcaggtggctgttccgggatggccttctgcccgaaaacaccttcatcrtgggctatgcccgttcccgcctcacagtggctgacatccgcaaacagagtgagcccttcttcaaggtgggtggtgtcagggcctcccccagcctggttctgccctctctaccagcccccagcatggccagcttcggggacctccccccatcccatcccgggatgctctcctcctctcctgccccgccccgcctgctctcgtacttcttgagacccccattaccagcccccgtgaccaggacccacaggtccctcctgctgtgctctgctgcgttttctccgccaatcatagttgggtgtcatgattttggagagagagctttctccagtgtatttctcccaggtcaaaatatcctgaaatctggcctctgtc

SEQ ID NO: 545270 - DNA, 444 bp, Homo sapiens
ctggccttgcatggtgcctgtagggggatttgctttgctgtgccattggggtacagctgctgctcttactctagaccaaaaagtcgggttgagtgactggtggcagggccaagatagagacagcggggagggtggctgaccctggcggccctggactgagcgtctggaggagtcgtggaggctctttcccttctttctcctctgagagctcgttcttcaggctcttccagcttgtcatgtcgagtgcctggccactgctcagggttggaggctcagtccctttgccctgtctgttccagctctggagctaactcagggatccctgatcagggttacrtaggtttggtaaaatgagtgctggaaattaactttctcccagtagtcttaggtctagctcagtgaacttaaactttatccagatatggtttttccttcagcctttct

SEQ ID NO: 545271 - DNA, 444 bp, Homo sapiens
ctggccttgcatggtgcctgtagggggatttgctttgctgtgccattggggtacagctgctgctcttactctagaccaaaaagtcgggttgagtgactggtggcagggccaagatagagacagcggggagggtggctgaccctggcggccctggactgagcgtctggaggagtcgtggaggctctttcccttctttctcctctgagagctcgttcttcaggctcttccagcttgtcatgtcgagtgcctggccactgctcagggttggaggctcagtccctttgccctgtctgttccagctctggagctaactcagggatccctgatcagggttacgtaggtttggtaaaatgagtgctggaaattaactttctcccagtagtcttaggtcwagctcagtgaacttaaactttatccagatatggtttttccttcagcctttct

SEQ ID NO: 545272 - DNA, 444 bp, Homo sapiens
ctggccttgcatggtgcctgtagggggatttgctttgctgtgccattggggtacagctgctgctcttactctagaccaaaaagtcgggttgagtgactggtggcagggccaagatagagacagcggggagggtggctgaccctggcggccctggactgagcgtctggaggagtcgtggaggctctttcccttctttctcctctgagagctcgttcttcaggctcttccagcttgtcatgtcgagtgcctggccactgctcagggttggaggctcagtccctttgccctgtctgttccagctctggagctaactcagggatccctgatcagggttacgtaggtttggtaaaatgagtgctggaaattaactttctcccagtagtcttaggtctwgctcagtgaacttaaactttatccagatatggtttttccttcagcctttct

SEQ ID NO: 545273 - DNA, 208 bp, Homo sapiens
tctgtaaacccagttgctaccctttggctgcatagaatctataaattctaacaaatggatgagaaccaagttaagaattctagagtgggataaggggatgtgatgtatkctattcagggatgaagttttagagactccaagtatgaaacagaaaattgaggatggggagacctgatgggtaccacattaagtttaaaaaaaaaaaagt

SEQ ID NO: 545274 - DNA, 607 bp, Homo sapiens
tgtgctaaacactttacaggcatcaacataagatgtgtccccttacagcagtgcagtgtccctcctaagacatggacagcctggtttccctatctctctgcttcatcaaaacccctttacgtggggcttagacactcctgttgtctctagtgtctagtagcacagggctcagcacatggaagccactagatacaatttgatgaccaggacctccgatgaaagccatgggtgctgattgggaaggcattgtcttttatgtgctatggtcttaaagcttcatccaggaagcagaactcggggggtgctgaggacccagaaccgagaataagattagtcagagatttcctgtgggcagaaatcataaggacgccaactgtttgggtgagataagacgaaaccaagagtggacttgtggccagaagcgtgaggaagagggagagagcttcccttgtcccctttcttcctctccctaagccacagtgattgacagcccccccsctttggagtcagagcaggcttgagactggactgggaaaggagggtgggtcaggatacagagcaggaaggctgggagtgcagggcaggagcaaggggctggggcattcat

SEQ ID NO: 545275 - DNA, 659 bp, Homo sapiens
cttgcaaccatctaaatggaacttcctcattcccctttatcccctgctaatcgtcctgtctttattcttttatctgaagaagtgtacccttcttcccccaagccttatgctctctrtcttagtccatttgtgttagtgtaacaagatacacgagatagggtaatttatgaagaacagaaatttatttctcacagttctggaagctagaagttcaaggtcatggccctggaagatttgatgccttggccatcgacttgaaaaaagtcactgaagtgaacttgtggttaccatgataccctgggttcattcttaacatgcacagtataggcaaatcaggggcacatttcatgctgaaagatgatgtgaaatgatgagtaaacattgccctttaaataataataacatagatggtgaattacaatttgcacttttggttttatttgcttaaagatagtgttttactgtctaggttttactgaaagaatacttaactaaacacttgagtcaaatcattccagtgtaacagtcctcacaaggaggaaggcagaagggcaaaagtgccaagctattgcctccagcccttctatttttattgattgactgattgattgattgagacagggcctcgttctgttacccatgctggagtacagtggtgc

SEQ ID NO: 545276 - DNA, 659 bp, Homo sapiens
cttgcaaccatctaaatggaacttcctcattcccctttatcccctgctaatcgtcctgtctttattcttttatctgaagaagtgtacccttcttcccccaagccttatgctctctgtcttagtccatttgtgttaktgtaacaagatacacgagatagggtaatttatgaagaacagaaatttatttctcacagttctggaagctagaagttcaaggtcatggccctggaagatttgatgccttggccatcgacttgaaaaaagtcactgaagtgaacttgtggttaccatgataccctgggttcattcttaacatgcacagtataggcaaatcaggggcacatttcatgctgaaagatgatgtgaaatgatgagtaaacattgccctttaaataataataacatagatggtgaattacaatttgcacttttggttttatttgcttaaagatagtgttttactgtctaggttttactgaaagaatacttaactaaacacttgagtcaaatcattccagtgtaacagtcctcacaaggaggaaggcagaagggcaaaagtgccaagctattgcctccagcccttctatttttattgattgactgattgattgattgagacagggcctcgttctgttacccatgctggagtacagtggtgc

SEQ ID NO: 545277 - DNA, 659 bp, Homo sapiens
cttgcaaccatctaaatggaacttcctcattcccctttatcccctgctaatcgtcctgtctttattcttttatctgaagaagtgtacccttcttcccccaagccttatgctctctgtcttagtccatttgtgttagtgtaacaagatacacgagatagggtaatttatgaagaacagaaatttatttctcacagttctggaagctagaagttcaaggtcatggccctggaagatttgatgccttggccatcgacttgaaaaaagtcactgaagtgaacttgtggttaccatgataccctgggttcattcttaacatgcacagtataggcaaatcagggscacatttcatgctgaaagatgatgtgaaatgatgagtaaacattgccctttaaataataataacatagatggtgaattacaatttgcacttttggttttatttgcttaaagatagtgttttactgtctaggttttactgaaagaatacttaactaaacacttgagtcaaatcattccagtgtaacagtcctcacaaggaggaaggcagaagggcaaaagtgccaagctattgcctccagcccttctatttttattgattgactgattgattgattgagacagggcctcgttctgttacccatgctggagtacagtggtgc

SEQ ID NO: 545278 - DNA, 516 bp, Homo sapiens
ctgctttctattaactacatgccactgataaaaagtaaagtgaggctgttttagtctgttttctgctgctgtgacagaatacctgagactggataatttacaaacaatagacgtttacttggctcrcagttctggaggccagaaagtccaatatcaaggtgccggcatcttgtaagggccttcttgctgtgtcatcccatggcagaaagtagaagtgcaaaagagtgtccatgagaaccagagagcaagaggaggctaatctttcttttagaactagcccactctcacaataactaacccattatcatggtaaccacattaatccatccatgagagaagagccctcatcatctaatcaccttttactaggccgcacctcccaacactgttacattggggattaagttttccacacatgaactccagggaacacattcaaaccatagcaaaggccaattctcaagggagcagatatgacaccagggattctaaaaatcttgtacatggcataaagaa

SEQ ID NO: 545279 - DNA, 417 bp, Homo sapiens
ggaaagtctgaagtccctgaagacctggccggcttcatcgagctcttccagacaccaagtcacactaaggaatcaatgactaaygaaaaaactaccaaagtatcctacagagcttcacagccagacctagtggacaccccaacaagctccaagccacagcccaagagaagtctcaggaaagcagacactgaagaagaatttttagcatttaggaaacaaacgccatcagcaggcaaagccatgcacacacccaaaccagcagtaggtgaagagaaagacatcaacacgtttttgggaactccagtgcagaaactggaccagccaggaaatttacctggcagcaatagacggctacaaactcgtaaggaaaaggcccaggctctagaagaactgactggcttcagagagcttttccag

SEQ ID NO: 545280 - DNA, 643 bp, Homo sapiens
tgtctaagttcactgttctgaactttattttttaaattaaaaatatatggctatgtagtattctattttatggaagttccatatttcatttatcctgtttccttctactgatggctagttaggttattggaagtcttttgctgttgctagttagtcttgtatagacattgtaatgcacatgtgcaaaaatacaagtatgatacaatcttaaaggggagttgctgagtccaatatatacattacaaatattgatagatattgcaaaattgccttcatagaggctrtattaatttatagttccagcagcaacatatgagtttatctgtttctccatatatatatatatgtatataaccaacagacagtgttaatttttaaaattttgacaatcttctgggtgaaagtagcattgtattgtagttatcatttgctttttaatattatcatgtaagtaacagagatactaaacccagaaggataagggagcaaagatgagaaaaataaacacacacacaaacaacaataacaaatctgtctaaaatattggaaaatcagaatgagaaatgaaatatgactgtaacgataaaaatcagtaataaaaatgactattaaatttaaaaataaggcagagcaaccacaagtg

SEQ ID NO: 545281 - DNA, 507 bp, Homo sapiens
gctgaggtgatgcatggatgagattgactggaagaagaaacctgtagaaacagatcaggaaacaaagctccgttgtacacacgtccatagcaggcagcctgggttttcrtcccagtcttcttctgttttcaagggccatttccatactgcatgagaagccatgagactggtgggctctggactcctgtgccagagatcactcaccttccccatttcccccaagtgtcccaaatgccttgtatcatctgattttctatcttcctgctaaagcttttcccatactcctagtccttcaccctgcggtatcctccaagtccttacctgacttccactatggagtctccccatggttacttgcttgaaggaggcactgtttgagcacagcctctgaatgctacagactctctcttcagattttctaaattgtcattttaaagagataactgtttaaagagaaaaggcctaccttatatgtgtcatgaaaaattcatgtaaccggttacctaa

SEQ ID NO: 545282 - DNA, 575 bp, Homo sapiens
gcaggggtccacgtggcaaatctaataatcttcttctctatagaaaatcctctgctggctctctagtgcccaggatccagtcccagcatctcagcacggccttcaagcatttccacgtcctggcctggctccatggtctccccgccaatttgccaccttctccatgcatccttttctgatcccctcctcactcatcccagcaaagaaccccctcctggcctgagcatagcatttcgtggtgtgtatctcagagcatccagttaggggtgtgcaagtttactttgttactggctgatgttgtgaagtcccaagttgttggtgccgcaaacaaaaaattggacatgacacacacaaatagcaaagcagcaaaagtttattaagcacagtacgatccactatggatcaaggatgacctgcgaatggtatcagcatcactttgctatatttcatggccttttctatgtgttttttttctctttttcctcaagctgcctaagctttagccagcatgtgccttttgrttgacaggtgggttgcttagtttcttggcctctgtgtgtttacgtgtcatttcc

SEQ ID NO: 545283 - DNA, 327 bp, Homo sapiens
aactgtttcttcagacagtgttgctaaatttgcagttaaggctactggagaaccccggccaactgccatctggacaaaagatggaaaggtaaccagttcttraatgtctctttcttttatcttctaaaatattttatcttctaaattcagcttcccaaaaaaagcttaaaatgaaatcactttttaaaacacaaatcatttgcattctacaggccattacacaaggaggtaaatataaactctctgaagacaagggagggttcttcttagaaattcataagactgatacttctgacagtggactttatacttgtacagtaaaaaatt

SEQ ID NO: 545284 - DNA, 157 bp, Homo sapiens
aattaaccgctcattcatcgacctccccaccccatccaacatctccgcatgatgaaacttcggctcactccttggcrcctgcctgatcctccaaatcaccacaggactattcctagccatgcactactcaccagacgcctcaaccgccttttcatca

SEQ ID NO: 545285 - DNA, 116 bp, Homo sapiens
attctctgttctttcatggggaagcagatttgggtaccacccaagtattgactcacccatcaacaaccgctatgtatytcgtacattactgccagccaccatgaatattgtacggt

SEQ ID NO: 545286 - DNA, 411 bp, Homo sapiens
aatcaaccctcaactatcacacatcaactgcaactccaaagycacccctcacccattaggataccaacaaacctacccacccttaacagtacatagcacataaagccatttaccgtacatagcacattacagtcaaatcccttctcgtccccatggatgacccccctcagataggggtcccttggccaccatcctccgtgaaatcaatatcccgcacaagagtgctactctcctcgctccgggcccataacacttgggggtagctaaagtgaactgtatccgacatctggttcctacttcagggtcataaagcctaaatagcccacacgttccccttaaataagacatcacgatggatcacaggtctatcaccctattaaccactcacgggagctctccatgcatttggta

SEQ ID NO: 545287 - DNA, 411 bp, Homo sapiens
aatcaaccctcaactatcacacatcaactgcaactccaaagtcacccctcacccattaggataccaacaaacctacccacccttaacagtacatagcacataaagccatttaccgtacatagcacattacagtcaaatcccttctcgtccccatggatgacccccctcagataggggtcccttgrccaccatcctccgtgaaatcaatatcccgcacaagagtgctactctcctcgctccgggcccataacacttgggggtagctaaagtgaactgtatccgacatctggttcctacttcagggtcataaagcctaaatagcccacacgttccccttaaataagacatcacgatggatcacaggtctatcaccctattaaccactcacgggagctctccatgcatttggta

SEQ ID NO: 545288 - DNA, 347 bp, Homo sapiens
aggcctgcccccgctaaccggctttttgcccaaatgggccattatcgaagaattcacaaaaaacaatagcctcatcatccccaccatcatagccaccatcaccctccttaacctctacttctacctacgcctaatctactccacctcaatcacactactccccatatctaacaacgtaaaaataaaatgacagtttgaacatacaaaacccaccccattcctccccacactcatcgcccttaccacgctactcctacctatctcccctttyatactaataatcttatagaaatttaggttaaatacagaccaagagccttcaaagccctcagtaagttgcaatactt

SEQ ID NO: 545289 - DNA, 564 bp, Homo sapiens
ctttgtagctatatttggatactggtcatctaaacatttacaactttggtgaggtcattctgggcttttcactttaactcaacttttcaggaaatatgcagtgtagatgttgtccactactccaggggtgagctcttttcgtattaccccacaactcagggttcatagagtttcactgagagcatcaggtcttgtctttttcctattagttaaaactagtatttctgaatgatccaattgtaggatacatgcttgatgatgcagatagcagttcattagaaatcctagaaaacagtgaaacaacaccaagcaaagacatgaaaaaaacaaagaaggtaagtgaaaygaattgtcttttttgatccttttgaattcaattgtttgttttacttttcatatggcaatccacataatttaactctcttaatatgagttttcatggccccaaaacctgaagaatttcaggtgatgtcgcatatttttaatatactacctttcctttggttagcatttgaatgatgatcttcttttcatccttttactttagcttatgttttagatgtg

SEQ ID NO: 545290 - DNA, 475 bp, Homo sapiens
tattgggagcaaacagggcataagtcaccccatgatggaaaggccagratcccccttgttcctcacctcatgctgctcccctcctcctgcaagcctagggtcgcccagagcactaaaactaacctgaccatgagctacgtgggagatgcaaccaccacctccacctagtcccagagcatactcatcacccaaaagaagacccctgtccccattcagcagttagttcccctcccgcctccccagcccctgacaaccactatccactttctgtctccatgaattgtctgttctgcaaatttcatataaatagaattctacaatatgtggtattttgtgcctggcttctttcattgagcatgatgctcttgagttgcgttcacgttgcaacctgtgtcagagcttcattcctgctcatggccaggaaactttgaaggaagcctctctccaagcacatagacttctctcctggactgtc

SEQ ID NO: 545291 - DNA, 475 bp, Homo sapiens
tattgggagcaaacagggcataagtcaccccatgatggaaaggccaggatcccccttgttcctcacctcatgctgctcccctcctcctgcaagcctagggtcgcccagagcactaaaactaacctgaccatgagctacrtgggagatgcaaccaccacctccacctagtcccagagcatactcatcacccaaaagaagacccctgtccccattcagcagttagttcccctcccgcctccccagcccctgacaaccactatccactttctgtctccatgaattgtctgttctgcaaatttcatataaatagaattctacaatatgtggtattttgtgcctggcttctttcattgagcatgatgctcttgagttgcgttcacgttgcaacctgtgtcagagcttcattcctgctcatggccaggaaactttgaaggaagcctctctccaagcacatagacttctctcctggactgtc

SEQ ID NO: 545292 - DNA, 475 bp, Homo sapiens
tattgggagcaaacagggcataagtcaccccatgatggaaaggccaggatcccccttgttcctcacctcatgctgctcccctcctcctgcaagcctagggtcgcccagagcactaaaactaacctgaccatgagctacgtgggagatgcaaccaccacctccacctagtcccagagcatactcatcacccaaaagaagacccctgtccccattcagcagttagttcccctcccgcctccccagcccctgacaaccactatccactttctgtctccatgaattgtctgttctgcaaatttcwtataaatagaattctacaatatgtggtattttgtgcctggcttctttcattgagcatgatgctcttgagttgcgttcacgttgcaacctgtgtcagagcttcattcctgctcatggccaggaaactttgaaggaagcctctctccaagcacatagacttctctcctggactgtc

SEQ ID NO: 545293 - DNA, 639 bp, Homo sapiens
  misc_feature (1)...(639): n = A,T,C or G
tgcaccgtgggcgtggtgagcgaggatgtgcagcggaagggggagcttcggctgcggccagaggagggggtgtgggctgtgaggctggcttggggcttcgtctcggctctgggctccttccccacacggctgaccctgaaggagcagccccggcaggtgagggtgtctcttgactatgaggtgggctgggtgaccttcaccaacgctgtcacccgagagcccatctacaccttcactgcctccttcactaggaaggtcattcccttctttgggctctggggccgagggtccagtttctccctgagctcctgagaaggagcagttacctactctcctctaagtacaggactcatntcaacccnagtaccatgtggncttgatccctggctgaatcacctggatgactcggngatagaaatgactgctttagaagatgggatggggtcgggtggtaagggatagaagagaggactctcaatctactgatcaagtcctttccccaatgcccagtggatggccagggtacctggggactcaggctgctgccagttctgctcaccaccatccgtgcttggcacagaagtagctgcatagaaagrgcactggatttgaagtcagaagacctggnttcttgaacca

SEQ ID NO: 545294 - DNA, 606 bp, Homo sapiens
tctcctgactgtgccccagttgggcatgagtgtccttcacagaggtgacacaccagtccattcaggtcaagggcgcagagcagtcctggcagcacacagtaggagatttattggagctctgagcctggctgtggttggcggcttccctgcaggcctgccccacccgtgtagcatggctgccgcccagacccgcccgacgtcccgcccagcccagccggcagcagcagggggcaggatttcccgctgatcccggcggtccgtcctctgcagtttaaaaagagcccagcggggcttaaccctcccgcgtccggccggcctccgatgccccccgtcccctgttctgtgcggaactccggctttggccatctgcctacttctctgagcttcagtatcctcatctgtaaaaccggttcccctcatttcagggtcaaaaatgagcattcagtgagcacaaggagccctcagtcgccaggggcatcctccccctccccgcggcggtgccgtttatctggccaggggaggtccacccgggaggaggtgactttgcagcctccagccgctatcgcttcctgmcttcatcttgggaacaggccgtgctgtgcgcca

SEQ ID NO: 545295 - DNA, 612 bp, Homo sapiens
attactacactggcctccttgacaacatgttgtcctcacagaaggaccaragtgacctacctgaagggtcacctaggttgggtcacttcttagtctcgaatctgccgttaactctcatggatcaatttgaaattccttagaatgaacctcaaggccattcatgaactggaccctgccacccaatcctgtgcacctcatcctctgtgagctagccatcctgaacttttgtcctttccacaatacaccaggtgtttcacctttctatactgccccttaaccccttcaacctcattcttattgagaatatttacttgagtttcaagatttaatgggaatatcacctgctttatgaagtcttttttgagtatgtccccaagtgacctttatctactttgtttcccccgctgttctgtggacttaggtttttcagagctcctccaaaaatcacagtagtatactcactgtcttataaaattaaatgtgattgcttgagggtagggttcatgccttgctcatctctgtatttctggcctagggcctgatactgaggaatgctcagtaaacgcactcattgaatggacttcaacaatgaggtaagagaggcaaggtccc

SEQ ID NO: 545296 - DNA, 612 bp, Homo sapiens
attactacactggcctccttgacaacatgttgtcctcacagaaggaccaaagtgacctasctgaagggtcacctaggttgggtcacttcttagtctcgaatctgccgttaactctcatggatcaatttgaaattccttagaatgaacctcaaggccattcatgaactggaccctgccacccaatcctgtgcacctcatcctctgtgagctagccatcctgaacttttgtcctttccacaatacaccaggtgtttcacctttctatactgccccttaaccccttcaacctcattcttattgagaatatttacttgagtttcaagatttaatgggaatatcacctgctttatgaagtcttttttgagtatgtccccaagtgacctttatctactttgtttcccccgctgttctgtggacttaggtttttcagagctcctccaaaaatcacagtagtatactcactgtcttataaaattaaatgtgattgcttgagggtagggttcatgccttgctcatctctgtatttctggcctagggcctgatactgaggaatgctcagtaaacgcactcattgaatggacttcaacaatgaggtaagagaggcaaggtccc

SEQ ID NO: 545297 - DNA, 371 bp, Homo sapiens
ttgacaaataatgcaactcctactacatccccgatgacacgaagtgaaattcctattgtgtggaaataatttaacttctaatcttctggtggaacaacaatcgtttctatttggatgtttgtatttcactaagtaatgatggctcaaaataatatttagtttccttgttcctttgtgctgtttttaaaatggcatgttagatttgggggtgggagggsatatccttttgctaaatttcactttatctgagcaggtttaaaatatatatgttgtagaagtgtatcaacagaataaatgacttcaatcgaaggcacattttacccactttcaaggcttaacattgttttctatgaaatttgcatccataggca

SEQ ID NO: 545298 - DNA, 586 bp, Homo sapiens
aggtttatcatgcttatatgaatagtgtttcccttctagatttcctttataaactccaaataaacacattcctgcaggtcagagaaagtgtttgataaaagcatagaattatggctttggaaagacaaactaagtcacttgttggtttagcaaaactggttggtgattagttggggccctcacagtttctagatgagaagcttaccttatcctgattaactttacttgctgtaactgttataccgaaaattgtaggtaggatgtccattactmaaacaaagcagaacaaaacaacaaaccaaaagcagcaataccaaatcatcactactagctagaacaatgagaaggattgaatttccaaatacatgcttatgtttaactcaactcttccaattacattctcattgtcctttctcttggataccgattgctaagataaacagacactgattaagtggtagaaagagaaaggtaaaatgcaactggaagggaaagaaaaaagtagggagaagctggcctatggatgtggctttgaagagaagacaggattttggcattccttgctaagcacgttcaatggaggaga

SEQ ID NO: 545299 - DNA, 586 bp, Homo sapiens
aggtttatcatgcttatatgaatagtgtttcccttctagatttcctttataaactccaaataaacacattcctgcaggtcagagaaagtgtttgataaaagcatagaattatggctttggaaagacaaactaagtcacttgttggtttagcaaaactggttggtgattagttggggccctcacagtttctagatgagaagcttaccttatcctgattaactttacttgctgtaactgttataccgaaaattgtaggtaggatgtccattactcaaacaaagcagaacaaaacaacaaaccaaaagcagcaataccaaatcatcactactagctagaacaatgagaaggattgaatttccaaatacatgcttatgtttaactcaactcttccaattacattctcattgtcctttctcttggatacmgattgctaagataaacagacactgattaagtggtagaaagagaaaggtaaaatgcaactggaagggaaagaaaaaagtagggagaagctggcctatggatgtggctttgaagagaagacaggattttggcattccttgctaagcacgttcaatggaggaga

SEQ ID NO: 545300 - DNA, 629 bp, Homo sapiens
cagattttcaattggcatttgtatttttttttttttggcctaataataatcgtagtgaaaatggcttctgtttgttgacacccactatgtcctaggcactctgctggggcatgcctgctttatggccagtcctcacaacaatcttgcacatagttgttgctattccaacttcacaggtgagaaacacgtgacttgtcaagatcacattagtaactgcaagagccagaaacagtcagttttgtctaacttcagagcccattctcgaatgttctcctgggatatagaacaatgttaacatgattgtaacctgtgacttactgaagacttcaggttatacttctrtagtaatctgttagaaaataatgtaaagataggagtcagtttacaataatttatacttactggtagtttcaagtccttcagaaaggattctagatactgctctttactgataatgcttgttaccatttattatctataacgtgccaaacatgtactaaataccttatttatattatctaatttaattatcacaacaactgggatacatattattatctctacttcacaggtaagaaacctgaagcttggagaggttaatgacttcattcatgatcatttagctagca

SEQ ID NO: 545301 - DNA, 518 bp, Homo sapiens
gcctgctttatggccagtcctcacaacaatcttgcacatagttgttgctattccaacttcacaggtgagaaacacgtgacttgtcaagatcacattagtaactgcaagagccagaaacagtcagttttgtctaacttcagagcccattctcgaatgttctcctgggatatagaacaatgttaacatgattgtaacctgtgacttactgaagacttcaggttatacttctatagtaatctgttagaaaataatgtaaagataggagtcagtttacaataatttatacttactggtagtttcaagtccttcagaaaggattctagatactgctctttactgataatgcttgttaccatttattatctataacgtgccaaacatgtactaaataccttatttatattatctaatttaattatcacaacaactgggatacatattattatctctacttcacaggtaagaracctgaagcttggagaggttaatgacttcattcatgatcatttagctagcag

SEQ ID NO: 545302 - DNA, 518 bp, Homo sapiens
gcctgctttatggccagtcctcacaacaatcttgcacatagttgttgctattccaacttcacaggtgagaaacacgtgacttgtcaagatcacattagtaactgcaagagccagaaacagtcagttttgtctaacttcagagcccattctcgaatgttctcctgggatatagaacaatgttaacatgattgtaacctgtgacttactgaagacttcaggttatacttctatagtaatctgttagaaaataatgtaaagataggagtcagtttacaataatttatacttactggtagtttcaagtccttcagaaaggattctagatactgctctttactgataatgcttgttaccatttattatctataacgtgccaaacatgtactaaataccttatttatattatctaatttaattatcacaacaactgggatacatattattatctctacttcacaggtaagaaacctgargcttggagaggttaatgacttcattcatgatcatttagctagcag

SEQ ID NO: 545303 - DNA, 602 bp, Homo sapiens
aggcaaaaaaaaaaaaagaaccctgcaagaatgtgtgcccatgtatgtgtgtgttgggggtcgacatgaccttggaaataatagtgtttgtatttcctctgccaggtgacaaggagccctgtgcacatcccaactctcgattttgtgccccggctcgccagtgccccatcatggacccagcctgggaggccccagagggtgtccccattgacgccatcatctttggtggccgcagacccaaaggtaaacaacatatgagctccatgttcttggcaaaagggctatctctgtattagggcctacctccctccctctgatccagagcctcagcctggatctcacctttctccagagttctcccctggtgaatgcaaacttgggaggaggcaaagggtctgaaaatgggatagccgaggtcttaggagagagagtaccagtcaagctcaccagaagggctggagttagggtccaaagaaaagggctgcctgtgactctgttcattggtgatctaggggtacccctggtatacgaggccttcaactggcgtcatggggtgtttgtgggcagmgccatgcgctctgagtccactgctgcagcagaac

SEQ ID NO: 545304 - DNA, 533 bp, Homo sapiens
tctgctggacatgtccttccttcactatatcaactctaataatctccccagagattcccattacgcctatggcatgaaacaggtttttcttattgatggggattgccsttgctccccgggagctggtgaaacaggcagaatttcaagccccatcctcacccactgagacccaccaccgactccttaagctgaatgtgaattttaatgaggcccccaggtgattttgcagtaaattaaagttcggaaatagtctaatagtaccagctcatatcctggcttcccagtcctttaagatagcgctagccaatagagaatgtgtaatttaaaattttctagtagccacattgaacaagtaaagaaacaggtgaaatcaattttaatatatttaacacagcatgtgcgaaatatttcaatgtgtcatcgacataataatgacacgtttttccttttttggtactaaattgtcaatcaggtgtatattttacattatagcccatctcagtttggattagccacagttcaagtgttcagga

SEQ ID NO: 545305 - DNA, 533 bp, Homo sapiens
tctgctggacatgtccttccttcactatatcaactctaataatctccccagagattcccattacgcctatggcatgaaacaggtttttcttattgatggggattgcccttgctccccgggagctggtgaaacaggcagaatttcaagccccatcctcacccactgagacccaccaccgactccttaagctgaatgtgaattttaatgaggcccccrggtgattttgcagtaaattaaagttcggaaatagtctaatagtaccagctcatatcctggcttcccagtcctttaagatagcgctagccaatagagaatgtgtaatttaaaattttctagtagccacattgaacaagtaaagaaacaggtgaaatcaattttaatatatttaacacagcatgtgcgaaatatttcaatgtgtcatcgacataataatgacacgtttttccttttttggtactaaattgtcaatcaggtgtatattttacattatagcccatctcagtttggattagccacagttcaagtgttcagga

SEQ ID NO: 545306 - DNA, 577 bp, Homo sapiens
ctggactcaaaactggatctatctggctccagagcctataaggcaataacgatagaggaggtgaagatacatgctgtaggtttcagcaaacatttgttcatttgttyattcattcactcatcagcaaaatgagattatggaatcaaaaaagtgtgagtgcctactctgttccaggagcagagaacaggcccctggaggtctcaaaacagaagaggaaagaaaaaagaaggtgatcccaccaatatcttggcagaaacagggagatggggttcagagatttctgtaagacaagaaattgctggccagacgtctctctatgggagcaacgcagaggcctagagagaagctggtgatattggggcactgttatcttcctgatctcaagtcttcaagaataagcaatagcagtgacagcaaggccatcctcaaaccccttggaaaatagaaacccaatatccctcataaatctaccattaaggcactcaaaaatgaagtctgtggtgctaggatgaggccccgggggtaggacttgtctgaaatgctctgtgaaccaggctttgcacggagagcaggataa

SEQ ID NO: 545307 - DNA, 503 bp, Homo sapiens
tcatggattatagcaatcaggattatttactctgctctgtggaaagtgtgataaggctgagggggaactggtgagcagctttttgggactggagtcttcggaacagaaatgaagactattatacaaacagaaacactacatgtaaataatttgcaaatkgcctgtggaagaaatagggctctatacaaatcacacttaaaacctgcacgtcacaccccaatggtttgcaagtcacttgccatgttaaaagccacaagcccattgcacacaggcatcctcactacatggtgtcctatacacatcctagagaaaatccttggggtcctctattgtgtctagacttagcagcccccaagccctaggctctgtccctatcccgaaccattctcagtgcctggatacccccagctccaggaaagcagtgaagatggtggcagcccatggagtgaggaggaccaggacactccagtctcctctccccatttagagagcccaagacctgg

SEQ ID NO: 545308 - DNA, 503 bp, Homo sapiens
tcatggattatagcaatcaggattatttactctgctctgtggaaagtgtgataaggctgagggggaactggtgagcagctttttgggactggagtcttcggaacagaaatgaagactattatacaaacagaaacactacatgtaaataatttgcaaatggcctgtggaagaaatagggctctatacaaatcacacttaaaacctgcacgtcacaccccaatggtttgcaagtcacttgccatgttaaaagccacaagcccattgcacacaggcmtcctcactacatggtgtcctatacacatcctagagaaaatccttggggtcctctattgtgtctagacttagcagcccccaagccctaggctctgtccctatcccgaaccattctcagtgcctggatacccccagctccaggaaagcagtgaagatggtggcagcccatggagtgaggaggaccaggacactccagtctcctctccccatttagagagcccaagacctgg

SEQ ID NO: 545309 - DNA, 584 bp, Homo sapiens
atgcatacacatgctcacacaygcacatgcatgcacacacatacatgcactcgcatgcacatacgaacgcacatgcacacttgcacacacacacacggacacacatgcacatgcacactctgcctcagctctctcatttggacccaaccacaaaagctggctcagcttcaggcccagatctctgaaacctccatggtccttctgttgatggaaaacaactgcaacctggacctggatagcatcatcattgaagtcaaggcccagcatgaagacatcgccaacaacagcagggctgaggctgagttctggtactaaaccaaagtgagacatcaaggtcaagttcattaaacaagcacaaaaaaccgagatttcaaaggcaaacaagataaaagccatgtcctctcagatgtcccagtctgatagggtcaagggatctgagttcagcttggggctcaccctatgttacctgggggaagcatgtcaggacctggggaacagccagataaaggcaggaggtggtcagtccctctgccaagaggaagatggacacacctccaatgccctgtatcagagagaaaagggac

SEQ ID NO: 545310 - DNA, 554 bp, Homo sapiens
gtttgtggactagataaagatgctctgcagacgttggcccctccctcctgagtccagtccattcatttcaaccaaggctgcctggggacctggtatttactagttgccagaggggatataaaggtgaacagacatgacttctgccttcaagrggagcaacacaaagtccaatggccaccctataagacgaattgtagctaatagcaatcatagggaaaggcttgaagggtctgaaccacaagtgcctaacctgaaaggatgggcttggtggaaacctcgtgggacatagcttggagtttcaagaatgtgctggctcaagcctcgacttgactggtgggatgatgattcctggtcctctcacaggttggaggggaattaggggcttgatagatatgtctaggcctgtgaggttggaatggcaagggcaggtttattgggaagcagggtctctttgatatgcctattaaaagaggcaggttgcagtttcccttgcgttctgcctagcgggagattcctatgctcataaatggcattaataatgttctctgccttta

SEQ ID NO: 545311 - DNA, 554 bp, Homo sapiens
gtttgtggactagataaagatgctctgcagacgttggcccctccctcctgagtccagtccattcatttcaaccaaggctgcctggggacctggtatttactagttgccagaggggatataaaggtgaacagacatgacttctgccttcaagaggagcaacacaaagtccaatggccaccctataagacgaattgtagctaatagcaatcatagggaaaggcttgaagggtctgaaccacaagtgcctaacctgaaaggatgggcttggtggraacctcgtgggacatagcttggagtttcaagaatgtgctggctcaagcctcgacttgactggtgggatgatgattcctggtcctctcacaggttggaggggaattaggggcttgatagatatgtctaggcctgtgaggttggaatggcaagggcaggtttattgggaagcagggtctctttgatatgcctattaaaagaggcaggttgcagtttcccttgcgttctgcctagcgggagattcctatgctcataaatggcattaataatgttctctgccttta

SEQ ID NO: 545312 - DNA, 569 bp, Homo sapiens
agctgtgtcagtgccatggcccatcatggggtcagccctggggggctaggctccaggcgcctcggaggctttggcagtcagagcctgtgtacggtggggtctccccggatcgcggtgagttgtagatggcccctacacagcaggggcaggtttggctactgggcagggggcctttgcaggcccagcccaccccgcatcacatctgttaccatcaacgagagcctcctcatgcccctcaacctagagatcgaccccaatgcccagtgtgtgaagcatgaggagaaggagcacatcaggtgtctcaacaagtttgctgccttcattgacaaggtgggtctgtgagctgtttcctgggactgtggcttaggaaggggaaaggracttggaacccgatgatagggtggttctaattctcctgttactgactagcacgtggctgtgagaacgtggctgaatcagggtcttggttttcaaatgttgccatgtcagtcaaatgcaaaatgaatctgaaaccaccagacagaagaggggtgtttgctgctgctgctcacaggcaagcagcaagcatg

SEQ ID NO: 545313 - DNA, 604 bp, Homo sapiens
tacagctgcacagctacaaagagggagccaattgacaagtcttgagtggaatcattccttacgccagacttgtcagagtggcagtcttattatcctcaccatagtgaaggaaccagaatgtgtcacctcaaaatatgtatctttgacataaatatatatcttttctttgagacagggtctcactctgtcacccaggctagagtgcagtggtgtgatcatggctcactgcagccttgacctcctgggctcaagccatcctcccacctcagcctcctgagtagctaggtctacaggtgtgtaccaccacacctggctaatttttttctattttttttcgtagtgatagtgtattagtccgttctcttgctactctaaagacatacgtragagtaggtaatttataaaggaaagaggtttaatcaactcatagttcatcatggctggggaggcctcaggaaacttacaatcatgacagaacgtgaaggggaagcaaggcacctttttcacaaggtggcaggaagtagaagtgtcagcaggggagatgccagatgcttataaaaccatcagatctcatgagaactcactcatcttcacgagatcagca

SEQ ID NO: 545314 - DNA, 452 bp, Homo sapiens
ggaatgatttgttcaaaatgcttattatttccaaaaattaagtgccaacttagaattctatgtccagcaaaaaatatccttcagggccgggtgtggtggctcacgcctgtaatcccagcactttgggaggccgaggcaggcggatcacgaggtcaggagttcaagaccrgcctggccaacatggtgaaaccccgtctctactaaaaatacaaaaactagccgggcgtggtggcacatgcctgtaatcccagctactgaggaggctgaggcaggggaatcgcttgaacctgggaggcagaggttgcagcgagccgagatctcaccattgcactccaacctgggtgacagggtgaggctctgtctcacaaaaaaaaaaaaaaaaaagaattccttcagaaataaaaaggaatgatggcatgtgtgaggcaataaggtgacagtgactgcatatt

SEQ ID NO: 545315 - DNA, 615 bp, Homo sapiens
ctgccatcaccagggtcagggctgcactcctggtacccaagttgcccaggsggttaagaaaaacacctgatgatgctggtcagtcatgtttactgagctcttattgtggctgggcctgagctaactgcttgatataaattctctcctttattaataattcttccaatgtccgaatgaggtcagtacaattattatccctattctgcagagatggggaaactgggacttgttcaggcgaattcccagggctgaccatgtggaaaaagcagatctgggatgcagactcagcttaatctgacccaagggctcctaccctgaaccagtagctgggactatccccagggtacccctgagagctgccccagcctggggtgagggtaaggggtagggggctttgtcttggctgagccacatctctcacacccctgtggcctgggcatcataatcagccccaactatataaccaggtgggcctgccagggcctctgtaaagctaggcctgctgggagaggatgaggaggaggccctgccctcaaacgtggcctcctatggacacccagactcacagccttcctatcacccacactcagctccatagcaactctcagccccaaa

SEQ ID NO: 545316 - DNA, 615 bp, Homo sapiens
ctgccatcaccagggtcagggctgcactcctggtacccaagttgcccaggcsgttaagaaaaacacctgatgatgctggtcagtcatgtttactgagctcttattgtggctgggcctgagctaactgcttgatataaattctctcctttattaataattcttccaatgtccgaatgaggtcagtacaattattatccctattctgcagagatggggaaactgggacttgttcaggcgaattcccagggctgaccatgtggaaaaagcagatctgggatgcagactcagcttaatctgacccaagggctcctaccctgaaccagtagctgggactatccccagggtacccctgagagctgccccagcctggggtgagggtaaggggtagggggctttgtcttggctgagccacatctctcacacccctgtggcctgggcatcataatcagccccaactatataaccaggtgggcctgccagggcctctgtaaagctaggcctgctgggagaggatgaggaggaggccctgccctcaaacgtggcctcctatggacacccagactcacagccttcctatcacccacactcagctccatagcaactctcagccccaaa

SEQ ID NO: 545317 - DNA, 615 bp, Homo sapiens
ctgccatcaccagggtcagggctgcactcctggtacccaagttgcccaggcggttaagaaaaacacctgatgatgctggtcagtsatgtttactgagctcttattgtggctgggcctgagctaactgcttgatataaattctctcctttattaataattcttccaatgtccgaatgaggtcagtacaattattatccctattctgcagagatggggaaactgggacttgttcaggcgaattcccagggctgaccatgtggaaaaagcagatctgggatgcagactcagcttaatctgacccaagggctcctaccctgaaccagtagctgggactatccccagggtacccctgagagctgccccagcctggggtgagggtaaggggtagggggctttgtcttggctgagccacatctctcacacccctgtggcctgggcatcataatcagccccaactatataaccaggtgggcctgccagggcctctgtaaagctaggcctgctgggagaggatgaggaggaggccctgccctcaaacgtggcctcctatggacacccagactcacagccttcctatcacccacactcagctccatagcaactctcagccccaaa

SEQ ID NO: 545318 - DNA, 510 bp, Homo sapiens
ctctcttgttaagacaacagctttcacgaggagctcatttttctcccataaagacatgatgagcataaatcatattagcctcactctttgatttaactgaggaagtcaagttgctcattcatgcatgtgaaaagattggcttgtgccaggtatgtggccaaattcaagattcagatttcttctcatgacttctctccatcctcccttyccccttcctggaggccttggtgagcgttgtggctcctctcaccccagcgcctgtcccctccctgcccttttcctccatgaatccatgtttgatgtcggggaaaccagctgatggtatcccctgtgtcacacacacatttgctgctgctcagctcccccaactacatgtagccctaacagtgcatgacttttcttttgttcctgggatgttcccagtgcttagtacaatgcctgggacatagtggatgctcaagaagtcactaatgaacccttcaagttttgagacgtattatttttttctca

SEQ ID NO: 545319 - DNA, 582 bp, Homo sapiens
gcccactggcattcccctgggcctccacccacccaaggcagccctatctccaccggctcctgagacagacaaggtcaggccctggctctaacccccacacccagagcctcccactcatctctttcctctgcagtggctcccactggtggggcctgcctggggtctgctggtgcccacgccatgccagcgtgcccacctgccttcttccagctcccacaccacccgcaggggtccactgtcccccactccctgccaccctcatgcctaaggataggtgggggctgctcctcccaagagctcagttccaggctctgtgagtggggagagggctcyaggtcttagtcggagccctctggagtgttcccaagaaggacactagggctggtggggggtgggaccaggcagggtcttccctgctttctccttcctagaattctccctttccaggaagaagcttgagccccggcacaaacaaaaactccttggctgcaccccatggcgtgggggctccctgttcatccaggcttggaggggccttaaccaacctgtgcatccacccaggatccagaccaccctgcccag

SEQ ID NO: 545320 - DNA, 557 bp, Homo sapiens
gcccctgcttgagagattatagatgacttgtccaaggaaaggatgagatggaagcaaaagtgctttggcaagataatgtctgtgggaagatgaggaattctctcacaatgacagatgtaacataccatgtgcccaccartcaacaaggtcctttgggccgggtgccaaccatgctctctgctcatttattaaagcaaccgtgtgtgctcccaccgtgacacccaaggcctgagacccatggccactctgtcttcaagagacactccatctgtaaaatttacagagagacactgtccagctaaatcaaattccataagcaaatgctgaccacatttgattataacataaaacttaggggagctctacagtgaagaagaaaccaacaccatgcagatgccgaggcaaagggagctggctgctgtcgagttcttccttccttccagctcacaggtgaaggaattgtcagggacacatttcctccacgagaggcaggaggaaatggttcaaagctgactcttgtgccagatggcctgcctttgaactccagctctgctact

SEQ ID NO: 545321 - DNA, 557 bp, Homo sapiens
gcccctgcttgagagattatagatgacttgtccaaggaaaggatgagatggaagcaaaagtgctttggcaagataatgtctgtgggaagatgaggaattctctcacaatgacagatgtaacataccatgtgcccaccagtcaacaaggtcctttgggccgggtgccaaccatgctctctgctcatttattaaagcaaccgtgtgtgctcccacygtgacacccaaggcctgagacccatggccactctgtcttcaagagacactccatctgtaaaatttacagagagacactgtccagctaaatcaaattccataagcaaatgctgaccacatttgattataacataaaacttaggggagctctacagtgaagaagaaaccaacaccatgcagatgccgaggcaaagggagctggctgctgtcgagttcttccttccttccagctcacaggtgaaggaattgtcagggacacatttcctccacgagaggcaggaggaaatggttcaaagctgactcttgtgccagatggcctgcctttgaactccagctctgctact

SEQ ID NO: 545322 - DNA, 557 bp, Homo sapiens
gcccctgcttgagagattatagatgacttgtccaaggaaaggatgagatggaagcaaaagtgctttggcaagataatgtctgtgggaagatgaggaattctctcacaatgacagatgtaacataccatgtgcccaccagtcaacaaggtcctttgggccgggtgccaaccatgctctctgctcatttattaaagcaaccgtgtgtgctcccaccgtgacacccaaggcctgagacccatggccactctgtcttcargagacactccatctgtaaaatttacagagagacactgtccagctaaatcaaattccataagcaaatgctgaccacatttgattataacataaaacttaggggagctctacagtgaagaagaaaccaacaccatgcagatgccgaggcaaagggagctggctgctgtcgagttcttccttccttccagctcacaggtgaaggaattgtcagggacacatttcctccacgagaggcaggaggaaatggttcaaagctgactcttgtgccagatggcctgcctttgaactccagctctgctact

SEQ ID NO: 545323 - DNA, 430 bp, Homo sapiens
atgtgcccaccagtcaacaaggtcctttgggccgggtgccaaccatgctctctgctcatttattaaagcaaccgtgtgtgctcccaccgtgacacccaaggcctgagacccatggccactctgtcttcaagagacactccatctgtaaaatttacagagagacactgtccagctaaatcaaattccataagcaaatgctgaccacatttgattataacataaaacttaggggagctctacagtgaagaagaaaccaacaccatgcagatgccgaggcaaagggagctggctgctgtcgagttcttccttccttccagctcacaggtgaaggaattgtcagggacacatttcctccacgagaggcaggaggaaatggttcaaagcygactcttgtgccagatggcctgcctttgaactccagctctgctac

SEQ ID NO: 545324 - DNA, 635 bp, Homo sapiens
aagtccctcctccagcgccagggagaggattttaaaagctgctaccactgtccctccacagccggcaggaccgggatttcttcctctgtgtctcttgacagcagagactgcagcatgacaaagcctcagggtcgtcgtgagctgcccgacccaaatccctcaggctggccaccaccacgcacacggggcttcagggagcgctgggagggccaagtgaactggttttgtttgaaaggtctttctcatgagaggctcgaggagaggacgcagcccaggtcttgggccgggacccccgctaccactgggacccccgagggttttgctgctgatggatgaagaggctcctgtggaactgtggcctctgctctgcacctgagccccgggggtcatagaggttcttggggtggactgcagtgcggggcggcgaggggaccgcaaggaggcactccttttggctcctggcaactctgaccaaaaaggcaggcccacggaaaaggcagttttatcctctgaaaaacctctctgtagacactctcttccttggctcagaactcacagagccagaaggaggagggggagggcgyggggtggggcaggtagcaccgtctggtgtcagagtgaaagcaccctgtggt

SEQ ID NO: 545325 - DNA, 155 bp, Homo sapiens
ctgcctttccctgacacttttggggtctgcctgggrgaggaggggagaaagcaccatgagtgctcactaaaacaactttttccatttttaataaaacgccaaaaatatcacaacccaccaaaaatagatgcctctccccctccagccctagccga

SEQ ID NO: 545326 - DNA, 504 bp, Homo sapiens
ctcgccgcgagggcccgcgccgcccggaggctgggcttgagcccacgggaaatgaatacggatcctataagattcgagctttcatcactgggtcaccagacggttctgggcgcgtgtccggggttcatcctgaatatgcgctgatggggccgctgggcacggtggcggtgtggccgcaagrccccgcggggccgcgcccacccggagggtcccataccagcccctcctccgcgcccaggccctggctctccccgctgcacccccgctgcccgcagccctgagcgcgccccgcttccgctggcgggacagcagcgtcctgccaaggtcgcggcgccgcacagcccgaatacttcctcacgaaactccagagaccccttctgtacccgctgtgtcccccggcctgccagtagctcatggttacctcagggtcccagacgcttaaatgggttctggaattttctctgcctcctcttgccttccgggagcaaatgcgatggtggctgc

SEQ ID NO: 545327 - DNA, 319 bp, Homo sapiens
ccgtgtgccacacccacccatcactggagtttgtcagagacgccaggccgacaagtgcccctgggttgtcactcctcccaygtccttgggatgctggctgggaaagccctgctctgctgacccctcactcctaaggggctcgcggaagaggccgagggtctgagagctggctccttggcccaaggcagggctgtccaaatcctaaggtccctctgctcccataggaaggcttccagaagcctctctctggggccagggcatctgggaagatgtcccggccctaactatgattgggaaatggggcaagatggagaaaaat

SEQ ID NO: 545328 - DNA, 481 bp, Homo sapiens
ctgggcctcccaaagtgctgggattacaggtgtgagccacttcgcctggtggaaagttgattgaatcctccccagccatgctacctgtacagcctgcagaaccatgagccaattaaacctctttttaaaatacattatycaatttccggtatttctttatagcaatttaggaaaagactaatttataggggtgtttggtaaatagaggccagctaatttttactctccttaacactgaatccaggtgtattagtcagggttctctagggggacagaattaataggatagatgtgtaggtaaagtggagtttattaaggagtattgactcacatgatcacaagttgaggtcccacaataagctatctgcaagctgaggagcaaggaagccagtccgagtcccaaagctgaagagcttggagtctgatgttggagggcaggaagcatccagcacaggagaaagatgaaatctggaagactaaa

SEQ ID NO: 545329 - DNA, 643 bp, Homo sapiens
acaaaaaaagacagtggaagagataggctctttccttcctttggacatttcagtgtttgcatacaatgcgtggaatggcagcagccatcttgtgagcatagtttcaccaaggacaaagctgataaagctagcgccatggtacagttgaaaattagaagaggctaggtgcagtggctcaagcctgtaatcccagcactttrggaggccgaagtgggtagatcacgaggtcaggagttcgagaccagcctggccaacatggtgaaaccccgtctctactaaaaatacaaaaattagccgggcatggtggtgcatgcctgtaatcccagctactcaggagactgaggcagaagaatcgcttcaacccaggaggcggaggttgccatgatacgagatcccaccactgcaccccagcctgggcaacagaatgagattctgtctcaaaaaaacaaaacaaaacaacaacaacaaaaaacaaacaaacaaaaaaagaaaattagaagaaatatgggtccttgatgatgtcactggatattgaattaatcaactctgaagccactcttcttcaggatgctcgtaatttgaaattttaaaatttccttaactgtttagattgagtgggtccatgttttctgttacttgtagc

SEQ ID NO: 545330 - DNA, 586 bp, Homo sapiens
cctgctgcttaaaccaaagacaagctatgaagtccacataacttcccaatttaccacttacgcagcaaatcgagattttagttttgggtttttttttttttttttggcataaaaccttatgaattccagatagaagtaaaggcagttgatttcatagcttcttttgaaaggaatggcctcatgtcattgccagtctttatgggaaagacaagtgttagcttattctagagaataactgtgcttggctaataatcctctctctctctctgtctctctctctttaaatggagaccctatsgaagtggcatttactcattgcatctagacgcagagtagctggagagggtttctgaatgtcagtcaaagtcattgcttggaaagaaggtctgaatattaggccttcaagatggaccaaggctgttagctagaaaatggataatgggattggaagtctgaggaattgggaccaggtgagaatgtaatttgctgagtggtcctgggaaagagggtcagaccaggtgacactgggtatttgaagtccaggtttatgaatcagagagacaggctcttgcagggctgaacacca

SEQ ID NO: 545331 - DNA, 617 bp, Homo sapiens
aggactgagcatcagtccacctgcctgggctggtgaggcctccttgagtatggcttccagtgtgcccaggagtgtgggatacccatggccccccaggcctgagccaacaaagcaaaggccagagcatcctgggccggctgttgcggccccactgcccactgtggggttctcttggcccacaaccttggacccctgtctgggtgtttgaattgctcctctgattaaaggaacaagcccagttcttgtgagctcttagcaaatcacctcaaatcatttttgaaggagagaaataattcayaaataagcagcttaagtttccattttccacaagcaaatttccatgcatcctaggagttgaccggactgcgttcccccatccccaccaccctttcagagtttcttgagctgccctcagccaggcagagcctgaggctcagcccctgcaacagggggcttgagcgggggacaccccgggggcaccctgctagcacagtgggaatggaattgattgtcttcctagcaagtttgctatttaatagttttaaaattaaaatgcattttaaagaatctttaaacctgtggagttcaaaatgagatctctggcagtttaaatgccc

SEQ ID NO: 545332 - DNA, 617 bp, Homo sapiens
aggactgagcatcagtccacctgcctgggctggtgaggcctccttgagtatggcttccagtgtgcccaggagtgtgggatacccatggccccccaggcctgagccaacaaagcaaaggccagagcatcctgggccggctgttgcggccccactgcccactgtggggttctcttggcccacaaccttggacccctgtctgggtgtttgaattgctcctctgattaaaggaacaagcccagttcttgtgagctcttagcaaatcacctcaaatcatttttgaaggagagaaataattcataaataagcagcttaagtttccattttccacaagcaaatttccatgcatcctaggagttgaccggactgcgttcccccatccccaccaccctttcagagtttcttgagctgccctcagccaggcagagcctgaggctcagcccctgcaacrgggggcttgagcgggggacaccccgggggcaccctgctagcacagtgggaatggaattgattgtcttcctagcaagtttgctatttaatagttttaaaattaaaatgcattttaaagaatctttaaacctgtggagttcaaaatgagatctctggcagtttaaatgccc

SEQ ID NO: 545333 - DNA, 418 bp, Homo sapiens
gcaaccagtcgagcaccaagcaagatggcagctaacaaaatgttcattaagatttgaggctatggaggtctcagttggaatccaaactccaccatttcttagctttgtggctgggggcaagtttccctttacactttgcttcccacatccgtaaaatagaagaatagtaatatccacttcattgagccaaaagtgtaaggatgtatagaaagcacctagcatgtgtcttagcatataataggtacttgagaaaggttaattccttctgtgtccggccactyactcatcaagggtgcagtggcaggaggttggaatgcaggacatctaagatttatttcacttgcagtactgtaggagattgtgatggtagccaggtacaggttattaacaataatgaaaataagaatgcttatctgta

SEQ ID NO: 545334 - DNA, 574 bp, Homo sapiens
tatttgattttctccagccaacaagctcattctggttaagatccaatagcagttattcactcattcattcactcattaaattcatacatttatgaaatatctgcagtgtcactacagagtccctttccctatcaatcactataaagcctagtagaagaaaaaagataaaatcacactgcaaagagaaaaatagcagggtgaaggacagagtgctgaagtagcatttggaagcacctcccagctcagtcttaaagattaagggaaaaacttcgaggactcatcacgtacatgttgagattrgaaaggtgagcaccaagacgctagattgagagacatgttcaagcagaggaaacggcatatacaacatcttagaaccatggttcccaaactgtgtgccaaggtgccccagggtgccaaagtggacccacgggggcaccgcaggatactttaaaacttctagagaagtgcagcaattctcagcacatgctggacacagcctcaactattagctcgaggtagttcacagtttcaacattagaatgcactaattcctttggtggctgtatttaaacac

SEQ ID NO: 545335 - DNA, 598 bp, Homo sapiens
aaccattatcccaagaaaacaaatgcagaaacagaaaacaaaatactggatgttctcacttatatgtgggagctaaacattgagtacacatggtcataaaaatggaaacaatagacatgggagtgcaagagaggagggggaagaagagaagtaagggttgaaaaaaactactgggtactacctgagtgatggattcattcatactccaaacctcggyatcatgcaatatacctttgtaacctgcacatgtatcctctgattttaaaataaaagttgaaaaaagcaacaaaaaatagagcaagccgcaatgcataagcactttttaagtctctgtttgcattgccttttctgctgtcctgtcagttaatgaagctatatgggcaagttcagagtcagtggggtagggagctatgcgggggctatgcaagggtgtgattaaggggagggaaactatggtggccagttttgcaaacagtctaccacagacattaaaatagaagagagtggaagggtttatttgaaatctatccaaaagatattgtcactttcagaaattcatctcagttcctaaatggtggcaaaaaacttgaagacaacg

SEQ ID NO: 545336 - DNA, 598 bp, Homo sapiens
aaccattatcccaagaaaacaaatgcagaaacagaaaacaaaatactggatgttctcacttatatgtgggagctaaacattgagtacacatggtcataaaaatggaaacaatagacatgggagtgcaagagaggagggggaagaagagaagtaagggttgaaaaaaactactgggtactacctgagtgatggattcattcatactccaaacctcggcatcatgcaatatacctttgtaacctgcacatgtatcctctgattttaaaataaaagttgaaaaaagcaacaaaaaatagagcaagccgcaatgcataagcactttttaagtctctgtttgcattgccttttctgctgtccygtcagttaatgaagctatatgggcaagttcagagtcagtggggtagggagctatgcgggggctatgcaagggtgtgattaaggggagggaaactatggtggccagttttgcaaacagtctaccacagacattaaaatagaagagagtggaagggtttatttgaaatctatccaaaagatattgtcactttcagaaattcatctcagttcctaaatggtggcaaaaaacttgaagacaacg

SEQ ID NO: 545337 - DNA, 630 bp, Homo sapiens
caccaccatggttactgtgaactgcttaactaaagatcccacccatcctgcttatatatgcctttgtgatttcatatacttcttatttatgcaatgttaaggataccttacaaagaagtaaagcttattggcaggtccttacttgcctagaccatacctaaaccctgttgaatgacaccatggagagatctcacaaatacaatcccactggggattactgtttaaacatattaattttgaggggacacaaacatgcagcccacaacaacctctctcatttagcctccccacagaaagaagcaccaacctatctttttctatcatattggaccttatgacmatctctggtataacaggaacacatttagttattttcaattctgtaacacagactgaattcataaggccactcagacattgtcacagtcctggcagaccatatacagtaagcatcttaagccttagaagcccttaatgaggcacaaagccctctagttgctgtggtagctgacaaaagattagcattggactacctactgccatgtcaaggtaaagtttctgtcttaaagaggacctcctgctgcatgtaggttaataagacagaacaagtctccagaatatttaaacaaa

SEQ ID NO: 545338 - DNA, 595 bp, Homo sapiens
tgatgacaagttagaacatatttttcttcaatgagagatgtatttcttcattaacattaaagcttatagatgttatttgctttgtttttttttttttttttcgttttattttttagacggaatctcgctctgctgcccaggctggagygcagtggcgcgatctcggctcactgcaagatctgcctcccgggttcacgccattctcctgcctcagcccccagagtagctgagactacaggcacccgccaccacgcccagctaattttttgtatttttagtagagacgaggtttcaccgtgttagccaggagggtctccatctcctgacctcgtgatccgcctgtctcgttctcccaaagtgctgggattacaggcgtgagccaccgcgcccagcccaaaagctcatttttatggaatatctgagcttgctaaaccctggggccagctcaggatttctttatcaagtagagctacaatatttttccagtgatttcaattctgatcgcatccctgagggaactaagcttcttgggtggggtagagagcagagctttgtatgaaaattctagtattgaacagtctctggcaaaccaaag

SEQ ID NO: 545339 - DNA, 621 bp, Homo sapiens
tataatggtgacttcagctctcctgtaaatttttaaataactaattcgttaacttcattattaccattattagcaacaatcttcttaaaatatgtcttacaactgaaagtagcatgctccagtgttccatgtgttctgacactggcctgctagactrgagcatgtggttcagggcactctcacaaatacagataaaagatttgtgccctgattgtggattatcttaaggaagaaataaacgtcttgaaaggtgaagctacaaagttaaatacataaagcgcagcaggaaggtgattagttttcacattggcatcacaactatccattcttctttttatcttatgttgaaaggccatatcaaagtgtgggcccagggaagaaaggatacattaacagtaacattaatataaactctatgtttaactccttggtaagactggtgaaattaaaattaacttgattacgtaggacaaagatacacaatttatagatttttgtggtagaatttcaggcacctagtcaataaggtagaatgaattgaaatggtaaagatcacctcttgttctaactacagagaaatgctggtcaaaataaggcaaataatttacatgcttagcccag

SEQ ID NO: 545340 - DNA, 605 bp, Homo sapiens
ttattaggaataaatcaaaaagtggattcccagactacaatgaaaagtttatatttgttaggagttactatggagaattacgcaatgcccaccagggatgtcttargcgcaactgaacatttagacttgcaagactaccataggtcatatttggcaccaatttactcagaaggcaaaaaacaacttgctagcagaagaataatatgcacttttcttcagtgtgagtctttgcagaatttagctcaagtacagggagatgagacccataaacgtggtgtaggaaacactctgactcaaaagaattcccccaggagccagtatctctcataacaactgagcacaactttatgggttgtctcaaagagcctgccaaattataggagtcactacattcagggatgtccagatacaactttctatttgatttacagttctccaagtccagatgcaatttactattcaggtgtcacttttattatgattatctaaggtcagtggttctcagtcaggatattttaccaacaggggaaatctggcaatgtttagaaacagttttgactgttacagctagagattgtacctggcctctaggaagtcaaagccag

SEQ ID NO: 545341 - DNA, 615 bp, Homo sapiens
gctctctcaatatatcatgctgcggcgtgtaatccaactccaaaaccctatgctgagagcagccacatctcagagggagttcttggctctgctctcaggaggtccattgatattaaacagagtcaaaaaataaataaacccacataaagtatgaatagtatttccatgaatacaggcagcaactctgccccttatttatggcttcacctgccacgaaaccaaaaactcaagggtgtcaataaatggattgyaacgttgttgtgatgtttaattacaaagaaaataacgtctctgcgggccctttgggaaatgcactgttgtctgtagcaaccagcagggagcttcatggaggcattgcctttgtgttctgataaatactcagactttcccagagcctcaggatctctgggtcaggcagggtcagatgggtcaccttgcgtaactgcctgtctcgctcagctccctcccacgatactggacttgtgtttctgcatctttcatgccaggtatttcaccacctcctgggcagctcattccagctctggtcagcatgatcctcattatgaggagcttgacatctggctccttgccacgtccctccataggtttggggcc

SEQ ID NO: 545342 - DNA, 615 bp, Homo sapiens
gctctctcaatatatcatgctgcggcgtgtaatccaactccaaaaccctatgctgagagcagccacatctcagagggagttcttggctctgctctcaggaggtccattgatattaaacagagtcaaaaaataaataaacccacataaagtatgaatagtatttccatgaatacaggcagcaactctgccccttatttatggcttcacctgccacgaaaccaaaaactcaagggtgtcaataaatggattgtaacgttgttgtgatgtttaattacaaagaaaataacgtctctgcgggccctttgggaaatgcactgttgtctgyagcaaccagcagggagcttcatggaggcattgcctttgtgttctgataaatactcagactttcccagagcctcaggatctctgggtcaggcagggtcagatgggtcaccttgcgtaactgcctgtctcgctcagctccctcccacgatactggacttgtgtttctgcatctttcatgccaggtatttcaccacctcctgggcagctcattccagctctggtcagcatgatcctcattatgaggagcttgacatctggctccttgccacgtccctccataggtttggggcc

SEQ ID NO: 545343 - DNA, 615 bp, Homo sapiens
gctctctcaatatatcatgctgcggcgtgtaatccaactccaaaaccctatgctgagagcagccacatctcagagggagttcttggctctgctctcaggaggtccattgatattaaacagagtcaaaaaataaataaacccacataaagtatgaatagtatttccatgaatacaggcagcaactctgccccttatttatggcttcacctgccacgaaaccaaaaactcaagggtgtcaataaatggattgtaacgttgttgtgatgtttaattacaaagaaaataacgtctctgcgggccctttgggaaatgcactgttgtctgtrgcaaccagcagggagcttcatggaggcattgcctttgtgttctgataaatactcagactttcccagagcctcaggatctctgggtcaggcagggtcagatgggtcaccttgcgtaactgcctgtctcgctcagctccctcccacgatactggacttgtgtttctgcatctttcatgccaggtatttcaccacctcctgggcagctcattccagctctggtcagcatgatcctcattatgaggagcttgacatctggctccttgccacgtccctccataggtttggggcc

SEQ ID NO: 545344 - DNA, 615 bp, Homo sapiens
gctctctcaatatatcatgctgcggcgtgtaatccaactccaaaaccctatgctgagagcagccacatctcagagggagttcttggctctgctctcaggaggtccattgatattaaacagagtcaaaaaataaataaacccacataaagtatgaatagtatttccatgaatacaggcagcaactctgccccttatttatggcttcacctgccacgaaaccaaaaactcaagggtgtcaataaatggattgtaacgttgttgtgatgtttaattacaaagaaaataacgtctctgcgggccctttgggaaatgcactgttgtctgtagcaaccagcagggagcttcatggaggcattgcctttgtgttctgataaatactcagactttcccagagcctcaggatctctgggtcaggcagggtcagatgggtcaccttgygtaactgcctgtctcgctcagctccctcccacgatactggacttgtgtttctgcatctttcatgccaggtatttcaccacctcctgggcagctcattccagctctggtcagcatgatcctcattatgaggagcttgacatctggctccttgccacgtccctccataggtttggggcc

SEQ ID NO: 545345 - DNA, 617 bp, Homo sapiens
tgatggctgggatgcagagaagactcaacgaggcagccaagaatttccgtctccccctgcagattcccagcatcctctcagaagtggcaatccctaatcccagcgccgtttctctgtccggagcatgaagtcctcggcctccctcataatactctctgaaaggaagagcaaagaggaaggcctgagttcttagcactggagatgggtgtaagttatggaagagaaatatctcatagatcctgaaaggggttcaactgatctaggcttcctgctaacctttcatcccaagagatgatgctgccgtctcgcagtcttcaaaactgagacaataaataaataagtaaataacaaaaactgtaagctcgctctctcacacacacacacaaacacgcacacacacatacacacgcacaatttatagtayaggttaacttcgagacctgaactaacatacttaaaggagcatttagttagcacctgttatgtaccacgtatgaaccacgtgctgtgtttcaaaagaagactagaataggctgggcgcagtggctcacgcctgtaatctcagcattttgggaggccgagacgagtggataacttgagatcaggagttgaagacc

SEQ ID NO: 545346 - DNA, 571 bp, Homo sapiens
gagctggtgaggtggaagcagagatggaggtggggtaggttggagatgactttcagcgctgggtcccactggacttggcaatggrtgggcctcgggaggggcacaggcaaggcctgatggagacatcctggctgacccaagacagttgggtccttatccatatggctgctcctagatttctgggtttgtatatttgcttgtttttagttttaactctttatcagcccagaattagcttttagtaattcagttgagactgcaattttactcccttcacccagtactgaatttctccattaaaatatacttaataactattgcttcctcattgttttgtgaggcttcccatgttgttcagttatgaaccattgctgaagcccatctctaaccttcccctctctaaccctcacctctttatctccgcagccacctctccagcccagtcttatttcaccccaactcccctctactgacctttcttcttttgctctgtcacacaattttgatgtcctacgttttgatccataaaacttttgtaggaaaattatctcctaatccctctttttaaaaa

SEQ ID NO: 545347 - DNA, 571 bp, Homo sapiens
gagctggtgaggtggaagcagagatggaggtggggtaggttggagatgactttcagcgctgggtcccactggacttggcaatggatgggcctcgggaggggsacaggcaaggcctgatggagacatcctggctgacccaagacagttgggtccttatccatatggctgctcctagatttctgggtttgtatatttgcttgtttttagttttaactctttatcagcccagaattagcttttagtaattcagttgagactgcaattttactcccttcacccagtactgaatttctccattaaaatatacttaataactattgcttcctcattgttttgtgaggcttcccatgttgttcagttatgaaccattgctgaagcccatctctaaccttcccctctctaaccctcacctctttatctccgcagccacctctccagcccagtcttatttcaccccaactcccctctactgacctttcttcttttgctctgtcacacaattttgatgtcctacgttttgatccataaaacttttgtaggaaaattatctcctaatccctctttttaaaaa

SEQ ID NO: 545348 - DNA, 488 bp, Homo sapiens
gttgctcaggctgatcttgaactcctaggctcaagtgatcttctggccttggcctcctaaagtgctgggattataggtgtgagccaccatgcctggcctggccttcatatttttttaaaaaagtaaaaaggaaagaaaaggcaaaccttaaaattgaatacagacacagatgaaactatcaaaagaagcaatctgartgacctttgatcaagtccctgaccgcaggcctgcaaaagggatacgtcccaggagagagtatacaggccggcctcctggggctgaggctccccgctggtccaggccactgtgaggcccactggaaggagcaggcactctcggggaacacaggctgagcgtgcccacctaggcagtgtgtccttcgaggaggaagaggagccaggaccaacacatcagtagcttctacgggggcgctgtggacactcagctccactgccagccctggccctgcagctcccggtgggcacaca

SEQ ID NO: 545349 - DNA, 459 bp, Homo sapiens
ggtgggcgaggatcagacggacctcacccgtgggcctcgtggcctggtgggcaggtaggggtggctcaccttgcacatcttatccacgggctgggacttgatgatgttacagaatagctggaagccgagttcctccagcaggaatgtggctaggtagcagatcactagaaaacagggggtctgtcagaggctaagggacgtcacggggcaccaggcacacggcgggaccggagccgaaggcctccaccgtgtcagggcacgcagccacaggaaaacccccaccctattggygcccacctgaaaatgataagcgaacacaaacaacattgtcttagagtgcaatgcatttgtggtttcaaagcactttgacaaataatcccatctgataagttctcagaatttgcaaaggctccccaggtaaaagtgaaatcattttggacttgtttgtcaatttctgag

SEQ ID NO: 545350 - DNA, 638 bp, Homo sapiens
tgccagactgttagctgtcatgggaaaagaacaatgtcacagggaacattggtgacaactcagggtgctacagggccatggactgagggcgggacggcactgctatgtatctatgcacatgtatacagttatttattttcaaatgtctttagagcagttttaagttcataggaaaaatgagcagaaggtacagagttcccaaacctctcgtgccccctgcccccaccagcacctgccctgcgccccctgcccccaccggcacccccgccctggggccccagcccccactggcccctgccctgcacccccagcccccactggcccctgccctgcacccccagcccccactggcacccgccctgtgcccccaatccccaccggcacccacmctgcacccccagcccccaccagcacccaccctgcacccccagcccccacgggcctctgtcctgcgtccccagcccccaccagcaccccccacgcccccagcccccaccctgtgctcccagcccccactggtccctgccctgtgcccccagcccccaccagcacccgccctgggcacccccagcccccaccggcaccctaaatgccctgcatgtccatggcactcagtatccgtggaatgtaaacccgac

SEQ ID NO: 545351 - DNA, 638 bp, Homo sapiens
tgccagactgttagctgtcatgggaaaagaacaatgtcacagggaacattggtgacaactcagggtgctacagggccatggactgagggcgggacggcactgctatgtatctatgcacatgtatacagttatttattttcaaatgtctttagagcagttttaagttcataggaaaaatgagcagaaggtacagagttcccaaacctctcgtgccccctgcccccaccagcacctgccctgcgccccctgcccccaccggcacccccgccctggggccccagcccccactggcccctgccctgcacccccagcccccactggcccctgccctgcacccccagcccccactggcacccgccctgtgcccccaatccccaccggcacccacactgcacccccagcccccaccrgcacccaccctgcacccccagcccccacgggcctctgtcctgcgtccccagcccccaccagcaccccccacgcccccagcccccaccctgtgctcccagcccccactggtccctgccctgtgcccccagcccccaccagcacccgccctgggcacccccagcccccaccggcaccctaaatgccctgcatgtccatggcactcagtatccgtggaatgtaaacccgac

SEQ ID NO: 545352 - DNA, 638 bp, Homo sapiens
tgccagactgttagctgtcatgggaaaagaacaatgtcacagggaacattggtgacaactcagggtgctacagggccatggactgagggcgggacggcactgctatgtatctatgcacatgtatacagttatttattttcaaatgtctttagagcagttttaagttcataggaaaaatgagcagaaggtacagagttcccaaacctctcgtgccccctgcccccaccagcacctgccctgcgccccctgcccccaccggcacccccgccctggggccccagcccccactggcccctgccctgcacccccagcccccactggcccctgccctgcacccccagcccccactggcacccgccctgtgcccccaatccccaccggcacccacactgcacccccagcccccaccagcacccaccctgcacccccagcccccacgggcctctgtcctgcgtccccagcccccaccagcaccccccacgcccccagcccccaccctgtgcycccagcccccactggtccctgccctgtgcccccagcccccaccagcacccgccctgggcacccccagcccccaccggcaccctaaatgccctgcatgtccatggcactcagtatccgtggaatgtaaacccgac

SEQ ID NO: 545353 - DNA, 362 bp, Homo sapiens
ggggtctggctccagtctcgccccccttccccaggacagcagccaccggcagccctgctccctcaagctccactgcagaccatgcaggagcccacccgccagccctagacctgaagcagcatctctgcccagaagccctgtggaggcaccttcccaggagggcgggtgtcctctggagtaagcaggtgtccctccatactaaacatatttactgcrtgcccactgttcgctgtacatacaggtatgttccttgtgaatttcaccgcttctgtctctcccacagatggcgaacatctcacgggacacggctaatgtctactgagcattttaccctggtggggtgtgtgtgtgttggggggagg

SEQ ID NO: 545354 - DNA, 598 bp, Homo sapiens
gaccctctaagcatggacagaggaggaggtgctggaaaacagacggagaaggaagggagggagtggccaggaagcgctctgcagcagcgactcagcgtcctgcatcttcatggcatccaaggccccatgcccagaggagtggcggcagaggaagctgggtatggcttgtggggtgcagtccccccatcactatctggggccatttgtgccaaaaccaatgcactgccacagcccctgagtccagcacatcctcgcaccctgcgtccctggactgtggtccaccctagccagcagcacccagagctctcctaaccaggcagragctccatgtgacagatgaggaaactgaggccagggcaggtggcgccgacctcactccagaataggcacggacagtgggacccagaatgcccacgggcaccatgttgggagctggatgggcactgagggtgaggctggacccctttctgaaggagggacgtggtgtctgctcctgtaccccatggtgggtgctcaccatctccccagcccacagtttacttggacagccccacagtgacccactttctccccgaaatgggctggatctgcctctagg

SEQ ID NO: 545355 - DNA, 634 bp, Homo sapiens
cccaaagtgctgggattacaggtgtgagccactgcgcccagccttcctgtgatattatttagattgcgacatgattgtggatgatttattgcgggcatggaaggaatgacagccttccaaaatgtgtatgtcagcatctgtgacgtggctgccccagagcctctgataaaaaccagtycctgcggctgagggccaagggccacatggtggcttcaggggtgtgtgctctttccccttcctggccaatgagaggacagtgaagagatggatgcaggctgctgtgtgttttcactactgggaagtgggttggggggcaggaccctccgaagctggccccaggtggtctcacacagtgcctgtcagggggcttactttgggtgccagaggacagactctgcgggggaggaggatgcgcataactggtgtaggtcgcagggccagggctggcagtggaccccggatggccaggctgcgtcggggcatggttgcccttgccggcaggctgggaggcagggctggggccctgtgccgaggttggggtggtcagacaggatgtgcagaattccagtgggtgtaccgctcgtgttaaaacccatacagtgtgtgtcccggaggccacacggtaggggcagca

SEQ ID NO: 545356 - DNA, 634 bp, Homo sapiens
cccaaagtgctgggattacaggtgtgagccactgcgcccagccttcctgtgatattatttagattgcgacatgattgtggatgatttattgcgggcatggaaggaatgacagccttccaaaatgtgtatgtcagcatctgtgacgtggctgccccagagcctctgataaaaaccagttcctgcggctgagggccaagggccacatggtggcttcaggggtgtgtgctctttccccttcctggccaatgagaggacagtgaagagatggatgcaggctgctgtgtgttttcactactgggaagtgggttggggggcaggaccctccgaagctggccccaggtggtctcacacagtgcctgtcagggggcttactttgggtgccagaggacagactctgcgggggaggaggatgcgcatarctggtgtaggtcgcagggccagggctggcagtggaccccggatggccaggctgcgtcggggcatggttgcccttgccggcaggctgggaggcagggctggggccctgtgccgaggttggggtggtcagacaggatgtgcagaattccagtgggtgtaccgctcgtgttaaaacccatacagtgtgtgtcccggaggccacacggtaggggcagca

SEQ ID NO: 545357 - DNA, 523 bp, Homo sapiens
agcagtgcggttccctaaagtgctgggcagcgatgaggtttctctctccaggccctcgggcagctcactgagcagccagtgaccccgtggtttctgtagaaggggaagtaggaaaaaggaggaccctgtgtcagtgttaataaatggtgtctttgtctttcttaggattttctaaggaaagaattcagtgaagaaaacattttattctggcaggcctgtgaatattttaatcatgttcctgcacatgacaaaaaggaggtaagtccacgcttgggaagtgggggctgtgtgagagtggcgtgtgagagagacgcatgtgaggggtgtgtgagagggccacgtgtgtgaggggcatgtgaggggtgtgtgtgaggggcgtgagaggggcgtgtgagaggttgcgtgtgaggggcgtgtgagggscgtgtgtgagaggggcgtgtgagagggacgtgtgagagggccacctgtgtgtgaggggcgtgtgaggtcgcgtgtgtgaggggcgtgtgagaggtcgcgt

SEQ ID NO: 545358 - DNA, 586 bp, Homo sapiens
tggcagtgaggacaaagacgttgacagcagtgtttctcaccctgtaagaggaacatggatttcctgggatcttgttaaaatgcgggctctgattcataatcttgggatgggcctgcagttgtgtcttcttgagcagctcccaggtgatgctgatgctttttgtacctggatcacactcggagtggtcacggcctggaggggaacgcaggtgctacagggagagtacctgaagatgcttggaaatgatgcctttacattgctgtcaggatacatgattggatgggtccatgatggtgttttcagaagaacggcaacagayggaaaggaaaatgggaattggaggccaaaagttttcataaagcaaaggtggaatgtggacttctgcagatgaaaaggaggttgctggaaacagaacagtgcatccactgcaattagtctcggcagcgcgtgacaataaattcctgataacagtggcttaaaccaaagggacttttatgtctctctcacatccagaaagtcaggaggttggtagtgtagggtggaacgtgatttaacagtgccattgacttccctggatcccaacatt

SEQ ID NO: 545359 - DNA, 513 bp, Homo sapiens
tcaaatgtaaacctgctattggtatgaacttcactaatttcctaattcagacccaaatgttaattttcttagagaatcataaaccacaccaaagttaaaaacaaacaaacttgtaaacaaattctaaacaaaatccaacttctttcattaaaactagtaattaaaggagaataaaattgatatgcatttactcaaagttttaggagcatttacctcttcaaaagaattcatggatcaactgaaacttaaacttttaaagattttaaaccactatctgtgtcacttgcttatctgtttggtcttggtttagtatgaaacatgtctctggtctgaaataaaagacgattgcatttcaaaaaagaccaatttrtaacaaaaaactcaaatcaggataatatgaatgaagtggtattacacataaagacaagagcagaagtcaagtttttccccaaaggatctgaaaatatcatcaagagtcaatgacctctcatttagcctttgaataagaagagt

SEQ ID NO: 545360 - DNA, 557 bp, Homo sapiens
cccccatacaacatcactctgagatcttggaacttttagatgccatcaaactccaaaagaaatagaagttattcattgcgggagacacaaaaagggagatatctctatcattatggaaaatgacctggcaccaaaggccactgctaaggacagctcaatactgttagcttctgcactaatacctgatactccactcatgtcagtgacaacacactgtacacttgaggaaattaaataggcagaaaaaagacttagagaaagattccccagggtggttgctagaaagcaaaaaactctccctgaggctgagcaatgaaaaataagcatttccacaacccctcacacttgagatgggattctctattcaaactggtttcccaaatattactggggaagagacatttcagactggaaaaagggtcactagggcctgtgaactttgtgcccataacaactcaggaaggcatcccatacccctgcccctayttaaacctgtacaacaccaagaaacatacgctggagaagactggcaaatagatttcacccagatgccacct

SEQ ID NO: 545361 - DNA, 585 bp, Homo sapiens
cctgaattcaaacatcggtatatctgattcttaacatttttcttctgtttctctaacaaatacatgaacttaatgaagtaatataatcctgagtttaacaaccattatgtcagagatcggctacagtgatgccaacacattgatccatcagcccttgggatagccagacaggcctgggatggccagccacattggtctgctagaagtcttgtcattttatcccaatgaggcaatacattttatagttttttatgtgtacgattacatgaaaaatttgggcagcaaaatttaacttctacgagtgtcagtgttttcctctaaatgyggggctattcatatgttttgctaaggttttggtgaggattaaatgagtcattgtattagccagtgttctccagagaaatagaaccataggaggtgtgtgtgtgtgtgtgtgtgtgtgtgtgtgtgtgtgtgcacgtgcatgtaaagagagagagggggagggaaggaggaagagagagagagagaaagagagagatggattaaaagtattggctcataagattatggagactgacaagtcctaaaatctgcagtcagcca

SEQ ID NO: 545362 - DNA, 524 bp, Homo sapiens
tctccataataaatagctggcatttcattggtcagcataagatgacagactgggacaatgactttggccatggaccagaaagaagctgaatggcctttataacaactggacccgtgaacttggcctcattagtagccagatgaactaagaggaaaaacaaatatttctactttaactttgagaatgactgtcttagcatcttctagttagcacaatattgagcaggagactatctctcccatttatcaaacatcttgaaataaacaccaagtggatgagactctgttaatatctaatgctcaactgaatgttttaaaaagaaaatattttgtgttttttaaattgaacacctctctatttatatattaggaactaygtttatacaggtccttttacaagtggttggctccttgagtaatacctaagagagactaaaaacttgagtaagccaaacttaaaatactttgtgtgatacgaatacttaacgactcgaatttcaaactgttaatgtcttttctctctaa

SEQ ID NO: 545363 - DNA, 477 bp, Homo sapiens
cacttctctgttgtcaagttcatctggatatttggggagcaatttctctygctctcacaaccataccttcttccactcttacctccgccttcccatggagccatctaaaaagggcagccacataggctgcaattaaagaagccccacactgctctacattaatgaggcactttgcttttcattttcagagggctctttagcactttgtaggtgacacccttgcctgtgacaatctctgttactagctgcggagatacaccttgcaggtgagtttaaacacacggacagcaacttacaagcaggcaaagacagttgaggaggatgatccagagttgtccctttattaatttctgattggtttaaaaactgttttctttcaccacacatagaaggcaaaagtctcttggtgtagtaaaaggaaaaccttgtcaatggcagtccaaatgtcttctggctgacagccaaaatgaatctctt

SEQ ID NO: 545364 - DNA, 477 bp, Homo sapiens
cacttctctgttgtcaagttcatctggatatttggggagcaatttctctcgctctcacaaccataccttcttccactcttasctccgccttcccatggagccatctaaaaagggcagccacataggctgcaattaaagaagccccacactgctctacattaatgaggcactttgcttttcattttcagagggctctttagcactttgtaggtgacacccttgcctgtgacaatctctgttactagctgcggagatacaccttgcaggtgagtttaaacacacggacagcaacttacaagcaggcaaagacagttgaggaggatgatccagagttgtccctttattaatttctgattggtttaaaaactgttttctttcaccacacatagaaggcaaaagtctcttggtgtagtaaaaggaaaaccttgtcaatggcagtccaaatgtcttctggctgacagccaaaatgaatctctt

SEQ ID NO: 545365 - DNA, 449 bp, Homo sapiens
tcatttgtaaaataagggtaatacttgcctcacaggactgcctggtggatcagatgagatactaagtatgtgagctgtgttgtgacctggtccccactaggcactcaggggaggaatggctcctaaactattcccatacagtggcaggaaagtcgatggaatcagacacattggaggaggactgagggagttctcaccatgtctaggaatatttccaggcagctaagaagtagatgccactctctcctggatactkccatgtctgctgggcactatgccctttttcccgggtcctgcaccctttactgatagaggatttatggtgtcaaagccctgtcattttctctggagtcactggtgagcaatgtccaccaacccatgacccccgtagaagtggataaagccctctctccactttatagttacagtaaccaggtacacatggatat

SEQ ID NO: 545366 - DNA, 582 bp, Homo sapiens
tgtggcagtaattaactgtaattgaaaaatatcccattttttatggttctctgaattttcagtgatcttttcccctccctccttcctctcctctaactctgactgcttcaccataacataatcctcccctgccccacattcaagctactttaatagaaatgtaagcaatttaagtagggtacccgttacgtcacaaggttttaaaattattaaggctcctactctcctagtcgggtctatctttgagatatgtgactttatgcctggaaccatgggkgagtggagctgggaaatatacccatcacatagaagaaaagggctctgttctataatattccttttgtccatctcaccttctctaagaatggaacataaacctcattcaagaaagatgtgtgaaaaacacttctgagatagcatatagtagaagaagtgtctatgccttcatcaggatccctgagaggtgaaatgtcctttttatagctggccaattctgaattttaatattatctccttcaaggagactcaggcctccttgctaaagcacagcttataattcttccacttgtactttctaggcag

SEQ ID NO: 545367 - DNA, 508 bp, Homo sapiens
ctgcctctggataggattctgccagctcctggccagactagttctgttgcattgcacaggctgagcaaaaagaagggagatgtgttactgggcagagtgagctccagacatgccagacatgcagggactgtcctataacatggaactcagccgagcatggagacagagtaagggtggtgggctttttgggcgctagaaagagtaccaggccttcacctcttcacctctcacctcacacaatggctattttatttgctgctgatcctagccagtgttaatcaggcctgagcctaccagtctccasctgccaaattatggctcccaatagtcactggcaattggacctatctgatctttcttatgtcaggtctgctacttattattgaatcccagaccaagagtcttgaacaggaggagagagaggacttctgaattatcctggggtctcttgctcttaaatccagacctgatcatgagtgagggaagagggcaatgtgaagaggactgt

SEQ ID NO: 545368 - DNA, 508 bp, Homo sapiens
ctgcctctggataggattctgccagctcctggccagactagttctgttgcattgcacaggctgagcaaaaagaagggagatgtgttactgggcagagtgagctccagacatgccagacatgcagggactgtcctataacatggaactcagccgagcatggagacagagtaagggtggtgggctttttgggcgctagaaagagtaccaggccttcacctcttcacctctcacctcacacaatggctattttatttgctgctgatcctagccagtgttaatcaggcctgagcctaccagtctccagctgccaaattatggctcccaatagtcactggcaattggacctatctgmtctttcttatgtcaggtctgctacttattattgaatcccagaccaagagtcttgaacaggaggagagagaggacttctgaattatcctggggtctcttgctcttaaatccagacctgatcatgagtgagggaagagggcaatgtgaagaggactgt

SEQ ID NO: 545369 - DNA, 548 bp, Homo sapiens
tcttaggagtttggacataaccctggggtcaatgaggaaagactgaaagttaactaacagggaaatgatctgattgggatgcttttgcaggctcagatttgagttcagttcaagaagaccttttcttgaattacagccattcagagatgaggtgggctgcccaggaggtggtgagctctctgccactggaggcattcgagaagagatgggagggctattttgaagggatgttagccaacagatcccagtatccaaagaaggatcaaatgaggtgatcttgatggtccattccaaccttgggcttctctgagaactgaaaatcgcagtccygtgggggctgcaggcaatggggacaaaagaaggtttgaggcacagtagggtgggcactgtagataaatgttaccatttaggctttggcttaattttatttccagatggctgagaaaagggagacactggatcagggcatgaggaacaggttccaaatgtcttcccccaaaacactgggagatgcagagttgacaataataggctggtacttacagaca

SEQ ID NO: 545370 - DNA, 559 bp, Homo sapiens
cctcccacgctgactcctgaaacacggtcagcagcccctagcagccagagaggtcattgggtctcccagcccacagggaggctggtgacattttcatccttttatgagctaatatcttgggctcccactcatgtctgggaacttgaaccactccagcctgcacccttatgttggtttgctgacaaagcagagagcttaagctggctgacccgagggcagagaaagggaccaggacttgtggaggaagaggcccagaggcagggggatggcagcaaggggctcctgcccaggaagctctatttggtggggagaggagggggccaygcctggcaggatttcctagaatcagaggtaggctcatgtagttcaaccctctcattttattgtgtttttgtttcttaattttaaaatcgactttactggagtataatttacatgcaataaaggcatcagttttatgtgttcagatttcacacatgaaatactaatggactaatggatacacatatgggaccatgaccacaatcaagagatagaacatttctaacatccacgaaat

SEQ ID NO: 545371 - DNA, 559 bp, Homo sapiens
cctcccacgctgactcctgaaacacggtcagcagcccctagcagccagagaggtcattgggtctcccagcccacagggaggctggtgacattttcatccttttatgagctaatatcttgggctcccactcatgtctgggaacttgaaccactccagcctgcacccttatgttggtttgctgacaaagcagagagcttaagctggctgacccgagggcagagaaagggaccaggacttgtggaggaagaggcccagaggcagggggatggcagcaaggggctcctgcccaggaagctctatttggtggggagaggagggggccatgcctggcaggatttcctagaatcagaggtaggctcatgtagttcaaccctctcattttattgtgtttttgtttsttaattttaaaatcgactttactggagtataatttacatgcaataaaggcatcagttttatgtgttcagatttcacacatgaaatactaatggactaatggatacacatatgggaccatgaccacaatcaagagatagaacatttctaacatccacgaaat

SEQ ID NO: 545372 - DNA, 391 bp, Homo sapiens
agtaaagcgacactggaatccaggtcctmtgaacttcaaagttatcagtcaccctctcactcctttcaccacctgtcacctctcaccactcaccccaccagtcctctagcagactttttacatagactactgctgcgataattcctcacatccctgtatctctttgaaatttagccttgctgctcctcttatcaagaagagccctcaaatctgggtttggccatgccacttgttttgaccaacaaatcaagcagaagtgatgtgcaacttatgagcctagggctgaagaggtctttcagcttttatgcttaccctcttggaactctgagacaagaagcccaggctagcctccttggggataagagaccacatgtagagaaaggccaagctg

SEQ ID NO: 545373 - DNA, 507 bp, Homo sapiens
gtgtggtggcgcatatctgtaatcccagctactctggtggctgaggcaggagaatcacttgaacccggaaggtagaggttgcagtgagccaagatcggtgccactgcactccagcctgggcgatagagtgagactccatctcaaaaaaaaaaaaattttttttgtagagacgggatctcgttatgtagactgggctcaagtgatcttcctgcctcagcctcccaaagtgagccaccrcgcctggtctgagtgtgtaattttgactctaccttttggatgctttgtaaattggataaaagtttctttaccctgagctgcttgggctggtgctactgccattttcaaattttccagagtaatgtgacatctggaaactattttaaaccatctgtggtaatctgtaccccaacccaatatagttcagttctctgtcggtttatcagtttcctatttatctctttgtatatttctgcaataaagatacgaagttgggagggggcaaaggaa

SEQ ID NO: 545374 - DNA, 577 bp, Homo sapiens
aagcagcttagccaccacgaaggagaaccaagagcaggaacccacactttgctctggtgtaaactcagtcttctctctaaggccttggattcaaattagaggggtagattcaaaagcctctgcagctttcgtgcttgtgttttgttttcttatgtgatctttcttttttttttttgagacagggtcttactctgtcacccaggctggagtacagtrgtgcaatctcagctcactgcaacctccacctcccaagttcaagcaattctcccacctcagcctcctgagtagctgggattacaggtgtgcaccaccacatctggctaatttttgtatttttagtagagacagggtttcaccatgttggccaggctgatctctaactcctggcctcaagtgatccacccgcctcagcctcccaaagtgctgggattacaggtgtgagccaccgtgcccggcctgtgacttcggttttgtttgctctctttccctggttctccttggtttgctcattctgatgacagcaaatgccgtgttttgagctgccctgtggagcagcccatggagcaagaaactgagg

SEQ ID NO: 545375 - DNA, 577 bp, Homo sapiens
aagcagcttagccaccacgaaggagaaccaagagcaggaacccacactttgctctggtgtaaactcagtcttctctctaaggccttggattcaaattagaggggtagattcaaaagcctctgcagctttcgtgcttgtgttttgttttcttatgtgatctttcttttttttttttgagacagggtcttactctgtcacccaggctggagtacagtagtgcaatctcagctcactgcaacctccacctcccaagttcaagcaattctcccacctcagcctcctgagtagctgggattacaggtgtgcrccaccacatctggctaatttttgtatttttagtagagacagggtttcaccatgttggccaggctgatctctaactcctggcctcaagtgatccacccgcctcagcctcccaaagtgctgggattacaggtgtgagccaccgtgcccggcctgtgacttcggttttgtttgctctctttccctggttctccttggtttgctcattctgatgacagcaaatgccgtgttttgagctgccctgtggagcagcccatggagcaagaaactgagg

SEQ ID NO: 545376 - DNA, 574 bp, Homo sapiens
cagtgtaatgacttacccaggggcactcagctggctagttgcagagctgggaatcaaacccaagctgtgcttttctcccaaatgcccagtctccccaggrgatgcatgaataggaaaaacaggaccttacgtactttgcaggttactaccgtgatgtccttgctagcgactcctccacgctttagtaccatcaagggtccaggttgggcaagtactcgaacctccattctgccctgggataacctgggcagaaaagccaaacacagcaggggagcaggaacaaagcgctcccttttatggtgaggcggtgcaaacctctgcatctgcctccaggccttgccaaggcccacagagaaatggcctgccctaaagattgcagtgagctgagattgcgccactgcactccagcctgggtgacagagtgagattctgtctcaaaaaaaaaaagagagagaaaaaaagagaaaaaaaacagaaatggcctgccctgactgagcccgaagccttctgccctgatctctgcttttctttgtgtacctgtctggttacaaaggaagcagctgccagctcactg

SEQ ID NO: 545377 - DNA, 574 bp, Homo sapiens
cagtgtaatgacttacccaggggcactcagctggctagttgcagagctgggaatcaaacccaagctgtgcttttctcccaaatgcccagtctccccaggggatgcatgaataggaaaaacaggaccttacrtactttgcaggttactaccgtgatgtccttgctagcgactcctccacgctttagtaccatcaagggtccaggttgggcaagtactcgaacctccattctgccctgggataacctgggcagaaaagccaaacacagcaggggagcaggaacaaagcgctcccttttatggtgaggcggtgcaaacctctgcatctgcctccaggccttgccaaggcccacagagaaatggcctgccctaaagattgcagtgagctgagattgcgccactgcactccagcctgggtgacagagtgagattctgtctcaaaaaaaaaaagagagagaaaaaaagagaaaaaaaacagaaatggcctgccctgactgagcccgaagccttctgccctgatctctgcttttctttgtgtacctgtctggttacaaaggaagcagctgccagctcactg

SEQ ID NO: 545378 - DNA, 574 bp, Homo sapiens
cagtgtaatgacttacccaggggcactcagctggctagttgcagagctgggaatcaaacccaagctgtgcttttctcccaaatgcccagtctccccaggggatgcatgaataggaaaaacaggaccttacgtactttgcaggttactaccgtgatgtccttgctagcractcctccacgctttagtaccatcaagggtccaggttgggcaagtactcgaacctccattctgccctgggataacctgggcagaaaagccaaacacagcaggggagcaggaacaaagcgctcccttttatggtgaggcggtgcaaacctctgcatctgcctccaggccttgccaaggcccacagagaaatggcctgccctaaagattgcagtgagctgagattgcgccactgcactccagcctgggtgacagagtgagattctgtctcaaaaaaaaaaagagagagaaaaaaagagaaaaaaaacagaaatggcctgccctgactgagcccgaagccttctgccctgatctctgcttttctttgtgtacctgtctggttacaaaggaagcagctgccagctcactg

SEQ ID NO: 545379 - DNA, 574 bp, Homo sapiens
cagtgtaatgacttacccaggggcactcagctggctagttgcagagctgggaatcaaacccaagctgtgcttttctcccaaatgcccagtctccccaggggatgcatgaataggaaaaacaggaccttacgtactttgcaggttactaccgtgatgtccttgctagcgactcctccacgctttagtaccatcaagggtccaggttgggcaagtactcgaacctccattctgccctgggataacctgggcagaaaagccaaacacrgcaggggagcaggaacaaagcgctcccttttatggtgaggcggtgcaaacctctgcatctgcctccaggccttgccaaggcccacagagaaatggcctgccctaaagattgcagtgagctgagattgcgccactgcactccagcctgggtgacagagtgagattctgtctcaaaaaaaaaaagagagagaaaaaaagagaaaaaaaacagaaatggcctgccctgactgagcccgaagccttctgccctgatctctgcttttctttgtgtacctgtctggttacaaaggaagcagctgccagctcactg

SEQ ID NO: 545380 - DNA, 570 bp, Homo sapiens
ctgcatgaccttggacaatctactgaacttcctgtgccttagtttctttatccttaaaatggaggtaataataatattaaccacaatgtaggcttgttattataaggattaaatgatttcatgtaggtaaggcacttagcagtacccagcgtaataagcacttaatgagagcaacttggtattattgcctgcctgcctgcctgccttccttgcttccttccttccttccttcctttccttccttccttccttccttccttccttccttccttccttccctccytccttcctctctctcacccccttctttctttctttctctctctcttttttctttctttcccctccctccctccctcccttcctccctccctcccttccatcctcccttcctcccttcttccttctctgcatccctcctttcaataaacaaatccttttaaattgtataaagccctggaactaccaagacctgcaaggctcaatagctcgtagtcttgtccaaggttccacagacagaaaatggactcactgggaagtgccatcttttaggaattcactcttatctga

SEQ ID NO: 545381 - DNA, 563 bp, Homo sapiens
tggaccgtggggccctggggatgagccagatcacagagggccttgtttgtctttggagcttaagactttgttcagaaagccacggagcacaagtgaatcatttcaagcaaagaatagcatgttttcagatttatattttaaaaaatgtacagaagcagcaatgcaaagttgaagttgatagagaaagactctggggagtgtaaccaattatgtcactattgaaattgtcaggaaagaatccacaggggcctgatccaaggtagaaatggtaagaatgagaggaaggratggttagaagagatgtggatcatgagactctataggacctggtgagtgatgatgtcatccttcggaatgggtaaccccggaggggactgaggggaaaagacaatgagttttggacacctggagtccgaggaggccataggatctctaggtgaaattgggcaggaggaagttggagatagaagacaggcaatcagagggacactgttgcttgcagtgtgcactccggtgcacatagcatggtagcgaccatgggggtgcgtggggtaggcctggga

SEQ ID NO: 545382 - DNA, 591 bp, Homo sapiens
tggaccgtggggccctggggatgagccagatcacagagggccttgtttgtctttggagcttaagactttgttcagaaagccacggagcacaagtgaatcatttcaagcaaagaatagcatgttttcagatttatattttaaaaaatgtacagaagcagcaatgcaaagttgaagttgatagagaaagactctggggagtgtaaccaattatgtcactattgaaattgtcaggaaagaatccacaggggcctgatccaaggtagaaatggtaagaatgagaggaagggatggttagaagagatgtggatcatgagamtctataggacctggtgagtgatgatgtcatccttcggaatgggtaaccccggaggggactgaggggaaaagacaatgagttttggacacctggagtccgaggaggccataggatctctaggtgaaattgggcaggaggaagttggagatagaagacaggcaatcagagggacactgttgcttgcagtgtgcactccggtgcacatagcatggtagcgaccatgggggtgcgtggggtaggcctgggagagtgtggaggctaaaagggaaggggag

SEQ ID NO: 545383 - DNA, 591 bp, Homo sapiens
tggaccgtggggccctggggatgagccagatcacagagggccttgtttgtctttggagcttaagactttgttcagaaagccacggagcacaagtgaatcatttcaagcaaagaatagcatgttttcagatttatattttaaaaaatgtacagaagcagcaatgcaaagttgaagttgatagagaaagactctggggagtgtaaccaattatgtcactattgaaattgtcaggaaagaatccacaggggcctgatccaaggtagaaatggtaagaatgagaggaagggatggttagaagagatgtggatcatgagactctataggacctggtgagtgatgatgtcatccttcggaatgggtaaccccggaggggactgaggggaaaagacaatgagttttggacacctggagtccgaggaggccataggatctcyaggtgaaattgggcaggaggaagttggagatagaagacaggcaatcagagggacactgttgcttgcagtgtgcactccggtgcacatagcatggtagcgaccatgggggtgcgtggggtaggcctgggagagtgtggaggctaaaagggaaggggag

SEQ ID NO: 545384 - DNA, 474 bp, Homo sapiens
tttttcaaattcctaattttgtcagtaatttcctttactaaaatggatgtgtcaggttgtgaaattctttggggttccccccctcctcattatctttgatttgccattaagtgctgtgatcatgataacccgctgagaaaaagtttgattttattgagtaatcaccccatgttttggattcttgggcatgctatgattagaggctttaaaaaccacactatattttcaccaccattggcaccaatgactgttaacaaaggagccaagtgcaccgtggccaattaatttcagaagactttctgtgggctggctgagatagagctaggatagggttccaaccctgcacttggtactgtgatctgttgcattggttctcagacttcagtggatgtaagaattgcttagagagcttkaaaaaaagtgtggatgcatgtgtcctcacccctagaggctgtgattagtagacccaggcag

SEQ ID NO: 545385 - DNA, 587 bp, Homo sapiens
ctgggcctctgcacctctccaaggcccctcagagcatatcactgtggtgtctccagcaggagaggtgggcttctttcgtggcagctcagagctctcagacagccaggcagaggccattctagtcctctgaaaggttacctctgggacaggctaacgtccaccattctccatgtgtcaaagccatcacaggcttgtcgggagcccagagggaggggcaaacagatgcgaccaatgggccaacgggaagagcattcaggaatgagcagtctttctgagatgcggcctattcagcatacaattcttgagatgctgctgggtggtacacatggagcatgtgcataaaagaagaggtgmtttactctctgggtcaaagcggtaggctctctaatggttttaggttggacctatcactatagggtgacctctcccatttagtggatcctccttctccatgccgcagtgattgcccttaagtggcatggagtttctaaccattatagatgctctttctcccttctggggccctggccatacataaacagacacacagaacaacattaaggagaatatgggaaatcagtacttgt

SEQ ID NO: 545386 - DNA, 577 bp, Homo sapiens
ttgacattgacatggggactcagaatttggcctgcttgagagaccatagattttttaaatgttcctcttctatcagtattgaatgagatttgttgacagcatcaagaggaaagtcaaagttgtcattttttattgaaggtggtggagcaagaagttggaggaacttattctattaacaattcttggcagcaatcactcttctcttttgcccccatacagacrcctcacttttgggaaatgatttcaaatcttaaacaagatgttagctcagttttatttctgctgaatagaacagaagttttaatactagagttctgataggctgtgggctcttctaccctttcattataatgtactttcactgaggccatataatctaacttgtgtaaaacttgtcattattggggaattgactccaaatataacaaatcaagatggtcaacttgctcaactgggaaagtcaacatttaagacaaatctaatcatgcatgccagttctcaacgaggtgagtttcagccatacccagttgtgcaagttttacacaaaacccagtttatcttctttgctgcctagagg

SEQ ID NO: 545387 - DNA, 397 bp, Homo sapiens
ctttggcaagcctggagctgatcatcagtaaaatgaaaataatgatgctttcttttcagagttgttttagggaaatgagaaacccatgggaggctttagtgcttactatcttagcctcaccttgccttctctgcagaagagatgtctgtgatagaaactaaatgcataactctaagagagaacagttgggaccctaagtgtacagagggaaatgtgatgtattagccatggtgactgtccagtattgyaggatgagttacctgaggggctttggaagggaacagaaaaatcctcatgccatttcctaccatcatatgtgctttcctgtccttagtactttgtcttttatgttgtaagggaagaaagactctaagaggtgcaagataaagagatttcc

SEQ ID NO: 545388 - DNA, 560 bp, Homo sapiens
cactccccaagacacttgcctttctgggaatactccctccatggtccttactatcattgcattgttgtgacagtgtcctggtggtgctgaattcctttgctcttttttttttttttaagttggtgcttttctttagatcatttgacaaaatcaccttgactagttgtcaacagccttcacctgaacacttccagtagaaactctcccaagtggctttatttcaatctctggacagctctgacagagaggatattccttttggctctgggctcagacgcgatgtcctggaacttctctcattttgtctggttgtgtcctatgtgggccacaccaagcatcatgtctgtcccactttacatttcagaagacaacaggccacacttgaggcttctctcctccaggcccaacatcctcagtttcttaagttgttcctcatctggacagaggcctaaagttcttcctttctgctcaatgatatttgtattccatggagatagaacccaagtaaaccccaaaccaaarcattgtgggtcagtaattgtccttcttttaccccagca

SEQ ID NO: 545389 - DNA, 626 bp, Homo sapiens
tgtgagccagagaagagacctggctcgtgccccagccctgctcctgtcctgctaagcctcagtttcctcatctgtagcacagggatctctgtgagcgcttcaggcaccaacaatctgctccctgggctcagtaggggatatctgatcccaccatttccccagccacatgccccagaagagggccgcagacctagtacaagagggagcaataaggtgacatcctctgctctgagaggtagagtgtttggggaagaccccagcccctgggaagggggccacttagccaggcctgcctgccacggggcatggctactctaagctgtctcaccctccccctttaggcatagctggggcaggtggaggtcagcccagttcagggctttccatgaagctgaggtaggcttccctgcctttcccactttgtgagctgtaaaattggcctttcctgaccattttcctgcaggactgctgtatgtgtgagaggtagtctttggaagaaaaggggcctctagaatytgaagcttctgatttctggttatgaggccaaagatcccaaaggtccttccagacacctcaggagggccctggggggcagaggctgggggctgtacagccaattacctcag

SEQ ID NO: 545390 - DNA, 439 bp, Homo sapiens
cagttaatcaagattagggaataaccagagtttatgtgcaaaagaattttaaatcccatgtaaactggcttcataggcttgctaatggaatttgtgcagtgcctgatactgaggggacagagaagagatggagacatgtcaagttaatcttytcaagagtttttcttttccttctctaactctctgaacacttaattgatttttcaaccagcctaatttgggtaacacaataaatacttatgggagaatgtgtctggggttaaaagcccatatttaggtgtcagatatacacatcacctaaatttaagtaattcatctactttttgatttacatgtaaccttgagcaagttattaaatttccataaaatcccagccctatatagtccttgtgaatggcagtcctggagttgtgcaatgcatggatctcctggctgtata

SEQ ID NO: 545391 - DNA, 572 bp, Homo sapiens
aacacttcctgctaataagtatggaatgctctctttgtatttaacctcacatttttttgaaataagtagcctaaagaagttttaaatcgaatttcaactaagatatctgattgaaggtcaagtgtgccttatctcttttgcaagaagaagcaataaatgtgcccaaagctacctgcaagatgagtggttaatgtgaaattaaaagctagacttactgccctcaagactatgtgataggctggctgattgtaaaaatcgctttaattctttataccttcctctatccttgcygtttgcaatgtgatttcattcagcaggcttctcacccctgcccttgaaccttggctggctttatgacctgctttggcctgttgaatgggtagaagtgactgcgtgccaatttccagtttcagcttagggctgaagcagtctggcaggcttccatttgttttcttagaaccccatcatctctaagtgagcaaaatcagagtaatgcattaaaggaaaaatcatgtgaggtgaaggtgaatcacttcaaatcataccatcctagaccagccaacactcagcca

SEQ ID NO: 545392 - DNA, 360 bp, Homo sapiens
gggaaatgtgaagctggatttgtgtctcagcctttctgasctcagagccaccagtattcatcatcattatgcttaccactttactacttctatcccttagaatattctttcctcagtgcttgaaatcccaatctccctttttatctgattcaacaaactcttgttttgtcttttattattttatgttatttttaaattttttgtagagacagggtcacccaatgttacccagactggtcttgaaaacctgggctcaagagattttcctgcctcagcttcccaaagttttgggattataggcatgagccacggtgcccagcatttttttttttttttttcagatggagtctcactctgtca

SEQ ID NO: 545393 - DNA, 499 bp, Homo sapiens
gctgggagatctaagttatattgtaacctctccatgcctcagttttctcacctgtaaagaggagataatatgtggtagttgtgacaatgacatgaggctgcaaattgctgagagtgcttgacacatagtaagtgttcagttgaatagtcatggtgagggggaagaagtatagttttggtagagagcttgggatttggccccataagagacccaagttcaaaattgtaactctgttgcctggcagcggcaaagtccttttgtcttcatagtaatgagacagtggacagttcctactggcaagtcagtggtccacacaggggccgcatatcaggctatccaggtatcccagccctcaaagtgggttataaggtatccatccccsctacccccattccaagaaagtggcttctggccaactcaggagggggctggcagagttgcactcatgaagcccggcttcccttcaggaaagctacagagaagtgactgccctgaaatc

SEQ ID NO: 545394 - DNA, 625 bp, Homo sapiens
ttggaaagacaagacaaggcataaaattggccatcacagggctaaaygtgggttatcaagtaatgactgtataatcctaacctgaaaacatttctcactccctgattcccaccctttctctcaccaatttgcaacagaataaacatatgctcctcaacttacaatggagttcagtccggttaaacctgtcgtaaagtcaaataattttaagtcgaaccatcctaagttggagtccgtctgtattggacacaattatgcaacgtggaatggctacgcatgtggtttagacatgtattgaaacacagaattgagcacgggaatggttaaatttcctaactgctgcttgaaaaaactcccgtggtttcaggagaaaatcaggttccttgtatacctttgcatgaaacctaacttgatgcttttgcttttatacctctgaactgatcacattgccctcaaggaaaaatcaagctatgaaaagacttgctctaaaggtgaggctcacctcatcctgtctacctaaggtatccatgccttgaaggtgccatcactacaatatgagataggatggcagaggacaacgttcaagtgcttgggttctggactcagactgacgtggatttgaatc

SEQ ID NO: 545395 - DNA, 451 bp, Homo sapiens
ttttgtattgtctttatttgttcatgtgtgaggggaccgctattcagtgtttttgcttttatctaaattttaggttaaagaacatggataaagaattgaatttttctataagtattgttttactaaaaacagcaatctcttacccacatccccatttcccacttcccaaaaacgtactcttttgcctgattttttaacatgtagctataaatctatcaatatcattcttagattgttaytgattacttagattaggcattatctatcagcttcccattgtgaaagatgatgatttagcttcacttcatgcctgcaaacactacacaatctcctctttcctgacttctctcttaatcctcaacctcttgctttctctctccacccctcacagatgtgtatattgtaattgtgtttagatcaatatccaatactttttatgactatataagta

SEQ ID NO: 545396 - DNA, 649 bp, Homo sapiens
atttgtatacagtaaaaacacaatattatagtcttaaagaagcatcattgtataatgcagtctattgttgaccaaaatggttttttgtggcatatcactgcacatgtacattgtggaataaataaatcacaaagaaaatgataattaagtcaacataagttagctaaagtttctttcctaaggatggaaggagtagcctstgaattattatgcttgatgctttttttgagaatagataaactaaaagaccttgatgttgacccagaactaccaagagtagtaatcctttgttgttcttttttgacttcccactgactctctatgtgtgagaatgttctacattaatgatgcagaatattctcctattacaaagacttaaaatgccagatattcacgttcttagattcccttgaagctaagatgcaaggacatgactcactattgaaaaatagtattcactgtctcggatattgaccacataccactggctagaagaagcagggccatgcagaaacccctgcgatgatggcattgtcatggcagttgatacatccaatgtctcgaagctggagtgatatcacttgtagcagtatcattaagctgtgctcacaataagcaagttgtggtgtctgtgaccattggcaataat

SEQ ID NO: 545397 - DNA, 649 bp, Homo sapiens
atttgtatacagtaaaaacacaatattatagtcttaaagaagcatcattgtataatgcagtctattgttgaccaaaatggttttttgtggcatatcactgcacatgtacattgtggaataaataaatcacaaagaaaatgataattaagtcaacataagttagctaaagtttctttcctaaggatggaaggagtagcctgtgaattattatgcttgatgctttttttgagaatagataaactaaaagaccttgatgttgacccagaactaccaagagtagtaatcctttgttgttcttttttgacttcccactgactctctatgtgtgagaatgttctacattaatgatgcagaatattstcctattacaaagacttaaaatgccagatattcacgttcttagattcccttgaagctaagatgcaaggacatgactcactattgaaaaatagtattcactgtctcggatattgaccacataccactggctagaagaagcagggccatgcagaaacccctgcgatgatggcattgtcatggcagttgatacatccaatgtctcgaagctggagtgatatcacttgtagcagtatcattaagctgtgctcacaataagcaagttgtggtgtctgtgaccattggcaataat

SEQ ID NO: 545398 - DNA, 649 bp, Homo sapiens
atttgtatacagtaaaaacacaatattatagtcttaaagaagcatcattgtataatgcagtctattgttgaccaaaatggttttttgtggcatatcactgcacatgtacattgtggaataaataaatcacaaagaaaatgataattaagtcaacataagttagctaaagtttctttcctaaggatggaaggagtagcctgtgaattattatgcttgatgctttttttgagaatagataaactaaaagaccttgatgttgacccagaactaccaagagtagtaatcctttgttgttcttttttgacttcccactgactctctatgtgtgagaatgttctacattaatgatgcagaatattctcctattacaaagacttaaaatgccagatattcacgttcttagattcccttgaakctaagatgcaaggacatgactcactattgaaaaatagtattcactgtctcggatattgaccacataccactggctagaagaagcagggccatgcagaaacccctgcgatgatggcattgtcatggcagttgatacatccaatgtctcgaagctggagtgatatcacttgtagcagtatcattaagctgtgctcacaataagcaagttgtggtgtctgtgaccattggcaataat

SEQ ID NO: 545399 - DNA, 649 bp, Homo sapiens
atttgtatacagtaaaaacacaatattatagtcttaaagaagcatcattgtataatgcagtctattgttgaccaaaatggttttttgtggcatatcactgcacatgtacattgtggaataaataaatcacaaagaaaatgataattaagtcaacataagttagctaaagtttctttcctaaggatggaaggagtagcctgtgaattattatgcttgatgctttttttgagaatagataaactaaaagaccttgatgttgacccagaactaccaagagtagtaatcctttgttgttcttttttgacttcccactgactctctatgtgtgagaatgttctacattaatgatgcagaatattctcctattacaaagacttaaaatgccagatattcacgttcttagattcccttgaagctaagatgcaaggacatgactcactattgaaaaatagtattcactgtctcggatattgaccacataccactggctagaagaagcagggccatgcagaaacccctgygatgatggcattgtcatggcagttgatacatccaatgtctcgaagctggagtgatatcacttgtagcagtatcattaagctgtgctcacaataagcaagttgtggtgtctgtgaccattggcaataat

SEQ ID NO: 545400 - DNA, 603 bp, Homo sapiens
tagtagtgttacttggtgtagttcataacctgtaggcctcaatttcctcatctgaaaactgataatacatacttcacagttgcgtgtgtgtgttgtgtaaaataactaaataatatttatgatgcctacaagcatggacttggcattcacatgatttgaataacaggaaggtggcaatagaaataagcaggtattatcccaggatttagacagagaacatgaaatacagagaatttaattcagtagcgttggtgagattaaggagagaccgtcacttttactttacttatgggttttgctagcctttttccaatgaacatgaataataattgggataaaatgtttaacaaaagcactctttggggaaccaacacattgaactactcagcaggtaataagacttgggcagcttagarggctatttaaaagagaaaaataacaaaagcatttggtaatgaagagctggcatagggtagcagttgaataaaggctctgaaacaagattgcttacatatataattctgtttcaccatttactatctgtgtaactttgggtaagttatttaatactctaggtcttggtttcataatctgtaaaaaagt

SEQ ID NO: 545401 - DNA, 576 bp, Homo sapiens
ttttcactccaatggtctttttcatatctgtatgtgtatagatgatacttaagttgtgcatagtttttcatgattttgaacactgttacaagaaacaaatttcctccatttttgattgttttcatttccataaaataaaatcctgaaataaaaatgaaatttcttggtcaaaatttgaaatattggtcaaacagtgcaactatttagtattttagcaaacttgctctccaacaagttcccaccaatttatactttggttagaagcatatgagaatgcctgtttctccataccttcaccattactggttattgtcatgatcttaaatttttgtcactatattgcttgaataaatgagagttgttttaattttcattcacttgtttattagatatatcttatttcccatttaaatttacattttygtaattttcttgtttatatctctttaacatgagtgtcataagctactccaaaactttaaaagtccgtgatttacttttccaactagaaaatgacagatctaaattaattccaaaggtagagttggtagaaagttttattacctctctccactt

SEQ ID NO: 545402 - DNA, 606 bp, Homo sapiens
gatataagatgatgtattctggttttggcatgctgagttggaagtgctagcagaatatgtacatagccttgttcaccataacactgcaatagtgatttggatatcaggaattattgccaaaaagatatttaagtcttgcacttagaggttataattgaagccataaggatgcataaaaccattaaggaagtgagagaacaaaagttgtgtgtatacatatagacamacacacaaacacacacacaaagacctgtttatatgccattgtgaaaaatatttacaatttagcttatatagaatttatgcgccttaatagataatactacctgaaaatgtggtatgaacctaaatctaagacttaatgcaaaacctttgtaaaacaagcaaagaaagtttctgatattaagaagaaatacaagaaaatatcatccacaaaataacaaccatctttactgtgaaggagaattaatatatttgttcattgcttttcacttctgcagatataagccagttaacttttaatctaggacacatataaatatccatggagactacagttacacaaataacttttcctattcgacagtgattgagatcataaaatta

SEQ ID NO: 545403 - DNA, 617 bp, Homo sapiens
catgaaaatgaaaaacataaggcactagatgaaagagaaattggtgtagaaaggagatagaatgttagtgacctaatataacccttccctattttataattttgtcggtctgacactgccttcctgtaaagagctaatcacaatataaggattagcattctcaagttatctgctccacttgactgtgagtcctttgaaagtaggaaccccaattttagttgctttgtatcacttgctcctaggtcttgcctgatatataataaatgttcagcaaatgctgggttaaaaaaaaaaggaatgtcatttcaggggtctgaaactttcgaatcttctctcacattctttattttggycaaaggtcttatcagatgtcttccctgatcaccctatctaaaattacaccatcgtgctccagcctcttgttttattttgctatctagcagttataactatctgaagttatactatatgattaattcttattctgtttattatctgtcttctctgatataatctaatactcttaatggcagaaaccttgtgtacgtgtgtactgctgcatctccagtacctagaacagtgtccaacacaaaatagcatctcaaaaaatatttttg

SEQ ID NO: 545404 - DNA, 304 bp, Homo sapiens
cctctcagggcactgcccctccttccctccttctccacctcacatcrtcctgcctgggtcctcagaggagccctgggtagcccgagatgggtagcattcctcggtcaaggcatcagcacagaggggcacaggagtctgggaccatcagaagagaatgcagtggtcgggagagggggtccccagactctgaaccccatgctgagctggggcttgacccttcacttctcccgggagaaggtctcctgtccccgtggctgctctgtttcccatgcccagctcagactgagctcacacaggtgagaaa

SEQ ID NO: 545405 - DNA, 304 bp, Homo sapiens
cctctcagggcactgcccctccttccctccttctccacctcacatcatcctgcctgggtcctcagaggagccctgggtagcccgagatgggtagcattcctcggtcaaggcrtcagcacagaggggcacaggagtctgggaccatcagaagagaatgcagtggtcgggagagggggtccccagactctgaaccccatgctgagctggggcttgacccttcacttctcccgggagaaggtctcctgtccccgtggctgctctgtttcccatgcccagctcagactgagctcacacaggtgagaaa

SEQ ID NO: 545406 - DNA, 304 bp, Homo sapiens
cctctcagggcactgcccctccttccctccttctccacctcacatcatcctgcctgggtcctcagaggagccctgggtagcccgagatgggtagcattcctcggtcaaggcatcagcacagaggggcacaggagtcwgggaccatcagaagagaatgcagtggtcgggagagggggtccccagactctgaaccccatgctgagctggggcttgacccttcacttctcccgggagaaggtctcctgtccccgtggctgctctgtttcccatgcccagctcagactgagctcacacaggtgagaaa

SEQ ID NO: 545407 - DNA, 304 bp, Homo sapiens
cctctcagggcactgcccctccttccctccttctccacctcacatcatcctgcctgggtcctcagaggagccctgggtagcccgagatgggtagcattcctcggtcaaggcatcagcacagaggggcacaggagtctgggaccatcagaagagaatgcagtggtcgggagagggggtccccagactctgaaccccatgctgagctggggcytgacccttcacttctcccgggagaaggtctcctgtccccgtggctgctctgtttcccatgcccagctcagactgagctcacacaggtgagaaa

SEQ ID NO: 545408 - DNA, 276 bp, Homo sapiens
taataaactaatccaggagaagaaataattttggcaagttagatggtagtgggagaactaagataaagcacctccttgaccccaaaaccaaaggcctccaatgatccctgcctcctggtactcacaaccttgcatcctcttatcctgcagtatgcttggatttagtccctagcttctaaggaacagaatatgatacaggtgatgggatgtcacttyggagattactaaaaaaaaaaaaaaaaaagtagcttctgtcttagacttgagcttgcatgc

SEQ ID NO: 545409 - DNA, 616 bp, Homo sapiens
aataaacaagtgagtacatagataattatttatgctctgcatttgtaggctttcaatcacttgctgatgtttcctctgcctggaatgcytttctcctacccatggaaattttactccattctcctaaattctagctcaaatattgtttcttctatacaactccatccaactccccccactcccaggcagaattaatctctgctctaacactatatgctagtgcatataattctctactgcactcattaccttctgccttaagtttgagttatctacatatcaggctgatctcatgcctaaacattgagctctttaaagtatggtattctccaaagtgtctagcatagtgcctggaatattgttaaattgaatggaaggaaactaaatgcttattatcaaagtagacaactccaattaaggataattagccttgagaatggcagtgttaccagcaactcaattaatgaactctaactgctcttcccagacatagacattagctggtattcagctttgggctgtaacatgtatggatttcttcattgttagctttaggtctgtgagctgttgcttctgcctgagctatgctagtgctttatatgcctccttcttgggg

SEQ ID NO: 545410 - DNA, 503 bp, Homo sapiens
atgtagttgctcagtggatgggctctggagctggattcaaccccatgctttaccatttagtagatgtatgacttcaggcaagttactttaccttctgtacttcaattttcttatctataaaatgggaacaataatagtgcctacctcaaagccttggtatgaagattaaatgaatacagataaaataataagcacagtgtctgacatttaattgatgtttaagaaagactatctcttcttattactgaaactaatgctgttagtactattaataaaaagatgatatatatagagatacaaggaaggatcaaggatgactcctatttttcaagcttgagcaactggtcctgtggtagtgccattcattgagatggggaaaagtgaaggaggaatagattcgggcgtgtgtttagtgmataacaagttttgttttttgacatgttgagtgtgagatgcctgtggaatatcagtatatagttagtcagttttggccgtgcgcggtg

SEQ ID NO: 545411 - DNA, 521 bp, Homo sapiens
gcatcagtgaacttgagttgtgcttacagacatcagggatgtctcaggcacacgaggcatgggaagtgtgtcttctaagaagggaacggatgggcaaatctgcagagagctgaggacacaggggtgagtgggaggactcggttttgttggtttgggttttttggtgaggagagctggggcrgggagggagggtggtgaatggccccattaaggccaagggcacttccagaagagtggcaggtgaggctgaaggagtggagctgaggccctcccaccccactaagggaagcccgaggatggctttcccatcgtgctcagcacatggagggatggagaaggaggagggcaagtgacttcagggacagagaacctccaggaagacacagcagtggccccaattagagaccagaagaccctcaattcaagcaggagatggggagattcaagcgataattgaaggtggagtcagcagaaacaaaagcccgcagaatgttgtttgtgaggttaatagaggcactgac

SEQ ID NO: 545412 - DNA, 628 bp, Homo sapiens
attttgatccgtttttaaataaagcttattaattacttgaaaaaattatatacagacatggcaaaaaaggtaaaagatatmaaaaggaaatctggaaaaaaaataattctaaacctcaagcctcctggtgataagatttctttgtacttgtctggaaatattctataaatataataatgtaaggtgatagaaatgggtctcattctgtctcagtctgaaatgaatcaagaagacaaagttgctatttcccaaagtgtgctatgagagactgctatagtcaagacctagcagactcacccatgtattatataacaaggttaggttgctggagattagggaagttttttgaaatggtggtttctttggaaaatgttgtgtcagcctactctggccttttggtagataggtctggtaagagagtctatgggacacccagtgaggtggggcctggtgaactggtgctgatccctagggcatctgtaggtgagcatcccagcctttggggttggcccacatcccagagtttatccaggctcagaatgcaaatgcttcctgtggactacagttgggctgtatgggagaaaggctggctttgagccacttaaaaatcttacatgggggagcagca

SEQ ID NO: 545413 - DNA, 501 bp, Homo sapiens
atgtggagcgttggctatggctaccatcttttggtcacgtatttttgggctctgagactcagaactgattgtccttccatgagctcctgaattttattggctccctcgagcacctgccttatcaagctctgagaagcattccattctgtaaaatttcccggcatgtgcatcttatgcaaatgtgcacaatccctggagataaagcctcagattttatgacttacatgtgatgactgaatgttcaygtccccatttgtgtttcctagggctgttatcacagatcacagctacagtaaatgtttacagcaattctgctgtccattttggatccttgggtgaaaagaagagcttttgcttttgcttaagatttgaatgctcattcccagggccactcactttcacaagtggaaagagaaatttgagtaatggggcttcaccatctgaaactgcgaggctaggcaggatttatcgaatgctcaaatacatcttggttacgaccag

SEQ ID NO: 545414 - DNA, 600 bp, Homo sapiens
ccagtaatgttgttgtctctaaatacgtaaaccctccaggttccagacatagagcaaatttccctagaattgtatttatcagagaaggtacctggttatagataattaactacaatttaaattttaaatatttgtaagatttttttatactctcaaatgcacacatttggaaaatactgtctttccgtccttaaagaacagtctagttccggaattacggtcctcagccgtgctctctggatcctcctggacttgcttcaatgcggaccctgggtgcggcaggggtggcttcgggagccgggagctagaacattctttgatctcaaaaygcccttccggtggaggccctggtgattctcctggagggctgggccagccatgcttttcaggtcccctcaaggggccgggcccctgccaggctgtggagctctgttggaggagaccctctgtggcaggagcagtgagccctggccgcttgcctggggtgggggcagccggcacctccctgcagccccaggactgctcctctccagctcccctccctcctcctttccttcctctcgcgctcctctgctcccgctgtgttctgtcatgagtgga

SEQ ID NO: 545415 - DNA, 600 bp, Homo sapiens
ccagtaatgttgttgtctctaaatacgtaaaccctccaggttccagacatagagcaaatttccctagaattgtatttatcagagaaggtacctggttatagataattaactacaatttaaattttaaatatttgtaagatttttttatactctcaaatgcacacatttggaaaatactgtctttccgtccttaaagaacagtctagttccggaattacggtcctcagccgtgctctctggatcctcctggacttgcttcaatgcggaccctgggtgcggcaggggtggcttcgggagccgggagctagaacattctttgatctcaaaacgcccttccggtggaggccctggtgattctcctggagggctgggccagccrtgcttttcaggtcccctcaaggggccgggcccctgccaggctgtggagctctgttggaggagaccctctgtggcaggagcagtgagccctggccgcttgcctggggtgggggcagccggcacctccctgcagccccaggactgctcctctccagctcccctccctcctcctttccttcctctcgcgctcctctgctcccgctgtgttctgtcatgagtgga

SEQ ID NO: 545416 - DNA, 376 bp, Homo sapiens
ccgccagctcctgtccctctctcctttcctctgccgtcccctgtgcaggcccctcctgcattgcttctcctagtgaacggagcttgctgtgttcctgtgcagggtgggatggggacaggctgacttactgttgcccagctctggggggaggtggggcacctgccgcrccgtaatcaggagcaatgtaggggtgaggggccctgcacgggaccctttggacatcgcagcccccatgctggggcacacctgactgcccgcatgcaccctggatttataggttcctcttttaaggtctggtgtagcgtggtaatgaccttcatttttatgtgttctggaagaaatccaaaaaggaaacgttaacctgagaattgctttc

SEQ ID NO: 545417 - DNA, 376 bp, Homo sapiens
ccgccagctcctgtccctctctcctttcctctgccgtcccctgtgcaggcccctcctgcattgcttctcctagtgaacggagcttgctgtgttcctgtgcagggtgggatggggacaggctgacttactgttgcccagctctggggggaggtggggcacctgccgcaccgtaatcaggagcaatgtaggggtgaggggccctgcacgggaccctttggacatcgcagcccccatgctggggcacacctgactgcccgcatgcaccctggatttataggttcctcttttaaggtctggtgtascgtggtaatgaccttcatttttatgtgttctggaagaaatccaaaaaggaaacgttaacctgagaattgctttc

SEQ ID NO: 545418 - DNA, 376 bp, Homo sapiens
ccgccagctcctgtccctctctcctttcctctgccgtcccctgtgcaggcccctcctgcattgcttctcctagtgaacggagcttgctgtgttcctgtgcagggtgggatggggacaggctgacttactgttgcccagctctggggggaggtggggcacctgccgcaccgtaatcaggagcaatgtaggggtgaggggccctgcacgggaccctttggacatcgcagcccccatgctggggcacacctgactgcccgcatgcaccctggatttataggttcctcttttaaggtctggtgtagcstggtaatgaccttcatttttatgtgttctggaagaaatccaaaaaggaaacgttaacctgagaattgctttc

SEQ ID NO: 545419 - DNA, 600 bp, Homo sapiens
ccagtaatgttgttgtctctaaatacgtaaaccctccaggttccagacatagagcaaatttccctagaattgtatttatcagagaaggtacctggttatagataattaactacaatttaaattttaaatatttgtaagatttttttatactctcaaatgcacacatttggaaaatactgtctttccgtccttaaagaacagtctagttccggaattacggtcctcagccgtgctctctggmtcctcctggacttgcttcaatgcggaccctgggtgcggcaggggtggcttcgggagccgggagctagaacattctttgatctcaaaacgcccttccggtggaggccctggtgattctcctggagggctgggccagccatgcttttcaggtcccctcaaggggccgggcccctgccaggctgtggagctctgttggaggagaccctctgtggcaggagcagtgagccctggccgcttgcctggggtgggggcagccggcacctccctgcagccccaggactgctcctctccagctcccctccctcctcctttccttcctctcgcgctcctctgctcccgctgtgttctgtcatgagtgga

SEQ ID NO: 545420 - DNA, 599 bp, Homo sapiens
gttctactttccaaagttactctttcacttgggattgaatgctagccttgagccagaccgggggcaacaatgacccgtatgacaacggatctaacccctccacaaacttccggaaccttcagtcaccctttcgcctatttgggggagaaatggctccacttagaaacaaggataaaggccttgagctgaagactttgacaactttccgcgggggagggctggtgctgccctagaatctcccgggaaagaaagctctgagagatggggagaggcgagaaggaggagaggagaacaaggaatagagaaaggagtgggagtgaagggggcctgagggctcaggaaggaactggggcccccatgaacaaaagctgggactccctgcgctgcaacctcacttctgcagtggggactcggcgtgggtcgctgcggtccagtgtgcttggggccctcagggctagtccagcccactccagcgtctgctcygtggccattcggacacttgcacctaaggcacctgctgttccccactgctcttccatattccctctctgtgcctctccgcaccccggtctccaaggctgctgtctccagtttacatt

SEQ ID NO: 545421 - DNA, 574 bp, Homo sapiens
cacttgccctgacatagcctgagtctccttcacagaggtttgggttgtgattttaatatagaggaattgtcctgggcccacatgataatacctgccctattaaaatgctttttgtccctgacacctggatgaggcccgaggacaggtgtgtgggcaggaaaagttcagaaaggagctgarattgagcgaggccctactgcataccaggactgccattccctgcctcaccgccatcgccacagtgcggccctgttatccccacattcgttttcctacgtgtgtgttgggggagggatttggactctaaacgccccctcccctaaatctggaattggaaattgcagacatggggtgggaaggtgggggcccaatgaataactgatggatgaatcaatgccattttgaaacctgcatttcaacttgacaatatatttgcatcgatcaggttgatttcaacgatgctgcaggaacaaactgtcaaagtcccagtggcttcagtcaaacatgtgtttctgcccaagcaaagtccacgacaggtgcaggtgattccccagagccacagtctcccagggat

SEQ ID NO: 545422 - DNA, 574 bp, Homo sapiens
cacttgccctgacatagcctgagtctccttcacagaggtttgggttgtgattttaatatagaggaattgtcctgggcccacatgataatacctgccctattaaaatgctttttgtccctgacacctggatgaggcccgaggacaggtgtgtgggcaggaaaagttcagaaaggagctgagattgagcgaggccctactgcataccaggactgccattccctgcctcaccgccatcgccacagtgcggccctgttatccccacattcgttttcctacgtgtgtgttgggggagggatttggactctaaacgccccctcccctaratctggaattggaaattgcagacatggggtgggaaggtgggggcccaatgaataactgatggatgaatcaatgccattttgaaacctgcatttcaacttgacaatatatttgcatcgatcaggttgatttcaacgatgctgcaggaacaaactgtcaaagtcccagtggcttcagtcaaacatgtgtttctgcccaagcaaagtccacgacaggtgcaggtgattccccagagccacagtctcccagggat

SEQ ID NO: 545423 - DNA, 307 bp, Homo sapiens
gccctctttggcccagagcccccaccacgccctytgagggccgtggccagctctaaagccctgagagggttgcagagtgctggggtctggggggcccctggccatgtccttgaggctgctcagagccccagtctctgcccctgcacagcgggaagctgagctggggaggctgtgagagcagattttcatggagaggcacgagggaggaagatggggcggcccccgccctggccccaggctcattctcctgggggctccctctgcagctccccagggccttgcacacttggcctcaggccactcaatg

SEQ ID NO: 545424 - DNA, 606 bp, Homo sapiens
tgggctctggctggctagccagggatcccctgtgacctcatgatgctccagaagggagtgtcttccagcaggaggagcctcagccttcaggaatgagtgtgggacagggcaggctccccttgaaacaccagggcccctccctctctaagcctccattttcacatctgcaaaacaaggggatctccctggataagtcaaggtccttttcttggctgtgatcctatgacccttagaatctaccattctgtgattcttgctgagatgctatgattcaaagagtattttgcatctctgtcgctttgtatcsaagtcttatttgctccccagccctgtggattgttttttcagactgccccttgcatcccaagaaggccaatcacaaaaaatatacattggttttgacacaggattttttcttggtcactttgcaagccggggacctctggccggcaatgccccacctgggcctctcttggccatgctacctgctgcatgagatggcctgctcagtcggcccaccgtggttgagtctggcttgtgtaccagttcccgagttcttgtcctgcacccaagaagagtgaggatacactgacaattgaagagtga

SEQ ID NO: 545425 - DNA, 606 bp, Homo sapiens
tgggctctggctggctagccagggatcccctgtgacctcatgatgctccagaagggagtgtcttccagcaggaggagcctcagccttcaggaatgagtgtgggacagggcaggctccccttgaaacaccagggcccctccctctctaagcctccattttcacatctgcaaaacaaggggatctccctggataagtcaaggtccttttcttggctgtgatcctatgacccttagaatctaccattctgtgattcttgctgagatgctatgattcaaagagtattttgcatctctgtcgctttgtatccaagtcttatttgctccccagccctgtggattgttttttcagactgccccttgcatcccaagaaggccaatcacaaaaaatatacattgrttttgacacaggattttttcttggtcactttgcaagccggggacctctggccggcaatgccccacctgggcctctcttggccatgctacctgctgcatgagatggcctgctcagtcggcccaccgtggttgagtctggcttgtgtaccagttcccgagttcttgtcctgcacccaagaagagtgaggatacactgacaattgaagagtga

SEQ ID NO: 545426 - DNA, 615 bp, Homo sapiens
ctgagtctagtctaagtgtagagtcaaaggcaaggaggtgaggaactcatggagactgcccagctctgtgctggtgaaaagcagctaccttcagttcttcattgccctcagctctaaaatggcccagtggttcaggctttctttgcctcttgaaatcatccttawtttttagtattaacagatactagtggttcagggcatgaggtccaagtcagtcacacatggactccaagtcagaattcccatcttagctgtggaacctcaaagaatgttttgaaatgatggcaccttctaccaagaagtgctggaatgatcaagtgagatgttacaactaggcaacagcacagattgtggcactaaaaaagccttcaataaataagaacaagtattattctactccttgagcttacttgtattcttaatgacttctgcagttccaaaattccttgctctcatggaaaacaaacatgcaggcttctctctgatctgtggaagtggacagtgcatagaaatactagcagcagcaattcctgtctcagggctttctgagaccatggttactcacataactctctcacacagagcctggctgaacggagacaccaaacacttggt

SEQ ID NO: 545427 - DNA, 615 bp, Homo sapiens
ctgagtctagtctaagtgtagagtcaaaggcaaggaggtgaggaactcatggagactgcccagctctgtgctggtgaaaagcagctaccttcagttcttcattgccctcagctctaaaatggcccagtggttcaggctttctttgcctcttgaaatcatccttaatttttagtattaacagatactagtggttcagggcatgaggtccaagtcagtcacacatggactccaagtcagaattcccatcttagctgtggaacctcaaagaatgttttgaaatgatggcaccttctaccaagaagtgctggaatgatcaagtgagatgttacaactaggcaacagcacagattgtggcactaaaaaagccttcaataaatargaacaagtattattctactccttgagcttacttgtattcttaatgacttctgcagttccaaaattccttgctctcatggaaaacaaacatgcaggcttctctctgatctgtggaagtggacagtgcatagaaatactagcagcagcaattcctgtctcagggctttctgagaccatggttactcacataactctctcacacagagcctggctgaacggagacaccaaacacttggt

SEQ ID NO: 545428 - DNA, 544 bp, Homo sapiens
acagagaaaagagatttgaagggaatgakactgttcaggaagaacaggagctgatgcccatccatctcatgagggtatgaggaagagaggcaagatagtctaacgcagactgtttggtgacatttcactgggacacgtgccattgaatctcccccgtttgtccccatgaagacgtctacaaatgcgcattgaatgttttggtaatcagatttatcattggtttgggggtggggggtgaatttcagcatctactgtcaagcggggcaagagcaaaggtagctcttggcgccctaatagtactctgcttcaataagttagctgtggtcattgcaaattatgtcagcagaagttgagtggttaaacatgggctttaccttcagagaaacggaacaattctgaaaaagaagaaaagagagaagatccaaacttgccacaggcacatgcagcaggttctccagtcctctttagagtggtttagctgtttaaaaacattgggtgggttctggcacgtgcctagtgttttccactcttaccctgtttatgc

SEQ ID NO: 545429 - DNA, 566 bp, Homo sapiens
tgtgtcatatctcagatattgggccaggcttaatgatatgaagagctcctctaagtgcttttctttttcttttttttttttttttaaatagagacggggtttcaccatgttgcccaggctggtttcaaactcccaagctcaagcaatacgcccatcttggcttcccawagtgctgggattataggtgtgagcgcctggcctctaagtgctcttctcagcattaacttacttgccctgttaactggctttacatgtattaatgctcacaaaaagtctaaggttagttctattattatcctcattttatcagtgacaaaacagaggctcacagaaaataagaaacttgcccaaggtctcacagttagtgggtggtgaagcaggctggttcttaactattcactatactgtgtctagtttagttaaacttaggggtgagacggggtgaaggggtggagtgaaagtcaaagcacttctagaggagagtctgagtagtcttgataatagagactggccagggaagaagggtgccccaggcagaggaaacagcagagcaaaggcaaggaggt

SEQ ID NO: 545430 - DNA, 620 bp, Homo sapiens
ggcaaagggccctcggctctctttgatggaaatactgggtgtaacacagaccaacccagtgaattagaggataagggacgtggcacagatttcttccccaacagtgggaataaagatggaagagagacaaagaggaaactcaatgcttccagagccttccttcccaggggtggagagcccggcacagaggtgtcgagtatcgggtgatgacctgtcatgggatcagtggcttactttggattccttgtgagtggacatgcggaggaaggtgagaaaaacacttcgatggaggcgcttctgcatgtcaacaacctcaggggctgaggccaccccctcgtcgaatttgcgggggacatagcrcaggtaggagtccaggcacttctgtagagtctcgtcaaagatcacctaaaccaggagacagaggagagcgaggatttatcccttaggccccaggggcttgtgggtggactgtgcagggactcaatgcccatcagccctgccctattccaaacactccgaccccaagggaccaaggaggtatgaatgagccaagggctaaacacaagattctaaaattgacactttgaaaggtgtgtaaacattaagattgtgatacaaga

SEQ ID NO: 545431 - DNA, 510 bp, Homo sapiens
ggttttggaactaaataacatgactgtaagaagacaaaacatccaataagtcacctaacttctccaaacatatctgttttctcatctgttaaacaaggtagttaatatccacctcatcatcattagaaggcttaaggctgggtgtggtgrctcatgcctgtaatcccagcactttgagaggctgaggtgggaggattgcttgaggccaagagttcgagaccaacccaggcaacataatgagacttagtctctcaaaaaataaaaataaaaaaactagctgggtgtggtggcacacacctgtagtcccagctactctggaggctgaggtgggaggatagtttgagcctgggagatggagtctgcagtaagctgtggttgtgccacggcacttcagtctcaaaacaaaacaaaacaaaacagaaggcttaaatgagataatatagacaatgccaagaacacagtaggtgctcaaaaaatgttagtgaaaaggaaggaagaaaggagactccc

SEQ ID NO: 545432 - DNA, 627 bp, Homo sapiens
tgagccaccgtggggtcttggtgcaactcggtgcatgaacgccaggaatggcttcacacggccaagcacacacagaagactgtggctgaccatgcagagaaagggaattctgtgtgtaacctgaacaggcgggagagttctggagtcagatgtctgggccaacagccaaggctgagttcaggggaacacagtgcagggctgcgcctgcagaagctgaattctgctaccctgtactgagcgccctgtccaggcactgcgaccagcatcatgcattcaatgcttccagacacccttagcaggcacgggccattctccccatgacagagatgaaaggcagtgcagcaaggggtgcaggsggcgtagcctgacttccatctctacctcccactggctctctggccagaatgagaaccctcacttccctgagctttagtgtccccatttataaaacacgcatgcttccccacagagttcttgcaatgatcaagctgatgaagacacgtgagccccacgctgtacctatacttctgcacggatttgtttttaagcaagtttgataagacacatggacacagaaatggctgtcacaaaggaggcttacactcacagttctctaaaaacgcaagc

SEQ ID NO: 545433 - DNA, 575 bp, Homo sapiens
tttaaccacgcagagccccgttagatgtcttgtcttgtcttatacggtaggtctttattaattttttaaatctcttcctgtctgtctggaggtggctcccagaatatgatttcaaatgctttccatgagatcaatgaacagggaaggagcaagttgtgaatttcaaatctataactttctcatccaggagaaggggctgagccagkgggtgggcgaggtgggcaaggtgatgaggtgggtgtgcaaaggtctcccgccctgtcggctggggaaggggctcatggaggcccttgagcggccaggattgacccaaggcccagcgctgtcccatcccttctgtgacacacttggcaccagacacccaggagcgttgcctttgtttgaaattaccagaaaaacacacccctcccctatagaaaatcagacacagagagagagagagacaatcctaaagaagaaggtaaaaccccatgagcccaccacccagacatcgactctggaacattctggagctttagccctcaccaggtacactctggttctacaatccatcatggcctttgaaaagctttcta

SEQ ID NO: 545434 - DNA, 602 bp, Homo sapiens
ctgtgagccaccgtggggtcttggtgcaactcggtgcatgaacgccaggaatggcttcacacggccaagcacacacagaagactgtggctgaccatgcagagaaagggaattctgtgtgtaacctgaacaggcgggagagttctggagtcagatgtctgggccaacagccaaggctgakttcaggggaacacagtgcagggctgcgcctgcagaagctgaattctgctaccctgtactgagcgccctgtccaggcactgcgaccagcatcatgcattcaatgcttccagacacccttagcaggcacgggccattctccccatgacagagatgaaaggcagtgcagcaaggggtgcagggggcgtagcctgacttccatctctacctcccactggctctctggccagaatgagaaccctcacttccctgagctttagtgtccccatttataaaacacgcatgcttccccacagagttcttgcaatgatcaagctgatgaagacacgtgagccccacgctgtacctatacttctgcacggatttgtttttaagcaagtttgataagacacatggacacagaaatggctgtcacaaaggaggctt

SEQ ID NO: 545435 - DNA, 579 bp, Homo sapiens
gatccaagaccctctccccatctcatctgtctcatctgcaaaatggaggcagtgcaacaaaaacaattgtcttggaggtcccaagcacacattccattgcaaggatgaaatggtgtcatgtttaatagagtcctctatggaaagagggatttttattttttttttaagagacagggtcttgctctgtcacccagcctggagagcaaagcacaatcatacctcactgtaatcttaaagccctgggctcaagtgatcctcccaccccagcctcccaagtagcccagactacaggtgcatgccaccatacccagctaatttttaaattttttggtacagatagggtcttgctatactgcccaatctggtctcaaactcctggcctcaagtgatcctcccaccttggcctctgaaagtgctgggattacaagtgtgtgccattgcgtccaagattttataaatgttctgygtttttataaatgatctgtgttttgcccaaacctaactgggcaatttaaaatctctctcgtctgctttcatttagacagaaatgaatcgcagagagtgaaggaaaagtgagcg

SEQ ID NO: 545436 - DNA, 620 bp, Homo sapiens
tgatgtttgcagaccctatgacagggatggagagctttaccctggaaaaggacttggtagaaggaatgcattcagctctgcatggccctagtctgtcttcttatctctgactacctccattgtgaactgcgtctctggcaaggcaagttctgctcattccatccttgtaagacaaatctgagttatgtcaaggttgcttgttttccacgaaacgaaatgtcatttttctacttagtacccagcctttcctcctttgattccacagccagagatggcttttgtcaaactgtctaactgcaatggctaactcccctacaagtggatgggactgtagcatatcttcttgtctcatctctttattgtacctgaggcccaggaaagggaactgtttacttgtrggttgaccatacagttgttttttgtaaagccatgatttttttccttgttcttaaaaaagtcctgtaaaaaattaatgtcatagaacttcattatgagctaaaatattaaatttacctctgacagggctctctctgacattctggttgcagtataaagagacacttgcctcttaggaaggaaactgatattgtagattaagagaattcaaatcctttgaccca

SEQ ID NO: 545437 - DNA, 536 bp, Homo sapiens
ttcaccttccatactcatacccataagcaatggactggttttgtgtgtcccttttgaaggctacatcaacagtacatttcctgctgtaggggtcgttctgcagattgtcattttcacccgcaatgatgtattgtgagatcttcctatgcygatacatgcagatgtggttcatttctttccactgccatagatcatcccatttgtccattgtccagctaaagtgcatttaggttgttttacttttttttttttttttttgagatggtgtctcactcagttgcccaggctggagtccagtggcacgatcttggctcactgcaacctccgcctcctgggttcaagtgattctcctgcctcagcctccaagtagctgggactacaggcacctgccaccatgtctggctaatttttttgaatttttagtagagacacggtttcaccacattggccaggctattctcaaaccactgaccacaaacgatgtgcccacctcagcttcccaaagtgctgggattacaagcatgagccactgcacc

SEQ ID NO: 545438 - DNA, 657 bp, Homo sapiens
atattatatttaatgatgtaatgttagaatcaagaaggagataaggatgcctgtttttcctgcttatakacaccattgtcctagagaggtcagccagatgctgatataaaggtaagaaaagcctagtgtttaggaatttaaactctagcctctgactggcagggtttaaatcccaattctgaccgtccctatctgtgtggccttaattaagttatttaacttttccatgactcaattattttttatctggaaaaaaaaatgggaattgtagcatttaccacatgggattcatgtgcagaataaaatatatatataaagtactcagagcagtacctggcatatgttaaatactatgcataaatgtagccattattactattcaaaagcactcctaaagaatcaataactaattactggaattaattggtgagctgcataaagcttctggatacgagattaatatacaaaaacaaaaattgcatttgtgtatacggtatcagcagcaaagttagaaaatataattttaaaaagatatcattttcaacagcagcaaaaaaagagattctcctgagtaagtctaacaaaaaaacctgcatgatgtttatagaaaaaaaaaaatcacaaaatgttactgagagatatcgaaggaagacttaa

SEQ ID NO: 545439 - DNA, 424 bp, Homo sapiens
ggatcatagctagggaggtgacttagtggtcaagaaaagactatgaggctttgaaggcagaaggaacacctgactttgagtcctaggcacaatgcagactactgagagttctaaggcaartgatctgaaatctgcccgtgaaatggagctaatagcactctccccaccccaaccaaacaggactacactgatccaatggaaaccctgtgtaaatgtcagagcctccaacccacccttcctttcttcccaggtggcgccacctccaggctctggagaagaaaaatgatagcctgacagctactgagtgctcacgacttgcctcggccaagcaccttcatgtggcacttcataaagtcctgccaatgacccagcaagggccatactctcattatcatccccactgtaccgagaaggcagcggaggc

SEQ ID NO: 545440 - DNA, 424 bp, Homo sapiens
ggatcatagctagggaggtgacttagtggtcaagaaaagactatgaggctttgaaggcagaaggaacacctgactttgagtcctaggcacaatgcagactactgagagttctaaggcaaatgatctgaaayctgcccgtgaaatggagctaatagcactctccccaccccaaccaaacaggactacactgatccaatggaaaccctgtgtaaatgtcagagcctccaacccacccttcctttcttcccaggtggcgccacctccaggctctggagaagaaaaatgatagcctgacagctactgagtgctcacgacttgcctcggccaagcaccttcatgtggcacttcataaagtcctgccaatgacccagcaagggccatactctcattatcatccccactgtaccgagaaggcagcggaggc

SEQ ID NO: 545441 - DNA, 619 bp, Homo sapiens
gagcacattttcagaggacatgccacctgtataacctccatgacctgtggagtctggtggccctgactccacactggcaccaggagcctcaggtcctgactcaagccttgccattaactcgctgtgtgaccgtgggtaagtcactccccttctctgggcttctgggccctcatttgtaaaataaggtcattggactgwacatcaaacatccctcccgatctgaacatttttgtgagcttgtggaacactaaattggattaaattgcagcatcagtttagcatctgattatattacatggctttgattcattacctctttcatgattgtataggcgagtagatgggaggtcacatttatctcaaacacctctagggccaaccaggtatgtaaataaataaagcaggcaaatataagaaaagtaatgaggctttcaaaaatttgcccacttgagataaaaacagtccagagaactatttctctgaagaggtgcaagcataaagaacatagcaattgcccctctctgtcactatggaagtgaggagtagggctggaggcaaacgcaggagcccctaggagcccttgctctgatcaaggaagccgctgttagtaacgccaggg

SEQ ID NO: 545442 - DNA, 584 bp, Homo sapiens
tgtgtgaaagggtgagtcaatgcatgcagctaacttcactgttgccttatttttataaattgcctcagtcaccccttgcttcaacaaccagtaccctgatcagtaagcagccatcagtattgaggcaagaccctccatcagcagaaaggttactattcacctagggctcagacgattgttagtaataaagtattttatcattaaggtatgtactttgtttttttcagacataatgctattgtacttaagaractacagtgtagtgtaaacatagcttttatatgcaccaaaaaatttgtgtgactccctttattctgatatttactatatactggggtggtcttgaaccgaaccagcaatatctctgaggtatgtctgtacacagttgtgtacaattatacaatttcccttttcttaaaaatatctcctgcttttccagaaggagaaacacaaacaagaaaaatgaatgggacattttatctaagacctgtggaagaggaagccatttggtggccaaggttgactttttttcacaaagtaatgaatctgttgcttttaataatagtgactgggaaggccacaac

SEQ ID NO: 545443 - DNA, 584 bp, Homo sapiens
tgtgtgaaagggtgagtcaatgcatgcagctaacttcactgttgccttatttttataaattgcctcagtcaccccttgcttcaacaaccagtaccctgatcagtaagcagccatcagtattgaggcaagaccctccatcagcagaaaggttactattcacctagggctcagacgattgttagtaataaagtattttatcattaaggtatgtactttgtttttttcagacataatgctattgtacttaagagactacagtrtagtgtaaacatagcttttatatgcaccaaaaaatttgtgtgactccctttattctgatatttactatatactggggtggtcttgaaccgaaccagcaatatctctgaggtatgtctgtacacagttgtgtacaattatacaatttcccttttcttaaaaatatctcctgcttttccagaaggagaaacacaaacaagaaaaatgaatgggacattttatctaagacctgtggaagaggaagccatttggtggccaaggttgactttttttcacaaagtaatgaatctgttgcttttaataatagtgactgggaaggccacaac

SEQ ID NO: 545444 - DNA, 578 bp, Homo sapiens
tgctggccattttctctggtgtcttttgggttttctctctctctctcctcttttcaatgggacattatacatttatttgttatgtgtgtaatttaagtctcacaaaagaaaataatatgaagaagcaatatacagagataatgtctaaaactaataaaagaaattaaaacacagattgaaagattctttaaaatcccaagaaggatgtatacgaagaayatagaaatttgtcagatgacctaaaattatggctggcatgtaaacagaaacaatggaagccaaaaggcaatggaatgataccatcaaagtgctttttaaaaataaagtaatttcaacttttattacagattaaagggtatacgtgtaggtttgttacatgggtaaattgcatgatgctgaggcttggggtttcaataatcctgtcacccaggcagtatgcttacttccaggttttctctttgtctttgatttgtcatcatgctggcagtttttaagccctcaaaagcgtccagctcattcctttctcaatatcttagcacctgctatccactctgctcccacttgctgtctggccaatt

SEQ ID NO: 545445 - DNA, 612 bp, Homo sapiens
caatgcctgaccaggcctgggtcttcctgagcaagcagagtctgactggtacaacctttattgcttctccagcattttccagaagaatggtgtcattagagggccacaggggatgggggagtaaaaaataacataaacgaactgaacagaaatgcaggagggtggcragaggggccgagattgggtgttcagggcagagaggtggaagaccaggggcagtcagtgcttcttagctttcagccaccagagtggagaattctgcagaacaaaatgacaaggaaagtgagtcagaggcggggatgcaagagagactgtccacacctgactgcggggccctgggtggtgctctctctgggttcttgcttctgctgcagcagccccagagcgtaagtgtgaaaatgaatgaatgaataaatgaatgaatgagcagatgagtgaagtgaggtgggaaatgatgggcctaccacatcttttggttcatcatgccatgccacacccaaaatcattaataataactacactaataacaatagcaataataataataatagttttctgaatgcttatcatatgccaggcactattcgaaacactttatatgcaatatcttat

SEQ ID NO: 545446 - DNA, 612 bp, Homo sapiens
caatgcctgaccaggcctgggtcttcctgagcaagcagagtctgactggtacaacctttattgcttctccagcattttccagaagaatggtgtcattagagggccacaggggatgggggagtaaaaaataacataaacgaactgaacagaaatgcaggagggtggcgagaggggccgagattgggtgttcagggcagagaggtggaagaccaggggcagtcagtgcttcttagctttcagccaccagagtggagaattctgcagaamaaaatgacaaggaaagtgagtcagaggcggggatgcaagagagactgtccacacctgactgcggggccctgggtggtgctctctctgggttcttgcttctgctgcagcagccccagagcgtaagtgtgaaaatgaatgaatgaataaatgaatgaatgagcagatgagtgaagtgaggtgggaaatgatgggcctaccacatcttttggttcatcatgccatgccacacccaaaatcattaataataactacactaataacaatagcaataataataataatagttttctgaatgcttatcatatgccaggcactattcgaaacactttatatgcaatatcttat

SEQ ID NO: 545447 - DNA, 675 bp, Homo sapiens
tggatggatggatggatgaggaatgggtggatggagggatgaggaatggatggatagagggatggataaagggagagaaagatgaatggatggatgggtgggtgggtggatggatggatggatggatggatggatggatggatgggtgggtggttgggtgggtggatgggatagctcacgagtccttcttagggrtcaacaagttctgacttactttatataattcacatgacagtctgggaggattctaattttatagatggggaaatggaggctgggaaggtgaggtgtcagggtcatgtggaaaacaagaggcagagccaggacttggcctctggcctcaggaacctgctacatgaatgtggagaggctactcctgagagggctagtgtcccagctcaggcagaagcatgaaccctctacagcttcaacctgtcatttcatccagcactggcattccctgtttgggggcactgagtttctctgtcctgggataaaggatgcatgagcctgtccatcaccgcctgctcatggagagattgtcaagaggggaagctggtcctctctgttttccagcctgccctgaccccttcatcctcactctggaaattatgggctctcaggctgctcatcggtaaatagcccgttggtcaccttcacactagacgggatttg

SEQ ID NO: 545448 - DNA, 675 bp, Homo sapiens
tggatggatggatggatgaggaatgggtggatggagggatgaggaatggatggatagagggatggataaagggagagaaagatgaatggatggatgggtgggtgggtggatggatggatggatggatggatggatggatggatgggtgggtggttgggtgggtggatgggatagctcacgagtccttcttagggatcaacaagttctgacttactttatataattcacatgacagtctgggaggattctaattttatagatggggaaatggaggctgggaaggtgaggtgtcagggtcatgtggaaaacaagaggcagagccaggacttggcctctggcctcaggaacctgctacatgaatgtggagaggctactcctgagagggctagtgtcccagctcaggcagaagcatgaaccctctacagcttcaacctgtcatttcatccagcactggcattccctgtttgggggcactgagtttctctgtcctgggataaaggatgcatgagcctgtccatcaccrcctgctcatggagagattgtcaagaggggaagctggtcctctctgttttccagcctgccctgaccccttcatcctcactctggaaattatgggctctcaggctgctcatcggtaaatagcccgttggtcaccttcacactagacgggatttg

SEQ ID NO: 545449 - DNA, 591 bp, Homo sapiens
cctcggtagctgccactcacctcgggtgggggtggagggctggagcctgcactgaaaggctgggctggtgggaagtcctgtcgggaagtgagcctggaggtgggatggccacctatataggcttctgctctggctattttgggaggtggcactccccgtagccccggccccctccccttccggtgtcaggtactccccaaccgtggtgctgggtgtctgtatcacattcagcctccctgggcccatcaggccaagactattaataactcttggcccctgcttccctccagcacccaaaattgasgcccaggcagggctcgcctcttccatgaagccttccgtgaccactgtagatggcagcgatgcttccttcctccatattctgccaggaaaggaagagaaacagcaaggaaaagaatgaaacaagaactgtcctctgtgcatggggctgagccccattcctatgctgatatgatctctcactacagccttgccaggtagacatagctgctctcgcacagatgaggaaacagcataaagacgttagatgttaagtgacctgctgctcaaagccacgggcctggggttggg

SEQ ID NO: 545450 - DNA, 638 bp, Homo sapiens
gcgggaaacctgctgattgttggaggggaaaccgagactcagggacactgaggggcagcaacttcctcccccgacacgacagaacagtggcagagcctgcctgctggggcgtgcggctggcgccaacctctccctttctccctgcaaaacgaaggcgaaagacgcccccacgccaggctcggggagcccctccctctccacccgcttccccctcaaaccctggttcgtgtctccctctgcatagcccagggcccaggcaagcggaacccctacatccacgacagcgccacgggcccgagggacgaggacctgcctctctggcccacccgggcctcgcgcccggagggcggagccacagccgcgccgggaaactgcctttgcacttccggcgtaggrcgaagccgagcagatcggaacaaggccgagtctggccgagtgctgccgaatacagccgagtagagccgagcctggccgagtggagccaagggtcgccgaatagagacgagtccagccgagcggagctgcgggtcggataccacgcggctactgggcgaggcctgaggacccgcggcgccccctgccgggcctggggagcacagagccacgctccagccgtccccgcagccctgcgacaggct

SEQ ID NO: 545451 - DNA, 636 bp, Homo sapiens
cttcacacggctttcttctctctcctgccaccttgtgaagaaggacgtgtttgcttccccttctgccatgattgtaagtttcctgaggcctcctcagccatgctgaactgtgagtcaattaaacctctttcctttataaattacccagtctcgggtatgcctttagtagcagcatgagaacagattgatacagcacaggaaggcagtggagcgggccagcattgcgtttgtgttggtcattcaggcacacaggtgcaggtcagcttttttaatgaagggtaaccagtagaagaattaaaaaataggacacattctttctagataaayactgaattctaactcaaataaggtatagcacttacggccaaagattgaaaacccattgtacagcaaggatgcaagaaagaaaaagacagaaaggaacatttttaattcaaaaaaatcaaagcagaaaccatgaggagatcaaaagaacccccagcacagccagcacagtggtgaatgcaggtgcaggggcaccgcagtcacagagatgggtgaattccagcactgccaaccccaaccttcctaagcacttaggacgatttggactcaaaatgaaggaggctggaaccagcccctcgtgtgtgatgtggg

SEQ ID NO: 545452 - DNA, 462 bp, Homo sapiens
atttacaaattagtaaatgtttgcaaatggatagctgtcatacaccccattgatttggcatttttatcattatgaaattttttatttctggttttgtttttttttttttggagacggagtctcgctctgttgcccaggctggagtgcagtggcctgatctcagctcactgcagactcygcctcctgggttcacgccattctcccgcctcagcctcccaagtagctgggactacagacgcccaccaccatgcccagctaattttttttttttttttgtatttttagtagacacggggtttcactgtgttagccaggatggtctcgatctcttgacctcgtgatccacctgcctcagcctcccaaagtgctgggattacaggtgaaatgttttatttctaatatatatttttgttgcctcaaagtctactttgtctgatagttgtaaacccattctagttttcc

SEQ ID NO: 545453 - DNA, 462 bp, Homo sapiens
atttacaaattagtaaatgtttgcaaatggatagctgtcatacaccccattgatttggcatttttatcattatgaaattttttatttctggttttgtttttttttttttggagacggagtctcgctctgttgcccaggctggagtgcagtggcctgatctcagctcactgcagactccgcctcctgggttcacgccattctcccgcctcagcctcccaagtagctgggactacagacgcccaccaccatgcccagctaattttttttttttttttgtatttttagtagacacggggtttcactgtgttagccaggatggtctcgatctcttgacctcgtgatccacctgcctcrgcctcccaaagtgctgggattacaggtgaaatgttttatttctaatatatatttttgttgcctcaaagtctactttgtctgatagttgtaaacccattctagttttcc

SEQ ID NO: 545454 - DNA, 484 bp, Homo sapiens
ctgtgcagattcattgtagggaaaccagaaaattctgcttaktatagaaggaaaagcagaacccccacccccatcacaggccctcagcggtggaggggacattgctccaggccatcagcggtggaggggaacattgctacccaagtggaaacagtaagcccatcctgggcacagacagcacagtgcccaccccgagcaacctccctgggctgtggctgcagaatgacccgaggcccaggcagtgcagcccagtctcacctctgcacgcagctcccaagggaccccaagaaggccggttccataaaaccagcacaggtgtaatcccagctacttaggaggctgaggcaggagaatggtgtgaacccgggaggcggagcttgcagtgagccgaaatagcgccactgcagtccggcctgggcgaaagaccaagactccgtctcaaaaaaaaagcagcacagggcagggcaggggacctcatcacgca

SEQ ID NO: 545455 - DNA, 642 bp, Homo sapiens
tgcgctgtgagaggaaaccttgctttgtagacacctggagggagggagttagcatatgaacaaaggtggtggaggtttgtggggaagagaatgtccagtgtccactctcaggtgctgatgagttaagggtgagatgcccaaaagacccctaaggaggtcgagcaggaggcagccggatggaggagcctgaagggctcggggctggaggcagagatgactcaggggaggccagtgtctggacggagttcaaagccatgagacagcaggaaagaaygccgataagagagagagagagaagcagtgggctgagtcccgaggatcccatttctacaggtctgagaaacaggaagaaataacagccaacacgataccagctccctggctgttattccaacattcaattctagctgtgtgatttcagaaaatccatttaccctctctgggccttggttttctcatctgtagattgggcgtaatgagtttcctgcctcccctgcagggtttggacctgccagccctcaccatgaccaaagcaaattccttgaatttatttcccttttatataaatgtgcaactgggtctgctcctctgcagaaaccggatatgtcgggataatgaattctgccgtggctgcatctttca

SEQ ID NO: 545456 - DNA, 678 bp, Homo sapiens
tgtgcaaacccaggcaagtcattctgcctctttgggtgtcaatttcctcccttgaaaagtgaaaatgatgtctccctgtctgtcctatcagtggtaaggaaaatcagatgaaatgatggctacaaaggagctgttcaaactataaaacatagcatgggccgggcacagtggctcacgcctgtaatcccagcattttgagaggccgaggtgggtggattatgaggtcaggagttcaagaccagcctggccaatatgatgaaaccccatctctaataaaaatacaaaaattagccaggtgagatggcacacacctgtagtcccagctactcagcaggctgaggcagaagaatcgcttgaacccgggaggcggaggttgcagtgagctgagatcatgccactacactccagcctgggtgacagagtgagactctgtctcaaataaataaataaataaataaataaataaataaataaataataaataaataaatmatagcatgaatgtgagcataagaaaaaaaatgaaaaaaaaatctccaatgaggttgtggcctagtcctttgcaaagacattgaaatttggtgtcctggtgactttctacatagttcctagggagtaaagaacatgtcttctacacacataccctcaagagctcattaattgcactgctgggtagaa

SEQ ID NO: 545457 - DNA, 678 bp, Homo sapiens
tgtgcaaacccaggcaagtcattctgcctctttgggtgtcaatttcctcccttgaaaagtgaaaatgatgtctccctgtctgtcctatcagtggtaaggaaaatcagatgaaatgatggctacaaaggagctgttcaaactataaaacatagcatgggccgggcacagtggctcacgcctgtaatcccagcattttgagaggccgaggtgggtggattatgaggtcaggagttcaagaccagcctggccaatatgatgaaaccccatctctaataaaaatacaaaaattagccaggtgagatggcacacacctgtagtcccagctactcagcaggctgaggcagaagaatcgcttgaacccgggaggcggaggttgcagtgagctgagatcatgccactacactccagcctgggtgacagagtgagactctgtctcaaataaataaataaataaataaataaataaataaataaataataaataaataaatcatagcatgaatgtgagcataagaaaaaaaatgaaaaaaaaatctccaatgaggttgtggcctagtcctttgcaaagacattgaaatttggtgtcctggtgactttctacatrgttcctagggagtaaagaacatgtcttctacacacataccctcaagagctcattaattgcactgctgggtagaa

SEQ ID NO: 545458 - DNA, 524 bp, Homo sapiens
aagggcccaagaggacaagttcaggaaggttttggatagctgaacacatggaggttcctggagggtggcccgccagagagggcatgcaagctctgcacccttcccccatacctcaccctatgcatctactatctgtatcctttgtaatatcctttataataaacaagtacataattgtttccctgagttctgcaagcaactccagcaaattaatcgaacccaaagagggagtcgtgggaaccccaacttgaagcttgttggtcagaagtttggaggcctggacttgtgactggtgtctgaagcaggaggagggtaggggagaagtcctgtgggactgagccctcaccctgtgggatctgacgctgcttccaggtrgacagaagaggtcagataagagatctgaaaatgaagagatcgcatctgctctgacaaaagggcatatgagatggttttgcctgggccctaaatccaaaaagcattttaaccaatcaacccttagatacagggtgtccttagaggacacc

SEQ ID NO: 545459 - DNA, 523 bp, Homo sapiens
atcactcagctattcagagccatttgtgccgagggctgtggaaggagtgctaagcccctgcattctgaagacttcaccatgagattctgtagrtaaagcattagcacattgcctgactcagtaagtgactgaatggatagtgtgttctcaataaatgagcaatgtcatcattgctattgttcttttctcaaggttttcctgggaagaggctatacgatacagtaggagcaccagcttgagaaccagtagactggtgcttgaatcctgtttcagtcactttttcactatgtgaccacgatctgtgcttaacctgtctaggactctgtttcctcatctgttaaatgggaataatagcagtgctaccttacagagatatttattaaattatatgatccatgtaaagcatttaatacaatgcctccaaagagagtttcaatgaatggtagtttttctgatttagctatcatcattctcataatcagggaaatataaccatgtgtattgatcaggtgtgcatttagct

SEQ ID NO: 545460 - DNA, 523 bp, Homo sapiens
atcactcagctattcagagccatttgtgccgagggctgtggaaggagtgctaagcccctgcattctgaagacttcaccatgagattctgtaggtaaagcattagcacattgcctgactcagtaagtgactgaatggatagtgtgttctcaataaatgagcaatgtcatcattgctattgttcttttctcaaggttttcctgggaagaggctatacgatacagtaggagcaccagcttgagaaccagtagactggtgcttgaatcctgtttcagtcactttttcactatgtgaccaygatctgtgcttaacctgtctaggactctgtttcctcatctgttaaatgggaataatagcagtgctaccttacagagatatttattaaattatatgatccatgtaaagcatttaatacaatgcctccaaagagagtttcaatgaatggtagtttttctgatttagctatcatcattctcataatcagggaaatataaccatgtgtattgatcaggtgtgcatttagct

SEQ ID NO: 545461 - DNA, 650 bp, Homo sapiens
ctgggtttccctacagaacatcagtttgtgaaatggaactcagttgtttggggttattgttaacatagtttttaaaaacatatttttttttttggttaaaaaagcaatatattcccagtcatttccatatagatgtaaagtacttaaaatagtgtctggcacatcatcagagctcaataaatgttgctcttattgttgttgttatttataccttaacatgaagtttatcatctctcttcctaaaaacgggtcttggttgacacatcaaaacatttattaagaatatttattcagccttacaacatgccagggactttatatgtctgcaagtcagaatcttctgattttaaagatgaggaaacaaagscttagaaaagtaaagcaaccagccgagggtcactcagataactggtggcatgaccaaggctatgtgtgtggatcttgcccaccactaaaattcatcctgattttataagattgttgctctttcccaataatgtgaacgtagttttggattttattctcgtgtaaaggaatacagaaatgaaagaaccagatgcttttctgggctccccaggcagaactaatccctcccgtctctgggcctccacgggcctttgtatgttcctccattatggctcttagcatat

SEQ ID NO: 545462 - DNA, 563 bp, Homo sapiens
gagcaacacagcaggtacaggagtatgtgcctgtggctgacttcacatctccatgcatggctgttcctctttcccacctttctgtctctctrctatcccaaattccagagccctacactgactcaggctcccaggggagagtagcaaatatctgaacaccaatacagcctatcccaggattgaagttaaaaataagattctttattgcacagaatcatggatcatacatctgttttcttttagtgtcatgcaagataactctgggtgtagtggttaaggcatattatcaatatcagccaattttgtgcctgatatctcagactatgagagtactgagaaaggggaagttaatactaatcaaaggaattacaggaaaatttaagccgaaggcccatactctgactttagaaatggataacattttgatagggagtgatggtagaatggggttctggttggggggaacagcatgaacaagactaggaaggacaacagtgtcaggaacagcaagtagttgggtgtgaccacatgttaaagaacaaaagcactagggcagtagcaag

SEQ ID NO: 545463 - DNA, 642 bp, Homo sapiens
acattcgagtggttattttgaggaggtaatatttgccctcagacctgcatgttaaggagctgtccatgtgaatgcttgagggaaaagtcatttggacaaaaggaagagttagttccaaggccccgagtttgggacaagcttggtgcacgtaacaaacaaacggatctctcatgtagttgcaaatgttggctgaggctgtagtcacatgaaagcttcattagactgaatgtcaaaggtggttcaggcatatggttggcaagtgatggtagctgttatctaggagcttaactgaagctccatctgaacaccttcccctacgtgtagcctctccrggtggcatggacttctcatagcaggatggcttggttccaagaggagatgtccaagactaaacatcccaggaggcgaaaagcaaaaactagcttgaaactggcacagaatctctcctacagtattctagtggtcaaagcaatcacaagacctgctcagattcaaaggagttatactgggtagaaaatgtcctctaaaatttatatttgcccagaatgttgggatatggctttattttataggttctttgcagttataattaagatgagatcatactggattagagtggggcctaaatccaatgactggtat

SEQ ID NO: 545464 - DNA, 642 bp, Homo sapiens
acattcgagtggttattttgaggaggtaatatttgccctcagacctgcatgttaaggagctgtccatgtgaatgcttgagggaaaagtcatttggacaaaaggaagagttagttccaaggccccgagtttgggacaagcttggtgcacgtaacaaacaaacggatctctcatgtagttgcaaatgttggctgaggctgtagtcacatgaaagcttcattagactgaatgtcaaaggtggttcaggcatatggttggcaagtgatggtagctgttatctaggagcttaactgaagctccatctgaacaccttcccctacgtgtagcctctccgggtggcatggacttctcatagcaggatggcttggttccaagaggagatgtccaagactaaacatcccaggaggcgaaaagcaaaaactagcttgaaactggcacagaatctctcctacagtattctagtggtcaaagcaatcacaagacctgctcagattcaaaggagttatactgggtagaaaatgtcctctaaaatttatatttgcccagaatgttgggatatggctttattttataggttctttgcagttataattaagawgagatcatactggattagagtggggcctaaatccaatgactggtat

SEQ ID NO: 545465 - DNA, 460 bp, Homo sapiens
ctgccaactggcctagctgtttagaaaagtaagccactggtttaggattattcttgagcctttgagctagaacacccaaagatgtcctttgtttttagtcacatagagagtgaaaggtttgggacatgttcccagcatttcttttagggttaagaatgcctgttgtgaggttctgtcccaattcaaaggcttgtgatcacactcttttagagctttatagagtggttttgatatgatcccaaacctgggaatacaaatatggcagaatctggccattcccaaaaaggcacttaactgtttcttagtctgagtgggctggagtgccagaatggtctctttctattcctgggctaaggtttttgtcccaggaataaacacacatctcagatacttcaccctttgggcagaaatttgggccttgtkgggagatacccagtacccttctgtattagtctgttct

SEQ ID NO: 545466 - DNA, 628 bp, Homo sapiens
tttacattacagttgtagtgtccttaaaatatatgacaagttcaatgttctaaatgctgagcaaatcaattgatatctctcttggttttagtgggaacctatttgaattacattttttgtttggactttgtgtgtgtatgtgtatgttgaggacagttggaaggaggaagagttaatgagtctgtgtatctgcattcagaagctgacccttccatattgttgaatgagagaaaaaatcagctaggagtttcatacttggctcctccattacttagctgactttgggggagtccaaccactctaccttgctggctttctatttcccgttctctacaatgtagaatacaatacgattctcttcttcacttcacaaatttgtcatgaaaatgggattagagacatgaagcagacatgtctggagactctatgyaatttttatatccaccttaaaattactgtgacagatgctctgtgttgtcatgtgagtgattattaacacttttagtggcagtcctctcctgttcagaaatcagcacagtgcatgcataggagatgggaggttgcgtggaggcagtaatgtgcatataggaaacacaccctatgttccagacatagtgatagacccttt

SEQ ID NO: 545467 - DNA, 640 bp, Homo sapiens
cttgaagaacagaatattctcttcctcctcaatatacctaagaggataatagagttgaataatttctagtataccaatgtgaatttagtactaatgctgaaaccataaatattataccagtttatatttgaacactcaactataaactgttggcatcctcccatgtttccagaattatgataaaatgtatatgtatccatgtcttactccattttctattgctatacctgagactgggtaatttataaagaaaagaaatttatttcttacrgttttgaaagctgagaattccaagagcatgataccagcatttggtgaggaccttcttgctgcatcataacagggtggagggcatcacacggcaagagggcaagagcatgtgtgtcagcccaggccttgatgtttcttcttataaagccaacagtcccatcatgggggccccaccctgaagaatcttatctaatcctaattacttctccattatcccacctccaatcaacatataaattttgaataaagtttccaacacatgaaatttggaaggcatattcaaaccatagcaatccacacatgcagctatgggggcaaaagctgtgaaggagctattctaaatcagaaccacccacatgtacagaggaag

SEQ ID NO: 545468 - DNA, 640 bp, Homo sapiens
cttgaagaacagaatattctcttcctcctcaatatacctaagaggataatagagttgaataatttctagtataccaatgtgaatttagtactaatgctgaaaccataaatattataccagtttatatttgaacactcaactataaactgttggcatcctcccatgtttccagaattatgataaaatgtatatgtatccatgtcttactccattttctattgctatacctgagactgggtaatttataaagaaaagaaatttatttcttacagttttgaaagctgagaattccaagagcatgataccagcatytggtgaggaccttcttgctgcatcataacagggtggagggcatcacacggcaagagggcaagagcatgtgtgtcagcccaggccttgatgtttcttcttataaagccaacagtcccatcatgggggccccaccctgaagaatcttatctaatcctaattacttctccattatcccacctccaatcaacatataaattttgaataaagtttccaacacatgaaatttggaaggcatattcaaaccatagcaatccacacatgcagctatgggggcaaaagctgtgaaggagctattctaaatcagaaccacccacatgtacagaggaag

SEQ ID NO: 545469 - DNA, 640 bp, Homo sapiens
cttgaagaacagaatattctcttcctcctcaatatacctaagaggataatagagttgaataatttctagtataccaatgtgaatttagtactaatgctgaaaccataaatattataccagtttatatttgaacactcaactataaactgttggcatcctcccatgtttccagaattatgataaaatgtatatgtatccatgtcttactccattttctattgctatacctgagactgggtaatttataaagaaaagaaatttatttcttacagttttgaaagctgagaattccaagagcatgataccagcatttggtgaggaccttcttgctgcatcataacagggtggagggcatcacayggcaagagggcaagagcatgtgtgtcagcccaggccttgatgtttcttcttataaagccaacagtcccatcatgggggccccaccctgaagaatcttatctaatcctaattacttctccattatcccacctccaatcaacatataaattttgaataaagtttccaacacatgaaatttggaaggcatattcaaaccatagcaatccacacatgcagctatgggggcaaaagctgtgaaggagctattctaaatcagaaccacccacatgtacagaggaag

SEQ ID NO: 545470 - DNA, 640 bp, Homo sapiens
cttgaagaacagaatattctcttcctcctcaatatacctaagaggataatagagttgaataatttctagtataccaatgtgaatttagtactaatgctgaaaccataaatattataccagtttatatttgaacactcaactataaactgttggcatcctcccatgtttccagaattatgataaaatgtatatgtatccatgtcttactccattttctattgctatacctgagactgggtaatttataaagaaaagaaatttatttcttacagttttgaaagctgagaattccaagagcatgataccagcatttggtgaggaccttcttgctgcatcataacagggtggagggcatcacacggcaagagggcaagagcatgtgtgtcagcccaggccttgatgtttcttcttataaagccaacagtcccatcatgggggccccaccctgaagaatcttatctaatcctaattacytctccattatcccacctccaatcaacatataaattttgaataaagtttccaacacatgaaatttggaaggcatattcaaaccatagcaatccacacatgcagctatgggggcaaaagctgtgaaggagctattctaaatcagaaccacccacatgtacagaggaag

SEQ ID NO: 545471 - DNA, 630 bp, Homo sapiens
gccttcctcaccctatctccttccttgacaaccgacatatctagattttcactgattccagtaggttccatggtaagatgaaattttcaggaaaatctaaagagtgtttacctagtaacaagaaagctacagcttgtgcaagcctgaggggcaaaggctgaggaaacctaaaaaatacaagtcaaaattagaaacagtagaagtacctttgcttaagttgttccctccatctggagtgcccctctcccaaccccttcatcttgaggctcacaatttaacacatagtttcattatttttgtatatttattatccctttactagactgcacactgcttgagggyaaagatcatgtctgattcatatctgtattcccaatttgtccagcacaaggcattttcatgaattgttattgaatgaatacatatgggaattaataaataaacaaatgctcaaagaatgcatgaataagtaaatgaacattattgattacggggtctccctccagtgtactaaaattctggtttttatgtacagtgtatatggggccttcaaaactatgtgaatacaggaagatcatacacttgaggactacagtgtcaactaagtctgagagtagttttgagaaacga

SEQ ID NO: 545472 - DNA, 606 bp, Homo sapiens
ctggcaggactttgagtaactcctcttttgagaacacaaggttttcacccctaaaaggatgctgaggctcggarggattgactgcactggatattctttgtctgttcatctagatccactttctgctcttatcaactctgcatgacacgcaggtgggttgctttaactggactctcatgctcctggcttttggctggttttgggcagtgtgaggcaccagcagaaggttggaaggtgagaggagaaagaagtgaactatttattccctcagttcctgccctgctgggcagcagcttggcaatagtcatgttcttctccctaagacctcatcccctgagggcaaccctgtcctcgttcatttcagtaactgctccctttcttgccccctcaggcctaggagggatcctggcttccccctgttcgtatccctgagatgcttcctcaactactggccttacttgaacctgccttcgcttgggtaaaagatcctttaataaactcacatcagtcactctttttagtgtgccatctgttttctgcctggactctgaccaatgtaatgttcaagttaagaagaccatgataagcatacagaatgattccatc

SEQ ID NO: 545473 - DNA, 604 bp, Homo sapiens
tgactgggcaaacatatgcaaaattataaagaacctaaaggcccagatggcagacaaacagttaaatagtctgatgtataaagtgcacaaacaattgatcatgatccaatcaaacgcagctcttttaaaagtgctgtttgctttctctggatggaatggctttttccaatgtgtccaygtcagaaactcctatttagcccccaaaggttcatctcagttgtttactataaaaggcattgctaacttcccagccagcacgaacacattaaaggaggcctttggcaacactggacctccttccagcctgtggaataagtaaataagtaaaaagactggaataaatctatcaacaaaatgattttaaattcagagctgaagtggaaaccaagaaagggaaatccataggtattaggagcaaggaaagacccatgtcaaggacagtaagaacatgagctgctgcaacaagagcccagggctttatcaagcccagacagagctgtatgtgctaatagcaaccctgaaatctagtgtaggctcaaagggaatggggttttaatgcacatttggggttagaagacttgggattgtgcaagactgggagtag

SEQ ID NO: 545474 - DNA, 371 bp, Homo sapiens
gtgcctttctggacatggtgaagcactttttgggagaccccgattgaaagtcatagaacatcagatctggaagtcgccaaactccccacctgctgagtgggggctccagaccccacccagggctgaggtcccaagaacatgatctacttgayggactgtcggggctgaccttggaccagggccagggtggaaggaggtgtattcactcattcattcaacagtaggtgaatgcttggataaatgggacagcctgggatgaaaccttgaaaactacacagtcatttgcctccgtgtagctcaccattttattttttagggaaacaattaactaataattataaaaatgcaatgggtggagatgcaaatgtagc

SEQ ID NO: 545475 - DNA, 586 bp, Homo sapiens
gtgaccaaatcactttccgttatccaagagtcaggaaaaccctctggacccaccggggtttcatctatggctagggaaagaatcagcctgctgcagatttatgaggaggcagtgagaaaaatcaatccctgcaatacccagtatccaaccatatcatgggtcagccttcttcaccctaccataaacacgccttgaattcacagaaaacaaggggcaagtgctctgcatcttggtacacttcaaatcactctactttttcatcctttatatgttttcctattctctactccataccatttttgcagtttctagatcatgcatatcacccaagtatccaragctcttcaatgtaggttgctcaaaaacaagagagaaaaagaaagtcatacatctcatagtgcttgttaacataaagacatgatacatgcagtgtaatgttaaggcataatcaagtgtcaaaacaggtattatcatgcaaatgcatgatttctatccaatgagtcagtcacaatgagacttcaagatgagtgaattgagcagactatagcaacagctacctgccacaaaggccagtttttgccacact

SEQ ID NO: 545476 - DNA, 586 bp, Homo sapiens
gtgaccaaatcactttccgttatccaagagtcaggaaaaccctctggacccaccggggtttcatctatggctagggaaagaatcagcctgctgcagatttatgaggaggcagtgagaaaaatcaatccctgcaatacccagtatccaaccatatcatgggtcagccttcttcaccctaccataaacacgccttgaattcacagaaaacaaggggcaagtgctctgcatcttggtacacttcaaatcactctactttttcatcctttatatgttttcctattctctactccataccatttttgcagtttctagatcatgcatatcacccaagtatccagagctcttcaatgtaggttgctcaaaamcaagagagaaaaagaaagtcatacatctcatagtgcttgttaacataaagacatgatacatgcagtgtaatgttaaggcataatcaagtgtcaaaacaggtattatcatgcaaatgcatgatttctatccaatgagtcagtcacaatgagacttcaagatgagtgaattgagcagactatagcaacagctacctgccacaaaggccagtttttgccacact

SEQ ID NO: 545477 - DNA, 584 bp, Homo sapiens
tccctgtaaggaaagcaaaaaacacgttagaacatgtaatgtagtgattttcattgatggtagtcacaggaaggttaagtgtagatcaataagttgaataagaagttactaagagttatataaagaagaggataaatgggccaggcatggtgactcacgcctgtaatcccagcactgtgggaggccgaggtgggcggatcatctgaggtcaggagttcaagatcagcctggccaayatggtaaaaccccatctctactaaaaaatacaaaattatccaggtgtggtggcacacgcctgtactcccagctactcgggaggctgaggcaggagaatcgcttgaactcgggaggcagaggttgtggtgagccgagatcctgccactgcactctaacctgggcaacaagagcaaaactccatctcaaaaaaaaaaaaaaaagaagaagaagaagaggataaacgtcacagaaggggaagtcaaggaaaggagtggggggcataaatggcttccggagataaggagtgttggtgctggaaccctcccaccagatgccagcacagctgggccactgattctgtgtctcct

SEQ ID NO: 545478 - DNA, 583 bp, Homo sapiens
tgttggagtactggctcttcctctcactaccaccacaattcccagctttcaaaatgagattcaacaaggacaatgaccatgacaggccaatgaattttcaaaacctctctttggtcctcaataatgaaagtcagttcattaagtcagcatccttaaaagcagtgttcaaatgataagtaggagcttctgaaattggcaggcaaatgatcactgagttaaagagttattataaatcatacattaagaagcaaaaaggccgggcactatggctcatgcctgtaatctcaacactttgggaggccaagatgggttggatcacttgaggtcaggtgttcgagaccagcctggccaacgtggtgaaaccgtgtatctattaaaaatacaaaaattagccaggcatcatggcgggtgcctgtaatcccagctactcgggaggctcaggcaggagaatcacttgaacccgggaggcagaggttgcagtgagcccactgatctccagcctggggaacagagcaagactccatcttaaaaaaaaaaaaaaaaaaaaaagaagcaaaagacygggtgtggtagctgatgcctg

SEQ ID NO: 545479 - DNA, 596 bp, Homo sapiens
tcttatacatttaatctctctttcttggtttctctgtctttatgtctctcttcatctttctctaggcttcttgccattctcaattaaactccttaaaggtcttgcatttgaaatttgaaataaataaacttttgycagtcacatatttctgaatagctaattgcctatatctccttcatttaataagtaatgtcttaaaactaaatgattttattcatgttctctatctttctcattttctactgaattatcaagtaaatgcaacctgacaatctctctatctttcagaggtagaggataaagttttcctgtggttggatgttgcgatgccctataaatgccatcatattcccccaccaggctattccctgccctgtaagtttctctgaattttacacagaggcaagaataattaaactacaatcaaaatagtcctcagggactactgagatagttccagggagagtgctgtttaatgctaatttagggtcacagctaaggtgcagcatttacttaggccaaatttaggcataactcttgagatgtatagcccactcactggcctcatggaagaaataacttaaagagctaatagt

SEQ ID NO: 545480 - DNA, 471 bp, Homo sapiens
aggtggtggcgcgggtggggtggggctcaagtgtggctggacgcagggtgactgtggaggctgcagccctgacaaggaagtggctctcaaggagaacacgggacaggacaccccggcaggctcctccagagccagcgctgctcgtgtctaaggctgcggggccccaacgcccatgatccccaagggccacccaggcctctgaggcagcccagsgtctcctggactctgcctttttagtacacagccccgtgactctgaggcccattttggccctctgctgaccttagcccggccctgctgaaataaaaggcccacaggcctgcaccatccttagggcctccgtctacctgagaaccgtgctgcttggggaacaatttgcaaggcaaattattgtcagtggcactgtcttccaaggcagcaggcggggcctcaattccaggatgcgctaggagtgtggcaagccaccttctc

SEQ ID NO: 545481 - DNA, 366 bp, Homo sapiens
cagctgttaagcttctggacagagtccgtgtgagcatcagtcctgagacctgccctggaagggaggctaaggagagaagcagcacagtccacaggcagcctgcctcagggccgctctgccttccgctttttttttttttttttttttgagacggagtctcactctgtcgtcaggctggagtgcagtggtgtgatcttggctcactgcaacccccgcctcctgggttcaagcgtttctcctgtctcagcctcctgagtagctgggactacaggcgcgcaccaccatacccggctaatgtttgtttttttttgkatttttagtagagacagggttttatcatgctgtctgactgtctcgatctcttga

SEQ ID NO: 545482 - DNA, 593 bp, Homo sapiens
caccagctgttaagcttctggacagagtccgtgtgagcatcagtcctgagacctgccctggaagggaggctaaggagagaagcagcacagtccacaggcagcctgcctcagggccgctctgccttccgctttttttttttttttttttttgagacggagtctcactctgtcgtcaggctggagtgcagtggtgtgatcttggctcactgcaacccccgcctcctgggttcaagcgtttctcctgtctcagcctcctgagtagctgggactacaggcgcgcaccaccatacccggctaatgtttgtttttttttgtatttttagtagagacagggttttatcatgctgtctgactgtctcgatctcttgactttgtgtgacctgttctctgtcctgcctcggcctcccaaaatgctgggattataggcgtgagccaccatgcctggcctgccttctgagtcttaacctccttggtcaccatgtggcgctgcttccacccactgacggtgtccatgcacctgctcagcagtggcccgaggrgccctgcagacgccccagcagccagggtttctcaccgtccccaccccaggacaa

SEQ ID NO: 545483 - DNA, 476 bp, Homo sapiens
gctgacttgggacataaacctaggcctcttggatgctgaccaaagcatctttccccatcaccccatgatgtttcttgagaaaataaggaaaaccacacaggtaaaaagagaagaggaaatatgccacccataaaggtcaaaaagggagctctgatagaatgtgaaatgtgatgatgagcttcctggcagccaaggtaaaaagggaaagagggaaggtcatggggtgtttgttcctggaaaggaaaaaatgaaccaccatgttgactggagacaagtctgtcctggccataaattctgaggaaaatggctgttatgggacagttgatggggacccctgaaggcaaaacagacgccaacctgcccctccttgggcatagcagttaagagttcattctttgaaaacattagctcatgtaatttcacaaatatttgtaatatacgcgtatttatraaaccactaacacaaggaagaaatt

SEQ ID NO: 545484 - DNA, 354 bp, Homo sapiens
cctccccggcctcccccagcctcctgccatactgaacttctctatcccacaccaagcagcctgtgatactcaattatctcagtgattttaaaaatgaaaacctgtcttctgcactcagtagaggacccctacaggcaggaaccrtctcttttattcatcctgtctcactggaacccgcatacaataggagcccagaaaacacacctgttccgtgagcgagcgagtgagatgatctctgaccttggccagtgggagccagggccctaagggctctgagtgcagccacaggcccagggctgggcgtccatggaggaggtctggccaaagggctgagtggggcagcctggtgaaagg

SEQ ID NO: 545485 - DNA, 354 bp, Homo sapiens
cctccccggcctcccccagcctcctgccatactgaacttctctatcccacaccaagcagcctgtgatactcaattatctcagtgattttaaaaatgaaaacctgtcttctgcactcagtagaggacccctacaggcaggaaccgtctcttttattcatcctgtctcactggaacccgcatacaataggagcccagaaaacayacctgttccgtgagcgagcgagtgagatgatctctgaccttggccagtgggagccagggccctaagggctctgagtgcagccacaggcccagggctgggcgtccatggaggaggtctggccaaagggctgagtggggcagcctggtgaaagg

SEQ ID NO: 545486 - DNA, 132 bp, Homo sapiens
tgcttccacctgaactttacagcagaccattgtgcctgccccgggacacagtcccacccatcccccgctgcctggcaagggccagcaacacaacgtttaygctctctcactctcctggccttggccagttca

SEQ ID NO: 545487 - DNA, 481 bp, Homo sapiens
gtcatttccctgagacctcaaaaccccaccaaccccactggggcacccacagaaagcttgtacatgtctggctctggctgagcacaggtgtggtttccatctgcgagtcagagcccgggattgacatgggacgctcgaggctgactagtgtcagaggggcctgtgtgcagattgggagargattatcgagtaatagaggggcaaagagggacatccagacagcaaacacccccatccagtctgtcctcacgttttgcccagactcctgcaagaacttccagaatggtcttccatgtgcaactgcccgtccctgcccatgtcctggatcattctccacactgcgccaggttgggctttaacaagatcatgttttgggtttttgggggttttttgtttgtttgtttggtctcactctgttgtgaggctggcgtcccgtggcatgagcatggctcactgcatcttggacctcccggcctcaaac

SEQ ID NO: 545488 - DNA, 590 bp, Homo sapiens
ttgtttgatttttaactttgagcacaaaacagaacatttaaatatgagaaccaaataaacttgttgccaatcagtaccaaaattaaagtacaatggtagtgcttgggaagggaggcactgaaaaggaagattaatatcctcgttttataaaatggggagtcaagaaacactggccatagtgagggcgtaagaaaaacattgcaagtaaattgtttacaaagtttctaatrgggattataaaactagcgatataatattagaagaaggtggggaggggagttagaagtgtaaagataacttaataataataaataaataataagtaatgaataaaaatattaataataaaaatagtaataaaaaaattatatcctaataggaagcaaataaatagtgatgtctaaatttcaaaatggagaaaaataaaaatgcaatagcttatatttattgaccatctgctttgcaccaggaaccttctaaatgctttgcaggcattaacttatttttagttctcacaacaactgttagaaagatactattatcacctgcatgcttcagatgaggaaactgaagctcagagaagttaagct

SEQ ID NO: 545489 - DNA, 585 bp, Homo sapiens
gctgcaccccctacgactgacctggatgccctccgccctccctggcacagcctggctgaaatcccaggtgcaggaggcattacttgaactaaaagcaaccagcctctggatgacatggcccagcttcagtttcactttcagttgagaaattgaatttaatttttctttctatcttgatgggcatctctttttggtgaagaacaaataagaccatgactcatatttcacagaaattacccccctgatttcatggacttttggcagctctatcaagttttttagaggggaaaaatcttaggctgggaggggaggtgacttgcccagagtcacacagctcttggagggcagaggggaggccaacatctgcccttgtgactctgatattgaagcaaaaatgggtgattttaataatccaacagtgtccaggtttgattctgcttctacaaacacagagacctaagctctcactcctgtasttatactcacaattccacagtgtggcttttgaatctcatgattgcaaagctggcatcatgccacaggtaccattctgcaatgcgaccttctcactcccctgtctcagcc

SEQ ID NO: 545490 - DNA, 443 bp, Homo sapiens
caggaaggagcaagcgctgctgctcgtctctcagcacacgtggcaagcccaaggcagcaggtggtagagaaacagccgcttggcacaggctcgaggatggcgggagccgccaccctggcaccagaaggagttcagctacagtggcatcaagttcctgcttttataccagacaggacatgcctatatccttgatgaccaatcagccaaaataccatctcaatgtaaagaggcacaatgcagtctcaggatggcacttcctgggcgtgaagccttgagtgtgccatgaagcttctccagtgctctagatggsgttatgccacctctctccgggttgctgtgaggactgcatcatggaatcatgtgaaagtgcctgacacggacaccccaggatggcccacaacagcctcaactgtgctgctgcagggacattcacccaggaggca

SEQ ID NO: 545491 - DNA, 626 bp, Homo sapiens
acctgcagttagttatagaaaaattaattaatacacatcttttaagttaaaygtttaaacagcaattatatttaaatacttcatttgaaagctgtgcctcccacacatttaaaagtatctattattttacaaactatactaattagcgtatacaacttcaagaaactattccttcagacagaaaattacaatacaaacgcaaatataccgaaaccatacaaactaaattatctatgcacagaaagacaccatggatgttttaagatattccaaaaacatattctgcaaaatatgaggcaggattttgaccaacattacttcttcaaaagagatggcattggttttatgaagagctgatgagccactatatttagaaaccatattattaccagtttctcctcagaaaaaaattggagagctaaaaatagggaaacatgatttggctcttgaaaaaaaggtttgcaaaccacaaaggctagaggcatggattattggaaactctcttctgaaaaattttttactaatttgggagattaacagtcagaatcaatgggtgatggtttatagagtgataccaaccttgtccagtcctgctcatcatttccaatcaacaaaatgaataaaga

SEQ ID NO: 545492 - DNA, 551 bp, Homo sapiens
acaagagcctgttaacacaaagaagataaagagtggaactctgttgtgtgtgctgagctgccatgtaacagygcagccttgtcctccagggctgttcagcttccagactcaccaaccaccaccaccctaccctcatgttagaaggttggctacccatttgaccctaactactgaagaccaggtttctggtactgagtgatggttgtgacctctcgcctgagaacaagtttaggtgaaaagaagttgttttctgctcctttttttttaacccctttcaggataatatacattagttcacagcgcaaagaattttgttggcctatcccctaactaatcagcaagatacactttgaattagacatagattcattaactatattgtctctatcgattctgagtagcaccaatctttttttcaactgaggtgcatgtgtgtatgtgagtatgtatgtacatgcagaaatagtcacaaaattttatttctgcaaattcaagcaatgttgtaaagcaacacaaagcattttagtacatctcacctaaggtgcaaacag

SEQ ID NO: 545493 - DNA, 551 bp, Homo sapiens
acaagagcctgttaacacaaagaagataaagagtggaactctgttgtgtgtgctgagctgccatgtaacagtgcagccttgtcctccagggctgttcagcttccagactcaccaaccaccaccaccctaccctcatgttagaaggttggctacccatttgaccctaactactgaagaccaggtttctggtactgagtgatggttgtgacctctcgcctgagaacaagtttaggtgaraagaagttgttttctgctcctttttttttaacccctttcaggataatatacattagttcacagcgcaaagaattttgttggcctatcccctaactaatcagcaagatacactttgaattagacatagattcattaactatattgtctctatcgattctgagtagcaccaatctttttttcaactgaggtgcatgtgtgtatgtgagtatgtatgtacatgcagaaatagtcacaaaattttatttctgcaaattcaagcaatgttgtaaagcaacacaaagcattttagtacatctcacctaaggtgcaaacag

SEQ ID NO: 545494 - DNA, 588 bp, Homo sapiens
gcaatgaaggaatacaacacacaatctaaccacaatgtgtatctgttagttttttagtatctaccccttctagggtccaacacaggcaacgttctaattttggagcctaattagactattgtttcagtaaccaacacatgcttctggcatcaaaacaagggattttaggatttctccaygagttattgaaggataagagaattaatgaggatcaccaccagctaaacactgctatcaagaaatgaaaggaaggaaagaaataaaaaagaatgaagaaaaaaagaaggaagaaaggaagataatggcaagtccaaaatggtggttagctgtgaaatgggacttttcacatttcatacatgcagactacgcttacatgaagccagttactgtttgatttttattttgatttccccttcttagctgttctaaatagacctaatatattgaaaaaggtagggcttagtcaaaactcactgagctcacattgtaattgaaaatgctaagataaataaacctagtagtttatattattcaagcaattttttacagtgatgactaaactctgccgagcctgcattcctttcacgt

SEQ ID NO: 545495 - DNA, 588 bp, Homo sapiens
gcaatgaaggaatacaacacacaatctaaccacaatgtgtatctgttagttttttagtatctaccccttctagggtccaacacaggcaacgttctaattttggagcctaattagactattgtttcagtaaccaacacatgcttctggcatcaaaacaagggattttaggatttctccacgagttattgaaggataagagaattaatgaggatcaccrccagctaaacactgctatcaagaaatgaaaggaaggaaagaaataaaaaagaatgaagaaaaaaagaaggaagaaaggaagataatggcaagtccaaaatggtggttagctgtgaaatgggacttttcacatttcatacatgcagactacgcttacatgaagccagttactgtttgatttttattttgatttccccttcttagctgttctaaatagacctaatatattgaaaaaggtagggcttagtcaaaactcactgagctcacattgtaattgaaaatgctaagataaataaacctagtagtttatattattcaagcaattttttacagtgatgactaaactctgccgagcctgcattcctttcacgt

SEQ ID NO: 545496 - DNA, 588 bp, Homo sapiens
gcaatgaaggaatacaacacacaatctaaccacaatgtgtatctgttagttttttagtatctaccccttctagggtccaacacaggcaacgttctaattttggagcctaattagactattgtttcagtaaccaacacatgcttctggcatcaaaacaagggattttaggatttctccacgagttattgaaggataagagaattaatgaggatcaccaccagctaaacactgctatcaagaaatgaaaggaaggaaagaartaaaaaagaatgaagaaaaaaagaaggaagaaaggaagataatggcaagtccaaaatggtggttagctgtgaaatgggacttttcacatttcatacatgcagactacgcttacatgaagccagttactgtttgatttttattttgatttccccttcttagctgttctaaatagacctaatatattgaaaaaggtagggcttagtcaaaactcactgagctcacattgtaattgaaaatgctaagataaataaacctagtagtttatattattcaagcaattttttacagtgatgactaaactctgccgagcctgcattcctttcacgt

SEQ ID NO: 545497 - DNA, 134 bp, Homo sapiens
ctgtctggtgggagccttgggtaggagcagggcctccacctggcaccacagggcaggattaacgaggtgccgcmgctcccgctgggcccagctacatcggaaggcgctgggccgggggcatggaggggaggggt

SEQ ID NO: 545498 - DNA, 602 bp, Homo sapiens
ggctgattttgaactcctgacctcaggtgatccgcctgcctcagcctcccaaagtgctaggattccagccccggaaaccactgcgcccagccatarttttttttttccttgatttcaggctaaaatttaccataccctggtgtctatggtgaatacatacatgttaaaaaaacagcaacatttgattttgattccaaaagcaataagtactcactataaaaactttgcaaaatatgataagattaattgaaagaacctcatcagttaccttattgattgatatatatatcaattaccttaagtataaagacgtcaataaaaatcatcctcagactgctaacagttttggtttattatctgctgctcttttaaaaaaaatctgtattgaggttttcccttgatttgttctgtttttacaaaattgggagtatagtggatatccagtcttggttcttgctctttccacttaatattatgtaatgagaatactcctggtggttattacttgttaacttaataataattatgaaatatttcacatatggaaaaagccttaaagagcaatattacagacatcagcttgcttaagaaataaaacactg

SEQ ID NO: 545499 - DNA, 318 bp, Homo sapiens
aatggttaagtaatcaacataacagggtatatttgtagtgtgtttttaaagctcccattcactgaaccaaccaccttcctaagcctggattaatttattctatcatcattacaaccctgggagggagattattgtccctgtgttagagatgaggaaattgaagcacagagaaaagttaagcaacttgcccaaggacacacaaacagtaaatagtaaatccagatttaaaccaggaaccttgactccagattctgtaagctttaccctgacactataccagyggttggccttgagcttaatttctaattctacgatgga

SEQ ID NO: 545500 - DNA, 562 bp, Homo sapiens
tgctctgccccacagccaacaacagtcttccttcccatgatgctctgccctacaaccgacagccacacctcccttggcaccaggatttgccyccagtctgacagccttccttcccagcatgccttgccctggcctgggcagtgttgtccacacccacatgagggtggtgtcggtgctgcccacgtcccagctgtgaggtcagccagccacagaagcagcagctgtggggacaagcttctgtgcgcagctctgtcgttcagcagctgtgtccttcagaaagccctggagctctctgggcctcaggtggcctttcggagtgtagacaacgccaacagctctgaccacagacagccatggcaggcaggtctgtcagtgactaaggaatatgcccagcagagacacggcaagaccacaaaccatcttgggaccctgagaaagaagacacggtgggcggattcaacagtcttatggggtcacaatgcacagggcttggtgagtgactgggtgcagagggtgacagaggagacagtgaaggagtcttgggtcctaaagtggcacctgt

SEQ ID NO: 545501 - DNA, 562 bp, Homo sapiens
tgctctgccccacagccaacaacagtcttccttcccatgatgctctgccctacaaccgacagccacacctcccttggcaccaggatttgcctccagtctgacagccttccttyccagcatgccttgccctggcctgggcagtgttgtccacacccacatgagggtggtgtcggtgctgcccacgtcccagctgtgaggtcagccagccacagaagcagcagctgtggggacaagcttctgtgcgcagctctgtcgttcagcagctgtgtccttcagaaagccctggagctctctgggcctcaggtggcctttcggagtgtagacaacgccaacagctctgaccacagacagccatggcaggcaggtctgtcagtgactaaggaatatgcccagcagagacacggcaagaccacaaaccatcttgggaccctgagaaagaagacacggtgggcggattcaacagtcttatggggtcacaatgcacagggcttggtgagtgactgggtgcagagggtgacagaggagacagtgaaggagtcttgggtcctaaagtggcacctgt

SEQ ID NO: 545502 - DNA, 562 bp, Homo sapiens
tgctctgccccacagccaacaacagtcttccttcccatgatgctctgccctacaaccgacagccacacctcccttggcaccaggatttgcctccagtctgacagccttccttcccagcatgccttgccctggcctgggcagtgttgtccacacccacatgagggtggtgtcggtgctgcccacgtcccagctgtgaggtcagccagccacagaagcagcagctgtggggacaagcttctgtgcgcagctctgtcgttcagcagctgtgtccttcagaaagccctggagctctctgggcctcaggtggcctttcggagtgtagacaacgccaacagctctgaccacagacagccatggcaggcaggtctgtcagtgactarggaatatgcccagcagagacacggcaagaccacaaaccatcttgggaccctgagaaagaagacacggtgggcggattcaacagtcttatggggtcacaatgcacagggcttggtgagtgactgggtgcagagggtgacagaggagacagtgaaggagtcttgggtcctaaagtggcacctgt

SEQ ID NO: 545503 - DNA, 494 bp, Homo sapiens
ccaaaccccaggacactgagaaggttcagccctcaccctctcctgggccacctggggtccagcccctggtccgtgtacacagagctctgcttgcagggagcggacttcctcccaggggccaccctcgtgcacaagcygatgagccccagaggaggcatgggagatggcaggtgtagcccccagactgcacctgagtcctgcggtgagggcctgtgcatcggggcgggacaaagcggggactgaggagagacgggcttcctgggagcccaagaagcacagagtccaggccaggctggctttgaatgtcagtgaatgcaaaggaggaagaaagaagggccgggtggtctcggggaaccacattcactgctctccctgtgacttccaaagcaaggccctccctcaggctgggtgggtggtgctgtgtgagacttatgggaggggagagggttgagtgggacaactcttcctagaggatggccagaggagggtagcga

SEQ ID NO: 545504 - DNA, 494 bp, Homo sapiens
ccaaaccccaggacactgagaaggttcagccctcaccctctcctgggccacctggggtccagcccctggtccgtgtacacagagctctgcttgcagggagcggacttcctcccaggggccaccctcgtgcacaagctgatgagccccagaggaggcatgggagatggcaggtgtagcccccagactgcacctgagtcctgcggtgagggcctgtgcatcggggcgggacaaagcggggactgaggagagacgggcttcctgggagcccaagaagcacagagtccaggccaggctggctttgaatgtcagtgaatgcaaaggaggaagaaagaagggccgggtggtctcggggaaccacattcactgctctccctgtgacttccaaagcaaggccctccctcaggctgggtgggtggtgctgygtgagacttatgggaggggagagggttgagtgggacaactcttcctagaggatggccagaggagggtagcga

SEQ ID NO: 545505 - DNA, 288 bp, Homo sapiens
ccatctgtgtacgttaattagttatattgaaaggaaaaatgaacttctgacatcttcatgataggaggtagttttgcaacttacagccaggtgcctgccraaagtaggctctggttctttcacagacactgtgagataggatattattcttttggctatttacatttcaaagcaaagggtccctactccctaggccacgggctgcagcaatcctgcttgccctgtcctggtggcctgtgtcccatctcttcccctaccatctaccatcgaggcacagctcacagcaca

SEQ ID NO: 545506 - DNA, 319 bp, Homo sapiens
gccgctctcaacacaagaaacacagtgttatgaagaaagggggcatattctcagcagaatttcttaagattttycttccatctctgctgctctctcatctgctggccattggattgaggatctacactggaacacatcaggcaaccttcgccagcactttttgataaagaattggaatttgactctgtttacatagtagatactatatctgagattgcaacatatctaactgaagactattatgattcatgaattttgggtcgtcacaacacttgcattgatttgttctgtaagagtgacattcctaatttagtaaaac

SEQ ID NO: 545507 - DNA, 319 bp, Homo sapiens
gccgctctcaacacaagaaacacagtgttatgaagaaagggggcatattctcagcagaatttcttaagattttccttccatctctgctgctctctcatctgctggccattggattgaggatctacactggaacacatcaggcaaccttcgccagcactttttgataaagaattggaatttgactctgtttacatagtagatactatatctgagattgcaacatatctaactgaagactattatgattcatgaattttgggtmgtcacaacacttgcattgatttgttctgtaagagtgacattcctaatttagtaaaac

SEQ ID NO: 545508 - DNA, 319 bp, Homo sapiens
gccgctctcaacacaagaaacacagtgttatgaagaaagggggcatattctcagcagaatttcttaagattttccttccatctctgctgctctctcatctgctggccattggattgaggatctacactggaacacatcaggcaaccttcgccagcactttttgataaagaattggaatttgactctgtttacatagtagatactatatctgagattgcaacatatctaactgaagactattatgattcatgaattttgggtcgtcacawcacttgcattgatttgttctgtaagagtgacattcctaatttagtaaaac

SEQ ID NO: 545509 - DNA, 596 bp, Homo sapiens
ttacagtaatgcacagtaaggtgttacatagaaatattgctaaattttctgcatatactatgtatttagttaaattatttgaaattttatagttaaagtaacaaatgtatatttaaatgttttgacacaaattacaaatatacgtttaaaaagcatcttacactctaaatattatttgtcacctatatatttgtcttttctctataggaaagtttaaatttttcccttgaagctttaattatttgagtctatcaaacaaattgataatgtacaaaytaacaggaaaaaatgtttacaaatataattatgtgcacaagtacgcacttggagtttacataatatacataaatatatatatacaaatatttttattttataaatcaatatacaaatatatactatatatgtataaaaactccaggaaaggcaaggtagtcaacacgcctatgttgtcttgagattacagaaaactcagagctgtactttggtaaatcaggctttgcagaaggcaggtgatgacaaggaagaaagaggagcctggcagcagaggtggtcttgttacatggatgaaacctcacagggagcagccttcctct

SEQ ID NO: 545510 - DNA, 596 bp, Homo sapiens
ttacagtaatgcacagtaaggtgttacatagaaatattgctaaattttctgcatatactatgtatttagttaaattatttgaaattttatagttaaagtaacaaatgtatatttaaatgttttgacacaaattacaaatatacgtttaaaaagcatcttacactctaaatattatttgtcacctatatatttgtcttttctctataggaaagtttaaatttttcccttgaagctttaattatttgagtctatcaaacaaattgataatgtacaaattaacaggaaaaaatgtttacaaatataattatgtgcacaagtacgcacttggagtttacataatatacataaatatatatatacaaatatttttatwttataaatcaatatacaaatatatactatatatgtataaaaactccaggaaaggcaaggtagtcaacacgcctatgttgtcttgagattacagaaaactcagagctgtactttggtaaatcaggctttgcagaaggcaggtgatgacaaggaagaaagaggagcctggcagcagaggtggtcttgttacatggatgaaacctcacagggagcagccttcctct

SEQ ID NO: 545511 - DNA, 596 bp, Homo sapiens
ttacagtaatgcacagtaaggtgttacatagaaatattgctaaattttctgcatatactatgtatttagttaaattatttgaaattttatagttaaagtaacaaatgtatatttaaatgttttgacacaaattacaaatatacgtttaaaaagcatcttacactctaaatattatttgtcacctatatatttgtcttttctctataggaaagtttaaatttttcccttgaagctttaattatttgagtctatcaaacaaattgataatgtacaaattaacaggaaaaaatgtttacaaatataattatgtgcacaagtacgcacttggagtttacataatatacataaatatatatatacaaatatttttattttataaatcaatatacaaatatatactatatatgtataaaaactccaggaaaggcaaggtagtcaacacgcctatgttgtcttgagattacagaaaacwcagagctgtactttggtaaatcaggctttgcagaaggcaggtgatgacaaggaagaaagaggagcctggcagcagaggtggtcttgttacatggatgaaacctcacagggagcagccttcctct

SEQ ID NO: 545512 - DNA, 555 bp, Homo sapiens
ataaggtatcatttttacaatctatatttcacaggtaagaaaacagaaacttgcagtggtttggaacctaaccaaggacacacagctagcaagtggcataaacaaaatatgacataaagaatggctggagacactagagatgtttatccagaagaaggaaattctagaatattatttgaaratgtaagtttgaaggaaacaagttcgaactatttgtaccttccgacgttgaaattataagatcaacctattatgctctgtacattattcatttcctttaccacatatgcatacatgtattgatttaacaaattatgttgcactactgcatgcaataaactgtgccatgtactgaacatgtgggtgtaaacaaaacagataaggtacctgcccttaggaaacttagattattattctgccttctcttacttcaccttctgccatcctatatttttcacccccttcaaaactcaaactcacctcaaaagtcacttttccctaccccaggaatcttcagtgatagattcactgctcttccgcccctgccccctataa

SEQ ID NO: 545513 - DNA, 599 bp, Homo sapiens
tatacatcatgcctactcctaacctcccctactccctccattgccttgttgcagatgacctgcctagaggctctattatggttgcttgagtgaaacatggcccaggtataagtcctgcagtgtgaggccaagaaacatatctggcggggtacatttgtaactctcaggcccagtgcaaagattataaaatgatctccagagcctgtggatgtcatttaaatcagggtccatgataggaaaacaaatggttgaatgagataataggggcttgtgtgatattctgaattcctcagtctttacttttagccaattaaaattaattccttcagcctcacagcctggaaatcccaagttcccagacatgtcaagttgtggttcaattttgagacacargcaattcctcaagaaactccagcctgacacaatcaaataagctttgtcaaagtccacctaatcaaaaaccccacacttaatcacatcagcttcttcagctcaaactagacagactcccatcagggtatgggagctctcagtcaatgctgcctgttattcaaataatctgagctgcagcactccagaactgcatcccagttacggga

SEQ ID NO: 545514 - DNA, 608 bp, Homo sapiens
atacttacaaatggtgcctggcacagagtaagtgccatgtaaatattagctacttttagtagtattttcataacatcttgagggcttggctcacagktcccaatggtgactgattttagataacagcatgttctcagtctgtgtttctaaccttactatccccactaaaagcctaaatccatccactaatgcttcatcccacaaattagggcatgaaaccacatctggtcattaagattctgtcagcaaaggcacgtgccatcacacttctccagaatccaaccctctgtcatctcccatttgagaatcactaagatactatagttgcatgtgtcatggtaaattatgttatatcaataggtatatcaataggacaatgcaaaaacagacacaactggttgtggcatgtaagaaaatgataaataagtcccacgaatttcaaaagacagttttctgaagagagggcaggtggtaaacctggaagtgaaatgaaaactgttcacaaattgaaagacagagtttcttcattccggatttgacacttggccaagttggaggtccacacaatttatctttagagggttccttctactctctcagtgtaccca

SEQ ID NO: 545515 - DNA, 608 bp, Homo sapiens
atacttacaaatggtgcctggcacagagtaagtgccatgtaaatattagctacttttagtagtattttcataacatcttgagggcttggctcacagttcccaatggtgactgattttagataacagcatgttctcagtctgtgtttctaaccytactatccccactaaaagcctaaatccatccactaatgcttcatcccacaaattagggcatgaaaccacatctggtcattaagattctgtcagcaaaggcacgtgccatcacacttctccagaatccaaccctctgtcatctcccatttgagaatcactaagatactatagttgcatgtgtcatggtaaattatgttatatcaataggtatatcaataggacaatgcaaaaacagacacaactggttgtggcatgtaagaaaatgataaataagtcccacgaatttcaaaagacagttttctgaagagagggcaggtggtaaacctggaagtgaaatgaaaactgttcacaaattgaaagacagagtttcttcattccggatttgacacttggccaagttggaggtccacacaatttatctttagagggttccttctactctctcagtgtaccca

SEQ ID NO: 545516 - DNA, 594 bp, Homo sapiens
aatatcataaatgacttcctccctgcaaaccatttttttcatatgttatgtccttgaaatttatgtatcaatgaaccaaataacttagcatttgaactcgtttcttattatttcgtagagaatcattgttcgttcgttttttttttctttttcatctcaaccagtctttcacccagtgtggtccatagactacctgcttcagaatcactgtatgagcctataaaagcagcatattcttggacctcaacccagacctactaagtgaaaatctctgagggtagaagcttgttacttgcatctttcaaaagttatccaagtgattctgattcacaataaagtttgagaaccacygtcctatgtttttcatgtttttgctcctacttttgcctctttctgggatacaatttctccaaacctgtttagaaattccgcatgtgcttcaaggctcacctcaaatgtaatcttctttacaaaaaccttcctctcctgcttcctcttatccagacaaatgtgacctttcctattgcgatgagtatggagcagggtacggcaagatgttaatactggggttcagaggactgttaaatacactga

SEQ ID NO: 545517 - DNA, 509 bp, Homo sapiens
cttagggaggaaatttgatgatgcagaagtcactgagaaatgggcagttatctaaaatcacagaaattcataatcgaataaataaaatgcaggatcacarttcaatttctgtttcaaaattagttattattttttcttatataagaaagtagaacatattgagggtggattttcctcatattgtacaagttcatccattaacatctcctttgaggcttatcatcaggcttggtttcaaagatgccattactgactacttaacatttggacaaaatggttcccttttactctgtagttgtgtttgaatctgttgggaatgtaattgaatgctatctacccaggttagcatctcaaaaataccatacaattgtgggtaaggaagataagaccaaatgtgatgtgtgcatatcctatattgtgcacatgtggtgtgaagtctgccagcttcttctgggacttttgcccattgttctgggcttcaggccccactcagaaacttggggaatata

SEQ ID NO: 545518 - DNA, 611 bp, Homo sapiens
agaactggacacaatattttcaggaatatactgtaaaatttccgtagtgatctgatatatccacaacaatgcacctaactttttaggttgatccataactgggtttaatggctaagagcactggctctggaattaaactacttagattcagtctcagcattgcctcctactgtctgtccttgagaaaattagtttctctgaacctcaatttcctcttctgttaaataggtaggatgataataatactttatttcccacatgactgttttgaggtttgacactactgccagcaaagcatctacaacaatattccagcacattgcagatgcttgatcctgtcacwtaattgatgctcagtaaaaatcagtatacgtgtgcatgtgcgtgtgtgtgtgtgtgtgtgtattggtagtgggagtgggtttgcagtgtctgccatactctcttgtctttctcagggtaatggttggccctgagcatgtcaatatggagcacttagtaatttggggggaggtaatgacataaaactacttttgccattatgcttctttgagaagcatggctttctctgttttcccgcttcccaaggtgaaaactaacgcacacagcag

SEQ ID NO: 545519 - DNA, 611 bp, Homo sapiens
agaactggacacaatattttcaggaatatactgtaaaatttccgtagtgatctgatatatccacaacaatgcacctaactttttaggttgatccataactgggtttaatggctaagagcactggctctggaattaaactacttagattcagtctcagcattgcctcctactgtctgtccttgagaaaattagtttctctgaacctcaatttcctcttctgttaaataggtaggatgataataatactttatttcccacatgactgttttgaggtttgacactactgccagcaaagcatctacaacaatattccagcacattgcagatgcttgatcctgtcacttaattgatgctcagtaaaaatcagtatacgtgtgcatgtgygtgtgtgtgtgtgtgtgtgtattggtagtgggagtgggtttgcagtgtctgccatactctcttgtctttctcagggtaatggttggccctgagcatgtcaatatggagcacttagtaatttggggggaggtaatgacataaaactacttttgccattatgcttctttgagaagcatggctttctctgttttcccgcttcccaaggtgaaaactaacgcacacagcag

SEQ ID NO: 545520 - DNA, 641 bp, Homo sapiens
agcagctgtctgatccccagtactatcatagtcagaactccaaaccaaagccatgtgtggttttagcctcattagcatatatggctttgatatcagaggactagagagtctatttgcattcactgttcctaagaagaatcaagctataatccacataccatgtgttttagttgtaaagagaaaaacacgccaggaaactattaatttctcccagccaaaatgacctcttatttcaaaacaggggcccactaatgcttcttggaaaattatagttctgttgctagastgccccttcatctggaagcaaaattgcccattcatatggttgagcaaggatgaataaaacatgctggtagtgaaattcactaggtatgaggttctatttaatttcattccactgtgtcagcacattgtgtggagataagtttcccagactgccacagggttttgctattaaatacttaaaatagcagagatttggtagcttgttgcttcctatcatgttgaagcaggcttgtatccaagtatagtgtgtaaaagtagaagtgcccctgcttatcaagagtatgtgtaaggttgaaacattgaaaataatgctctctacttagaagcctctgtagttttggtacaaatctaaggat

SEQ ID NO: 545521 - DNA, 650 bp, Homo sapiens
ttttcaatcagccacactataaagttcaaattgaaatataacttgtcagaaacctaagggaaattctgaaaaagaagtgtattgagagtatgctagcaataacacctattaaaataccataaatcttatgtaattaaagtttgatatcagtatataaatagacaaatcaaggaaacagaacagagagcctaggaataggcacacacacacacgcacacacacacacacacatatatataaaatatatgtaatttagtttattatgagggaagcatttcaaatcaacaaggagaaataaattattcaacaagtagtattgggccaactgcctaaccacttgaaaaaaaataaagttaaatacttgcttcacttcttataccaaaataaataccagatgggtaaaaattataaatgtttgttttaaaaatgatactgagaggtgacagcgtgctggcagtcctcacagccctcgctcactctcggcgcctcctctgcctgggctcccactttggcggcacttgaggagcccttcagcccgccactgcactgtgggagccccttcctgggctggccgagcccagagccggcttgctgggaggtgtggagggagaggtgcgagcgggaaccrgggctatgcgcggcgcttgcgg

SEQ ID NO: 545522 - DNA, 491 bp, Homo sapiens
ggttatcatgtagcagagtgacggaggactgtgaaataagagacaggcttgacaacctggattctgaacagggaaaggtctgggtctggacctacattcagatgttggtgcatccactgagcactaagtccgaattgtcttttctttgttcctgtctggttttcgcttcygtctgtctgtgtctgctgctctgtctgtcagtggtggggtttccacgcaaaaggaggagaagctaaaagcttcatttccttcctccttcccctccccctaaacactcagtccctacatccaacttgattgaagcttcaaactcctgccctcaatgtgttctcactagcctaagggagcacccctgagacattcacagtgctgtagaatggtccgagcttagaactcagacttgatggcagtgggactggtgatttgggctggtgcctcgtactacatatactgactggcctgtggtagacagcaaaaaaagaagagaccag

SEQ ID NO: 545523 - DNA, 585 bp, Homo sapiens
atctctgccagttccctcctagcactttggagaaatagaattacctgtagctcccacaaatgcaccatgcacttaccacaattacaattaaactatcaatcaattgtgtagtcaattacgtagtggctgccttctgggaatgtatgttcctaatgttccgagaggcagggagtactccagtcctattcactgatgttaggtgctcaacaaacttatgggactttttaatttaaaaaaaaaaaaagtttttttaagagatgaggtcttgctctgtggtcgaggctgaagtgtggtggcaygcttatagttcaccgcagcctcaaactcctgggctcaggtgatccttctgcctcagcctccccagtagttgggactccaggtgtgagccacatctggctaatttttaaattttttttgtagagatggggtctcactgttttccaggctagtatccaatttctggccccaagcaatcctcctgcctcggcctcccaaagctctgggattatggatgtgagccactgcacttggcactaacttttgctgaataactatttcatgccccatataggttgggtctactat

SEQ ID NO: 545524 - DNA, 615 bp, Homo sapiens
gctggcccaggtgctaagcccctcacagcccagggccactccaagagtgcagggcctgccgagcccacgcccacctggaacttgccctggcccgcaagcaccacgtgcagccccggttcccgcctcgcctctccctccacacctcccggcaagcagagggagctggctctggcctyggccagcccagagaggggctcccacagtgcagccacgggctgaagtgctcttgaagcatggccagagtggacgccgaggccaaggaggcactgagagtgagcaagggctgctagcacattgtcacctctcaatactgtaatcaccaaatattaggcttacaattgtagggaactccccaattctcttagaaaaagctgataccttatgggatataaagaaacagatttccaggtggtaagtttgaaaatgaattcactgatgaaaatctgcttgtctggaaaattatacataatttacaaaagtagttgaagcgagtttgaaaatcttaccttctgtgaacaaattatgatcatttgagaagaagaagcatttctcttctggatgttaactctgttgcatttaactttggtgcatttagttttcagctcctgacatcgc

SEQ ID NO: 545525 - DNA, 615 bp, Homo sapiens
gctggcccaggtgctaagcccctcacagcccagggccactccaagagtgcagggcctgccgagcccacgcccacctggaacttgccctggcccgcaagcaccacgtgcagccccggttcccgcctcgcctctccctccacacctcccggcaagcagagggagctggctctggcctcggccagcccagagaggggctcccacagtgcagccacgggctgaagtgctcttgaagcrtggccagagtggacgccgaggccaaggaggcactgagagtgagcaagggctgctagcacattgtcacctctcaatactgtaatcaccaaatattaggcttacaattgtagggaactccccaattctcttagaaaaagctgataccttatgggatataaagaaacagatttccaggtggtaagtttgaaaatgaattcactgatgaaaatctgcttgtctggaaaattatacataatttacaaaagtagttgaagcgagtttgaaaatcttaccttctgtgaacaaattatgatcatttgagaagaagaagcatttctcttctggatgttaactctgttgcatttaactttggtgcatttagttttcagctcctgacatcgc

SEQ ID NO: 545526 - DNA, 562 bp, Homo sapiens
tatccgaaccacttcctttattgggctctgacacttcagaccactgtctgcctgccataatcaccataggaccaggtaccagacaactaggtacagcccctaaaccctagagcccattgaaattattctgactaaccaatccaaaacttgtttgccctgcctcatacgaagatccgaagaccttggtgctttccatgtaccacactctatcctccagtaacatggcatgcccattcctatttggatctgtgaacaacaaacttttctcaatagcagtcatctcctggtctgttagccttaacatatataataatatataaatagcaaatacaaataataaaacttattaaaacattcacataccatagtcatccttttaaaatgtgtacttcagtatttttaagcatatttacmgagtttgacaaccatcactactatctaactccagaagattttcatcaccccaaaaagaagtccaaggacaccagcaaaaatagcacagtaaggatccatgaaaattatttcctgatggaagggggccaaggtggccaactagaagcag

SEQ ID NO: 545527 - DNA, 662 bp, Homo sapiens
ccctgtacctgcagtttgttttttctattttgtcctcttctgcctcctttaatccaaaggtgatactggccatataatcaggaattagaggttgcctactagttagaatatcacgtcctaaatagtagaccataacactttacaatatcaccaagtatccttggggtcttgattttttttagattattttcatatatgtatgtgttcatgtatgcattgttgactttggccaagagtataggaagtaacgtacggaaatgagargggaacatatttgacatatgtagcatattcatgtaagtgaaaggcattaggatagaagttaggagacctttgactggtcactacagttttctgggtttcgtctttcagttgggaaaaacaatgatcaaaattatatgaaatggggtggtaggtgatctcttatattggcaagacatcttctccttcatctcactctggacatattcactgggttgaaacattaaaatgaaagaagtttccccactgggctctgctattcttctacctttgcaagtctcttgttatgaggtatcttttggggtgatgaaaatattctagacttagatagatgtgatggttgtgcaactctgcaaaaatactaaaaaccactgaattgtatgctttaaaaggatgaatat

SEQ ID NO: 545528 - DNA, 588 bp, Homo sapiens
tgtaattttaacaacttagtttatgctgaacatgaataataaactatcacctattaaacctagagagcaccagaagttactaatatgatttacaatgcactgcaaaaatgggattcattattatctcacactttaaaaatttgcagtagagtagtgtaaacaagtatttactttaattaaagaaataacaagggttttgtagggctgtattttatgtaraaaataagtatccaataaccagaaagttcatacttgttaaaaagaatgtcgtgcattaactgaatcttaccagaaaatctgctcatctgtttgaaagacaataaggtgtttctaaaagcttatctacacactgctgatggcccttttcagttcttgccagcaattcctgtctttaaagcaaggtcagtgggagggcctttactcaagggaaagagaatttgaagtatccatgttacttttcttttctttccttaaattgcctttgtagagcaagacatttattagtgggccttgacagatccttgagacttacaaaatcaccggtagaaggataataggctaactttagatcatgttcaaactcctcag

SEQ ID NO: 545529 - DNA, 588 bp, Homo sapiens
tgtaattttaacaacttagtttatgctgaacatgaataataaactatcacctattaaacctagagagcaccagaagttactaatatgatttacaatgcactgcaaaaatgggattcattattatctcacactttaaaaatttgcagtagagtagtgtaaacaagtatttactttaattaaagaaataacaagggttttgtagggctgtattttatgtaaaaaataagtatccaataaccagaaagttcatacttgttaaaaagaatgtcgtgcattaactgaatcttaccagaaaatctgctcatctgtttgaaagacaataaggtgtttctaaaagcttatctacacactgctgatggcccttttcagttcttgccagcaattcctgtctttaaagcaaggtcagtgggagggcctttactcaagggaaagagaatttgaagtatccatgttacttttcttttctttycttaaattgcctttgtagagcaagacatttattagtgggccttgacagatccttgagacttacaaaatcaccggtagaaggataataggctaactttagatcatgttcaaactcctcag

SEQ ID NO: 545530 - DNA, 408 bp, Homo sapiens
ttaacaaattctggatttgtagaacattaacgaggactttaaacgtctttctaaaattaacaatggataatttctagtccctccttttaaagtgcactttgaaatactgcattaaaaattgtctgtaagttgagaaatgactcaagactgttctaatcactcttgataaatctttggatttatttatactctttgaactcatggacatattctatttgactggtgaatcaaatgctcacaaagttgggttgttgraacagggctttcccaattgtattttgtgtgcctttcttcctttggctgctggccttttggccttttcactgctcattaacaccttcttggcagtgtggagagctgaaaaaggtgaaatacaaactggttaatactgctaccccagcataaaaa

SEQ ID NO: 545531 - DNA, 613 bp, Homo sapiens
ccaatttttccacaaatttgtaatccatagtaattctgaggcatagcttatgggaaattaggatgctaaagccatgtcagaaaactaagcaagtakaaatttacagtaaattattggagagactcacatcactacattagcacatggtttagctgtattttgacagtggaaaacctggcataagagtctctgggagcaccaggtaatatgcctgaggtccctttcctgcaggtgaattctctagtggcagctatcgcaatttatgccagaggcttatttttgtgcagacataatctctggtagaattttcgcagcctctgttgacagaactgacagtgtgtataggcccaggctactaggcaacaccagcatcagttagcagtcagcaaatatttattatgccttaaccatatgcctagaaccaagttagaagcaaggaggatatattagaacaggcataaacaatcccctcagactctttacagggctgacatacttaaagtaactaaaatagtgacaaggctatatttaatcaaatgccacattcgagggagggtgagtattttaggatgttagaaaaaggagagatcagttagagcactagattgggaga

SEQ ID NO: 545532 - DNA, 606 bp, Homo sapiens
agtggcactgtgcctctccctcctacatcaagtacacatgctttgtgagagctattctccaacttcagaggcttttttggattccctctgggttcctgaatatgttccagatagctataactgacagaagtctgaatgcctgataagcgtgatgtttctgtatttatttcctaatctcattataatcaatattcttatttaccaagcacaccaagtgtgcctttttttttttttaagagacagggtctccctatgttgccctggttggatttgaactcctggcctcaagcaatcctcctgcctcagcctctggagtagctgggactgcaggcgtgcccccacaattgaaacatagcttttaaaaataaaatgcaaaagctaaaatgtacaatcagagaaaatatctgatttttaccctgtggatcacacctttaaaatagactataagccatttaacagtttcaagttcgggttctcatacattcaaagagaaataaaacgaatgaatgatttggttttaccagctattgaggctcgtatgctctgattctgatagaggcctttccaacttctatcaaayaggagctatatagtcatgtatgcaaa

SEQ ID NO: 545533 - DNA, 633 bp, Homo sapiens
atacctgtcagataaattcctattcctggctgtgtaattcctgggtacragggtaaatctgatggatgtcattacgtacatggatcgtacctagtagcccacttttctagatgatctgttacgatcttctcttcattattccttctccctttgctgtgtccttctgtattgcaggggtcagagcctggaaacaatgttccttcaatcctttgccagcagggatcttctttagtttctgccaataagggccactggtgtaaaatttggaaaccagacaaagagaagctgacttttggcaatggcgtgagacatgggcatcaataaaggctgggtgagctctgccagtggctttcaggcgtgagtcatctgttcacacagttgagatctgcagtggctgtccctgcagtctccacttcctggattcctgaatgcttccgaagcttccctgaccttgactctctccccaacagcttcgtaagcctgtaatctcctgcattaatctcctctccattgaaggacctggagggtttccattttcccaggcaaaccctgtctgagacgtatccccactagcactgcataagagctcccagggccccacctcctcaccacacagtgcttgtcaacccttcg

SEQ ID NO: 545534 - DNA, 633 bp, Homo sapiens
atacctgtcagataaattcctattcctggctgtgtaattcctgggtacaagggtaaatctgatggatgtcattacgtacatggatcrtacctagtagcccacttttctagatgatctgttacgatcttctcttcattattccttctccctttgctgtgtccttctgtattgcaggggtcagagcctggaaacaatgttccttcaatcctttgccagcagggatcttctttagtttctgccaataagggccactggtgtaaaatttggaaaccagacaaagagaagctgacttttggcaatggcgtgagacatgggcatcaataaaggctgggtgagctctgccagtggctttcaggcgtgagtcatctgttcacacagttgagatctgcagtggctgtccctgcagtctccacttcctggattcctgaatgcttccgaagcttccctgaccttgactctctccccaacagcttcgtaagcctgtaatctcctgcattaatctcctctccattgaaggacctggagggtttccattttcccaggcaaaccctgtctgagacgtatccccactagcactgcataagagctcccagggccccacctcctcaccacacagtgcttgtcaacccttcg

SEQ ID NO: 545535 - DNA, 633 bp, Homo sapiens
atacctgtcagataaattcctattcctggctgtgtaattcctgggtacaagggtaaatctgatggatgtcattacgtacatggatcgtacctagtagcccacttttctagatgatctgttacgatcttctcttcattattccttctccctttgctgtgtccttctgtattgcaggggtcagagcctggaaacaatgttccttcaatcctttgccagcagggatcttstttagtttctgccaataagggccactggtgtaaaatttggaaaccagacaaagagaagctgacttttggcaatggcgtgagacatgggcatcaataaaggctgggtgagctctgccagtggctttcaggcgtgagtcatctgttcacacagttgagatctgcagtggctgtccctgcagtctccacttcctggattcctgaatgcttccgaagcttccctgaccttgactctctccccaacagcttcgtaagcctgtaatctcctgcattaatctcctctccattgaaggacctggagggtttccattttcccaggcaaaccctgtctgagacgtatccccactagcactgcataagagctcccagggccccacctcctcaccacacagtgcttgtcaacccttcg

SEQ ID NO: 545536 - DNA, 633 bp, Homo sapiens
atacctgtcagataaattcctattcctggctgtgtaattcctgggtacaagggtaaatctgatggatgtcattacgtacatggatcgtacctagtagcccacttttctagatgatctgttacgatcttctcttcattattccttctccctttgctgtgtccttctgtattgcaggggtcagagcctggaaacaatgttccttcaatcctttgccagcagggatcttctttagtttctgccaataagggccactggtgtaaaatttggaaaccagacaaagagaagctgacttttggcaatggcgtgagacatgggcatcaataaaggctgggtgagctctgccagtggctttcargcgtgagtcatctgttcacacagttgagatctgcagtggctgtccctgcagtctccacttcctggattcctgaatgcttccgaagcttccctgaccttgactctctccccaacagcttcgtaagcctgtaatctcctgcattaatctcctctccattgaaggacctggagggtttccattttcccaggcaaaccctgtctgagacgtatccccactagcactgcataagagctcccagggccccacctcctcaccacacagtgcttgtcaacccttcg

SEQ ID NO: 545537 - DNA, 490 bp, Homo sapiens
ctgggctcactgtagcaggggcaaaacctgggtagcttcagccacaggcagagaaaacaggagacgttgccggggctgggaccctccactagggctgtgtgacctctggtgagtgacttggcatctctgtgcctcagttaccttgtctgcatggtgggggactacagcgctgtcctcacaagctcttggaaacatcaagtgacgtatttcatgaggagcccttagaacaatgcctgcactcagtgagtgctggggtaaatgtcacccgctctgcagtcccctgggrccgccataacaaaatgtcacaaactgggtgcttgaaacatgagttgactctgtcattgctctggaggccggaaggccgcaatggaggtgtgtgcagggccttgcctcctccaaaggtcctgtcactcagggccttgggtagagggaggctggaggctgagcccctgtcctggaggtggggaagtctgtcatcccaggggacacc

SEQ ID NO: 545538 - DNA, 614 bp, Homo sapiens
tcatgttcctacttatctctccccgttttgttttagctacaaggaagccaagggtcaaatgaacagttggaatctaagaactgatggtgacctcattcccatccgatcctgtggatggkgttaggttgtgtgttacccactcatagcatcggggctcttgtatttcagctcccatcccaagtgcaggcataaagggatggctaactggtcactgctcggtgggcctgaaggctgcaagttcctgcctcatctcctgaagcccagagagctggtgaacgcctcgtcacttgtgcatttaaaacagaagctgtgatttcgttggcctgcttaaatctcctaggagttggggatgctatgaatccacctgcagcatcattttctgtggccaagttcaaagggtcctgagaggtgagatgtcaggaatacaatgaaaagactgaaagctgagcaggcagcagaacccagggtcaggtcccagcaggtgggggtcccagccaaagtttgggtacaagtcttccgctaggagggtgcccctgccccagccgctgcaggtgccagcctccaggcccccctaaaggaacctcacctgatcctcctggggcacctaggaggaa

SEQ ID NO: 545539 - DNA, 432 bp, Homo sapiens
gctcttaatcaaaaagtgccagacaacacaagtggctaccgtatgctgacatttaaaacacccgttcagcggccctcggcgttgcagagcagtttgtttaagttgaaaggatgtaattttatgctatttagcaaaaaaacacacactctgaatggcatcatgaactaaggattgggggttgtgatcttggggggggggtgtcaaaaaatggttgtgaggtcccccgtgaccacaggtgcatgtgtagaggtgtattctggaaacttctgcacggaagtggcagcctctgaggtcacgctagttctgccgtggagggtgtccgtgagaccagctaaaacggccacktctgcatctactcaactggaaaacataccatctggaagagatctggactccaggggcccaggagcccaccaggagcctcctgtgcaa

SEQ ID NO: 545540 - DNA, 541 bp, Homo sapiens
ggatcgctttgttcctctgacgttgtggtgggcacaatgcaaaattgtgagacgccaccaaccccacttcccacgttagcagggggatggggcaggggtggacggagtccaccgtcactttaagcctctgcctcgatgtgggctcgggagcacccactagatgctgggcagggggatacggcggcagggccttcattctggtcaggaaacagacctgctcatggtgaccagccaaggtgaggacggcaggggcacaggctgggggggccacctgccattgattcattcactaacgcagcacccaccccaggtacaggggacacagcactgagtcagaagcagccccgtctcccagggactgcctgttcagtgggcacagacccatcccccaccccatctgtgagaccacagagatgccacttcccagaggagatgacaatgagtaggaccctgaaagaaaagtccacgacatggcccgaggcccagtggggggaatgcggccctggggactcaraacagcctgacatggcacagcaagtct

SEQ ID NO: 545541 - DNA, 297 bp, Homo sapiens
gggtgactctgttctcccccaggtgtcccaagtccttccaatggccaaacggggcacattcttacaacataggtccaggtgcacacacaagcgctattgcaagcagttttcatgctttgactggcgtcctgtatgctcacatctcattggccaaagcaagcctggtggccaaggccagggtcacagagggagggccctgcaaagggggtggatatggggagggtgaagaattgggcataaagcagccaagctgcccgagggctctggggtgcracaggactctgcagtctcaggcag

SEQ ID NO: 545542 - DNA, 647 bp, Homo sapiens
catttgaaaatcaatataaatcatatttccagaatacaggagatatgcatattgttttaaaaatggatataagtgtttgacaaaattttaaaaccatctgtgatttttaaaaaatcaaagcaaactaagaagggactttctatctactaattaatgtacttaatggtcaaattattgaaacattctccttacaaaatcagaaacaagacaagggtgcccagtctcacctcttccattccacattgtattggagatcctgactattgcaatatggcaagaaaactaataggcataaagattcgaaagagggaagtaaaactgacgctacttgcagacgacataattgtttagatggaaagtattacagggtttacaaaacaactactagaactaataagaggatgtggcaaggtttcaggatataaggtgtatcagtcagggttcactcaggaaacagaaaacacaataatttgaaaagggaaagtttagtgtaaacaaatcagtagctataacagggccataaatattagggtagaaactgatctctgaagagtacctttgggctacatgagagcatcctggggaggaacaatttsgaaggggaagcccatccccaaagctgagattcagacctctttggagaagga

SEQ ID NO: 545543 - DNA, 463 bp, Homo sapiens
tctgtctgaagttagcatgcagctccgtgaccgtacatgtggtttccctctgagcctcagcttcctcgtctgtaaaatgaaccttgtaattcctgccccccgctactgtgcarccgccgtgacgacagggggagaaggaaggggaagcacagtcaaccgtgagactcagtggtgatcagagtggggtgatggccaccgccctgcagtggacactgctacctcacatccctgagagaaggggaagcacagtcagccgtgagactcagtggcgatcagcgtggggtgatggccaccgccctgcagtggacactgccacctcacatccctgagcttccactgcccatcaccttgacacctgtaggtacatacatgtcacgcgttttagagcattgcagatgtgaggagcctgctaggaagcatgtccgtgccgcaacctcacccttactgtgagaaaccccagggc

SEQ ID NO: 545544 - DNA, 567 bp, Homo sapiens
ataatgatatataactcatatgatatctatcatttgctacatacagagtatgtacacacgtatgtatttataacatacatatccatttagtcctcaagaaaactctatcaggcaaatgccattattatcgccaattactataatgcccaggggaggaaactgaggcacagaagggtcattattatttttgccaagaccctcatacttatgacttggaagggctgggatttgaaaccatacaacctggacctccagtacttgggcctcaccactatgctagactttgggacttctagcagatagaagaagtccatccaaaccttcagtttacargatcacccacatggcccagagaggattagcaaatgccctcaggtcacacagcagatttgggtgcttctcctaccagcccacattgcctcctaaggtatgtttaacatctttaatgtctatgggggaagggccctaaacgtttctgaagaaacccactcctccctgcaagcagcgctgtgtgctccacccccagccagcaccaaagcatatgtgaatacctgcagggactgatgc

SEQ ID NO: 545545 - DNA, 567 bp, Homo sapiens
ataatgatatataactcatatgatatctatcatttgctacatacagagtatgtacacacgtatgtatttataacatacatatccatttagtcctcaagaaaactctatcaggcaaatgccattattatcgccaattactataatgcccaggggaggaaactgaggcacagaagggtcattattatttttgccaagaccctcatacttatgacttggaagggctgggatttgaaaccatacaacctggacctccagtacttgggcctcaccactatgctagactttgggacttctagcagatagaagaagtccatccaaaccttcagtttacaggrtcacccacatggcccagagaggattagcaaatgccctcaggtcacacagcagatttgggtgcttctcctaccagcccacattgcctcctaaggtatgtttaacatctttaatgtctatgggggaagggccctaaacgtttctgaagaaacccactcctccctgcaagcagcgctgtgtgctccacccccagccagcaccaaagcatatgtgaatacctgcagggactgatgc

SEQ ID NO: 545546 - DNA, 628 bp, Homo sapiens
gtgctggggcaaccctaaagcctgggatcctgtaaacagtcctgcggcagccctrttctcccctctgtggagtggctgtgatcaccaaatctgccaccagggggcaacccagagcactcatggcccagcctgggcagaggccccggccagtggagctctcagatctgcagctctaaatcctagaatcccatgtggtctgctgtatggaggggacacttggctctggacatgcaacagggcaggtgaccagctcaccttgggatcatctccaggctcagtcaggcaaccaagaattcaggcagcagtcaaggcctaggaggcagcccgggtagtcacagccatacgaccatggccaacaaggtggagacgctgaaggaggaggaggaggagctgaagaggaaagtggagcaatgcagggtgagggccatgggggtcccctggatatgtaggggtggcaggggtgggtcctggcccatctcacaggcaaggaagctgaagttcagagaggtgacatgacttgcctaaggccacgtggctaggagccagcagagctccgccattccctcgtagcctcttctgtctgtaccccatgcataacttgggaaggcagagacttggtctgttccct

SEQ ID NO: 545547 - DNA, 628 bp, Homo sapiens
gtgctggggcaaccctaaagcctgggatcctgtaaacagtcctgcggcagccctgttctcccctctgtggagtggctgtgatcaccaaatctgccaccagggggcaacccagagcactcatggcccagcctgggcagaggccccggccagtggagctctcagatctgcagctctaaatcctagaatcccatgtggtctgctgtatggaggggacacttggctctggacatgcaacagggcaggtgaccagctcacsttgggatcatctccaggctcagtcaggcaaccaagaattcaggcagcagtcaaggcctaggaggcagcccgggtagtcacagccatacgaccatggccaacaaggtggagacgctgaaggaggaggaggaggagctgaagaggaaagtggagcaatgcagggtgagggccatgggggtcccctggatatgtaggggtggcaggggtgggtcctggcccatctcacaggcaaggaagctgaagttcagagaggtgacatgacttgcctaaggccacgtggctaggagccagcagagctccgccattccctcgtagcctcttctgtctgtaccccatgcataacttgggaaggcagagacttggtctgttccct

SEQ ID NO: 545548 - DNA, 628 bp, Homo sapiens
gtgctggggcaaccctaaagcctgggatcctgtaaacagtcctgcggcagccctgttctcccctctgtggagtggctgtgatcaccaaatctgccaccagggggcaacccagagcactcatggcccagcctgggcagaggccccggccagtggagctctcagatctgcagctctaaatcctagaatcccatgtggtctgctgtatggaggggacacttggctctggacatgcaacagggcaggtgaccagctcaccttgggatcatctccaggctcagtcaggcaaccaagaattcaggcagcagtcaaggcctaggaggcagcccgggyagtcacagccatacgaccatggccaacaaggtggagacgctgaaggaggaggaggaggagctgaagaggaaagtggagcaatgcagggtgagggccatgggggtcccctggatatgtaggggtggcaggggtgggtcctggcccatctcacaggcaaggaagctgaagttcagagaggtgacatgacttgcctaaggccacgtggctaggagccagcagagctccgccattccctcgtagcctcttctgtctgtaccccatgcataacttgggaaggcagagacttggtctgttccct

SEQ ID NO: 545549 - DNA, 615 bp, Homo sapiens
ctgtgtaatcgtgttcagttacataacctccaagcatctctgcctgggtgagaaatggcagtgctcagcatgcccggtgacggtgatcagggtgagtgcctggcacatagtaggtgttcagatgatgtaagttgtagccagagtcccccatgttacagagaacttaatgaaacagctttgtgtgtgttcttctttggtttccaaattactctggagatggaagttattgtcccatttctcaagtaaagagactgaggcagccggatgcagtggcaacagcctgtagtcccagctactcgagaggctgaggcgggaggattgcttgagcctaggaggtcaaggctgtakcgtgctatcattgcatctgtgaaaagccactgtacttcagcatgggcaacatagtgagaccttatctctaaaagaagaggaaagaaactgagactaagagaagggaagtgagctgcccaagaacagatatagtgagcccctccacctcctgtgtccccacacacctgcctccatcctgcctctgggaattggtgtttcagccctcacaagtagggacagtcctcgcaggcttcccctccaaccctccaaccgcaccccaatgatggg

SEQ ID NO: 545550 - DNA, 615 bp, Homo sapiens
ctgtgtaatcgtgttcagttacataacctccaagcatctctgcctgggtgagaaatggcagtgctcagcatgcccggtgacggtgatcagggtgagtgcctggcacatagtaggtgttcagatgatgtaagttgtagccagagtcccccatgttacagagaacttaatgaaacagctttgtgtgtgttcttctttggtttccaaattactctggagatggaagttattgtcccatttctcaagtaaagagactgaggcagccggatgcagtggcaacagcctgtagtcccagctactcgagaggctgaggcgggaggattgcttgagcctaggaggtcaaggctgtagcktgctatcattgcatctgtgaaaagccactgtacttcagcatgggcaacatagtgagaccttatctctaaaagaagaggaaagaaactgagactaagagaagggaagtgagctgcccaagaacagatatagtgagcccctccacctcctgtgtccccacacacctgcctccatcctgcctctgggaattggtgtttcagccctcacaagtagggacagtcctcgcaggcttcccctccaaccctccaaccgcaccccaatgatggg

SEQ ID NO: 545551 - DNA, 412 bp, Homo sapiens
atgccactgtaccccactataatcctgtgtccacttctcttcactcaatatcatcctgtacccccaggatttaatatcaatgactgtccgggtcagtggccagcagagagggagtgacagagatctgtccacacccccagtctactcactgggctattaacctgtccacacacactgaccactgccagtcagcctctgctgccacctgcttttgtctgactcaaaccctccaccgtggaggggcctccttttgctccygcctcccctgcagggccaaattcgcaagatgacagcagtgaagagtgccctggaccggatgtcggtgttacagaggccaataatttttttatttttcgtagagacggggtttcatggtgcaggctgggccttttatttatttattttaaatgca

SEQ ID NO: 545552 - DNA, 564 bp, Homo sapiens
ccaccctgtggtgccgaccagrctgctgccttggccctgggctctgggctccagggtccccagggatcccaggcccaggctcttgcccctcccggctctcaggtgagctgctgggatcgggttcctgcggtttcatgtctttcattgttcttggctggggcccggcttatgaaactgtaatgaggggcccctgctcccgaagccggcccctctaaggtttccactgcctcggcggctgctgccaccacagcccggagtcggggcctgggagggcagcagtgtgggggcctgagccggagccccccggggacgagggtgctgacagtcgacagccaccaccaccaccagagcccgcagcccaggtaatccgagaggaggcggggcgcagggtgccatggccgctgtctcccaccaccaggggagggaactgccgctctccagaggtggggaggaattggggggggccctggaggtgagcagccgttcccccctggtgagcccagcaccagaccagccttcacaggtgtggccttgccaaaggtggagggagagaggagtgggcag

SEQ ID NO: 545553 - DNA, 564 bp, Homo sapiens
ccaccctgtggtgccgaccaggctgctgccttggccctgggctctgggctccagggtccccagggatcccaggcccaggctcttgcccctcccggctctcaggtgagctgctgggatcgggttcctgcggtttcatgtctttcattgttcttggctggggcccggcttatgaaactgtaatgaggggcccctgctcccgaagccggcccctctaaggtttccactgcctcggcggctgctgccaccacagcccggagtcggggcctgggagggcagcagtgtgggggcmtgagccggagccccccggggacgagggtgctgacagtcgacagccaccaccaccaccagagcccgcagcccaggtaatccgagaggaggcggggcgcagggtgccatggccgctgtctcccaccaccaggggagggaactgccgctctccagaggtggggaggaattggggggggccctggaggtgagcagccgttcccccctggtgagcccagcaccagaccagccttcacaggtgtggccttgccaaaggtggagggagagaggagtgggcag

SEQ ID NO: 545554 - DNA, 560 bp, Homo sapiens
tagagcagctacccaagttttcttggaccccccgactcccccaagtaatggatggatccctgtctaatccattgctcctactcggcaagtgtagaaagtaaggcttgtagagaggaagggacttgttcaaggccacacaggcctagagggcttgaccagctaagcgtgaggtttatggtacaaaaagcagtgcacattctgggccacacccatccacatcctgcagcacccctggmcctcatggggcacttcagtgctaatgttcctttgcctggaaagctgtcacttctctccctgggctctcaccagccctcatgccctaccgccagcggtagacacagatggggcaacccccaaaatgcacacacagaggccagggaggggttgtctgcagtttccgtccctgcaacagtaccgactgggcacctaccatgtgctaggctgagccagatgccgaggagacagcagcaggagacagtgaggagacgggcaaaatacacaagaaatttaatcaatgagtcaattacctagtatgctggaaagagaaatgtgctatggaa

SEQ ID NO: 545555 - DNA, 326 bp, Homo sapiens
gtggggattttacttcctgcgtctaggcatagaattaacctacgggcttttttgaaacaagtcccacttcctccactctgttttcctctgarttttatttccccatttgtagaaaggagataatacccaggccaggcgcggtggctcatgcctgtaatcccagcactttgggaggccgaggcgggtggatcacgtgaggtcaggagtttgagaccagcctggccaacatggtaaaatcccgtctctactaataatacaaaaattagctgggcatggtagtgcatgcctgtaatcccagctactctggaggctgaggcaggagaatc

SEQ ID NO: 545556 - DNA, 390 bp, Homo sapiens
tcccccagggtccagacctgcttagggacacaatccttctcagaatggcagaaaagcaagctctgggggccttcaagaaagcctctagggccacagaactgggcatgacatcaggacccaagactgccccatccccagtgtgctgctgcaccctactttattaaagaggcagacaggagtggaaggagaaatccaacgttcctggagcccctgccaccaaacccaaggcagccagtcatcctattttacagaagagtcaagttggaaatcttaagagtcagattagaactgagcagctctcgcacccctaaactgtgccatgattagctgaggtagtgcactacraaaccctggccaaaggatccctgagctgcaggcggaagccccggg

SEQ ID NO: 545557 - DNA, 511 bp, Homo sapiens
ccccgggactgccgacctcagccttggggatccgtcttgaccacccccggattcggaggcgcccgggccggaccacctgtgctggtctccacctcctcggcaaccccgggtcaccggagatgctgcagctcgagggtcccgcctgcaccatccatggctctcgagatccttcagagcgcggacccggccgagaccccgcggagccgctgcgcgtggctggtgcccgcggtcgccccgcagtcccgtatgcggcgaaaccgccggggctgcttacctggcccgcaccctcacgctcccgtccgggctgcgcagccgcttctctcacacattttgcgataacatcgatggcgaaagaaaatgttgtaaatcctcctgcggccacgtggctgtccccccacccccttctccctttctctggccctcaggacaaaaaggccccgcggccggccgctggccacggggctctgggcgggcgargctggctgcagcggggcgtggtctggggaggggc

SEQ ID NO: 545558 - DNA, 628 bp, Homo sapiens
acagtacaggccacagaggctttgcgactttatccctgggcaaaaagaggagatgatgaaggattctgagcacaggacacaagccagtatgtatttagacgcgatcctgccctgtggctgagcctcttctgagaagtgcaggccctgtgtcasgtcaccctgaacctcagtcatcagggttttggatgtgagtttccatatccctcttcctaggccaagctctcaaaggcaaggctgacctctggtcttcagcttcatcctcatcagccaggccagtgcccagcacaaggagctgctccaaaaacatacgtgggttgaaccagtgaccaggacaagacgcttatcagcatttccctgcgaaggagcagggctgcctgtaaagccttccacattctctagaaattacaaagttcaagggttttagtgaggccacgactcagggagcccttgagagccaagctggcatcccactgctgtgcacacccagcctgggcacacagtatgaccctgcccaggcatctgcctgcggccgtctggtgaatgaccagaaacagaaccgaaagctctgtaaagtgctctcaaggttacaaagcatgtttcacaggagcagtttcatctcacacgggca

SEQ ID NO: 545559 - DNA, 508 bp, Homo sapiens
gagcaggacagtacaggccacagaggctttgcgactttatccctgggcaaaaagaggagatgatgaaggattctgagcacaggacacaagccagtatgtatttagacgcgatcctgccctgtggctgagcctcttctgagaagtgcaggccctgtgtcacgtcaccctgaacctcagtcatcagggttttggatgtgagtttccrtatccctcttcctaggccaagctctcaaaggcaaggctgacctctggtcttcagcttcatcctcatcagccaggccagtgcccagcacaaggagctgctccaaaaacatacgtgggttgaaccagtgaccaggacaagacgcttatcagcatttccctgcgaaggagcagggctgcctgtaaagccttccacattctctagaaattacaaagttcaagggttttagtgaggccacgactcagggagcccttgagagccaagctggcatcccactgctgtgcacacccagcctgggcacacagt

SEQ ID NO: 545560 - DNA, 590 bp, Homo sapiens
tacgtttgataaatgttaattttccatattggactctcccacagaccctgaactctaaggaaaagtgaagtgttttatttgatttttgtgtgtgtgygcctagcatggcaactacttagcaaacttggctgaacagaaattttcttttttcttttattttctctgatgtgtttcattcccataggcttcatttggcctgtgtcccttatctttaggggaagccaactttcagcacatgcgctagccaatgtagcaaagttttttttttttttttaaagagacatttaacaaattatgcaggctgtgatgtccttcattccagctcaaatttctcctactgaatatgctagaacttaaatccacttccacgaagactttcaacaagagaagatgaaaatcctattcctgctatatttaaactcacatctactagaaaaacaaaaaacaaaaaacaaaaaagtagcattaagttcaatgcatagtgtatcttttcatttacatctgtttagtaatgtacaggtactggtaaatctgtttaggttcatttacactgactgtatgttgtgtttataggagtcatctggctggaa

SEQ ID NO: 545561 - DNA, 626 bp, Homo sapiens
aaacaaaaaacaaaaaacaaaaaagtagcattaagttcaatgcatagtgtatcttttcatytacatctgtttagtaatgtacaggtactggtaaatctgtttaggttcatttacactgactgtatgttgtgtttataggagtcatctggctggaatctggcaggcatgttctctacacttctgccatggagtaacaattctattttattgttctaaaactctccaggagccaggcacagtggctgatgcctgtaatcccagcactttggaaggcctaggcaagaagattgcttgaggccaggagttcaaaatcagcctggtcaacatagagagaccccaatctctacaaaagaaaataaaattagcagggtgtggtggcatgtgcctgtagtcgcagatactcaggaggccgaggaaggaagatcatttgagtccaggaactcaaggctgcagtgcgccatgactgtatcaccacactccagcctgggtgacagtgcaacatcctgtctcaaaaattaaaataaaaccctccaggagaaatacccagcattccttacagggcaggcggttctctgggttcttcacctaaaccgctaatattccatctgaccctgtctgctatggtt

SEQ ID NO: 545562 - DNA, 626 bp, Homo sapiens
aaacaaaaaacaaaaaacaaaaaagtagcattaagttcaatgcatagtgtatcttttcatttacatctgtttagtaatgtacaggtactggtaaatctgtttaggttcatttacactgactgtatgttgtgtttataggagtcatctggctggaatctggcaggcatgttctctacacttctgccatggagtaacaattctattttattgttctaaaactctccaggagccaggcacagtggctgatgcctgtaatcccagcactttggaaggcctaggcaagaagattgcttgaggccaggagttcaaaatcagcctggtcaacatagagagaccccaatctctacaaaagaaaataaaattagcagggtgtggtggcatgygcctgtagtcgcagatactcaggaggccgaggaaggaagatcatttgagtccaggaactcaaggctgcagtgcgccatgactgtatcaccacactccagcctgggtgacagtgcaacatcctgtctcaaaaattaaaataaaaccctccaggagaaatacccagcattccttacagggcaggcggttctctgggttcttcacctaaaccgctaatattccatctgaccctgtctgctatggtt

SEQ ID NO: 545563 - DNA, 541 bp, Homo sapiens
gcaggcctggaggggcagctgtgaacactcagaagatgtataagaggaccctggggagtgagcccagcatgcaccataagggcctttcagaggctggctgccaatctggctcaggcttcccggcagccrtcagagagaggagaagggggtctgctggaagttgtcagagccacagacagggcccttcctcgagatcacacgtcagcagtgaagatccatggtctccctggggaggagctcccgtggaggaggcagggcctgaactgggctgagaaaggttgggcagaggagaggaaggacgttcgttcattcactggctcagcatttgttaggcatggagtgtgtggccagcaggaaggttcctaacacatcagtgctgagtgaccaaatgagtgagtgagtgagcaagcgcctgagtgagtgagcacctgagggaatgaatgagtgtctgagggaatgaataagtgtctgagtgaatgaatgagtgcccgagggaatgaatgagtgtctgagtgaatgaatgagtgcctgagtaaatgaa

SEQ ID NO: 545564 - DNA, 666 bp, Homo sapiens
atatatgggtgtgcttatatgttttaaaattgccaaactgtattcaaaagtggttgtaatatatctgatcagtgttcattaattttagccatcttaatagatgtaaggtgttaactctacacaaaatctttccaagacatactgaagatgaatcaaaatagaccaaatattagacaatcaagcaaatctttaaaaaaatccagactgaaaatcaaacagtatatgttctctgatcacgatagaattaaattggcaatcaataagaatatctgaaaaattctgaaatttggaaataccagacttggttagaataaccaaaccacaggttaagaaaaaaagggaaatttaaattgtatatatttaattgaaaacatttaaatatttttatttgaatgataacaaaaggacaatttatgaaaawctctgcaatgttgctaatgaaatgcttaaagaaaatgtatagctttagaagcttctattagaaaggaggaaaaagtctagaatgtaagcttccaccttaaggagctagaaaatgaagagcagaatgaatccaaataacaaagagcagacaccaataagagagaaaataaataagtaataaagaaaatcaatgaaaccaaaagctcactaaaaaaatcaaaaggtggctttttaggggtatggtta

SEQ ID NO: 545565 - DNA, 679 bp, Homo sapiens
cttttctcacacatgttcacacacattttctcatcattcatcagagcattctatctcaggatgctgaggaaacaaaaatatgttacagcagtctgaactaagtgaggtatatagtcccagagggacatgagtatgggactttaatcatatcctctgtgtccgtatctgtgggcaattatttaaagtcattttgtttttgacaagttgtcttacccaatatctttatgtttttaaaatttgtaatacaaataataatgtatagccaattaatagtttatgctattttaatgtaaatttttaataaataactaaggaacgctctcttaaaaaaatacttgtaactgtcaattggggtatatatttaggacaacttaaatttatactctgacattacaatcctcaaacttggcccaaataaactcactacttatattaactttgcttcagtttcttccttttaggttgaccaggctaagttctgaaatgtcttctcctgttcaccgaattaggtcatgcatcctagtagcggcctcctgtttttgatagctccctgtctttccagaacatcttggtctgrcttcccttcctgccttatctactcagccatggtagtggtgctttttctagtgtccctggttagccttcacctgtggtttgaatcttgtaatccctctaacag

SEQ ID NO: 545566 - DNA, 546 bp, Homo sapiens
gtatataaatgtgtgttaaaggcacatggtagatgcagctagcattctaatcagtcatttatatggggagcaggagagagtcagctagctttatatcaaaaagactgtgttccagagggactacaaccacccctttagctatttatacctccatcaacactactttgctcattaatgtcataaatgacttttcaaaactaatggcttgtaaatatcatgaaggacataagaaatggattctcactggtgaaattaaargtattcaagttaaaatattttggagacactccctccctttactgaacaaatgataagaacagaatgaagactgtagcccacacctgttgagatgacattcaactataagtcagtaggaattctggttgtctgatgtcaaccatgaaaactataacatctgcctaaaaagaacctttcatgcaacatagtagtcagagtactaaaaggacaaagaacggtcatcaggcttactactaagtaggctctataagctattccatgcctgcttgctaaacaaaaatgtttgat

SEQ ID NO: 545567 - DNA, 617 bp, Homo sapiens
tgccaggcccgcttctggaaagcccagcaccgaggcagcttgtgctgctgccgtgagtcttagcacattctagggcggagaagtccggaagggaggagcagggtggctggagctgctgttcctgggctccaggcctatccagggcctccacagaaaccatccacactgggggcagatcagggggcccttgtcagtggagaagccccaggaccatgtgcaaggcagcatttaagaagagacacaccagacgctatgggccccctgcayctgcaccaacacaggcccctgacacagcctcaaggacagttctcctaacaaacagtcatcaatctacagggctttccacaccccagtgctcactccggccacctgatcagattctggtcctccttgtccatctccaccctgaatgctggggctggaccatcgctgacagtgctccgggtgacaggtggcaatctgtagaggtcattaactccagagcgccacattttaatgcaaaaaggagcccttctaaatcggcgcagatgcgagcctatataaagaaatggggattttaatgttttgcttttcttcccttttctagtgccacattatcataacattttcccataatt

SEQ ID NO: 545568 - DNA, 617 bp, Homo sapiens
tgccaggcccgcttctggaaagcccagcaccgaggcagcttgtgctgctgccgtgagtcttagcacattctagggcggagaagtccggaagggaggagcagggtggctggagctgctgttcctgggctccaggcctatccagggcctccacagaaaccatccacactgggggcagatcagggggcccttgtcagtggagaagccccaggaccatgtgcaaggcagcatttaagaagagacacaccagacgctatgggccccctgcatctgcaccaacacaggcccctgasacagcctcaaggacagttctcctaacaaacagtcatcaatctacagggctttccacaccccagtgctcactccggccacctgatcagattctggtcctccttgtccatctccaccctgaatgctggggctggaccatcgctgacagtgctccgggtgacaggtggcaatctgtagaggtcattaactccagagcgccacattttaatgcaaaaaggagcccttctaaatcggcgcagatgcgagcctatataaagaaatggggattttaatgttttgcttttcttcccttttctagtgccacattatcataacattttcccataatt

SEQ ID NO: 545569 - DNA, 617 bp, Homo sapiens
tgccaggcccgcttctggaaagcccagcaccgaggcagcttgtgctgctgccgtgagtcttagcacattctagggcggagaagtccggaagggaggagcagggtggctggagctgctgttcctgggctccaggcctatccagggcctccacagaaaccatccacactgggggcagatcagggggcccttgtcagtggagaagccccaggaccatgtgcaaggcagcatttaagaagagacacaccagacgctatgggccccctgcatctgcaccaacacaggcccctgacacagcctcaaggacagttctcctaacaaacagtcatcaatctacagggctttccacaccccagtgctcactccggccacctgatcagattctggtcctccttgtccatctccaccctgaatgctggggctggaccatcgctgacagtgctcygggtgacaggtggcaatctgtagaggtcattaactccagagcgccacattttaatgcaaaaaggagcccttctaaatcggcgcagatgcgagcctatataaagaaatggggattttaatgttttgcttttcttcccttttctagtgccacattatcataacattttcccataatt

SEQ ID NO: 545570 - DNA, 580 bp, Homo sapiens
aggttcgtgcacacgactaatagaacccctcctctggaactcacaagatattctccatcctgcatagggctgggggcttgagcaccccaggagattcttttggcgctggagacccttttctgaggagccagtagagggcctgcaagtcagattgagcaaccagggagaagaagcatcatcccttcatcttgaggcctggtccagggaggtgaagggatgtggactgtccccagccgtacactcacccacaactcatgcatgcaagcattcatgccccaatgcacacacagcaccacacacacacatattttccttgaatctctctctctctctctcwcacacacacacacacacacacacacacacactctcccatccacacacacacaacactttaggagaaactgagcaaagaaaggcagcctctcactgcgagtcctctaacccccgtcccagtggttgttgtgcactgaagcttccttgccaggggctctgacgggattcttgtgttaatatgattgtgtccatgcttgttttctcccatcaattttgaatcctgtttaattaaaacgctgacttt

SEQ ID NO: 545571 - DNA, 509 bp, Homo sapiens
gaagcttccttgccaggggctctgacgggattcttgtgttaatatgattgtgtccatgcttgttttctcccatcaattttgaatcctgtttaattaaaacgctgactttcctgtttagtatcttctcaactgcagcttctccccgctctctttcctggcagggaggtgattctgcagaagttggggctcctgacaactttggggtggccatgagggacgtacctcttgcctctggatgtgcagggtgggcmtgggaccctggcagggaggggctccctcaatgggattctgtggagtcagccattgatgcccaggtctccacccttacaatttcattcctttcattgaagccttttttcctgctaaaaaggatgtggcttttaaaatgttacagattccaattcatcctgtccatcccgaactcctgtgccagacattccttcattcaacctctgtttattgagcaactacttgggccaggcactgggactggggaagccaacaagaca

SEQ ID NO: 545572 - DNA, 407 bp, Homo sapiens
gtgagcccactgctcgctgtgttctgctgtggtcggcgggggtgggttgttctctctccactcctccctgcggtgagggtgttttctatttgccattaggttgsgggtgcccaactgaccaagggcttgctgagatactgaatttggagctgaatgttttcacggggtgagatgtcaggatgtccctgctgatacagtgggagaaaaaatgtattttatgcaaggccagcgctatctcctaaaggaagcacacaggtctctgaacagcaggtcgcgaaaggtgggggctgtagcgggctattgtgcctgctctcccagggatctgtgcctccctctgaaaacaattgcaggctttcaccttccacacacatatcccatgtgcattttaccaagaggttactctgaca

SEQ ID NO: 545573 - DNA, 570 bp, Homo sapiens
ttagcacgcgtgcatatgtgtgtaagctgcagctcctaaataatgtaattccgggagcctctgcatctattacatttaattgcttctccctgtggtgcgcaggatggagatgcagccacaacctcactaggtccccggagcttggcaaaccccagaggggctgctctgcaggaggggctgaccacagggggctctggggatgcagggccagtgagcacttgctgtgagggacccgcctcttctcacagtcccctgggagcctccccaggacaaattcttctcctctgcctgtgatgccctctgtgccattggtctcgggtgacatcacctcccatcagtggcccaggagtttgrtgagaccaccaatccctactatccccctcccggagtggggttcagcgtttagggtcttagcctggtccatgaatcccaaagtcatcagaagactctgcccacaggacaggacacctccagggagggagctagaacaagaagagggccctggctggggcaggggagcaggtggcagggcctccacccctcacaagcaccacccaaggccaggcccag

SEQ ID NO: 545574 - DNA, 569 bp, Homo sapiens
tcttctatgtcttgataatggttggggttacataggtgtaagcatttgtcgaaactcatgaattatgatttatgcattttactgtatatacatttaaactaaaaaacataaatactgagttctagtcaatgatatgtatttatggatgatgtatactgatgttggcaacttcctttaaactttgaaatgcaccagaaaaataaaatggattaataaagggataaataggtatgtgatagagcagatagagcaaaagttaactgtataatttaggtgttaggtatatgggtgttcatgctacaattttttccaatattctgtatatctgaagtttttcttaataagatgttggggaaaasgttttaattaggtaaggaaagtatacaacacgtgcaatctgcccacagaatgaacattaaaatccaaaatactttgttaattacatctgtgtagtgcaggaaaacaaacaaacaaaaaaaaaaaggtggggggggagaagaaaaaatggtttgttaaaccccttaatctgaaataaataaatcccagaatagtatgcccctgtctgaaga

SEQ ID NO: 545575 - DNA, 637 bp, Homo sapiens
gaatgaaggggttgagtaaagaaaaattaacttccaaaaatgtaatatttggccaggcatggtgggtaatcctagcactttgggaggctgaggcaggaggattgcttgaggccaggagtttgagatcagcctgggcaacctagcaagaccctgtctctaaaacaaacaaacaaaacaaaaccttaaaaattatctgggtgtgggtggcacatgccagtagtcctagctactggggaggctgaggtggaaggtttgagcccaggagttcaaggttatagtgagccatgttcacaccactgcactccaacctgggcaacagagcaagaccctgtgtttaaaaataaaaaacacacacacagaaatgtatttttatttaagctgtgggtgtttatacatgcaaaatactggagtttacattttacattaacgacataagtgaaaaactagaaaatttatcattacactttttttttgtttgtttattctcctttgacttggaactggtggcctgacacatttatgtgccaagaggtcaatgttagktcttatatttttgttacaacatgcagtacagaattgagccttgaatgctttcacttcaagtgactaatttgatcctatttcataatggaaaaca

SEQ ID NO: 545576 - DNA, 499 bp, Homo sapiens
tatttcctactttttaaataacaatactccaaaggttaatgagctcgtcaatttggcgacgccattgaagttttggaatccggagccgtctttgtcttccagctccatcttttccaccttttgcttaggcagtcccccgagtcgtgtcaaggctgaggagtagaaatggaacagcactaatattaatggcaaaaccgttgtgaaatagggttactttctgtttaagcaaggaaaataaagtaaagcaatgggaaaaaaattaaaagcaaaagraatggaggtgccggggattgaacccggggcctcgtgcatgctaagcacgcgctctaccactgagctacacccccgtactgaaacggttctctcgagagtatattcaagatcagaatctgacccttttgctaggtttcagaaccattagttgtaatcagccaaggtctattttatttagttatttctgatatctcaaatttaggttttgcgtccctctttgctgaca

SEQ ID NO: 545577 - DNA, 499 bp, Homo sapiens
tatttcctactttttaaataacaatactccaaaggttaatgagctcgtcaatttggcgacgccattgaagttttggaatccggagccgtctttgtcttccagctccatcttttccaccttttgcttaggcagtcccccgagtcgtgtcaaggctgaggagtagaaatggaacagcactaatattaatggcaaaaccgttgtgaaatagggttactttctgtttaagcaaggaaaataaagtaaagcaatgggaaaaaaattaaaagcaaaaggaatggaggtgccggggattgaacccggggcctcgtgcatgctaagcacgcgctctaccactgagctacacccccgtactgaaacggttctctcgagagtatattcaagatcagaayctgacccttttgctaggtttcagaaccattagttgtaatcagccaaggtctattttatttagttatttctgatatctcaaatttaggttttgcgtccctctttgctgaca

SEQ ID NO: 545578 - DNA, 614 bp, Homo sapiens
gcagaagaggcaactacaaaattttggaaactgaaaaaaggataagtaataatgacattgaatttgagaaagctaaattttagcctgaagggggcaagtaaaggacaaatctgaccgggcaccgtggttgacacgtgtaatcccagcactttgggtggcygagatgggcagatcacttgggatcagcaatttgagaccagcctggccaacatggtgaaaccctgtctctttattaaaaatagaaaaattggctgggcttggtggtgcgtgcctgtagtcccagctactggggagtgggaggcggaagtggcagttagccgagattgcaccactgcactccagtctgggcaacagagtgagactccttctaaaaaagaaaagaaaaaaaaaaagacatttattttacatcatagaatctttaagcgactcaagaattggtggcaccatgtacccctggaaatgagaatgaatagactaaaacgaggagagtctgtcagaggctatttaggaagcaagcagagtcctaggtcctcaagcccaaagaagactggaggtttattttctgaagaaggttaaacaaaggatatgtgggctagacacatggaggacaggaa

SEQ ID NO: 545579 - DNA, 614 bp, Homo sapiens
gcagaagaggcaactacaaaattttggaaactgaaaaaaggataagtaataatgacattgaatttgagaaagctaaattttagcctgaagggggcaagtaaaggacaaatctgaccgggcaccgtggttgacacgtgtaatcccagcactttgggtggctgagatgggcagatcacttgggatcagcaatttgagaccagcctggccaacatggtgaaaccctgtctctttattaaaaatagaaaaattggctgggcttggtggtgcgtgcctgtagtcccagctactggggagtgggaggcggaagtggcagttagccgagattgcaccactgcactccagtctgggcaacagagtgagactccttctaaaaaagaaaaraaaaaaaaaaagacatttattttacatcatagaatctttaagcgactcaagaattggtggcaccatgtacccctggaaatgagaatgaatagactaaaacgaggagagtctgtcagaggctatttaggaagcaagcagagtcctaggtcctcaagcccaaagaagactggaggtttattttctgaagaaggttaaacaaaggatatgtgggctagacacatggaggacaggaa

SEQ ID NO: 545580 - DNA, 634 bp, Homo sapiens
aagtgtttatatttaacaaaaatatggctgtcatcaactaatcttttttaatcaatgttatgtctcctaccccttgggtgacccttgatctttttttttttcattctgcattgatgtgagtacatcagagcaccaagaaaaaaatcaataattttgaatattcaaaaaatatgtttgggtcttaatttttaagagcatcatatcaatatttcttcagaaaaaataaggtttgttatagaaaccctgattcatattaacatacaaaacaggaacatttacagtgatgtttgatattgaaaaatgatagattcagggtaagttctcattatatagcaagtttagctagtttattgcaaatgtgctataatttagttawactcaactttaccacagtgaggcagtgttatgcaatgctaaaaggtacaagtctttgagtcaaatgtaacgaaattaaaattctggctttacctctaaagaggtgcaatatcaacatgttatttacctcttccagcctaagtctactcctttgtaaaatgggaagaataataattaactcaaagagttgatgttaagattaaagtactgagtacagagtcttacactcagtaagtgttcaataaatgacaataacaaa

SEQ ID NO: 545581 - DNA, 647 bp, Homo sapiens
gggaagaggaataagtgctctcacttgccttaagtcttcatccaacaattaccattctccagtggaatttactttgcctttaaagatttttttaaatcataaagcagaaataaaaattgaatgctaatctcatgaagttaacattgtgcagaagaaagagtatgtcatgtttgtatgcttctataaacattttgaagacagaaactgtgttgtatgatgttgtcttattacctagtttgaaacaggacagctcaacaaatattgttatcatgccaataattaattgagtgctgtggtaagagaaagttgctatttgaagaccactatgaaataatctstacgaagaaaacagtattttttctgattcattttaaataaactttgctgtacagagctgaaaactgttgtcaatgggagcctgctgggaaacatttaattaaataacctgtgagacaataggaactactccaagctttggaggtaggagacactggtttgaattctgcctctaatacttactacttttgtaatccttgttgtacaagttacttcatctttgcctctctaatctccagttccttatattaaaaagggacataataactgaacactaaatgttaatgtgtttaaagcatccagacaattgc

SEQ ID NO: 545582 - DNA, 473 bp, Homo sapiens
taagcttaatgtgacttaaccatgtaatatggctactgaacaaagacaccaaccttaggatgcatgaccagagcatagatcccaagactcaaaaggtcagtgcccattgcattctgcactggtcacatatatcaggaacaatgrgttctttctaagcgctccacattttaaggggtacatttctagagaagagtaatcagaatggccaaggatctaagaaccacaacctcctggggtggacaattgaaagaactaatagcttgatttagaaatgaggaactctagacagtgctactcagagtgtggtcagggggctgccagtccccaaacttgctctttaatgaggtagatacagaaattgagagtaagaattaaaaccatttgtcaccatttgaaaagtctgtgctatctgagctcacaatcagtggatttgtcttactgaacagggtaaagaccagtctgggtgtagtcaa

SEQ ID NO: 545583 - DNA, 645 bp, Homo sapiens
tatttttaaaggaaaaattcttatattttattaccttttatagcacttttttttttacaagaggtcttcattttctttttgcattgggtcctgcaaattatttatccagccctgctcccagaaggaaattatattactagaagaaaggagactatggttctctagcaagagttcatgcttccttcaccctgatgaagaatacaggcatgtagcagagaaaacagtcagctcagggttgggttgagcatgtgtcctgaatcagarggatcaggtgttgcctcccggcatctgtccaggccgtgccttggtttaggaacaatctgagcttgtttttcagttgccaaagcagcacatgaggtgttggatgacattaaagatgaaggaaagctgaggagtaaatttttttctttttctcagtccttactcttgtaaaaagtaccggtatgttttatgagtgtttttcttttcctcctcttgtctttctccagaattggagctggtctattagggagagggagatgacagcccgggatctgccatgctggaggtgaccccagagttgccttttattacaaggacctttacaaacgactcaagtctttcattcttcactttctccagatgtggttttgaagtgtacagtga

SEQ ID NO: 545584 - DNA, 645 bp, Homo sapiens
tatttttaaaggaaaaattcttatattttattaccttttatagcacttttttttttacaagaggtcttcattttctttttgcattgggtcctgcaaattatttatccagccctgctcccagaaggaaattatattactagaagaaaggagactatggttctctagcaagagttcatgcttccttcaccctgatgaagaatacaggcatgtagcagagaaaacagtcagctcagggttgggttgagcatgtgtcctgaatcagaaggatcaggtgttgcctcccggcatctgtccaggccgtgccttggtttaggaacaatctgagcttgtttttcagttgccaaagcagcacatgaggtgttggatgacattaaagatgaaggaaagctgaggagtaaatttttttctttttctcagtccttactcttgtaaaaagtaccggtatgttttatgagtgtttttcttttcctcctcttgtctttctccagaattggagctggtctattagggagagggagatgacagcccgggatcygccatgctggaggtgaccccagagttgccttttattacaaggacctttacaaacgactcaagtctttcattcttcactttctccagatgtggttttgaagtgtacagtga

SEQ ID NO: 545585 - DNA, 641 bp, Homo sapiens
tctaccctagccattccatatttgacaaataatcatactttattatttaaaygtataacagtctagaattgggatgcttaagttgcacttactatgtgtgtgagcctctggtcatccataaaatgtaaagtatccacccaaccccaggattgctgggcggggattggaggggtggggaatgaaatgagagaatttatataaaatgtttagtacaggaatgtttagtacagatgttagaggaatttaattccttctaagcctcctccaacaagctcctttctcttaataactaaatgggttccccagaggcagacccagacacaaggacttgggtacaggcattttattcattaaatgatcccaggaaatgctaatggaagaatgagacctggaacaagaatgggaaggcggcccagggggtggcaactggagcttaatccactcagggcaccttgggagctcgctgagagcacattcctcagttataccccacaaaggcaagggagctggggtctctatccaccaactcccaccagccattggttgagggttgctcatggggaagtggaggctgttaattctgccccccacatgagttgcaaaatggccctgggtcctcaggcacaaggaggcaggtgctg

SEQ ID NO: 545586 - DNA, 621 bp, Homo sapiens
agttatattttacattataaatgtttgtatattctagtttaatttgcagtgaacatttgccctaaatgagaacttaaaatgtatactaaatgtagcattaaaaacagttgtttgcattttatgtcacagcccatccttgacaaagacacctgcatgaaaagcagcaaatttggatagcaataccagtaaccagctataaagttctgtaagttagttccttttgtgaattctctgattgattgattgattttgagacagagtctcgctctgtagcccaggctggagtgcagtggggcaatctcagctcactgcaacctccgcctcccaggttcaagtgattctcctgcctcagcctcccaagtagctgggattacaggggtacaccaccatgcctggctaatttttgtattttttagtagagacagggtttccccatgttggtcaagctggtctcgaactcttgacctcaggtcatccacccgcctctgcctcccaaaatkttgggattataggcgtgagccactgtgcccagccccctcatttatattagaaaattatatcacaggctgagtgtggtggctcacacctgtaatcccagcactttgggaggccaaggcgggt

SEQ ID NO: 545587 - DNA, 592 bp, Homo sapiens
taacatgagtagagagatcccatctagaaaagagccacagaaygggaaaaccagattgcacgaaaactctcccaatagctctggtcctgttgcctaagtgcactccagattccaaccagcctggttaggactaaaagaacagaacaaaagctttgagttgtttggtactacagggtggaaagggtttggagtttcatttcaagtaagttaactatctgtttgtttggttggttggttttttttgagacaggttctttttctgttgcctaggctggtgtgcagtgatgccatctcagctcacagcaacttccacctcccgggttcaagtgattcttgtgcctcagctttctgaatagctgggattacaggcacctgccaccacgcccagctaatttttgtatttttagtagaggcagtgtttcaccatgttggccaggctggtcttgaactcatgacttcaggttatctgcctgcctcggcttcccaaagtgctgggattacaggcgtgagccaccacacccagcccagttgactttttatgttggccttgtatcctgtgaacttgcttaacgtacttattagttctaaatag

SEQ ID NO: 545588 - DNA, 573 bp, Homo sapiens
cattctgtcatatcatcagatacccaggggctgttgctacttgaggcgtccacagaatcacagcattttccagtattgaaagacctgaaagatcatggtgccttcatatcaactgtgasacatgaagtaattttcccaaatctacgacattaagatatggtgcaataaggaccagattaaaggtgtcctgattttcaaccatgttccctccatctcatttactcctaaacacagtcactgctgcaaatacttctgttgtcaagtgggaaatgaatgttcttacaagactcaaagttgtgaacacatcactgaccagctcagaggtggctcacaataaggacccaattaaagtgtttcccatgcaactgggtcgaaccttccaagtactaaattaaaacaatcttttaaagaaggaaattatttcagaagaggaccttcatactgcatctctgagcagcaactgatgatgatactgaactcagatgctgattggttctccaacgcgggattacccaatccaggagcaaagaaattagtaacttcctccctatgtttgggatgtgagtggtgggg

SEQ ID NO: 545589 - DNA, 573 bp, Homo sapiens
cattctgtcatatcatcagatacccaggggctgttgctacttgaggcgtccacagaatcacagcattttccagtattgaaagacctgaaagatcatggtgccttcatatcaactgtgagacatgaagtaattttcccaaatctacgacattaagatatggtgcaataaggaccagattaaaggtgtcctgattttcaaccatgttccctccatctcatttactcctaaacacagtcactgctgcaaatacttctgttgtcargtgggaaatgaatgttcttacaagactcaaagttgtgaacacatcactgaccagctcagaggtggctcacaataaggacccaattaaagtgtttcccatgcaactgggtcgaaccttccaagtactaaattaaaacaatcttttaaagaaggaaattatttcagaagaggaccttcatactgcatctctgagcagcaactgatgatgatactgaactcagatgctgattggttctccaacgcgggattacccaatccaggagcaaagaaattagtaacttcctccctatgtttgggatgtgagtggtgggg

SEQ ID NO: 545590 - DNA, 606 bp, Homo sapiens
agccccagaattgcagggaggcgggggagagggcccaggcagtgctcagaggcagtgcttccagaacrccgcctccgctcctggagctacgcccccggggaagaacgggaccctgaatccagctcaaatcagaaaggagttctccagacagaacagatgggacaagtggacgaaaaccccagtgatgccaggaggaaggcacttatcaaagcttcagactctagagctgagattggcaaaccatgacctgcccagcagacacagcccatgagctaagagttgtgttcacatctttacagggttggaaagagaagatggaaaatgagaacgatagaaagagggagagagacaggaaaaaggagagggagaaggaggaggagagaaagaagagacaaagcccaaatgtggcctgcaaagcctgtctagccctgtacaaaacaaaaacacaaaggtttctgtctgtgatgcggaaggtaagatgaggccagaaacaggtgctgtcgaagtcagcagtttacaggataaagagcaagaaaactcgggaatattgaagcgaggggctcactcccaagtccaggagctccagagaggccggagagccccttg

SEQ ID NO: 545591 - DNA, 654 bp, Homo sapiens
gccagctgcagtggctcagatttgtaatcccagcactttgggaggccaaggcgggcagatcacttgaggtcaggagttcaagaccagcctgcccaacatggcgaaaccccgtctccactaaaactacataaactagctgcgcactaaaaatacaaaaattagctgggcgtggtggcgcatgcctgtaatyctggctacttgggaggctgaggcaggagaatcgcttgaacccgagaagtggaggttgcagtaagccgagatcacgccactgcactccagcctggagtctttaaaaaaaaaaaaaaaaaaaaaaaaacaaacaaaaaaaaacacaaaaccacaccaaaaaaccaaaaactactacgccatgaaaaacaagtctagactcattgatttagagcaacaggcaaactatatggcccagagaacaaatctgatcgccacgtgtctttgcaaataaagtctttttggaacacagccatcttcatgtttctagtttatggctactttgagttcactgtcagagtagctgtgaaacaccctgactcccaaagccaggggtcccaacccccagaccagtaccagtccgtggcctgttactgggctacgcaggaggtgaacagccggcatgtgggcatcactgcctgtcacatc

SEQ ID NO: 545592 - DNA, 654 bp, Homo sapiens
gccagctgcagtggctcagatttgtaatcccagcactttgggaggccaaggcgggcagatcacttgaggtcaggagttcaagaccagcctgcccaacatggcgaaaccccgtctccactaaaactacataaactagctgcgcactaaaaatacaaaaattagctgggcgtggtggcgcatgcctgtaattctggctacttgggaggctgaggcaggagaatcgcttgaacccgagaagtggaggttgcagtaagccgagatcacgccactgcactccagcctggagtctttaaaaaaaaaaaaaaaaaamaaaaaacaaacaaaaaaaaacacaaaaccacaccaaaaaaccaaaaactactacgccatgaaaaacaagtctagactcattgatttagagcaacaggcaaactatatggcccagagaacaaatctgatcgccacgtgtctttgcaaataaagtctttttggaacacagccatcttcatgtttctagtttatggctactttgagttcactgtcagagtagctgtgaaacaccctgactcccaaagccaggggtcccaacccccagaccagtaccagtccgtggcctgttactgggctacgcaggaggtgaacagccggcatgtgggcatcactgcctgtcacatc

SEQ ID NO: 545593 - DNA, 295 bp, Homo sapiens
tccaccatccccagacaccacaaccttcccgatagttgctggccyccccactatccattctgccccctcgggctcaccctccatccagcaccagagagatggatcctttcatgccctggcttatataatgcctaatcttaagcattaagtccataacctccctgcacctccaggggctaccctccgtggactccacagtgtctctggctgcctcatcactccccaatcacccccacccttcttccagttgcaaccccctactctcttttcttcagatttaccttgctccctttac

SEQ ID NO: 545594 - DNA, 619 bp, Homo sapiens
tggaatggaatgagttggtcctcactaattcagccaagattctctctgctaatggcaaaacatgcctgtccctgtagctaaacaaacactgaattattcattttcctttggcaaataccatcatggtaatgctcacgatacttgtttatcatgaatgactgttggggacatcccttgttaaaagaaaaactgtacaaaccaagttaataaggatgaattgaaatgttgcagaattctgtgtatatgtgtatgtgttgatgtgtatccaaggctttatgtgatttttgttttgtctgaatatctcatgtttcatgtttcaacggaatttttcttttgtggtcctccaagcttagattaaaggagctaatataagtgacctaggatatactcagaatccagatagtacctggctcttttttgaattgttaaaggtatataataaaggctactcacrgtgtctgccctcaaaaaattttgtccttaaatagatacacaatcatatatctgagtaaatggttgtgaataaaaagaatatgtaaaaccagatcagcgttcctcaacctttctggcaccggggactggttttgtggaagacaatttttccatggaagcagggggt

SEQ ID NO: 545595 - DNA, 499 bp, Homo sapiens
gccggatttcctttgctgttcctgcatgtagtttaaacgagattgccaccaccgggtatcattcaccatttttctttttgttaacttgccgtcagccttttctttgacctcttctttctsttcatgtgtatttgctgtctcttagcccagacttcccgtgtcctttccaccgggcctttgagaggtcacagggtcttgatgctgtggtcttgatctgcaggtgtctgacttccagcaactgctggcctgtgccagggtgcaagctgagcactggagtggagttttcctgtggagaggagccatgcctagagtgggatgggccattgttcatcttctggcccctgttgtctgcatgtaacttaataccacaaccaggcatacgggaaagattggaggaaagatgagtgagagcatcaacttctctgacaacctaggccagtaagtagtgcttgtgctcatctccttggctgtgatacgtggccggccctcgctccagcag

SEQ ID NO: 545596 - DNA, 499 bp, Homo sapiens
gccggatttcctttgctgttcctgcatgtagtttaaacgagattgccaccaccgggtatcattcaccatttttctttttgttaacttgccgtcagccttttctttgacctcttctttctcttcatgtgtatttgctgtctcttagcccagacttcccgtgtcctttccaccgggcctttgagaggtcacagggtcttgatgctgtggtcttgatctgcaggtgtctgacttccagcaactgctggcctgtgccagggtgcaagctgagcactggagtggagttttcctgtggagaggagccatgcctagagtgggatgggccattgttcatcttctggcccctgttgtctgcatgtaacttaataccacaaccaggcatasgggaaagattggaggaaagatgagtgagagcatcaacttctctgacaacctaggccagtaagtagtgcttgtgctcatctccttggctgtgatacgtggccggccctcgctccagcag

SEQ ID NO: 545597 - DNA, 605 bp, Homo sapiens
ctccccagccctccaaggccactgtgtttccyagttagctcagagcctcagtcgatgcctgacccagcaccgggcactgatgagaaagtggctgtttgaggagccacctcccagccacctcggggacagggccagggtgtgcagcaccactgtacgatggggaaactggcccagagaggtgaggcagcttgcctggggtcacagagcaaggcaaaagcagcgctgggtacaagctcaaaaccatagtgcccagggcactgccgctgcaggcgcaggcatcgcatcacaccagtgtctgcgttcacagcaggcatcatcagtagcctccagaggcctcaggtccagtctctaaaaatatctcaggaggctgcagtggctgaccattgccttggaccgctcttggcagtcgaagaagattctcctgtcacagtttgagctgggtgagcttagagaggaaagctccactatggctcccaaaccaggaaggagccatagcccaggcaggagggctgaggacctctggtggcggcccagggcttccagcatgtgccctaggggaagcaggggccagctggcaggagcagggggtgggcagaaagcacccg

SEQ ID NO: 545598 - DNA, 605 bp, Homo sapiens
ctccccagccctccaaggccactgtgtttcctagttagctcagagcctcagtcgatgcctgacccagcacygggcactgatgagaaagtggctgtttgaggagccacctcccagccacctcggggacagggccagggtgtgcagcaccactgtacgatggggaaactggcccagagaggtgaggcagcttgcctggggtcacagagcaaggcaaaagcagcgctgggtacaagctcaaaaccatagtgcccagggcactgccgctgcaggcgcaggcatcgcatcacaccagtgtctgcgttcacagcaggcatcatcagtagcctccagaggcctcaggtccagtctctaaaaatatctcaggaggctgcagtggctgaccattgccttggaccgctcttggcagtcgaagaagattctcctgtcacagtttgagctgggtgagcttagagaggaaagctccactatggctcccaaaccaggaaggagccatagcccaggcaggagggctgaggacctctggtggcggcccagggcttccagcatgtgccctaggggaagcaggggccagctggcaggagcagggggtgggcagaaagcacccg

SEQ ID NO: 545599 - DNA, 418 bp, Homo sapiens
accagcgatactcagtaagatactctttcacaatgccaggcagcctcagccacatgatcatgaaggtgaacaacttatactctacactttcaactcacaatattttcaatttacamtggatttattgggagttaaccccatcataagttgaagagcatctgtattacatttaaaaacccaggttattttaaaatagttgcttatatttacatacttacaagattattcagtctagcccagatttacaagggggaaaaaacacactcaaggtattttaagcccagagagatgtaatacagtgaagtgcattgcaaaagttttgtaaggacagaaaaagcaaaattgtgcttccaaaggtcaggaactgcaggaagctactattggccctgcagcactaaacaaacccacactcctggca

SEQ ID NO: 545600 - DNA, 581 bp, Homo sapiens
ccttatttagcttgtaatcaagaaatgctaaacctacatgaagtatgaacgattccttacattccattccatgcaccacatcctccctgaagattgtcttgattccttcatagttattgaattattataatattagtgcctatgttctctactctcaaaagtgmaaatgacattaataactgaatttataatattttctgctttgctaccttaagaatgagtgcctggtattgcgacgtgattacaacgaatttaagacaatgaagcagtcctctctccctatctccctcatatcctctctggctctctctctctctctgtccttctctcctcctctctttcccccgcattctcccagggtggttcagtggcagaattctgctgggacgtttaagagagagaagcatattcagcagcagcagcagttttcctattcctgcccccatccgcggctttgaactgagtttaccacgaaatacaaaaacacaattttagaaagaaagatattggcagttaagatttgggaagtttcttaatgggactctcagtccttcccgccactctgaaatcgcggtgcagtc

SEQ ID NO: 545601 - DNA, 581 bp, Homo sapiens
ccttatttagcttgtaatcaagaaatgctaaacctacatgaagtatgaacgattccttacattccattccatgcaccacatcctccctgaagattgtcttgattccttcatagttattgaattattataatattagtgcctatgttctctactctcaaaagtgaaaatgacattaataactgaayttataatattttctgctttgctaccttaagaatgagtgcctggtattgcgacgtgattacaacgaatttaagacaatgaagcagtcctctctccctatctccctcatatcctctctggctctctctctctctctgtccttctctcctcctctctttcccccgcattctcccagggtggttcagtggcagaattctgctgggacgtttaagagagagaagcatattcagcagcagcagcagttttcctattcctgcccccatccgcggctttgaactgagtttaccacgaaatacaaaaacacaattttagaaagaaagatattggcagttaagatttgggaagtttcttaatgggactctcagtccttcccgccactctgaaatcgcggtgcagtc

SEQ ID NO: 545602 - DNA, 581 bp, Homo sapiens
ccttatttagcttgtaatcaagaaatgctaaacctacatgaagtatgaacgattccttacattccattccatgcaccacatcctccctgaagattgtcttgattccttcatagttattgaattattataatattagtgcctatgttctctactctcaaaagtgaaaatgacattaataactgaatttataatattttctgctttgctaccttaagaatgagtgcctggtattgcgacgtgattacaacgaatttaagacaatgaagcagtcctctctccctatctccctcatatcctctctggctctctctctctctctgtccttctctcctcctctctttcccccgcattctcccagggtggttcagtggcagaattctgctgggacstttaagagagagaagcatattcagcagcagcagcagttttcctattcctgcccccatccgcggctttgaactgagtttaccacgaaatacaaaaacacaattttagaaagaaagatattggcagttaagatttgggaagtttcttaatgggactctcagtccttcccgccactctgaaatcgcggtgcagtc

SEQ ID NO: 545603 - DNA, 581 bp, Homo sapiens
ccttatttagcttgtaatcaagaaatgctaaacctacatgaagtatgaacgattccttacattccattccatgcaccacatcctccctgaagattgtcttgattccttcatagttattgaattattataatattagtgcctatgttctctactctcaaaagtgaaaatgacattaataactgaatttataatattttctgctttgctaccttaagaatgagtgcctggtattgcgacgtgattacaacgaatttaagacaatgaagcagtcctctctccctatctccctcatatcctctctggctctctctctctctctgtccttctctcctcctctctttcccccgcattctcccagggtggttcagtggcagaattctgctgggacgtttaagagagagaagcatattcagcagcagcagcagttttcctattcctgcccccatccgcggctttgaactgagtttaccacgaaatacaaaaacacaattttagaaagaaagatattggcagttaagatttgggaagtttctwaatgggactctcagtccttcccgccactctgaaatcgcggtgcagtc

SEQ ID NO: 545604 - DNA, 352 bp, Homo sapiens
agcccctgtcacaccttcttacagcctggggtgggcagctcccctcacctgtkcccatgccagcatctggggcaaggatgatgtgtctgcaagttcttcccctagcactcagaggtgcccggggttccccttgcctggatggggtggtggagcagatcacacccaagcctggccgtcgggaaaatcaagcttggtggccaccccagggacaccgctctgggccacctcaggcagaacctcctcctgaggcgcaggaactgggcttcctcagcagggtgggtgggacagtgaccatgccgctggctgggtccccaaagcgaggccactcccacttcccaaaccaggcccaaca

SEQ ID NO: 545605 - DNA, 352 bp, Homo sapiens
agcccctgtcacaccttcttacagcctggggtgggcagctcccctcacctgttcccatgccagcatctggggcaaggatgatgtgtctgcaagttcwtcccctagcactcagaggtgcccggggttccccttgcctggatggggtggtggagcagatcacacccaagcctggccgtcgggaaaatcaagcttggtggccaccccagggacaccgctctgggccacctcaggcagaacctcctcctgaggcgcaggaactgggcttcctcagcagggtgggtgggacagtgaccatgccgctggctgggtccccaaagcgaggccactcccacttcccaaaccaggcccaaca

SEQ ID NO: 545606 - DNA, 309 bp, Homo sapiens
ggcaaggatgatgtgtctgcaagttcttcccctagcactcagaggtgcccggggttccccttgcctggatggggtggtggagcagatcacacccaagcctggccgtcgggaaaatcaagcttggtggccaccccagggacaccgctctgggccacctcaggcagaacctcctcctgaggckcaggaactgggcttcctcagcagggtgggtgggacagtgaccatgccgctggctgggtccccaaagcgaggccactcccacttcccaaaccaggcccaacaagcctggccccagttccatgccctccc

SEQ ID NO: 545607 - DNA, 473 bp, Homo sapiens
cacaaagtgaaagtttacaagagtgaaaagagagagtttgttgaccaaaaaagaaaggttacaaaatagtacaaagcttatgattttatttgggttaaaaaaatgtgcactgaaaaaggtccaggccaggagtggtggctcatatctgtaatccccacactttggraggctgaggtaggtggatcacttgaagttaggagttcgagaccagcctggccaatattggtgaaaccccgtctctaccaaaaaatacaaaaattagccgggtgtggtggcaggcacctgtaatcctagaaactcgggaggctgaggtaggagaatcacttgaacctcgggaggcagaggttgcaatcagctgagatcatgccactgcactccagcctggtgacagagtgagattgcatctcaaaagaaagaaaagaggtccagagtgacatatgctaagctgttagcagtggaatctttggtaatgt

SEQ ID NO: 545608 - DNA, 467 bp, Homo sapiens
agtggagaggagcgcctcctccatcctggccaggccctgccagcttaggtggggaaggaagtgaggaacgacacccaaagcaaggtacagagttggggagrggcgctcggcctggggcctggggcaccctgttccctcagtgctgggaaaggaccctgatctgagtcccctggggtggacctggctgggatgtagccaggggtgaggtcaggggcctagggaagctgctggaaccctgtgggttgggctatttcttccctccgggactgggagacctaaaatcccctgtgactctttctgcctgtgtgaccctggaagggaggctgcagaggtctttgtgtgtgtatgttttcacagcagagtttgtatgtgactatttaggaggaggcaagtgtcccacagtgtgtgtattcctgggcctatggctaagacccagggacaccgtggatgtgtttgttagatgagta

SEQ ID NO: 545609 - DNA, 589 bp, Homo sapiens
caggaaggatcctcccctgagcctcgggcaggagcgagtccgtgctgacacctcaatttcagactttggcctccagagctgggagagaataaagtctgatgtttaagccaccactttgtgatgttttgtgacagcaggtcctggaagttgacaccatgcctctgcaggagaatgaagagaaggaggattggacagagggaaaagctggmctcagtgggtcctgcaggaattccagggctggggtggcactgcagaggcatcccaaacagaggtagggggctgggcctttgtccctctgcatcagcggtcgaaggtcagtcgctgggctgcttgctgggaggggtgagaccttgagaggcagctccctgtgtcgtggtgggtgtcattgtgggtgcccagggggcaagaggctcagtagccccaggcccatctgagcatctgggagccattcgagtttgcctgatagagaagctgacaacattgtctgcataaaagtggaaagctcctatatggcaaaggaatgaaaacaaagcaaaaagacatatgtcagaggaagagaaagcattttccacacgcataacaaaggctt

SEQ ID NO: 545610 - DNA, 481 bp, Homo sapiens
gacccagactccctgtgtgcagtaaaaggggaaagagagggttctgggccccaggggttgcgtgggctgagtttgggaaacagggtgtgaccagcagaagaaatacaaaaatccatcctctttcctcatcagggaaatgaaaatgacaaccagaggccacttgtgcctccaggatgagaaaggttttytctaacgggacagtaggcaggactcacaaacaggcagcgaaactaaccaggttgacgatggctggagagggtgcagataagtaccatctttcagagcacgactcaacacgggtttcaggagcattaaaatcttcacacctggccgggcgtggtggctcacgcctgtaatcccagcactttgggaggccgaggcgggtgaatcaaaaggtcaggagactgagatcatcctggctaacatggtgaaaccccgtctctctaaaaattcaaaaaattagccgggcatggtggcgggc

SEQ ID NO: 545611 - DNA, 481 bp, Homo sapiens
gacccagactccctgtgtgcagtaaaaggggaaagagagggttctgggccccaggggttgcgtgggctgagtttgggaaacagggtgtgaccagcagaagaaatacaaaaatccatcctctttcctcatcagggaaatgaaaatgacaaccagaggccacttgtgcctccaggatgagaaaggttttttctaaygggacagtaggcaggactcacaaacaggcagcgaaactaaccaggttgacgatggctggagagggtgcagataagtaccatctttcagagcacgactcaacacgggtttcaggagcattaaaatcttcacacctggccgggcgtggtggctcacgcctgtaatcccagcactttgggaggccgaggcgggtgaatcaaaaggtcaggagactgagatcatcctggctaacatggtgaaaccccgtctctctaaaaattcaaaaaattagccgggcatggtggcgggc

SEQ ID NO: 545612 - DNA, 626 bp, Homo sapiens
cactatgcgttagtgttcaaattctgcagttaaggaagaataatgagccaatacaagtaaaagtggacctatttttgcaaaagggatatactcctggaaagaggttgaaatgtatatctataaagtttgtaaaaccacatttgccatttaaaatacttgcagagaattccgttgcaattcaaacaattaattcccagtttcctaccttataagtttggagttttgacatgtatataacacagcttgcacttagcatttacaattgtaaaatactttaatgtcttttatccacataatagttttattctgtggcagctatcgttaccttttcttttttttttgagacggagttttgctcttgttgcccaggctggagtgcaatggcgcaatctcggctcaccgcaacttccgcctcccgggttcaagcgattctcctgcctcagcctcccgagtagctaggattagaggcatgtgccaycatgccaggctaattttgtaatttttttaatggagacagggtttcttcatgttggtcaggctggtctcgaactcccaacctccggtgatctgcccgcctcggcctcccaaagtgctgggattacaagcgtgagccaccacgcccagcc

SEQ ID NO: 545613 - DNA, 441 bp, Homo sapiens
gttcacatctctggttcctggacgacggaaatgatggcttcaaaaggtgatgagctgcccatcactgacagcagccaagctgatactaggcggccatttgctggagatcctgcagaaagggttcctgtaccaggtgaggacctggaggtggggacaagtcccagggtgtcaggagccctgggttctagcctctgctctggggccacctcaccgtgtgaccttgagcaagctctcccctctctgggcctccagctccccacctgtaaacgcaggcagttaccctctatcaaagattctccatctgcaattcacagaaggatgagcagatgaacctcaggggtctgtgaaccccggaaacactaggagaaattagatgtatgggtcatttgtgcctgctgytcccctggcctggaatattctctcctccgcttccatctttgt

SEQ ID NO: 545614 - DNA, 385 bp, Homo sapiens
tatatattggcatattacatagtatctacacattttccttcgggatagtcaagagtgtgataaaatagttgttgtaagaagaggcgctggatctgccagggctgaggaccactgctctcatgtgattgccggttggcatttccatctctcakactaaattaaaaattctgggacagcagggactcagtcaaagcatatttcctgaactgaaatgaaagaatacatgagcacgctggtgacacctaaggggtggggaggcccccggggcagttatggtgtgaagttataactccctttgcaggagagagatgaggcacacccttcttcctccatcactgcctcctccatgaccaccgccaccatcctggctgggacggccagtcag

SEQ ID NO: 545615 - DNA, 514 bp, Homo sapiens
atgaccccctggaatgagcccatgaggcctaaagcagagccctctaaccactccacccagcctgtctgtggccttcggcctcaacagagaatgcccaggggagatatctattccatctcctgggcatgagccttactattctgcctcgattccttcacacacactgtttacygcttccaaatcctacatgcctcctgcagaacctgcacaagccccaccacttgcaggaagctgccctgtctgtctggacatcaagtccttctcatcccatagctttatgggccccagacttgttcccgcaaagcaggctcagactttatccctttcaaaccacagcctctcttttcctcaccccaggggcctcacctggatgaatccccaaccatcaaaatccttatcaattgactgaactaagacattcagtgacaggtgaatgaacaatgaatttgacaccccttacttgagcacttgacatgtgctaagggggcggggagcagtatggacctagataaac

SEQ ID NO: 545616 - DNA, 554 bp, Homo sapiens
ttgtgggtccggtgcccacagagaggctggagcagggccaggcgggcccagcggtgcaggagggccttcctgaggggctaagagaagctcatggccaggtccttgggctgggtgagctgtctgccttcccccaccaggagctggaagaggaacccaggtctgaggaaggaaaacaagagggcmgaggtgggcaggacctcagttcagagcagtcagagcagtcggttgaggctcacggcctagaaactgcgcattcggaactcccccagcaagactctctgcttgtttctctcccatctgccacaccacaggctcaggtggaagcagaaggccccactcctggaaaatcggcacctccaaggggctctcctcccaggggggctcagcctggggctggagcaggaccccaggaacccacgcaaacccctcccaccatggctgagcaggaagcccaacccaggccatccctcacgactgctcacgcagaagaacaaggcccgcctcactccagggaaccaagggcagagagcaggcttgaagatccaggaatggac

SEQ ID NO: 545617 - DNA, 660 bp, Homo sapiens
gaggaaactgaggtagagaaacattaagtaactctcccaggggccaggtgcggtggcgcctgtaatcccagcactttgggaggccgaggcatgagaatcgcttgaacctaggaggcggaggttgcagtgagtcaagatctcactccagcctgggtgatagagtgagattctgtttctaaaaaaataaataaataaataaatcccagggtactggagctagcaagcagcagaggcaggatttgaacccagggtactaatggagtccatcccatggggttgtcatgaggtctgcaggggctaatgtgtgccaaggacaggccttatctgggcccactacatgcagggggtctgtgaaaaaaggaggcttagcaggaatggggaaggcggcctttggggctggctggtttctactttgtccttgtgtgtttgaaacagaatggarcccaatgctacgttcaccacgcagctcacggccacacctgagcgactgctccgactcatctctgctggggtctgtggcctcatcctgctggtggggctgtcagctaatgggctcatgctgctggtggtgggccggggcccgggctccccccacccgctccactccctgacccacagcctcatgatgaacatcacgccatctgacctgctcttcctggc

SEQ ID NO: 545618 - DNA, 660 bp, Homo sapiens
gaggaaactgaggtagagaaacattaagtaactctcccaggggccaggtgcggtggcgcctgtaatcccagcactttgggaggccgaggcatgagaatcgcttgaacctaggaggcggaggttgcagtgagtcaagatctcactccagcctgggtgatagagtgagattctgtttctaaaaaaataaataaataaataaatcccagggtactggagctagcaagcagcagaggcaggatttgaacccagggtactaatggagtccatcccatggggttgtcatgaggtctgcaggggctaatgtgtgccaaggacaggccttatctgggcccactacatgcagggggtctgtgaaaaaaggaggcttagcaggaatggggaaggcggcctttggggctggctggtttctactttgtccttgtgtgtttgaaacagaatggagcccaatgctacgttcaccaygcagctcacggccacacctgagcgactgctccgactcatctctgctggggtctgtggcctcatcctgctggtggggctgtcagctaatgggctcatgctgctggtggtgggccggggcccgggctccccccacccgctccactccctgacccacagcctcatgatgaacatcacgccatctgacctgctcttcctggc

SEQ ID NO: 545619 - DNA, 618 bp, Homo sapiens
tggtataatttggtatttaacatacattaattccaatttaaatttgcaagcataggtttctagaaatctttctaatcagtgtacactgtcacatttctctatgtgcatgtgtgtgagatgtgttttcctttcatgaattaacatcatttttcttgtagtctttaagaatattgctgctcattcgctcagagccacaggaggaggggagaggcctggaggacaccaacatgaacaagttgaaatcatcgcagaaggataaagtttgtcagtttatgatcttcacacaatctagtgaaaaaaaccgcagtaagttgtctatctcaaaatgactggaagttagatgttgcaacagataattttttccaaaatcctgaactttatatatgagagagtgtaaaaggatcactggaaaggaagaagttagaayaactgtacaatagagacaaagatcctcaaaatgagaataaaattggaatagatggtatatagcagttctgtgatggcctggcactcaatccagccagcattagtgtgttgattattgcatggatgttcagagcagcaatacagtgtgagttctccaaacaggagttcatggatggcatgacagaattagga

SEQ ID NO: 545620 - DNA, 512 bp, Homo sapiens
cctctgtggaacaggcacccctggtagcctgggtaactccactgtgttcccaaacactaggctaggatcccatctcagcctgctgtggcctcagcatggagcagggaagatgcccatgtaagttctactcaactgaatttaaaaggcaggcttggacsatggggagatgcacagatgctccaaaggagtccagagagaacatcatttctaaataactgtatcccttttcttcccatagaaaccaacatagatctttccccagaatatagaaaaattgccacaggaactgagccaaaagcatgcataaacactgtgggtgtagaaaaattttgttccttgtctcttgtgatggcatggcagagattagcacttgataaccttaatggtcatgcacttttgaagtaagtaaaagtctcttaatgagctcctaaattagagaagagaggaggcccagctaacctctacatgttattggagtcagaaacatggtaaagctacaacttagcactaat

SEQ ID NO: 545621 - DNA, 461 bp, Homo sapiens
aacaggcacccctggtagcctgggtaactccactgtgttcccaaacactaggctaggatcccatctcagcctgctgtggcctcagcatggagcagggaagatgcccatgtaagttctactcaactgaatttaaaaggcaggcttggacgatggggagatgcacagatgctccaaaggagtccagagagaacatcatttctaaataactgtatcccttttcttcccatagaaaccaacatagatctttccccagaatatagaaaaattgccacaggaactgagccaaaagcatgcataaacactgtgggtgtagaaaaattttgttccttgtctcttgtgatggcatggcagagattagcacttgataaccttaatrgtcatgcacttttgaagtaagtaaaagtctcttaatgagctcctaaattagagaagagaggaggcccagctaacctctacatgtt

SEQ ID NO: 545622 - DNA, 464 bp, Homo sapiens
tctggctgctgggcacagcattataacctttcttggactatactctgtttctgtgrcttaggcttccaaccactgcctcttctcttcacagggctgtacaactgcaactttgggaagtgcacactgagcttcatctaaattcattccttgtcagaagccaaggaatgtaattcagcttatgctaaggagaaggttgtggaggaaagaatactatggatttatttatatacaaataaagagaatgcagtgtgtacaggtgatagggtttggctgtgtccccacccaaatctcaccttgattgtaataatcccccatgtcaacatggggagaggtggagataattgactcatgggggccgttccccccatactgttctcgtggtagtgaataagtctcatgagatctgatggttttataaatgggagttcccctgcacaagctctcttgcctgccaccatgtaagg

SEQ ID NO: 545623 - DNA, 640 bp, Homo sapiens
aggcactttcaccctgatggttcctgagttcactgctkggcctgcctgcctcctgataccacccaaaaaattgagagaactgctagggcatgggaatcagcagcagtaggtattattcagtaccctcctcctccagggggtggcatatgactggcacaccaaggggctgtttttaggtagtactctcacaacttgtgtgggttgttgagagtgggaaggatttgagagattccaaacctgttatgcgcaggcaaacgacaggcacccacagtgctcacctaacaatgaagttgggcttttcttttcagttccttcctgcttcaaacctacactgaagaggcccatttctcatttagcagtcagtcctcagaacctcaaggaagcaagccttttggagggctctgcaggcacaagccaggcttccagtagtttcgcggctgctgtttccatcctagccacctccacaaagttctccagctctaatgattcaatctgttacccacttagcaattttcttcatttctgtccctagacagtttctctcacacctccccctattgttctgtttcttctatctccaagatgatcgatgacccaataggcatttacatttacaaagcaatcacatttacataagata

SEQ ID NO: 545624 - DNA, 654 bp, Homo sapiens
ctgcttctcaacaatgaccagtttaatttaatgtagtcagtctaagcaatatgagattaattgccttcattctattctatactcatgcaattgaataatctacttctatgcttgagttyctgactttgattagcttctaagttggtttgatctatgaatacagtctcaaaaaatatgcactagagttacaggttctgagtcacatcatggtcacctttatacataatcaacaatctggttggacataaaagtcttgggacacaatcatttctttgcaaaacttgatgtttgtttctccattgtaatttagcactttgtgttgtgttatgcatttaatgtttaaaagttatgaaaatttttggaccaaaaaaagactaaatttattctgtttatatatgaaattatttgcaggaatgtattcttcccttttgtcatcaaatactttctttcatgctcaatatctttcaatgtcactgagtgattatctatctgattttggttttagcctagaattggaatgagattttataggacctcttgcttccatacagcttagagaggtgggatgggcatcttcccggcagtgtctttttctcaataccttcacaactttgcagtataaaaacaaagttcaggttaatgtgtacagcccaa

SEQ ID NO: 545625 - DNA, 654 bp, Homo sapiens
ctgcttctcaacaatgaccagtttaatttaatgtagtcagtctaagcaatatgagattaattgccttcattctattctatactcatgcaattgaataatctacttctatgcttgagtttctgactttgattagcttctaagttggtttgatctatgaatacagtctcaaaaaatatgcactagagttacaggttctgagtcacatcatggtcacctttatacataatcaacaatctggttggacataaaagtcttgggacacaatcatttctttgcaaaacttgatgtttgtttctccattgtaatttagcactttgtgttgtgttatgcatttaatgtttaaaagttatgaaaatttttggaccaaaaaaagactaaatttattctgtttatatatgaaattatttgcaggaatgtattcttcccttttgtcatcaaatactttctttcatgctcaatatctttcaatgtcactgagtgattatctrtctgattttggttttagcctagaattggaatgagattttataggacctcttgcttccatacagcttagagaggtgggatgggcatcttcccggcagtgtctttttctcaataccttcacaactttgcagtataaaaacaaagttcaggttaatgtgtacagcccaa

SEQ ID NO: 545626 - DNA, 640 bp, Homo sapiens
tgtcttcctattagattctgctaataggggtatagcaggaagacaggaggaaactaggaagaacttgctctttgctgtttatctgctgctcctgacattgtcactgttgacagctctttaccctgacattggctggtacttccatttgtccctccagaatcagcttctttgtgacctcctcagaggtatagacacaataagggctgtgctgctttccccaaagtctgagtcatagctttgcaagacctcttctcaaagctccaaggtatcagtaccaactgggtggcatccactccttagaaacctcaggtaaaaagactttgatgctctttttcaatcctctacatattgataacttcaaaatatgatttcccagcccaaggcctggtagctacatacygaagttaccgggggtctgtgttatcttgatcttctctttttggctttttcaatctttcaacccctatttaacccagcccttaaaattacagttgtccctcagtctacacaggggattggttccaagacccctgcacataccaaaacctgcactactgaaatcccacagttggccctgccaaactcacatatgttaaaagtcagtcctccatatacataggtttcacatcaagaaaataat

SEQ ID NO: 545627 - DNA, 587 bp, Homo sapiens
ctgcctaggaagcagctggctatgtagtgatttccatgattatagagtttcataaacatggcatcatttttcatcattaaatacctgtggatctcaagacttgataattatgttgacaattatggagtatgtctttgttacttctttgtgggtatttcaataagtactttgctttcaataagtacttttaacattttctgtagacctttctctttcctactaatactattaaaataaccaacatattgcatagaactatagaagcttacaaacatgatataaattcacagatgagcgaagacttgtttttttawtcttgcaaagtgactctctagttaatactctaagacatgtaatataatgcatacaatttatacaatagttttctcaaagacatatgatcaaatgtgaaatgtagaaagcgggtaaattcacatgtgaatatgccttaatttggctttcccaaggagcagatagtgagataaggacttgagtaacaggagattatttagaaggcacaacctgtcttcctaaataccttttaggcaaatagacaagtgacataagaaaaatcagaaagcctacta

SEQ ID NO: 545628 - DNA, 505 bp, Homo sapiens
gacagcatgcaccccagaggaccccttccatttgaccacagttgagtcaaacatggtcacataaaatcaattaggtaaagtggcatcctctctggagctctgctgccagagcagtgatgggaaggtgctctctttgctggagctgcctagctgggaggatatgagcttggggctggtcatggtcagccactaatcctcccacatggagggagcctgacagaaagatggaaaggaagatagggtaaaccctgatgacctcttttcagtccctgtgccctcaggttattctacctctgattttaaatagatgttttaaatagattttaaatagatgtgtgtgtgtgtgtgtgtgtgtgtgtgtgtgtgtgtgwgagagagagagagagagagagagagagagagagagagagagagagagagagaggggaccaacagagtggcatgaagattactttaaactgaaaacatctgaacaaacagcagccacagaaagaagccttatcta

SEQ ID NO: 545629 - DNA, 612 bp, Homo sapiens
gccacaaattcctttcccctgccccagggggatgggagatgggagttccacctggaaggagactgtcaattagcattgggatgaataagcccaatagagccttccataacttcccattgaagccctacaacccctttttttgttaagctggtatataaacccgtagcactggctgttcagcatgccaactcttattgagtgtccccacatgcgtgtgaaataaacttttctcatattgtatttgttgtcaattaattcacaggccccaccacttgaacrtaagttggtaaaggaaaagattttctcccacaatatatagatagcaagcagtcattttatatattgtataatgtatctgtacatatatgtttgatatgtatgtgtgtatgtgtatatacacacacatatatacatatacatatagcttgaggtcaagttctgtctcttgtaactaataatagtaagtagactgcaaggtttgtggcctatgatagggtccccttggatacactgaattttcctatcctcacaaatgtattctttaccctggcagccaattctgttacaccactcaaatccctgaggacaatcatatcactcattcattgagac

SEQ ID NO: 545630 - DNA, 542 bp, Homo sapiens
gatgtttcctgatcaacattttgttaggactttcccagctggattcaggraaaggtctttgttttcaactcttttattaaactgatgtctaagcccttgttgatacgatgttgtgatcaaggactgaacccgtgtcttctgaagccccctaataagccttaggaaaacatcataaaaacatgtatctgttgaaatagatttggcatcatccctggcctcctcccaaaccctcaaggacacttcagagcacacaaaaagggcaacctgacaatcgtggcttctctggagtttttccccccaccccacactgggaaaatacccttggaaataccctggtggaacacaggatccactccattccagctctgtagctgcctcctcttatcccataatacctgagggcctggcgcatgctctgcttttattccctgttccagtgtgaaagagaagatttatatgccaatcacatcatcatcacagtgtgagagctgcaagaaagagcagaagccctgaatcagatatgtgttccataagagagacct

SEQ ID NO: 545631 - DNA, 512 bp, Homo sapiens
gactttgcatttggctttgatacttttcaagtttctacaaaatgacattttgttacatcaaaattataatctttccattttattctcaaaatgatagattatagcaattatgcaaagagagaagattcattagtaaatgcagtaggtgagatatacatttataggcctaagtacctttaaagggacagatatttagtaaagggcaagggtgaatgaaagccctcctcctcacgctgaccctgagcccctcatttcctttgtgatggtgagaaatccttaactctagactggggccctatgcatagctccctgtcactactcaccagcctggcctagagcccacaggcataagtatttggaagtttttattggtgttattttgtgtcatcagagatgacacgtcattacccagaaaatacagggcaaaaagtgactctcagaatcacaccagaaacacttygtttctagtacataatagaaattagggtcaaataccagctactgtcaacagg

SEQ ID NO: 545632 - DNA, 576 bp, Homo sapiens
aactttggcccaagcctaaacctggactttattcttcagcggggcctgagacatcagcaaagcaaaacaactttcctccaggctaggacagaccccgcccaacaccaactcatggtctctcagatcaggycctcaaagtgctcctatgcccatatgccttggaagactactccaattgtccgctaaaaaaaaccccagcacattgtctgagaacctttccaaccactcaaatatatgtgaagactttccatccagtatgcaaaaggatttcaagggattcaattttcagaatttctctcctgacatctgcctgaggacacacttgtgatggataggcagacccacctttcctactccctttttcacaatttccctccccgactctaccgaataaaaggcccacctctcacccttctggaatcttccactggtgcactgccctgggcactaaaaatgttttaggtatcaaacagaggcataatttcgcatttgggctagcattgacaatgcgaataactctaaccactgtgtccaattctttattttcaccaaaactgctgagagacctatgaatgt

SEQ ID NO: 545633 - DNA, 579 bp, Homo sapiens
aactttggcccaagcctaaacctggactttattcttcagcggggcctgagacatcagcaaagcaaaacaactttcctccaggctaggacagaccccgcccaacaccaactcatggtctctcagatcaggtcctcaaagtgctcctatgcccatatgccytggaagactactccaattgtccgctaaaaaaaaccccagcacattgtctgagaacctttccaaccactcaaatatatgtgaagactttccatccagtatgcaaaaggatttcaagggattcaattttcagaatttctctcctgacatctgcctgaggacacacttgtgatggataggcagacccacctttcctactccctttttcacaatttccctccccgactctaccgaataaaaggcccacctctcacccttctggaatcttccactggtgcactgccctgggcactaaaaatgttttaggtatcaaacagaggcataatttcgcatttgggctagcattgacaatgcgaataactctaaccactgtgtccaattctttattttcaccaaaactgctgagagacctatgaatgtcat

SEQ ID NO: 545634 - DNA, 422 bp, Homo sapiens
tgccttggaagactactccaattgtccgctaaaaaaaaccccagcacattgtctgagaacctttccaaccactcaaatatatgtgaagactttccatccagtatgcaaaaggatttcaagggattcaattttcagaatttctctcctgacatctgcctgaggacacacttgtgatggataggcagacccacctttcctactccctttttcacaatttccctccccgactctaccgaataaaaggcccacctctcacccttctggaatcttccactggtgcactgccctgggcactaaaaatgttttaggtatcaaacagaggcataatttcrcatttgggctagcattgacaatgcgaataactctaaccactgtgtccaattctttattttcaccaaaactgctgagagacctatgaatgt

SEQ ID NO: 545635 - DNA, 579 bp, Homo sapiens
aactttggcccaagcctaaacctggactttattcttcagcggggcctgagacatcagcaaagcaaaacaactttcctccaggctaggacagaccccgcccaacaccaactcatggtctctcagatcaggtcctcaaagtgctcctatgcccatatgccttggaagactactccaattgtccgctaaaaaaaaccccagcacattgtctgagaacctttccaaccactcaaatatatgtgaagactttccatccagtatgcaaaaggatttcaagggattcaattttcagaatttctctcctgacatctgcctgaggacacacttgtgatggataggcagacccacctttcctactccctttttcacaatttccctccccgactctaccgaataaaaggcccacctctcacccttctggaatcttccactggtgcactgccctgggcactaaaaatgttttaggtatcaaacagaggcataatttcgcatttgggctagcattgacaatgcraataactctaaccactgtgtccaattctttattttcaccaaaactgctgagagacctatgaatgtcat

SEQ ID NO: 545636 - DNA, 605 bp, Homo sapiens
taccttggtgattatgttttcctggagctaatattagagttggttggcattccccaagcacatgctaactaattacaggcaaagcaagctgaagaagccatactgggattaaaattttgttgcagataatcaacaagctgaataatccacccactgataatcagattgaccaaactatataattttcagactctgctagccttcatatattcatacattcatttcctgtgagatagtagaacaccagccccgagattctttgattattttcatgttttttttaacagcacccacaattccatccgcttctttaaatgtgttctgaaaactttatcctcttatttttcatcaatgtgaaaattataactttgtctttcaagctctattaaaaatccatattttgaggaattgtttaaggatctttcccaaatggtaagatgatattttacacaaagaagcctaatactcctgcagacactgcaaccctgggaatcacatttgtatttgactgatgctggaaggygcaggttatggacttccaaacatatgattaaaacatcaaaaaataaaactatacattgttttactcttctcataattcaaaa

SEQ ID NO: 545637 - DNA, 632 bp, Homo sapiens
tgtccacccaaggagactgggcagcagctgcagagagcaaaacgacctgaccttctcacatggaaacttctccaagacttggtgtcatggaaaaagcaaagtcgctaaaaagcrcacacgcacactttttttttttttttgacacggagtcttgctctgtcgcccaggctggagcgcagtggtgcaatctcagctcactacaacctccgcctcctgagttgaagggattcttctgcctcagcctcctgactagctgggactacaggcatgcaccaccacgcccggctaatttttgtatttttagtagagatggggtttcgccaggctggtctcgaacttctgacctcaggtggtccacccacctctgcctaccaaagtgctgggattacaggcgtgagccactgcacccagccacacacgcactttttaaaaagccgcacgacacatctgtttttgtacacacagacccagaaaaagataacagcttggctgatcacagaagcacctctgagaagggcacagtgcctggcgatgggcaaacaaaggtatgtggactctatgtgtctgaactgttggcagtgaaaatgtggtcttatatcactgtgatattatgatatatatgacaagatata

SEQ ID NO: 545638 - DNA, 632 bp, Homo sapiens
tgtccacccaaggagactgggcagcagctgcagagagcaaaacgacctgaccttctcacatggaaacttctccaagacttggtgtcatggaaaaagcaaagtcgctaaaaagcacacacgcacactttttttttttttttgacacggagtcttgctctgtcgcccaggctggagcgcagtggtgcaatctcagctcactacaacctccgcctcctgagttgaagggattcttctgcctcagcctcctgactagctgggactacaggcatgcaccaccacgcccggctaatttttgtatttttagtagagatggggtttcgccaggctggtctcgaacttctgacctcaggtggtccacccacctctgcctaccaaagtgctgggattacaggcgtgagccactgcacccagccacacacgcactttttaaaaagccgcacgacrcatctgtttttgtacacacagacccagaaaaagataacagcttggctgatcacagaagcacctctgagaagggcacagtgcctggcgatgggcaaacaaaggtatgtggactctatgtgtctgaactgttggcagtgaaaatgtggtcttatatcactgtgatattatgatatatatgacaagatata

SEQ ID NO: 545639 - DNA, 630 bp, Homo sapiens
ctgctttggtataattccctgacccactttttttcctaataagagatagatagccaagatacccagatgtgagggatactgtctctgtagaaggctcttatctgattagacactgctttcattttatagcaattcatatttccaagggcatctccttctttgcttcattttacatcccaacttctatttccttccacaaaacccaaggcactatatcttccagttaatgccacagtgcaccagaatgcacgattatgtgcagtctaatttcctttaggtcatgttcacattcaattattttatgcatattgagagtaactcaatatgtataatctttcctttgaatttttaagctgagagttcagtctgctctaagataaattagacattattcctaagccttatgtgctctagtgaactactctaaggccttggggtttcaaacaaatgtctttctttttctcctttcagaaaactaagctgggtctcaaagtatgtcycttgctattgtgatttcttattatttcctttcatccctagaagaaatctctcagttcagcatgatccagtgcctcagtcacaataggctgagtgatgtttgcttaaataacagcccttcccagatggctg

SEQ ID NO: 545640 - DNA, 612 bp, Homo sapiens
tgttacctgatcagatgggtgtttaagaaagatgaatccatgaaaagagaaatgctatatgaacattgctgtagatgtcataaaggcatttgatcaaatccaacctctagtgctgataaaattcttaattaaattggaatagaggattaataaatagtatttatacaatacatgaaatactattgtttgtagtattatacagtatatgctatagaactatcttgtgttagagaatattgtattggtattatagaaattcatttatgtagtaattatgaaccaagcactgctgtaagcattttcacaatctgaaaatattttaatgaatttaattttggcaaagccytgtgaagtggtgatattattgccataacattcagatgagaaaattagtgccaaaagtgtaaactgcttgcctaaggtctcatagcatttaagtggcagagccagaatttgaaccagaattccttacatgatatacatctcaaataaaaggccagcatcatatttaatagtgagaaactcaagaaattcccatttaagtaagaataaggcaaagatacccattatcaccgggaatatttattatgttttgcaagtactaatcaatga

SEQ ID NO: 545641 - DNA, 243 bp, Homo sapiens
ccaacctgctagcctaggcattctaaactttaacatttagtaaaatggtctcaaattggagagagagtgtctcttctcctggaggagtggaaartgatgttgttcagtcaggccgaggttagcaacgttagcaaagccctctctgtccctacctggtggcaggaaagagacaaggaaggtctcaaagatggatgccttgctaccttcctgcaggctttgggtcaggtttggctaagctatcat

SEQ ID NO: 545642 - DNA, 566 bp, Homo sapiens
tgcatttggactgtaaatatcatccagactcttctggattggaaagtatcttggcatttttcaaatacaaatatttatttaggttttatcattttgaaagttcttccattagtgggcaaacatgagctcatgtgtattcacttgcacgcttcctcctgtagcagtctgggttcagagaggagatagaaaccacacagtagattaaagaggggaaatttaatataataagtattacctatgataaaagagtaactatcagatatgaagaaactctgtagcgttccctaaggctgagggcgtatatccaaggaaggacaaactgccagggcttcagacytcattggagaagatgtggttcagcccatggaatcacagaggagtttgctggtttgacaagactggagctgatccaaagtctctgggcaagccgtcgtttaccttctggagtgctggcagagagcaggccatccagtgggttactggccatccggtgggtagcagggtgtgggccctggctgggccaggaggcctttagaacacaagagccatgtggaggctttagtggc

SEQ ID NO: 545643 - DNA, 500 bp, Homo sapiens
ctttggttaattgagattttgccaggaattaacatcttttagcatcaaatacttttgtttgtgtgtgtgtggttttttctttttgttttgagaagagtctctctctgctgcccaggcaggaatgcagtggtgcaatcacagctctgtgcagcctcgactgccaggctgaagcaatcctcctacctcagcctcccaagtaactgggaccacgggttcatgccaccagcctggctaattttttaaaaattctgatagagactgggtctcactatattgctcaggctgatcctgaattcctgggctcaagcaatccaccagcccttggccttccaaagtkctggaattggccgaatgtggtggctcatgcctgtaatactagtactttgggagacggaggtgggaggattgagtccaggggttcaagaccagcatgggcaacgtggcgaaaacccttctctacaacaacaaattagccgggcgtggtggtgcacacgtatagt

SEQ ID NO: 545644 - DNA, 552 bp, Homo sapiens
tgtaagctgcaaaggcactcccttgcgggggcttagcacagtgtgattcactttggagcagtgcctatcagaaagacttgccacctggggctgggtgcagtggctcacgcctataatcctagcactttcggaggctgaggtgggcggattgcttgagctcaggagtttgagaaaagcctgggcaacatggtgaaaccttgtctctacaaaaaatacaaaaattaaccaggcatggtggcgtgcacgtgtggtcccagctacttgggagactgaggtgggaggatcacttgagccccggcagttgaggctgcagtgagctatgagagtgtcactgcactccagcctgggcaatagagcgagaccctgtctcaaacaaaaaaagaaacatgcctgctgggcactgaggggcatccttctaattgccccaagcccgcatgcatgtccatgtcacaggaggccyctgtgttacctcatccacagccacgtaggttgtcagcacctggcagagcccctcacttttgtcttttcacatcgaagggtttgaatcttggt

SEQ ID NO: 545645 - DNA, 621 bp, Homo sapiens
tctactacaaagagagcttctgaggaaagcctccatggagcaatatatcttgcttttatcattttcctctttatgatgttttcttttctcaatcccatgaaaaatcacataatgggagtttactgtagcctgtttgaatggataggacaatggagaaataacgtagtcaagaaactgttcccacaactaaaagaagtttatctgagaaatgtttgtggcagaacataagcaatcattagaaatgaaatttgggaaagatgaaaaatcattcaatataaatcatatattgtttatcagaaatacttggaatatacagaaagattttcattatgattattgagataaaaatgtggctttcaaatatattcttccagtatgaccagtatattttattgcaaaattattccttcttcaagaaaggtcttttataaatggacaatgaaacaggctgtgtattcagatgctactgtctatcctcagatatcttgcttttcagcaagtaaagcagaaattgatggtgacagtcttcctggatttgttggctctttcaccatgatccactctytttataaatgaaacattgagtttcatttggtgattttagatgcatttattattttt

SEQ ID NO: 545646 - DNA, 650 bp, Homo sapiens
gtaacaggtagtgattgcaaatggccacaggggacacagggagtgttttggagatggtgtaaatatccaatgtaaatatcctaaagctggtttgtgctgatagttgcacaattctatcaattaactaaaaataattgaattatatgtttaagtgggttggttatatttcaataaagctgtaatggattcaaagtgttaagtaataaatgctcaactaacagtagcttttttgttgtttaagtaatcaggaaaagcctcctgaaggaactggagttttaatgatragtgacagatagctttgcctagatgatagggaagtgggaaagtgaagaagaaataataggaaaatagtatgggcagtggcctggagagagaatagacctggtgtaatttgtcttactatagagctgactagactaggaagttagtactagggaatattgggatagttgagagataagaagctgttggaatcagacctaagactgggaaaggactggtaggatgtgcctcacatgtaccattgatgagtgggtagaaatgaagagattcaagtgatagaggccccagatgatagagatagttaagatatggcttttgtcgaggagcagtgggcttcctgggtgctagaaatagaattattctggctg

SEQ ID NO: 545647 - DNA, 557 bp, Homo sapiens
gctgatagttgcacaattctatcaattaactaaaaataattgaattatatgtttaagtgggttggttatatttcaataaagctgtaatggattcaaagtgttaagtaataaatgctcaactaacagtagcttttttgttgtttaagtaatcaggaaaagcctcctgaaggaactggagttttaatgatgagtgacagatagctttgcctagatgatagggaagtgggraagtgaagaagaaataataggaaaatagtatgggcagtggcctggagagagaatagacctggtgtaatttgtcttactatagagctgactagactaggaagttagtactagggaatattgggatagttgagagataagaagctgttggaatcagacctaagactgggaaaggactggtaggatgtgcctcacatgtaccattgatgagtgggtagaaatgaagagattcaagtgatagaggccccagatgatagagatagttaagatatggcttttgtcgaggagcagtgggcttcctgggtgctagaaatagaattattctggctgca

SEQ ID NO: 545648 - DNA, 632 bp, Homo sapiens
gttatcttttctctggctgctcttggagtcatgtgagaactgactaaactgtcttccagtcttgtgagttatttaagtaagcagctctgtcaagattatgccctccagctttccaacaaatctagtgaggtcactgggggagaaatctccaaatgtcttctcaaagttgtatagaattttaaagatttcccgcccaacttgaggcaaatccttacagtgcttaatctcagtgatgtgataagatcatgactttttcagaaatgtctttgatgtcaatcctaattctgctaaattttacctgacaaggaaagaatgaaacattataagctagtttgtcaagcatctcagtaatctgttttggcaataatctgttccagttcagccctgcaatgatggggtctggtgaatgatgtaccttgacttggaaggaacttattaagtgttcaatcattgattaatgaagtaaaaatgcactaggtagaccttgaagtgaaaaactggacaggaaccttggcagacattagggcctcmtgcacactatccatactgtgatttattttgaaaatgatgactactcctttttttacccacatacctacaatgccacagaaagaccagtgttgacaatcaac

SEQ ID NO: 545649 - DNA, 637 bp, Homo sapiens
atggagctaaataatgtgtacacatgaatataaagatggaaacaatagatattggggactccaaaattggggaggatgagagggcggtgagtgttaaagaaattgcctgttgggtacaatgttcattatttgggtgatggatgcactagaarctcaacccccccatcattcccatgtaacaaacctgcacatgtatcccctgcatctaaaacaaacaaacaaaaactactattggcttgtgttggccacaagataatgtacatgttctttattgtagtatttaaagctctgcctacctttggccttgattaacattacttcttccatggaggctatagtccagctatcctggacctgtccgtttcattaacaaatcatttattttgtcttcacttatgcctttgttgaatgcttttcctcttctggaataccctgctatcccttctgaggccagtgcactttcaagtaattcttcaaagcccagatcaaatctgttctcttttgtcaaatcttcctagacttctcttcatacctaccttcttctctctgaaaacaagtccttaatatatccttatactcttaattatagcccgtgcccctgtgaaatcattcataaaattttatcctgttttgtttt

SEQ ID NO: 545650 - DNA, 259 bp, Homo sapiens
ttattttgtcttcacttatgcctttgttgaatgcttttcctcttctggaataccctgctatcccttctgaggccagtgcactttcaagtaattcttcaaagcccagatcaaatstgttctcttttgtcaaatcttcctagacttctcttcatacctaccttcttctctctgaaaacaagtccttaatatatccttatactcttaattatagcccgtgcccctgtgaaatcattcataaaattttatcctgttttgtttt

SEQ ID NO: 545651 - DNA, 516 bp, Homo sapiens
gcctgctgtctaaaccatctgagctacttgggggaggggcaatgtccaacactgggactgatagctgcctaacacactaatctcccagagcgggggaagggcagcagccatctctatagctccaggtcacacttytcccctactgaagcctgggaggctagatggcttggtcccaagagatatctatcccccacagctcaacgcaggagccgtggcatactgtagaccgagtgccccttcaggcctgaccttggcccatccctcctcactgggcagggcctccctgaaggaactctgacaactccatccaggggcttagggacccaactctgatctccctgggcataagcccctagggaagggggtgaccatagtctccacaaaccagcagacttagactttcctcctgctaattctgaggaattcaggcagcccagatgattgtgtttccccccgaaacgaagcacacccctccaccaagggacagtcaaagtgctttgttaaacagatcctgct

SEQ ID NO: 545652 - DNA, 516 bp, Homo sapiens
gcctgctgtctaaaccatctgagctacttgggggaggggcaatgtccaacactgggactgatagctgcctaacacactaatctcccagagcgggggaagggcagcagccatctctatagctccaggtcacacttttcccctactgaagcctgggaggctagatggcttggtcccaagagatatctatcccccacagctcaacgcaggagccgtggcatactgtagacmgagtgccccttcaggcctgaccttggcccatccctcctcactgggcagggcctccctgaaggaactctgacaactccatccaggggcttagggacccaactctgatctccctgggcataagcccctagggaagggggtgaccatagtctccacaaaccagcagacttagactttcctcctgctaattctgaggaattcaggcagcccagatgattgtgtttccccccgaaacgaagcacacccctccaccaagggacagtcaaagtgctttgttaaacagatcctgct

SEQ ID NO: 545653 - DNA, 637 bp, Homo sapiens
ctgccttacctcaaattgagacaactttgaggtgtaaactcacactctagagttccctgtgcgacctcagtggaactttgcyggagaccttcgccttgcttagctcttgcccttctctcttgggagcatctcttatccaatagcttgtaatcccaatttccttgggaaacaatgagaagagaaaacattgaaaaacaaaccagtagggacatctaaagcttcaaaagaggcatggcaaggagggcttgatcttcttggtttgacaagtcattgtttgctgattgcttgacatccattacagagccaggcctgccacaagccatctctgccctacctccctgccaacattgtcctgcaagacggccagggccttttgaagcagcctgtggagagcctgccagggttctgtgtacttgcatgcctgctctccggttgcagaggagcagtttttacatttctgccacttgcctgacctgctgcggcaaagcagcccactggggaaacttggcatcactgcctggcactggtgcttattccttcctggcattggcccatgccagcaggaacaaggacagtgccaagcatgccaccatggttgtgccaaccagttccactgcagcagtgccctgaggatgct

SEQ ID NO: 545654 - DNA, 582 bp, Homo sapiens
taactgcaacctcatgagagaccctgagccagaaccacccagctaagcccctcctgaattcctgacactcagaaactatggtatgacaaatgtttgctgttttaagccactaagttttgggataatttgtgacgcaccaatgggtaactaatataagtggttcctatctccattttacagataacgttttaggaacctgcccaagctcacccagccagtaggcagtggaaccaggacccaggaagaagtctaactcaacctttaagctctttcccctcagcagtagaaaccatgtacggaatgccactatgtgccaggaacttcccttacgttgtctcatttattccacaatagctctgcaaggaagacatctttctgcctttcaaaaaggtatcaaagtaaagttcctgtcttctttttttctttttttttttcagacaggatctcactctgtcacccaggctggagtgcagtggcaccatctcgactcactgyaacccctgcctcccaggctcaagagatcttcctgcctcagcctccccagtatctaggatagaactgcaggcataagccaccatgcct

SEQ ID NO: 545655 - DNA, 558 bp, Homo sapiens
ttggtgttgctgggacccagaacatatgtgggatgatattgaagatgctggaggaataaataaggaccaactgcaacgggccttatttaggcaagttaaagagtttggagttttggtcaggtgcggtggctcatgcctgtaatcccagcactttgggaggctgaagcaggaagatcacctgagctcaggagtttgaggccagcctggccaaaatggggaaaccccrtctctactaaaaatacaaaaattagtcaggcatggtggtgggtgcctgtaatcccagctacttgggaggctgaggcaggacaatagtttgaacctgggaggcggaggttgcagtgagcggaggttgcaccactgtgagtggagattgcaccactgcactccagcctgggtgacagagagaggcactgtctctaaaataaataaataaataaatagtgtttggattttatcctgtagcagagagggcttaccattcatctctgtatttattcctgaggcagacatcaccaattgatcatgccattttctgcaaagggtgagcacctctaggca

SEQ ID NO: 545656 - DNA, 645 bp, Homo sapiens
agtacggtcctgagttggtggtaacaggaacggggccggagaggcagagagccttctgacaggcacatagtaccctggtggctgagccaggatggagcaggtgtggcaggctccctctctggtgctcctctcctgcctgccccagggcctgtgtgtgcactttcatcaggcgagccctgtccccacagccgttgcctgagcccctggccactggtctccttcatgggacttgggtgctctgagctgctcagccagccctggcctagggcaccgcatgccaggcatgtggctggtggtgccctgagaataaccgagtcaggggaagactgtcctgtctaccattttggcatcaccagggggacaggmcaggcaagggaggactgagagtgatggccaaagagggccatttgagaggcctgggaagtgacgggtaactgtctttcaggtgatgagggcctgagctgagatcccaacactgccactttcctggaagctgccgttgggcatgtttctccacctttctgggcctcagtttcttcacctgtacaatggggatgataagaatccctacttcaccttgccagagcaaggccaagggacaaagtaaggcacagggcttggcactgggaggtgctccaggtggca

SEQ ID NO: 545657 - DNA, 590 bp, Homo sapiens
tcaaaccccgttttacacatgggaaaagcggagtgataatcccaggccacaragctcagggacagagccagcaatcaagcctgggccttctgggtttaccataccacgtaattcccccactcgctcccatcctaaatctgatcctgagttttcttcattttatcatccataaagagcattctaaattctcttgtgctctgccctggggtccagcttgggctcatcaaggtccgcttacttctccagagatccccataatctatttggaggagtagcacagttctactctgatttggcatgttttagaggaatcaaaggtagggccattcatttttgaattatacataggtttcccttcatctctagaatgtaattaggcaaaagggcttgaggaataccaaatgccaagccaagagcattaagaagctgccaaaggaagcgggtattagcaacctctgttatgtgccatgtgggccagagctgttcttagcttctcggcaggagggagaggctgtggttccaggaatcaggagagagagggaggcaagcaggaaggtctttgcctcttccctgcagattttgtagtggag

SEQ ID NO: 545658 - DNA, 520 bp, Homo sapiens
ttgactgctacatgtggtgaaattttcagaaaaatgcacaaaatgactcagaaatggaatttgtaccccttcaagggagggaagaaaaatytttaaacgttctcagagtgcctgcagacacatttacccacccacatcttgctaatcttcttcctgcccttctaccaccacagccacccccaacacatagctttgtgggcaggaacacatccctccacaaaccatccgttctggtgccccatgacagggaggagtgtgttggcatatcaatcaattaataagcacctgaaattgtcagtgtcacagatacatagccagtttgttctccaggtccctgctatgctgaagccaatcctcaggagccatcagcttggtaggcaaaatgggaaatttccctaaggtgtctgttgctgctgcctgagtgctcagatctattgggaggatgggaaggggatttcaccaagtgaacccatttattcctgcctgccctttcttcctcggtaaccatccccttgcccac

SEQ ID NO: 545659 - DNA, 641 bp, Homo sapiens
tattttatcttcctgtttctgctgagcatccagaattggccattcwacccataaacttcagcatctgcaagggaagtaatatgttctgtgatttgcccagggctggataaccttttggtcccagactgaccttgagggtgacctcgaggatcccaattctagctctactgtatttataccatacccattctctccttatgtttacctagggcgagtttcctgctttattctctttgactcaaatacgtgctgagacccaattatgaaaactcaattttgtctccaaggcttacttccctggagcaagttgaatgtcccctccagagctatgcatgtggtggagctttacttctcacctatcccagtagcagcacattactattgctcctgccccaccactgctcacaaagggactcccttgacttccagaagaaatagctgctataaaatggatcactcattcataaggaactatgtgtttattcatatatattttatatcataacaaatgtaaattaatttcagggtgtgactacccaagctagtatctatatggctgcctgtataaaatttctccctcaaaattctccaaaccatctggcataaactactctattgtgacctgttaaaataagtaacag

SEQ ID NO: 545660 - DNA, 466 bp, Homo sapiens
aactgtgctggcaagagactgatgattgatgcctgcttttaaacttaaagctttttttttttttttttttttcacttcttgcaattagtatgtatccagctgttacagggaatatgaacaggaggaaaagcagttgtgagactgttcttttattaccaggccctccgtgtacagggttacagctttagctggccctgtatcatacacccagagtgaattttctttctcctgctcttttcctgtgttaatttttttttttttcaaaatgtgaccraatagctgtttctcgtcaggctgactagtcccagtctatagcatcagctacacgccatcctttcagtgtctacatggcacagtccttttttccatttttattcctagtgtgggtttctggccatgtttcctgagcatagcacaagtcttctggtttcaaatggaacacaaaggggcctgggcaccagcggtt

SEQ ID NO: 545661 - DNA, 590 bp, Homo sapiens
tggcccagccccacagatgctgatggtgcctctgtgtccttgtccccgaccctgggggggatccgagagaaagggcttgtcagggagggtcgggagggagttgaggcatgtgcggactcacatgcagggcgaggcaggctttgggggatggagcttctgctctgaagcccactggccaggagaaagggcccacttgtaatgtctggtttattttcacttcattttgatgattacgaaggacctgcatgtaccaggccctgtactaggcaccacggatactgtttgagcaaatccaggcatgggcttggtcctcgtgaaactttgatctgctaagggaggcccatgttaacattagcaaaaggatcacggaaataagtgccatcagccctccrtattggtggcctctgtattcgtgggctctgcatccgtggcctctgtaaccgtggactctgtatccatgggctccatattatgggttcctcatctgtggattcaaccaaccgcggatttagtgtattgggaaaagaaaataaatggttgtgtgtactgaatttatacagacttttctccttattccctaaacaacacaa

SEQ ID NO: 545662 - DNA, 590 bp, Homo sapiens
tggcccagccccacagatgctgatggtgcctctgtgtccttgtccccgaccctgggggggatccgagagaaagggcttgtcagggagggtcgggagggagttgaggcatgtgcggactcacatgcagggcgaggcaggctttgggggatggagcttctgctctgaagcccactggccaggagaaagggcccacttgtaatgtctggtttattttcacttcattttgatgattacgaaggacctgcatgtaccaggccctgtactaggcaccacggatactgtttgagcaaatccaggcatgggcttggtcctcgtgaaactttgatctgctaagggaggcccatgttaacattagcaaaaggatcacggaaataagtgccatcagccctccgtattggtggcctctgtattcgtgggctctgcatccgtggcctctgtaaccgtggactctgtatccatgggctccatattatgggttcctcatctgtggattcaaccaacygcggatttagtgtattgggaaaagaaaataaatggttgtgtgtactgaatttatacagacttttctccttattccctaaacaacacaa

SEQ ID NO: 545663 - DNA, 545 bp, Homo sapiens
agcattcaggtgattattaggcacaaggaagtttgagaatcactgacttcaaggattatggaatattaataaatgaagtcattcattcaacaaatatttatcaaactcctactatgtgctaggcatttttttttttttagatggagtcccactctgttgcccaggctggagtgcagtggcacggtctcagctcactgcaacctctgcctcctaggttccagtgattctcctgcctcagcctcctgagtagctgggattacaggcacgagccactgtgcccagccatgctaggcattcttttaggcacaagggaaatagcagtgaaccgaattccrtatttttatggagtacacattccaaatggaggaggcaggtaacaaacaaacacgtatgtcaactagtgataagtgctatgagaaaaactaaggctggtaaacggctagttagtgatgggggtcctatttcatataggatggtccagaaaagcctcactacaaaggcagtaactgaggcaagacttgaatgaagtgagggaatgagccatg

SEQ ID NO: 545664 - DNA, 545 bp, Homo sapiens
agcattcaggtgattattaggcacaaggaagtttgagaatcactgacttcaaggattatggaatattaataaatgaagtcattcattcaacaaatatttatcaaactcctactatgtgctaggcatttttttttttttagatggagtcccactctgttgcccaggctggagtgcagtggcacggtctcagctcactgcaacctctgcctcctaggttccagtgattctcctgcctcagcctcctgagtagctgggattacaggcacgagccactgtgcccagccatgctaggcattcttttaggcacaagggaaatagcagtgaaccgaattccatatttttatggagtacacattccaaatggaggaggcaggtaacaaacaaacacgtatgtcaactagtgataagtgctatgagaaaaactaaggctggtaaacggctagttagtgatgggggtcctatttcatataggatggtccagaaaagcctcrctacaaaggcagtaactgaggcaagacttgaatgaagtgagggaatgagccatg

SEQ ID NO: 545665 - DNA, 624 bp, Homo sapiens
tttaaagtgaatcacttctgtgtctctttacatgtttattgtgtctcacccaataggccgtacactcaaaggcaaaagccacatctgctttaattatcagtgaatttccagaacgcaacagagtgcttggcacacagcagacaatattttttgatagattggtgggtagctggaaggataaacagatgtagtaagtagatacagttagaataaatgaaacatggtggaaatttcaggctcagtagccaggtggtggagtaatactgggcggcggacaggttatttgccacctcaaattgggtggagatacacttccttgaggagtaagcrttaggaataggttaactaaatggagcaaatgggtgtatagagatggtaggcaagatgctgagaatttgccaagacattgtgtctaaaggcacaggaactttcaaaatataatgtttattatcaaatgcattttatgcaaaagcgccagaacagacctgccaaatatttcatcttgttttttcctttgtcttctctgtgcagaatctagcattaaagcccagttactctggcctccatattctagcaaaagttcttagcttctgaagtgaaaaatacaccgccaccaacctgtca

SEQ ID NO: 545666 - DNA, 507 bp, Homo sapiens
tggcagttgttcttgcctgcacatgcacagattggtcctagctattcctaatgtcatcgtttcagtagagtttcacaaaggctacgctacaygagttgtttaatctaaaataccttcccaggccgagtgcggtgctcacacctgtaatcccaacagtttgagaggccgatgcaggagtattgcttgagtccagatattcaagactagcctgggcaacatagcaagaccccatctgtacaaaaaattaaaaaattagctgcacatggtggtgcatgtctgtagtcccagccacttggaaggccaaggcaggaggatcactcaagcccaggagtttgaggctgcagcgaaccatgatcacaccattgcattcctgcgtgatagagcaagaccctgtctcaaaacaaacaaacaaaaacttcactaaggttatactgtaattacacattgaaacacagatacaaataatgaggcgaatgcttgatattaatgagattttaactaagaaat

SEQ ID NO: 545667 - DNA, 545 bp, Homo sapiens
ccatcttaggccctgggacttactcttctcttggcctggtcactcatctcccagatggctttctttatggaggagtctggatgtccctgtctcacagatgcccgctacggacgcctcatggaaggcagccccctcttcccatctcttccctcttagacactctggcccctttccagctttttgtmttcatggcattgcctggcgttgtgtgtgtgtgttttctgtctcccatctagaatgtcagctccctgagggcagggaccatccttcttttgcccagtcttatatcctgattgtgtcacaggtcagtgcgtggcatatcatagacactcagcatgtttattagatgatgtagttcgttgttttgaggctgttctttaaacgcatctcccccgggagggtagaaagtgttgctcactctttaatgatgcattttggtagcatttacttggaggccctactgtgtttctggtgtttgtgccacggacatagggcagggagaaaaggaaggttcattccccttcccttgtgctcagaggcttcag

SEQ ID NO: 545668 - DNA, 589 bp, Homo sapiens
aatacaaatccttaattttcagtgtactttgggaattttgtgaatatatttttttgagaggaatcacagtgttgtaacagttcaggcaggccagataaacctgagcccatgtgtttgttcagccacttcccttctgttaactraagattccttctcagtaatgtgaggataacaatgcctgttatgcatatagtagatgtttcatcaatataggatgtgatgaagaaggtggggcaggcaggtttgcgatgatgattgtggttttatattactatagctttgtaaaatgtggcagtaaatttttcccatttacatttagtgaacacatagaatggtgttttatacatattatatatacaaatcttatgagaaaaaggttttaaacaagaaaccattgttaaaagtattaccaaccttgctaaaaagctgtttgcaaaataattcaagtagaacctgttccttgtggctagccatgcttaggtttgctgttcattatttgcaattttttcctttaaaaagatgatacttactctggagaccagtgtcctgagaaagatgactttgtgtctagcagtatagatgagctagc

SEQ ID NO: 545669 - DNA, 527 bp, Homo sapiens
tctgcctctagtcaggtcagaggtggcattagagtctcacaggagcgtgaatactgttgtgaactgtgcatgcgagggatctaggttgcaagctgtctatgagaatctaatgcctaatgatctgaggtggaacagtttcatcctgaagtcttccccgcaacccctcttcccccgagtctgtggaaaaattgccttccatgaaatcagtccctggtgccaaaawggttgggaactcctcctttagataaaactggatacatcccttataacatagacatcagtttgaataaactgtaaatggcacaggtgtaaatgtaacagcacctgaacccatgcaagtattaggagaaaacatgaatgagttccgttatataacctccgagtctggaagcaataagagaaaaggttgataaatttaagtacatttttaaaaagttggatgacaagaagcaaataagcacataaaatgataaagaaaaaatagtggaaaagatttgcaacttaaatcacaaacagaaagcctaata

SEQ ID NO: 545670 - DNA, 624 bp, Homo sapiens
atgggaaagtgtgcagatagtatcaggcacaggaggacatacagaggaagaaagatagtgtttttagggagaaagtagtactacttccctttgtaataggaaaaaccaaaccaaataaggaaacaaaatgaacaaataaccaytcactagctgtggacaggacaaaaacaccaaggggcctcacctgagtccttcctttccaacattctgccttttccttgtcaaagcaggaatttaagaaaggacctaagaattcattcatacctccgtgttgtaggaccaatgtgaattgcctggaaactagcctcaggagtgatatcatagtcaagtcccagttcattgtgggtcaaggaatctggctccagcctcagtttcttaggaaagaagccagtgggagttacacagcctctgatataacttgaaaaactgcccaccttggcagatggttatccatccatggggctcagtgacctgtgatcagattgaaccaaatgagggctgtggcaatggtgcctttgggaggcttggtgaggcagagttggaggtcagagaagctaagttgccctgaacctttcctgaggaatgtgtcttctgtttctttagagagttgcactctcaccaatg

SEQ ID NO: 545671 - DNA, 608 bp, Homo sapiens
acaggtgtaaaccaccatgccctgctaatggaactgggattcaaatctagattccttgccccrtgtcctggaggttgcccaggcatggaaaagatccaggcctggtccactgcttttagacacttctcaggcaaccccctctttcagtaatttgcgtttgattagatagaaactgaaaactcatgtcaaggtgtctgaaaccagcaaaagaatgttttttcatctttgtccccattccttggttggagggggtgctgggtgacatttgctgtgcaaacaatagcccagaagccgggcagagtccacacctagctgagtaaatagcacctgaaggccctggcagggcatgcaagctccccaggggtgccttgctttgagagacaaccatgagaatgtgcccttggactggaagccaggaatccagagctgtagtcctagttctactgttattaacacttgcacctctctgttcctcatctttgaagtgaagaaaaccaagttgatgatgtttgaggcctgaggctgcaggggtcagtttgacttaggcagtgcagcctggtggttaggcacacacagagtagaatccagttgcctggggtccagtatga

SEQ ID NO: 545672 - DNA, 648 bp, Homo sapiens
caccaggtaggtgaggatcagataatacaatggaagtaaaggaacaattcagaaaactaattcagaaaactattaactgtaaaatttattcgaagcatccttaacccagtgcatctagtgagttctttgagtcctgggatcatagagtgtccatattgttttctccatccttcacctccccaactcacacaactgcacactgctctgctttcctgggtggtgctcatctgtccagccagtctaccgcttctctcaatcactacagtcaatgtacctagtggtttcatatcatcttacagtggaactgcagaagcagctcaatacccctgggttgcaagaaacataagccgagcacaccagatgcaccaggcatgacaccattggtgggacctaggtgcttggactaaggaatggggatagtttaataagtgaacaccacatggcatgatccatgattcaatagcatcacctcatgacatgatccagtcagatcaagtctcccacatcacgacattgcaaatgtccaatcagatcackccattaccttctgcctataaaacctgtccccgcctccaaaagcctgactcctgtctccttgttcagcagccttgcaataaacttttctctctacaaaaacacagtacttca

SEQ ID NO: 545673 - DNA, 514 bp, Homo sapiens
caggcccaaaacgttttcctcacactcccttgcaatcctacttgcctaccsccatcagggatcacctctgtgtgacttttaacagcatagacgagttttgccagtttttgcactgtgtatcagtgaaatcctatgaaacgcgcttttttgtttctggtttctttctctcaacattatcattatgtccatgggattcatccatgttgtcatgggtagtagcaaataaggcattcccaggtacattcaacaatctcttgcagacaccgtactaggcaggtctgactccaaagcctgtactctatattctataccacattgcctggcctgttaacagtgcatcagttgaaaaatgaattcactcatccacttatttgctccttcacagtgtttcctgtgtactcctgtgttctaggccctgcactgtgtgctgctggagaggtgcccaactgaattcaagtcaggcctcatcctcaagtgacttccattcttgagagaggtaagccagctatataca

SEQ ID NO: 545674 - DNA, 383 bp, Homo sapiens
ctctttgtctcaatttcaaagtaccactgacctcaacctaaaacctcaacctaacaaacgacctcaacctaaaatcctgtgcttccggttgtgagccttgtgactgtggaggagrcatttcctagcgctgagcctcagttcgccacctctgtaaattgcctgtggaagacatggctttggaggacagaaaagaaaagtgaaggaagagaaagatgaagccagagtgaagtggtagcattagtgctgtgattcacaaaaataacactataggaagaacctggatgatagtattctgaatacagcaggagcaccaatagagtagcagtagtaaaaatagcatcattataactaatagtgcagaaatagtactaggggtcctaccc

SEQ ID NO: 545675 - DNA, 383 bp, Homo sapiens
ctctttgtctcaatttcaaagtaccactgacctcaacctaaaacctcaacctaacaaacgacctcaacctaaaatcctgtgcttccggttgtgagccttgtgactgtggaggagacatttcctagcgctgagcctcagttcgccacctctgtaaattgcctgtggaagacatggctttggaggacagaaaagaaaagtgaaggaagagaaagatgaagccagagtgaagtggtagcattagtgctgtgattcacaaaaataacactataggaagaacctggatgatagtattctgaatacagcagsagcaccaatagagtagcagtagtaaaaatagcatcattataactaatagtgcagaaatagtactaggggtcctaccc

SEQ ID NO: 545676 - DNA, 474 bp, Homo sapiens
cacatgtttctgatcccaggagaaatccacactgccttctgcctgggtacaccattggcagactgcttccagatccctgtacatcacttggcaatatctctcataggtgttcatggacaagacagagcmgtcctggaactgagacataagggatgaatttcataaacacagactgcctgggccaggtggagagtgtcatggagatgggtgctaggtccgtgcaggaaaacagggggagaagggggacaaagcagaataaataatggctgcacataatagcaattgacacagagagtaaggtggggaacagggagaatcggggtatggtggggggtgtaagaggaaccagagcatgctgtcatggcatggagaaccctataggacggtaaccacttttccatttgtctttgtccctatccatgccctgcataaatggtgccacccataggtggtcactattgctcctgaaggttt

SEQ ID NO: 545677 - DNA, 614 bp, Homo sapiens
gggtagagagaggattcagtctgtggtaagactaagaccttaagctatgactagagtcaggtataaggttgtctaagaaaccaagtatagggcatactttgtagactgggttaggtttcagaccgcagtcaaggttaatgaccaggatgtggctgaggtaggggtcaaagctaaagcagagatcaggagtcaacttacggctcgggtttagaagtgttatggcagtcagtctgcatccatggtggggtcaaacttgcccacaagtgtggcttagactttattcagaaataaaatktagcccatggccatgaaaataactggacaaagcccagtgacctccacatggactatatccattaccttggtctcattagcatcagttcaacccttggcttcataggaatagtcctggacattgcctaacctgagtggtgctaggattataatgatgacagtggctatagcaaggtgctgagcatggaaggtaattagacaacactactgtcttggaactcactacttagggggagaggaaagtgcaaactaaaaatcagagttgagtgatgggcaccaacacagaagtgtgcacaggaaagggcatgcccagctctgct

SEQ ID NO: 545678 - DNA, 449 bp, Homo sapiens
atgagcttgttagctctaatggtgtcaacccaacttctcctatgtggaagcattggttcggtctacaacaaaactccagtcctgagcatcagattttcaaacctaccacgttgtagaactttacctccacttagctgtctcagagccagctcacactagacacatctaaaactcaacttagccccaacccctacaaacctgtctgctcctccttctacatttcctttcttagtaaatggtwgcagcatctgacaagtggccagaatctgaatctagggctcatcctcagttcttaactccttcgttctcactcctcatcctaatcaacagccttacagaagtctgttgatttggcttctgcaggtttgcatctgccccacctctcttttctccttccactgataatgccttggttggacactttcccacttacccagattcaactagtc

SEQ ID NO: 545679 - DNA, 620 bp, Homo sapiens
attggggaagaggagtggtacctggtgctgattggcaaagggtatgttttttctttgaagcctctgcttttgtgccaagttggaattaatggcacttaatggatttctaacttttgctgcaatctggtgtggtatttcttttcccaacaacctcattccctttaacagaaatggctaccaacaagtcctagggttagataaaacgtttgcaagagttgatgagtgccttttagtagccacttttgtctmttttgttattcacaaattgtctcaaaattttgtgatccgtttctgttttgtacattgagtgctgtatgtctgttctacagtattctagtttctgaggtttcccctctcatgctaccaatattactgtgttatgtttactatcataattttgtagatcttgattatgtctcccctctgcttttgtcttgtagccttgagtactaaccttagattatgtttacagaaaaaccatttcatctatgtcattattaatttttgttgctgttttttccttttgcatagtttataatttttgatcaagtagtatagagtattctaggcataaatgcactatagctgcagcacagagcaatgatagctaatatttgctg

SEQ ID NO: 545680 - DNA, 483 bp, Homo sapiens
cctgctggttgtctgcagcaagtctgattgactgatgccccattctgattggttgcagcccaaaccataacaatcgctaaatatcttgactcctaaatatcactcttctgtagcttataggttgctgtgagaaataaataaaataatacaaggaaaatgcttagcttgacccaattactactagtatttgttatgggctgaattgtgtccccgctttccaaagaagacgtgttgaagtcctaaccccagaacctcagaatgtaaccttatttggaaatagggtcattgcagatataagtaatgaagttaagatgagatcatactggagtagagtggttcctctaatccattgtgactgctgtacttttaagaagacaactatatgaagaaacaaggagaayacagtgcacagacagaggcacagacgggagtgatgcacctacaagcagaggaatggcatgggatgctagcagccaccagcag

SEQ ID NO: 545681 - DNA, 611 bp, Homo sapiens
aggtctgattaatgcggtcatcttggaagctgatttggatcaccacagtgcagcctagtggacttcattcactcgttctttcattcaacaaacatttatcaaggactctgtgcttgttcttgtgccagttgctaatacctaaagataaaagaaaactgtgtctgctcttgaactcacagcttacatttccagaacatgacaattaactgacccctcacggttggtgtgtagtgtgacaacacgaggcagggtgtggttgtggaggctgagtgcatcaggtgggcttcacagaagaggcaacccttagacactattcagttgggtctggtacagaggaatgacaaccagaacagatatggttcccaacttccagcaggaggcagcaggacagtgctttctgggcagacgtgtgtgcttgttcttagagaaaagttctgygtcaatctagattcccaagttcctattcaggataccagagtaaggctggaccttgaggatgacctggaatactgtcttctagtagtgctaccatcagaaaggcacacaaaaaagcaaaacccaacatttagccaatggtcaatccctccatgggcccacccaccaccttcttt

SEQ ID NO: 545682 - DNA, 627 bp, Homo sapiens
cttaacttctaactcagtgtcatctcccaaagctagatacccctgcttatcaggcacaaagatgggctatgagacagacagtggctcactgctggtctggaagggcaggtgtgaggcctgattcatcacaagcccagccagggatagtagatgttacagattagagaatcaaggacccaaatggaacccagatgactacataccctccttcctccgagatgtcatcccttcctgacttaacagctcctccaatctttgtaaatattcatacagcacaaattagtcatgtgctgtgtaaccacgatttggtcaacaatgggctgcatatatgacagtggtcccatacgattataagagaactgaaaaattcctatcctctagtgacgtagtagctgtcatgatgttgtagcccaatgcattactcacgtgtttgtagtgatgctggtgtaaacaaacctaccacactgcaagtcataaaaaagtctaacacatgcaattatgtacaataygtaactgataatgaaataaatagctatgttactattttatatatttactatgctacactttttatagtcattttagagtgtactccttctgcttattttttttaaagttaatgtagaa

SEQ ID NO: 545683 - DNA, 507 bp, Homo sapiens
ccctcactctctcctgcttggaccattgcagtagtctccaggcccgtctctgtcctttcagcctcaatagtgcttcactccaatctatgagccatattgatgtcaaagaaattggcccaaaacccaagtctaaaacccaggtctcccatatttaagaccagtagagagatctcacttcccatagaatcatgtcagagcaccttagcctgccttccaagccctctcaatctctcatccctttactctctcatctcctcctccccgtccctctagttaccaagcagccccaacaagaggccacaaaaccctccctatagctcctccacrtttttatgtgtctcttcccaacagttgggaagtgctaacccacatgccaacctcagtcccctgcttgataaatttctgtttattctttagggtccagttcaaaactctcttgttctctgaaccttctctgacccaactacacaccattaattacccatttgctactagtgatagttgtac

SEQ ID NO: 545684 - DNA, 483 bp, Homo sapiens
agcgagcagccgcggtgctggccagatcctctctccaaccatytggagaatggctgggagggcgacatacaggaagcagagcaatatcagttggaggactcatctccaattcaggcaagaggtgatccattatcaggcccagggaaggaattgtgttcccagggacagtcgacaccccatatgctaacataaaaggtggagcttctctggagctttcattccttccagtgctctgcctcacgcctgctctctggaaatggatgtgcattatctcacaggctgtcagaaccttcctaggaaaccagcatgtggacgaatcttgaaaatgcaatctggccgcatccagagctttgcatgctggttccttgggaccacacactgagacactttgcaagaaaatttaacagaagacagatggcaaatgtcatggggcctcacacaactgagaaggcaaaggagtaaaccaaaaaataatgcattgag

SEQ ID NO: 545685 - DNA, 621 bp, Homo sapiens
tgggttcagtcttggctcatctgcccattaactgcaatcttggtcaaatcctttggcctttcctgagattgattttcttcatcttaaataatggagatagaaagaggacctaccatcacaggaaaatcaccatagggccctgctggttgtctgcagcaagtctgattgactgatgccccattctgattggttgcagcccaaaccrtaacaatcgctaaatatcttgactcctaaatatcactcttctgtagcttataggttgctgtgagaaataaataaaataatacaaggaaaatgcttagcttgacccaattactactagtatttgttatgggctgaattgtgtccccgctttccaaagaagacgtgttgaagtcctaaccccagaacctcagaatgtaaccttatttggaaatagggtcattgcagatataagtaatgaagttaagatgagatcatactggagtagagtggttcctctaatccattgtgactgctgtacttttaagaagacaactatatgaagaaacaaggagaatacagtgcacagacagaggcacagacgggagtgatgcacctacaagcagaggaatggcatgggatgctagcagccaccagcag

SEQ ID NO: 545686 - DNA, 614 bp, Homo sapiens
actctttgaggctgtgagagcttgagtragccatacaacctccatgaactgcaattttttttttcagctgcaatattatcttgagcttccaccccataagaggttgtattctggataaaataagtatccaaaagcatttttaaaataataaattataatagaaacacaaggttttcacttcatgcattagattagcagcttggaagggaagaggacaggccaaaccaggagtgggtagagccagcacctaggaagaggttccgttgagacttcagcaggcccaagccaggacgtagagtgtgactgtcagagagtgtcaggaggtgtcccaagtagcagattggtgtaggaagtccaggcgaaggtttgctggcagggagccgagggggctggtgaaagagcaattctggacatcagccacagaatctaagctgggtagggaaggaagagaagccaggatgggccagtcaactgggagaagtaggagggtagtaggactggaatgctgaccgactgtgtcagggagcaggctgactgcagtgagggccttaggaggtaggatggtgggaagtgcagggggagcagtcccagggcaagggatgccctggggtgga

SEQ ID NO: 545687 - DNA, 614 bp, Homo sapiens
actctttgaggctgtgagagcttgagtaagccatacaacctccatgaactgcaattttttttttcagctgcaatattatcttgagcttccaccccataagaggttgtattctggataaaataagtatccaaaagcatttttaaaataataaattataatagaaacacaaggttttcacttcatgcattagattagcagcttggaagggaagaggacaggccaaaccaggagtgggtagagccagcacctaggaagaggttccgttgagacttcagcaggcccaagccaggacgtagagtgtgactgtcagagagtgtcaggaggtgtcccaagtagcagattggtgtaggaagtccaggygaaggtttgctggcagggagccgagggggctggtgaaagagcaattctggacatcagccacagaatctaagctgggtagggaaggaagagaagccaggatgggccagtcaactgggagaagtaggagggtagtaggactggaatgctgaccgactgtgtcagggagcaggctgactgcagtgagggccttaggaggtaggatggtgggaagtgcagggggagcagtcccagggcaagggatgccctggggtgga

SEQ ID NO: 545688 - DNA, 614 bp, Homo sapiens
actctttgaggctgtgagagcttgagtaagccatacaacctccatgaactgcaattttttttttcagctgcaatattatcttgagcttccaccccataagaggttgtattctggataaaataagtatccaaaagcatttttaaaataataaattataatagaaacacaaggttttcacttcatgcattagattagcagcttggaagggaagaggacaggccaaaccaggagtgggtagagccagcacctaggaagaggttccgttgagacttcagcaggcccaagccaggacgtagagtgtgactgtcagagagtgtcaggaggtgtcccaagtagcagattggtgtaggaagtccaggcgaaggtttgctggcagggagccgagggggctggtgaaagagcaattctggacatcagccacagaatctaagctgggtagggaaggaagagaagccaggatgggccagtcaactgggagaagtaggagggtagtaggactggaatgctgaccgactgtgtcagggagcaggctgactgcagtgarggccttaggaggtaggatggtgggaagtgcagggggagcagtcccagggcaagggatgccctggggtgga

SEQ ID NO: 545689 - DNA, 639 bp, Homo sapiens
atccaagttcagccttttctcctgctccccatttcccaaggctgcaaacattcaaatctctaggatgctacttggatcagaactgaaaattacaaattaagttatcaatcagaggttgttgagcagctcctaaaagtttattgtgcaagttgtggggactcaaaagaagcataaaacatggcctttacaaaaactaawcgtctagttttaaaaagaaacaggaagtaactcatcacacaatcaatggtactcacttctagttttttctgtttttgtttttgtgtttttgagatagagtctcactctttcacccaggctggtgtgcagtggcgtgatcttggctcactgcaaccactgcctcctgggttcaagtgattctactgcctcagcctcctgagtagctgggattacagacacatgccaccatgcccagctaatttttgtatttttagtagagatggggttttgccatgctggccaggctggtctcgagctcctgtcctgtggtgatccacctgcctcggcctgccaaagtgctgggattacaggtgtgagccactgcatctggcatctcatttctagtttaaggggtgtttgtggaagaggagtctgggtggtggaggacggcatcataaaggc

SEQ ID NO: 545690 - DNA, 639 bp, Homo sapiens
atccaagttcagccttttctcctgctccccatttcccaaggctgcaaacattcaaatctctaggatgctacttggatcagaactgaaaattacaaattaagttatcaatcagaggttgttgagcagctcctaaaagtttattgtgcaagttgtggggactcaaaagaagcataaaacatggcctttacaaaaactaatcgtctagttttaaaaagaaacaggaagtaactcatcacacaatcaatggtactcacttctagttttttctgtttttgtttttgtgtttttgagatagagtctcactctttcacccaggctggtgtgcagtggcgtgatcttggctcactgcaaccactgcctcctgggttcaagtgattctactgcctcagcctcctgagtagctgggattacagacacatgccaccatgcccagctaatttttgtatttttagtagagatggggttttgccatgctggccaggctggtctcgagctcctgtcctgtggtgatccacctgcctcggcctgccaaagtgctgggattacaggtgtgagccactgcatctggcatctcatttctagtttaaggggtgttygtggaagaggagtctgggtggtggaggacggcatcataaaggc

SEQ ID NO: 545691 - DNA, 618 bp, Homo sapiens
tgttcttacaacttgagaatgtgttaacttggtagaagttaaaaggtgttgaaaagcagccttattatcttcataacagtgttatggcctgaaatttcactcacctggttctccaaaacaacttattgccttaaagaaatgctctgggcaaaataagagcatcaacctgctatcaagggtcagctgatagacacctgagagcagaaaggggacaagggtggggttggagccgaagggaacagaggacgcaggagtgggacaaaacctccacatctgaggccagccccacracgactctgctggggaagaatggtgaagaagaccaggctgtgtgcaaaagccagcccggtatgtttcagagccacaagctctctaaggacagtagtcaggttccggtccattcctccaccacctgtgctgccccaggccctcagcagccattacaaacaggtagttaatggcaatccttcagatgtgtgggttgagggcacctcactatgagcccttgtatttttcaaaactcttcccaggagaccacgacactagttgagaggcctgctgggttctcgagttagcccagcaaagggcatgctttactagtatagatgataacttcta

SEQ ID NO: 545692 - DNA, 495 bp, Homo sapiens
tttcctccggagcagatggggttcagccaccaattcacccagcgaacttttctccacggtgagtctccccaagtcctaccccaaagtggcaccgtgtggactgacactggattgggtaaacctggtctactgcacgccgtcagcagatattagctgtcactgttatattcttgatggagtctccctcgagagggctgagttcaaggactctgaacaggacagaaccatggaaggyaatgggggctgtccatgccatcctgccagctctcctcctgcaggaagccctccctgaccacccctgtccccggggctactttaagactccagaggtttcaccatttggcttttggtgggctggcttcgtggtctggggttgccaggctcaaagtttttgttcggctgctgaacaccaaggcctacaagccctctccttttccatccctctcagcttctgtacgggggcctccagccccatccagaaatgccctggcctaa

SEQ ID NO: 545693 - DNA, 551 bp, Homo sapiens
tttcctccggagcagatggggttcagccaccaattcacccagcgaacttttctccacggtgagtctccccaagtcctaccccaaagtggcaccgtgtggactgacactggattgggtaaacctggtctactgcacgccgtcagcagatattagctgtcactgttatattcttgatggagtctccctcgagagggctgagttcaaggactctgaacaggacagaaccatggaaggcaatgggggctgtccatgccatcctgccagctctcctcctgcaggaagccctccctgaccacccctgtccccrgggctactttaagactccagaggtttcaccatttggcttttggtgggctggcttcgtggtctggggttgccaggctcaaagtttttgttcggctgctgaacaccaaggcctacaagccctctccttttccatccctctcagcttctgtacgggggcctccagccccatccagaaatgccctggcctaaaaaagcaccctgcctgttcttccatgatgaaatcaaaggtcacagacattcaggca

SEQ ID NO: 545694 - DNA, 597 bp, Homo sapiens
ggtttagccttgtttccttgcccagtcttcatgggaatttgtaattccatcgctcttctcaaagagccaccacgcaactcagttggtcttcatttgcaagttcattgatttctatcttattttcttcatattactttgattttcattcaattctatttctttatttatacactacttttttggttattaatattttaagtaaatatcaacttatttaattatatgatattaawttattctgtagaaaaacatgctctttctttccatttattccgaccattgttattttataaagtttgttggctggtacttttatgtatttttgaattaaaatgcagtagaatggattttagaacatgtatgtacggttatgagtcttaagcaaccagaccatcaggatgcagggaagcccttccgtcgccacgaacgtctccctgacatcacccttcatagttacgccctcctcgctccctaatccattctcgccaccatcatcatccttctcaagagtgtcatacaaagagaagtttaggatatgtaagctttcaaggctggtttctttcactcagcataattcttttgaattattccaagtcg

SEQ ID NO: 545695 - DNA, 536 bp, Homo sapiens
ggagtcctgacacagggacctccaccctccacacggggctcagcccacagaggctgccgcaccccgaagctgcaccctgcagccctcacactggcctgtgtctccccattccracaccaatcaatagccatctgctaagaagggaaagtgcagacaggtgtgctgggcgcataatggtgctgtggccgtccctcccatatgggcacctcctggggtgtccgatttcctcactcagttgcccggctgcctcccccaggaagtccccctggatgcccttgcccagggcgagtgagtttccctcccttggggcccctcactctggacatgtgtcgatccacccctgacagtggccctcagctttcatgtcccacccacagggactcgggatccctgaagacagaggccacattcaattcatctcagtcccaacaccaagcacaatgtctgcagaaagcagtgactcaatacattttttgtttaatttgcccaatttggtcaataaaaaaaagaactattatcctgcactagaattccca

SEQ ID NO: 545696 - DNA, 514 bp, Homo sapiens
tgtgatcaagaatgtttcacagagsagaagacctttaacatttttagctcattcttggaccatggaaatattttgacagagagaggagggaaaaattatcaggtttaagtgaaaatatgccagtgttatagtgtttgggtatttgaggaacgaggattggtttaatgtggtcatgacatatcactgggagtggctggacaccaggccaatgacttatttttaagctaatttctacgtgttgctagtgggaaattgaaaagggtgtcaggaggtaaataagtgtatataaataaagccaaactattttattgatctatatccacaaaatctgtgaaatcagaagagtctgttctcctgaagacctattttatactggataccaggcagagaactggtacataattattattggctcaactgctttagacctaaagtataagttatctattgccttacgtaatgcagcataacaactcacttcctgttttacctatctccatcaaacaaaaccgta

SEQ ID NO: 545697 - DNA, 649 bp, Homo sapiens
ggtaaatgaaaaatctaagaataattggtgttcccaaggaagaagagaagtctaaaagtctggaaaacatatctgagataataaytgaggaaaacttccccagcctcaatagatacctagaaatccaaatacaagaagctcaaaagacacctgggaaattcattgcaaaatgattataacccaggcacttagtcatcataggttatctaaagtcaagataaaggaaagaatcttaagagctgtgaggcaaaagcatcagataatgtataaaggaaaacccatcattaacagcagatttcttagcagaaaccctataagccaaaagggattggggtcctatctttagcctccctaaacaaaataatttctagtcaagaattttatatgcagaaaaactaagcttcaaaaatgaagaagaaagaaagtctatttcagacaaatgcttagataattcaccactaccaagccagcactataagacatgctaaaaggagttctaaatcttgaaacaaaacctcaaaacacaccaaaatagaacctcctaaaagcataaatcttacaggaactaaacaataacacaacgagcaacaacaacaacaaaaaccaaggtattcagacaacaactagcacaatgaataaaacaacacct

SEQ ID NO: 545698 - DNA, 649 bp, Homo sapiens
ggtaaatgaaaaatctaagaataattggtgttcccaaggaagaagagaagtctaaaagtctggaaaacatatctgagataataattgaggaaaacttccccagcctcaatagatacctagaaatccaaatacaagaagctcaaaagacacctgggaaattcattgcaaaatgattataacccaggcacttagtcatcataggttatctaaagtcaagataaaggaaagaatcttaagagctgtgaggcaaaagcatcagataatgtataaaggaaaacccatcattaacagcagatttcttagcagaaaccctataagccaaaagggattggggtcctatctttagcctccctaaacaaaataatttctagtcaagaattttatatgcagaaaaactaagcttcaaaaatgaagaagaaagaaagtctatttcagacaaatgctkagataattcaccactaccaagccagcactataagacatgctaaaaggagttctaaatcttgaaacaaaacctcaaaacacaccaaaatagaacctcctaaaagcataaatcttacaggaactaaacaataacacaacgagcaacaacaacaacaaaaaccaaggtattcagacaacaactagcacaatgaataaaacaacacct

SEQ ID NO: 545699 - DNA, 493 bp, Homo sapiens
acattcaaatgcttcaccttatctcactgaatcttgaaaatggccctaggatctggagatggctttctatctgtggatataaatcaggaaacacagagacagacattgatgtcacttgtcaaagtctccagagagttaagtggtcaggtcaatatcaaagtcaaagcctgcttccagaggttaactcaatatttatgctattaagctaaattataatgaatttgtgggctttatgggttaaaaatggcaatttcccaaaattcagccttgcrtactaaagagagcagtattgtgtaaaatacccgtggaataatagaaaaagcactcaactgaaacaaggaatctggaatgtagtccaaaattattaactccatttttttttcttttttttttttttcttttttaagaaacaggctctcactatgtcatccaggctggtcttaaaactcctgggctcaagcagtcctccttgcctcagtctcccaagtagctg

SEQ ID NO: 545700 - DNA, 574 bp, Homo sapiens
tgctcgggaggctgaggcgggaggatcgcttgagtccaggaggtcgaggctgtggtgagccatgattacggcactgcactccagcctgggaaacagagtgagaccctgcctcaaaaagaaaaaaacaaaacaaaaccaaaaaaagcaatgttcccaaaagagaattaatgtcttctgttctctctcttaagaatccagggcctgaaaacccagaatgaacttgtgtccatcccagagatcactgcagatgtcatgaggtaccctttgtgtcaccagctcaagcaggcctctggccactttatcatctgtggtggtcctgtsccgtgaccaggaggaaaaattagctctttgaagagaaagtagttctctattgcaggcactggcctcttaaattgttgcaggtggggaatggatgagaatatttgttttgggtgatcagaactgagactcctattgtggattagtaacatgcctcctcctagaacaagggagggcagggatcgccgagaccaccaccgggctcccagcgaggaagaggccttggagaaatgggactggaattgtccagagacgc

SEQ ID NO: 545701 - DNA, 354 bp, Homo sapiens
gaatgattggatgaatgaatgaatcatctgtttctccacttccattctgtggtctccrgccaacattccctcccatttacctctcattaaactctttttgcagcagcactttctcttagttcttcctgtcatttgctagacttcagctttgtgatctttgggtcagacaccatgatgagagatgcagatcgcaactgagcgtcatttaaatattcagaagagctgaggctccgcaggctgaattctgaatatgcagataattcagaaaacactggagcaatagacttgttgaattcaaactcgaggtggagcagacgagggtacagctcggcttaggtgacccatcgtccccat

SEQ ID NO: 545702 - DNA, 354 bp, Homo sapiens
gaatgattggatgaatgaatgaatcatctgtttctccacttccattctgtggtctccggccaacattccctcccatttacctctcattaaactctttttgcagcagcactttctcttagttcttcctgtcatttgctagacttcagctttgtgatctttgggtcagacaccatgatgagagatgcagatcgcaactgagcgkcatttaaatattcagaagagctgaggctccgcaggctgaattctgaatatgcagataattcagaaaacactggagcaatagacttgttgaattcaaactcgaggtggagcagacgagggtacagctcggcttaggtgacccatcgtccccat

SEQ ID NO: 545703 - DNA, 579 bp, Homo sapiens
gtatctcttgcccctgctctgggctccagctgaggcgcccagcagttctatattctatgcatggaaatacagataattaatgtccactggggcaaggccatgggggacaggagcagtggttacaggcctccctctctcctccctgtagaggaacattctgaagacgctccttgaagactcctcaggaggtctccagtcgcccacatgggtgaccctatcaagaatttctcccggcatcagccttctgtccttctctgtgtcactcctcccagtaccccagtcctgctcctagaatcacttcccaaacaaatcctctgcctgggagccttgcctagggctctcccttcaggggaactcaggccacagcagcctacattagacagcatgaaggctctgggcttttgtgctaagagtaataggaagccattgaagacatggaagccggtgtttgatgaaatctgtgtttttatgggtcaacttggcccaatgtggaggaagagctggcctagcggcaagggctgtrtatcagcgaagaccattttggaagcttttgcaggagtctgggcgaagtgagaaggc

SEQ ID NO: 545704 - DNA, 520 bp, Homo sapiens
ggtgaaatgagttactcagaaagaggcagagctgggcttgtagctggacctttctggttcttgttttgtttcattttctggaccatcctgtttcccctaaaggaaatgatttcctgaaatttctcaagtattctgaaaatstaattttcttcctcactttctccctgttggctcaagatgaatcacaaaactccaaataccatcagaatgtgttgcccaagtcccacctgttctatggctgatggccacagggagctgggtatggctgggctggttatgaccaactgtaaccccatcaaggattaacatgctcctgaaacagaccccatgtccagaaatttgcaaaacctaccctgaaatgttgacatcatagagtgtgccccaatgtcctgtccagatttctgtccctcccatgagctggagaggatatttggcatcagacagctggaaatcactttccccagtttttggcttcatgactcagttttcttgcttgtagaataaagctaatcatagaatt

SEQ ID NO: 545705 - DNA, 520 bp, Homo sapiens
ggtgaaatgagttactcagaaagaggcagagctgggcttgtagctggacctttctggttcttgttttgtttcattttctggaccatcctgtttcccctaaaggaaatgatttcctgaaatttctcaagtattctgaaaatctaattttcttcctcactttctccctgttggctcaagatgaatcacaaaactccaaataccatcagaatgtgttgcccaagtcccacctgttctatggctgatggccacagggagctgggtatggctgggcyggttatgaccaactgtaaccccatcaaggattaacatgctcctgaaacagaccccatgtccagaaatttgcaaaacctaccctgaaatgttgacatcatagagtgtgccccaatgtcctgtccagatttctgtccctcccatgagctggagaggatatttggcatcagacagctggaaatcactttccccagtttttggcttcatgactcagttttcttgcttgtagaataaagctaatcatagaatt

SEQ ID NO: 545706 - DNA, 494 bp, Homo sapiens
accctcatctccctactgtcctccactgtgcacataatgtcattctggatgtygtaaaaactggaaatggtcttgaagaagctgtttagtaaatggtagcacatgcattccacagaacactacgtagccatccaaaatggtgccggtgaaactcaaaagataggaaaatattaagaaagcaaaacaaggcagtttgaacatgaaaattgcaatgaacattcctgtaaatcacattggggtagaaacaaagaaaaatataattgcaacgaatgcaaaagtgcatacgcactccagaggtttcggccacactccccactttcaggcgtttacagttccctctgccgggaagccttttctatccagatctttgtgtggcagacctagttttaatccttcagatattggcttatgggtgctttccaatatcagtgaccaattctctgattatctggataccaactgggtgttcaacaattcagttcagttctgacacc

SEQ ID NO: 545707 - DNA, 519 bp, Homo sapiens
ggcaccttctgccatttcaactgccacttccacaccacagctgcttgtttactctctgtccacccyagccctctcatcatggtgcacctagccttcagcccagtacctggcatacggtacatgtacaataaacatctgaggactaacagaatgaagggataaatgaacagccattagaaatggacaggacaccatccacccatgtctcctgacttccagttacctcttcagcttcttcctctgagtcaaccacagggaagtcttgcatggactgagtggtgcgctcggatccataagcccccacagcaccttttccctttctctgcttggcttcaattgggttaatgatacctgaggaatttcagcaaaaaaaaaagagagtcttacgatcacagcaattcatgtatgtgaatcagccactcagtgaaatgacagtttcttgctccttccacaaaataacatgctactcaggaaggagagctattctctgccctcagaacactactcttgtcccttgtg

SEQ ID NO: 545708 - DNA, 432 bp, Homo sapiens
ctaggttgcaaatctgcccttctatccttgatgacagtgtttgaacctgtcctggcctctgtcctggctgcagccccagcgagggtcccctcctaaaggccagccgccgttgtccaaggcagacaatgtggagtagccaggcctctccaggccttttcatcccattcaaaggcctgcgcggcccccaccccctacggcctcaattctttaattcttttcagaaattctcctttcccagtggtcaggggccagcatgcccctgctgggctagcaagagcagttgacatgggcagggctggaggacggaggtggttgaagcatcagaggccaraagagcagttgtctgagacaggggtggacgtgtggcagatgttacagccaccacctattgtgtgcagacaacagttagcctgagtcggctccgttacctgc

SEQ ID NO: 545709 - DNA, 432 bp, Homo sapiens
ctaggttgcaaatctgcccttctatccttgatgacagtgtttgaacctgtcctggcctctgtcctggctgcagccccagcgagggtcccctcctaaaggccagccgccgttgtccaaggcagacaatgtggagtagccaggcctctccaggccttttcatcccattcaaaggcctgcgcggcccccaccccctacggcctcaattctttaattcttttcagaaattctcctttcccagtggtcaggggccagcatgcccctgctgggctagcaagagcagttgacatgggcagggctggaggacggaggtggttgaagcatcagaggccagaagagcagttgtctgagacaggggtggacgtgtggcaratgttacagccaccacctattgtgtgcagacaacagttagcctgagtcggctccgttacctgc

SEQ ID NO: 545710 - DNA, 552 bp, Homo sapiens
ggcaaagtgactttttcagaatcatagcagtaaatggtagcattaggaagctaagcctgatcatcctgttcttgtcctgttgaggagatagtgagagcaaaggaaagtggcaacaatgaaggaataaaacccagctcgtccccctgttcctcatgcccaacccttgccaagacttcaggtaacagaaggaagagaacacatggatgggcacatgctgggcccggaagagctgtgcatgtcccacagaccacgagtgtggagcccatggccgtgtgaagggggtggggtcccagtcctagaagcaggatcatggaagtggccttggaggacctgacgaggaagcctatgatcttccaggtacttttaggtgatgtggatttagacactggatgtggctgtgaagcgggcttttgcttttttggttgtccggcatccatttaatcacgccccagcttcctgcttgggaacttccactaacgctgtcagtccatggacttctagaggagctgaatctaccrctggctcaggaacaggaacctgacctgggcctaa

SEQ ID NO: 545711 - DNA, 357 bp, Homo sapiens
tttgacaagcactgtgacagaaaagcagcccaagtattggctggtcatcaccctgaagttctgagcactgggcacagggacccctgagagtgctttctgacagagtcaccagcctcaccctttttggggggtacacgctctatatctctccttctgtacaattctcatggaaaggrgaatttgtagtgaggcacagcatgttcaccaatgtcccagttggcctgtcatgggtgtatgtactatgccagctccttagcggtcagccagatgtgtactgttgacaacatgtgaaattttctcctgatataaaatgataattttgtatatattacactgttttttgatgttgtcaataac

SEQ ID NO: 545712 - DNA, 369 bp, Homo sapiens
tgaatctgcgagggctcaggaaaatggtgtctgtctttgctgaagccacattcctattaatggaatgaggcctagatggtagcttagatcagaggttctaaattggtagcccatggaccaaatctctcacaagttggggctggctcgccagtgttttaaaatttgattttagtgtttttattcagctctccaaagcccttgctgttggctattgttttacacttgcccatctcacactttacctactattctattcagctccctgggacttttgggtttmcaagtcctaacttagaatgaaaaatgaagacgaaatcttgccagaacctcaatatctctgactccgagacaagtccaggcaacgtaact

SEQ ID NO: 545713 - DNA, 466 bp, Homo sapiens
atttacatcaagggaatgacctttttaaaactctttaaacgtcacaataactagggaagcaatatgtctgaataatttccttartaattctcaatactgtatttactatcaaagttaatcttaacaaagttctcaggctggcaagaacatagcagtattctgtcctaatcacagttactgtattttttaaccctaaattgatgcataagctgaggaagacagaatctaatttcggtcatataagactactttgcacataattatattttttgacattggataataagagggttattctttgaacttttctaaataattttatggagaagagacaaacataacttatttttaaataaaaataatactagtcctaactaataggcctgagccagttcacaaaggttaggcaaaactactaatgaaaccatagcaacttcaagtacagctattatgtgtaaatggttac

SEQ ID NO: 545714 - DNA, 452 bp, Homo sapiens
tttgcctttttcatctccttaaagataaatccaaatccccaacaaatgaagttattattttaaagtgaggtttagctagtgggaatttttccatagaatattgatttatataactaatttctacattaattttaaaaaccttttgtagtatgaatatattggtattggtttcctttgttaaatctacttctattataaaaatgattatattgttggaatgctacttatctgttagctggagggagaaacttcttaggtatatggaagaattatgcatattttgttttttccaaccatttgtattggcaacaagacctgcttagycatacaggataacatttataatagttaaattcttaccattgaccttgcagctatgtaaatagcttcacagtttaatgtaatacaccaagtgagagaagccatctgaggagagttgaggcaatgggcca

SEQ ID NO: 545715 - DNA, 606 bp, Homo sapiens
agtttcattggctcacggttgtgcaggcygtacaggaatcatggtgctgacatctgctcagcttttgggaaggcctcaggaagcttataatcatggcggaaggtaaagagagagcaggcacatcgcatagcaaaagcaggagaacgtgagagagattggggttgggagggggaagtgccacatgcttttagatgacctgatcttgtaagaactcactcatcatgagggatgttcttacaagccatgagggatctcaccaagccatgagggatctactcccatgaccctaacactgcccactaggccccatctccagcattggggattacaattcaacatgagatttgggcagatattcaaacaacgtcacagaattcggtaagaaaatttgatttttcagtgagggctagacaaaaggagtgccaagtgggtaaatgagttgtgactcatctgatgatttttatttatcttggaaaaacacctaacttcttgattctagcttctgttgtggcaattactttccgtatttgtcaagaacttttaacatcaaggttttcaagtttggttaaatataaaattctttcagtaatgatcagccgcttatat

SEQ ID NO: 545716 - DNA, 551 bp, Homo sapiens
agctggacgcaaatcatgacccaatggtccagtcccacaaaccttggcattttaaataaaaattcttctgagagtttgtgccaagaaagtatcctgctatttttttttttttttgaggaggttgggggtggtagccgaggaagcattaattaagaggtaattgttgtttcttccaactcaataaaggcttcgtatttgytctctacagaaatactacatttcttacatacaattacataggctaaattctccatgaccaataccacatgtaaaatacttacataattagaagaaatagagaatttcatgtgaaataaaataggcctatcagatagccacaacaaaggcttggaaacttaggtagccagcatttccccgtatatcagaccctagagtcacctgaagatctcacctccccagatccgtgaatgtgcctctgcctctgtgaatctttgccccctactttcattgcagttttctttaatgcttcccataggcagtcaaaaaaaaaaaaagcagtgaaagaattaaaccaggacctaggattttct

SEQ ID NO: 545717 - DNA, 603 bp, Homo sapiens
gacccaatggtccagtcccacaaaccttggcattttaaataaaaattcttctgagagtttgtgccaagaaagtatcctgctatttttttttttttttgaggaggttgggggtggtagccgaggaagcattaattaagaggtaattgttgtttcttccaactcaataaaggcttcgtatttgttctctacagaaatactacatttcttacatacaattacataggctaaattctccatgaccaataccacatgtaaaatacttacataattagaagaaatagagaatttcatgtgaaataaaataggcctatcagatagccacaacaaaggcttggaaacttaggtagccagcatttcccygtatatcagaccctagagtcacctgaagatctcacctccccagatccgtgaatgtgcctctgcctctgtgaatctttgccccctactttcattgcagttttctttaatgcttcccataggcagtcaaaaaaaaaaaaagcagtgaaagaattaaaccaggacctaggattttctcagagcagaagcccgagttctgctcactcacagcccagttctcagttctctgggtaacactgactaaat

SEQ ID NO: 545718 - DNA, 300 bp, Homo sapiens
gccttgatcagagagagaattcaggttaccaagacggaaggtgtcttgaagagatcctgaaaaataccagcactttttcatggcttttaggttattctgctttagtgcatccagactggtrgagtcggagggaggaagtgaggaagggtcaaggatggaagagttctttcacttaccctttttattagtcagcttttaaagtaattgttttactgagccttctgactatgccttgttctcttttgagatatatattttcacagtcttttctagatatattattgttttaacttaacaaat

SEQ ID NO: 545719 - DNA, 515 bp, Homo sapiens
taaaaactattcatatttccaattgtattttaaaccaaattaacttttaaaaaatgcaaacacattcaacaattctttatgtaaatgatttgtaactttgtatgcctttagataaattatattagggattttaagtattgcatagtcaggagaggctggaatttacaaggccatataattggtgtgtaggaaagaaaaaactttacytcttcctttttagggttgttttttggctggacctgagaattaaattgacataagatagattaacaagagaaaaggatacaaatttaatacaagttgtatgagtttgtgttaaaagctcatacaggttttacatggcacagaagcttttgtaaggaaatgaagacctaaagaagcaattaaacagtttatagtgaattggacaaagaatagtaagttatgaaaaggcaactaaattgtgttggaagacttaaagacgagttattttaataaaggcttgtacagaattctctctgcctcgacatcttgtc

SEQ ID NO: 545720 - DNA, 515 bp, Homo sapiens
taaaaactattcatatttccaattgtattttaaaccaaattaacttttaaaaaatgcaaacacattcaacaattctttatgtaaatgatttgtaactttgtatgcctttagataaattatattagggattttaagtattgcatagtcaggagaggctggaatttacaaggccatataattggtgtgtaggaaagaaaaaactttacttcttccyttttagggttgttttttggctggacctgagaattaaattgacataagatagattaacaagagaaaaggatacaaatttaatacaagttgtatgagtttgtgttaaaagctcatacaggttttacatggcacagaagcttttgtaaggaaatgaagacctaaagaagcaattaaacagtttatagtgaattggacaaagaatagtaagttatgaaaaggcaactaaattgtgttggaagacttaaagacgagttattttaataaaggcttgtacagaattctctctgcctcgacatcttgtc

SEQ ID NO: 545721 - DNA, 515 bp, Homo sapiens
taaaaactattcatatttccaattgtattttaaaccaaattaacttttaaaaaatgcaaacacattcaacaattctttatgtaaatgatttgtaactttgtatgcctttagataaattatattagggattttaagtattgcatagtcaggagaggctggaatttacaaggccatataattggtgtgtaggaaagaaaaaactttacttcttcctttttagggttgttttttggctggacctgagaattaaattgacataagatagattaacaagagaaaaggatacaaatttaatacaagttgtatgagtttgtgttaaaagctcatacaggttttayatggcacagaagcttttgtaaggaaatgaagacctaaagaagcaattaaacagtttatagtgaattggacaaagaatagtaagttatgaaaaggcaactaaattgtgttggaagacttaaagacgagttattttaataaaggcttgtacagaattctctctgcctcgacatcttgtc

SEQ ID NO: 545722 - DNA, 643 bp, Homo sapiens
aatctatgatgtgattagttacctgcttcttctattactgctcctaacagtttaacgttaaactattcacagcacatatacttgtagctataaatgtcatatgaaattttttttaagagatagggtcacactatattgcctgagctggtctcgaactcctgggctgaagtgatcctcccatctcagcttgccaagtagctgagattacatgtgcaagccattgtacttgatccaaaaattccaatgactagaaayacaactttaaaatgttaccattaagatcatttccattgggtagaacgtgcactagtcgggcaagaggtacactaaaagccaggcttcactactttacaattcatccatgtaaccaaaagccacttgtacccctaaaactattgaaatgaaaatattttttaaactaaaacagtaatttccaatgactgtattaactcaatttttagagcatgaaaaaaattagatcaagccatatgaagtagtttatcggctataattagatttatatcttcattgtgggaattgaaatttctattcacagtactatactttggatttacaaactgtaaaactgagattcctgtaccacaaatattttgtgaataaaataatttgaattcctataaaa

SEQ ID NO: 545723 - DNA, 643 bp, Homo sapiens
aatctatgatgtgattagttacctgcttcttctattactgctcctaacagtttaacgttaaactattcacagcacatatacttgtagctataaatgtcatatgaaattttttttaagagatagggtcacactatattgcctgagctggtctcgaactcctgggctgaagtgatcctcccatctcagcttgccaagtagctgagattacatgtgcaagccattgtacttgatccaaaaattccaatgactagaaatacaactttamaatgttaccattaagatcatttccattgggtagaacgtgcactagtcgggcaagaggtacactaaaagccaggcttcactactttacaattcatccatgtaaccaaaagccacttgtacccctaaaactattgaaatgaaaatattttttaaactaaaacagtaatttccaatgactgtattaactcaatttttagagcatgaaaaaaattagatcaagccatatgaagtagtttatcggctataattagatttatatcttcattgtgggaattgaaatttctattcacagtactatactttggatttacaaactgtaaaactgagattcctgtaccacaaatattttgtgaataaaataatttgaattcctataaaa

SEQ ID NO: 545724 - DNA, 394 bp, Homo sapiens
agtgtgttagcttcctgtggttgctgtgacaaatcaccaccaacttgatagcttcaaacaacacagatggactctgtcctagctctggaggtcaggagtctgccgtctgttttaccgggctaagtcaaggtgtcagcagggctggctcctgctggaagcactgagggcaggattctttgtgttttcaagtgtttgtatttttcttttttcttttcttttctttctctttcctttctttcttyctttctttctttctttctttctttctttctttctttctttctttctttctttcttctttctcttccttccttccttctctctctttctcactttctctttctttcttttctttcctctctctctttttcttttctctctctctctttctctc

SEQ ID NO: 545725 - DNA, 641 bp, Homo sapiens
tgtagatggagtgctttggatgtgttggcaaagggaactacagccagggtcagcggggaggggttccaatagttagcaagaagacatgaggtccaaactgtggtggaggatgggaatgaaaaaagagcaaaagagccaatgggaaacaaaggaagaatgatcaggatcattactgatcatgaaactgacccaatagtcccacagagagttttttttttataaacatggaaattggcctttctggtcttaaagcttgaaacttatatttgttttatctgagttccttcctcaagaaaggatccctaggccttcaaaagtatcagagaactgaaactcacagattgccacatgcagacaatgaaatacattcaagatgattgtttctttgcccctccctaactcctgtttgcttactcattgttacatttcttctctgctgtataaaaacccctagttttagttgatcagggagatggatttgagactgagctcccatctccttggctgcagcacccgattaaagccttcttcctyggcaatactcatcatctgagtcattggctttcagtgtggcgagcagaaggacctagaccaaacccctggtgttttggtaacagtcaggttgctgaaaggtccaaaac

SEQ ID NO: 545726 - DNA, 555 bp, Homo sapiens
gctttaatgacaacctacgcatcttagaagacattcagacccactccactctgcacagttgtttctgggcaagccctctgatatgatttagtgcacgtgtggctgggtgtggagtgtgtgcgtgtgtgtgggtgcrtgtgagtggtgagtgcgtatgcacagggtttgatctctgagatgttttatactctctggcttggagaagggacagtcctgtagtatcaagaccagaccttgtgtccccagcccaaggctgccctgggcctagggacagtatttggagacttcgctggcagttttgcgttggaatcacctggtgcctccctgtacgtccacccaccctgtgcccagatccccttcgcaagcaccatatgctgttagatcctcgagcagccttgtgggacagccaccctggggctggtatcaccatttatgtaagaaaaaaaaggaagtgctggcccagggtcccacagccagcaagttggagctgcactgcccaagcaggtcctttagtcagctctctgttgtcccccaagcccctcagccccccaggca

SEQ ID NO: 545727 - DNA, 555 bp, Homo sapiens
gctttaatgacaacctacgcatcttagaagacattcagacccactccactctgcacagttgtttctgggcaagccctctgatatgatttagtgcacgtgtggctgggtgtggagtgtgtgcgtgtgtgtgggtgcgtgtgagtggtgagtgcgtatgcacagggtttgatctctgagatgttttatactctctggcttggagaagggacagtcctgtagtatcaagaccagaccttgtgtccccagcccaaggctgccctgggcctagggacagtatttggagacttcrctggcagttttgcgttggaatcacctggtgcctccctgtacgtccacccaccctgtgcccagatccccttcgcaagcaccatatgctgttagatcctcgagcagccttgtgggacagccaccctggggctggtatcaccatttatgtaagaaaaaaaaggaagtgctggcccagggtcccacagccagcaagttggagctgcactgcccaagcaggtcctttagtcagctctctgttgtcccccaagcccctcagccccccaggca

SEQ ID NO: 545728 - DNA, 569 bp, Homo sapiens
aggctcaagcaagtctcccctcctcaagggaaggctctgttcttgatgggtccctgttcttatacccttaatgcctaacggaagcactccttcaagacacagtttaatcttcctaacttggtggaccaagatgctgtcctgtgaccctgasaccctgaagccggaaggattgtcttagattcccaaagggcagctgcttctcaaagggttactactgtcatccgcccttggtcaagggcatccttagtgagggtgggaatttgaagaagcagtcacattttgtgtatttgtgtttgtatttctcatccttatgtcacagagcatccttgtgtggtgccaacacccttgtgtggtgggtatcatgggcgataccactgccaggtgctttaaaggcagcagctcgttcgatactgacacagccctctcagctaggatttctttgcatcatctccttttgctgatggggaaactgaggctcagagaggttgtgtaatggagccaaggtcacatgtcagcaacagcagcagaaattgctggcagagaactatgttcagactcccttcccttca

SEQ ID NO: 545729 - DNA, 595 bp, Homo sapiens
aggctcagaaagccaagagggcaaagccatggaagtgtggggaggcagagggtgccaggggtgccggctgtcccaggacagcagcsaggaagggggtctctactcctttctcctcctcctggtggacgatctcagaccctgtaggtcccaggaggggagggagaagcttgattctctgagcctgaggtctctgagggcagaccctgtgctaccctcctcacaccctaggagcaggtgccagtctgggaagctctgagggcttttccttttcagaatgggtgggggtggctatgtctcagccttcacagttgatcagtgacacagaccctaggcctgtggtccctggtcaggaagttgtgctgggggcagggaggggcctgccctcaggtgctggttggccttggtggagagtggggagtgctaggggctgggaagactcccctgggtcccagagggaagggctgtggaggtgcttgactttcccacctcattgtgatgcgtccaggtgtgagatacacgcacctaactacccctttgaagggatagggctggcaactcgcaggcctcagaatgagggcacacagtagccctaggg

SEQ ID NO: 545730 - DNA, 451 bp, Homo sapiens
tgcccttcccacacctgctgggcagtgaccttcacctccgctcactgtggccacccacgccctgggccctgtcatcacttgaaggttccaactgcactccgagatcccgctccctgaccacttccgacgccgccaggcctctcacgcctccgtcccaccacaccccctgacctcgtcctgatctcagmtccctgcactttcctgtggacaccagccaccccgggtccccatctctgggcctccggaccacaggggacatcatcccagccacactcttgccagcgccctcacatgcctggcccttttgtccttccgccctgctcatccgcagcactcaagccagggatttacacagcacctgtctccgccatcccatgctagcctccacactctggtgggagagagcccacaccaaggatgtttggtgcctgcaaagccatggtactcagag

SEQ ID NO: 545731 - DNA, 451 bp, Homo sapiens
tgcccttcccacacctgctgggcagtgaccttcacctccgctcactgtggccacccacgccctgggccctgtcatcacttgaaggttccaactgcactccgagatcccgctccctgaccacttccgacgccgccaggcctctcacgcctccgtcccaccacaccccctgacctcgtcctgatctcagctccctgcactttcctgtggacaccagccaccccgggtccccatctctgggcctccggaccacaggggacatcatcccagccacactcttgccagcgccctcacatgcctggcccttttgtccttccgccctgctcatccgcagcactcaagccagggatttacacagcacctgtctccgccatcccatgctagcctccacactctggtgggagagagcccacaccaaggatgtttggtgyctgcaaagccatggtactcagag

SEQ ID NO: 545732 - DNA, 634 bp, Homo sapiens
aggacctgaggagttgatttactaacaatagtgttacataaaaaatggcgtttgagattataatgttaatggctgcggtcgctggggaatgcgcccgcttccaactaattccatgtaacttgttttttttcctcccttttcctccctccctttcttccaggctccgtctttgcagggattcaaagccttcgcggtgtttaatttggtggcaggctccagtaggctaagaccagaagttctggagcttggggttgatgctcttgttctgggagtgtttgtggtgacatattggggcctcgacagcaaggttggcctctgtcccacaaggacgaggactaggatgcggggtccgagcaccaagtagccaagctgaggagcggagggagamggctgcacccagaggaagccctccctggcctgcaggagactggacctccctagccagcggctgcctcgcgccttgggccgcgccaggaggctgccctgcctgcctggaaagggccctcccagcttcctgcggcctctagctccccggccccgcaaggaccaggccctattttgctccctactcgccctcctaggccagctttccacccagcagcctcagacccggggacgctcgcttcccgcccaa

SEQ ID NO: 545733 - DNA, 639 bp, Homo sapiens
tagagccggcagccctccccagcccggggaggggagagggttatgcgaccccacctctggctagggccggggaggcctttgcttcccgggagccctgcccgggctccttggtcgcagggctgctgggtcccaggcaggaacgasagggtgaggcccacatgtggcccggcggcccagggcggcttgcagcgtcctcactgtcccggctgccaggggctgcggcgacgcggccagtcagcagcgagttcaggtcgcgcagattttattgatgagctctgactttcagcactttccctaagtcaagaagagtctagcgtacccttcggctgcttcatttcagcctccctgcctcagctcttcagccctattccccctcgccctgtcctggggtgtgtacagcagcccaggccttccttctccttcccggctccgtggcccgaagccgccgagagagctcgggacagcgcaggaccaggcagccgctcgctctcctgtcaccttaactgcaggctccgaggggcgcctttggagtgtactgaggtgtgtcctaatcgtgcggcattcaacaaatggacttctggtgtgtggtcagaagagaaaagccatttacttactttcctccccggttttctggcaaca

SEQ ID NO: 545734 - DNA, 473 bp, Homo sapiens
cttatttagcaatgtcaggaaagagaattgtcccaggagtagctacatttactagggtctctgaaaatgaactgcccccattattctactctgttacaacctttataactttatacatttaacaaacgtgttttcttttattcctgctgwgtatttaaccttggttttccactcttcttctttgtgtcacgtttatcacagactcctatttccggttttgtggtcttgactagataaactgatcatcactcctaattgaaattccctttacttaataacctggtttcaatgttctctattcttggactatacccagatttttgtttaattcattcattgtggctctacagaaagctcttgaattcctttccctcatagaaggtttttactgacaaattttgggggtgaaaataagcaagttcattactaacaatgagaaaattgagtaggttttaagatctaagctatgtgtt

SEQ ID NO: 545735 - DNA, 611 bp, Homo sapiens
ctgggtggactctgctgtgtctcctgtcaagaatctcctcagcttaccttggtttttcctttttaaatactctctggtgttttcctctccagtgggggctgcatctcaccttagaagaaaagattttccaactaggggctgtcttggtagctggtccagaagaaggtctcctctctctggagtgaggtccgcccaagtaactccagccagaactctcactgagtgcggctggatctgccctgctctcctcccatcytcctgtggactgtggaaacccatccatgccctatgcaaagtcctgcatctcagactgtaaaatggcagaagctgaatttaaaataaatgattatattgactctatgagggaaacagagttctgaggtaggcaattggtaagcaagcaattatgtgtaacttgttagaacactagggtgttttttgtcttactgattattttctggttaacaggctggctaggagccagagggagagaaagctggctgggaattgagaggcatgaagtcacctcagtcccaacatttccatgtaaatgatgatgcgagatgggctggtggcaggagtccctggaaatcctcacaatctcagctttt

SEQ ID NO: 545736 - DNA, 615 bp, Homo sapiens
ccagctgggtggactctgctgtgtctcctgtcaagaatctcctcagcttaccttggtttttcctttttaaatactctctggtgttttcctctccagtgggggctgcatctcaccttagaagaaaagattttccaactaggggctgtcttggtagctggtccagaagaaggtctcctctctctggagtgaggtccgcccaagtaactccagccagaactctcactgagtgcggctggatctgccctgctctcctcccatcctcctgtggactgtggaaacccatccatgccctatgcaaagtcctgcatctcagactgtaaaatggcagaagctgaatttaaaataaatgattatattgactctatgagggaaacagagttctgaggtaggcaattggtaagcaagcaattatgtgtaacttgttagaacactagggtgttttttgtcttactgattattttctggttaacaggctggctaggagccagagggagagaaagctggctgggaattgagargcatgaagtcacctcagtcccaacatttccatgtaaatgatgatgcgagatgggctggtggcaggagtccctggaaatcctcacaatctcagctttt

SEQ ID NO: 545737 - DNA, 619 bp, Homo sapiens
tttgtgtatggtgtaagaaaggggcccagttcaatcttcagcatgtggctagccagttatcccagcaccatttattgaacggagtcttttccccattgcttgtttgtcagaaaagctattcctaaggctttgcccaacatacctttaacttttgaccatatctttcccctggtcaataggctccaggaaatgggacaggatgcttggaaataaagagctaaccctgagacaatgcaggtgaacacagactagctkctgcataataagtaaacaaaatatgtgtctttcattcaatattaaacaatgatagactgagtatttaagcatgttaccattacaggtatgcaagtgcctaactatgacttaaattgtagagcctcagattttagatctggaagagccatgggttttaatccatgctgggagaggctcaagcttactctggagaaacacatagtttggggaggctggagaccgaggggtgggctcccattccccaggtccttcaatgagtctgatcgattttataaatcagttattggaaaatgattcagacaactcagcccaattccctattatttggtctaggccatcagccctcaggcttcttgccactgca

SEQ ID NO: 545738 - DNA, 234 bp, Homo sapiens
ttagatctggaagagccatgggttttaatccatgctgggagaggctcaagcttactctggagaaacacatagtttggggaggctggagaccgaggggtgggctcccattccccaggtccttcaatgagtctgatckattttataaatcagttattggaaaatgattcagacaactcagcccaattccctattatttggtctaggccatcagccctcaggcttcttgccactgca

SEQ ID NO: 545739 - DNA, 570 bp, Homo sapiens
taagtgtatattaagctctcaattgttaccttatttcttgataaactattatcttataattttgtcttatttagtaggaagcctcctgggattctgtcattgagctataatccatctatatgtagaactgtgtgtcacacacacatacacatacctatatgagtcatatatgtgtataggaaattctcgcttaacatcattgataggttcttggaaactgtaagtaaagcaacatattgtttaagaaaactaattttaccagagtttaataaataaaaacaagttatgtttgaatggcatgtaacaacattgtttcatttaaagatgcagttttcaagaatctattttgaacattaaatgargacttaacatacatctgtgtttgtgtgatacggatttttctgataaaattatataactatatttaatttgtacaatgtaatgatttgatatgcatatacattttgaaacaaaatgtcaagttgatgaacacatttattacctcacatagataaccatttttttttttgtcacaagaacacttgaggtctactgttgtagcaaattgta

SEQ ID NO: 545740 - DNA, 668 bp, Homo sapiens
tcatttattcatgtgccaattaattaattaattaaaatcttccttgcatccaccatgtggctaataggaggacagacatagtagtgagctgcataggcttgacctctttgtcaagaagcagagagccccgcctaggaggagagacagataaaatgaggaggcccttttgggtaaatataggaagaatatatggagcatagaggatgggcaggtaatcccaggtgtcttgggggaaagtagytccaaaagaataatatgtcatctgtcaggatggtagccttcagcaaaaagtcagcatggatgtaacacaatggtgaaagctcagattcatctgcagttggagtggtgaagagagcaaactctagtcaaatgaggggatttgatatgcttcactcccactcctggcccacaaacccttctgtagatgaatctccatgttccttcccttccactaatttagttcaaatcagccaggtgagctcggacactccaagctgagaatggaggagccgcaatatggtaggaacttgggtctctactacttcttgaaggacagtcaccctagagagttgcctgaccagaaatgtctgcattggacttttcatgagctagaaatagacatctaccatagttgagtcattgatattttgaggtttgtttgttacatc

SEQ ID NO: 545741 - DNA, 668 bp, Homo sapiens
tcatttattcatgtgccaattaattaattaattaaaatcttccttgcatccaccatgtggctaataggaggacagacatagtagtgagctgcataggcttgacctctttgtcaagaagcagagagccccgcctaggaggagagacagataaaatgaggaggcccttttgggtaaatataggaagaatatatggagcatagaggatgggcaggtaatcccaggtgtcttgggggaaagtagttccaaaagaataatatgtcatctgtcaggatggtagccttcagcaaaaagtcagcatggatgtaacacaatggtgaaagctcagattcatctgcagttggagtggtgaagagagcaaactctagtcaaatgaggggatttgatatgcttcactcccactcctggcccacaaacccttctgtagatgaatctccatgttccttcccttccactaatttagttcaaatcagccaggtgagctcggacactccaagctgagaatggaggagccgcaatatggtaggaacttrggtctctactacttcttgaaggacagtcaccctagagagttgcctgaccagaaatgtctgcattggacttttcatgagctagaaatagacatctaccatagttgagtcattgatattttgaggtttgtttgttacatc

SEQ ID NO: 545742 - DNA, 586 bp, Homo sapiens
accctgttgaagatggagactatccacggggcattgatcttggggtctcccccttcctgaatacttgaagtccctcggcagactcttggatacctccagcaatggggagctcaccacctgttttgaagccaggcaggtttgggctcttcttgtagctgtgtgactctggattttcccataggtgggagtggatccaccaccttgagcttcagtttcctccagtgccatgggattagcagcagccctgcctcacagattgcgtgaggatgaaatgagatgatgctcctgagttggctggtgcagtgcacggtacacagagagtgctcaataaatgttccctgctgtgaatgccctgtcctggttcactcgcctacattgcggagcagaggaactkcagggtttcttttgtctccaaaatttcaggattctagagagatgaagcactgagtgaagaataatgtgtaggtctttgggagaactttccccttaggggttgttcctctgcaatgtttgctcatgaacattttgggtgaatcatctctgtgggtgttggaaggagaccttctagcatagttttatgatagtc

SEQ ID NO: 545743 - DNA, 618 bp, Homo sapiens
gtttcttcacttgctcaccattaactgattcacttatttatctctttggttatttgtgcatctatccatctaatggtcatctcctttattccagcaatattcaacagacttttactcagcatttactatgtacagttgctgaacagataaatacaataactgcctttttcttttgagtcagggtctcactccgtcacccaggctggagtgcagtggtgcaattatggcttactgcaggctggaactcccaggctcaagcaatcctcccacctcagcctcccaagtagtcaggactacaggggcaaacctctatacctggctatttttttttcattttttatcttttataaagacagtgtctttctgkgtcatccaggattgtcttgaacacctaagtaccatttttaaaatgtggtaagatacatataacaggaatgtcaccattttaaccatttttaagtgtacaatatagtggcttcaattacattcatgatgttgtgcaacccttaccactatctgtttccaaatcttcaccccaaacagaaactctgtacccattaagcaacaatttctcattcctccttaccaccgccccccccagtccctggtaacctccaa

SEQ ID NO: 545744 - DNA, 612 bp, Homo sapiens
caagccaggtaacctcactgtatcagtgagcagttgtaccctcactgtatcagaccaacgttggctacaaatttcctgctgcaaaacatgagctctcaaatggaaaagaaatgaagatagttcatgccttgtcacatgcaacaaaaacgttgctttattttgtctgggaagagcagagagccactgaaggattttgagcagtgcagcgatggagataggttttgaaggtcattttgggactggagcatgaggcagcaagacagcagaaagtcaccaagtggggtccaagctgattccattggcttattagtgaagggctctaatcctgccaggggctggtgccacagagttgtgccacatgtgacaaaggacatgctccctgagccaatctctggactctgcaagttcagtgcttagggtcaatcactcattccagaaatgtttattgagcacttactwtgtgccaggcactgtgctagaactcgaggtggacacaaccatgagcaaagaggcaaacaaatctatgccatcatggagcttgcagtttgaagagttcctcaactggggcaaacccagtgattgtttctcaattccttcactgtttgttcagct

SEQ ID NO: 545745 - DNA, 638 bp, Homo sapiens
gtgtgtataatggtgagtgggagtttgatggatggggaaataagatgcctggagtgtcagacaaatccattgagtgtaatacccaaacaacattacagttactaaatatgggtaatttatttgacagtttcaaggaaccacaaatcccccctgtggagggccaactctaaactcatttcccactccatgctggcagtagacaacatgtccctcatgctcatgctctcaggggtaagcaggttcttttttgttttgtattattttggctttaaacattttttctttctgcttctattggaccaggggagtcagattatttacaaagtgcaggtaattttatgagaagtcaaactccttctgtgctgagccatgacrtgcatgcagaatgaaaagtcagctccaacagtgaccaatcctgcattctgatctttctgcgtgactgagcctgctttgtgaaagctcattctctggcttgaagccatctattgactcttgtcaccagaagaataaaatgcatgctccacaaagccttgagtgccgaccatcatggacctctccacctcatctccacatgcttcctctctatgttccacttctgctgactttgttaggtgtctcaaatgctcaagagctaactc

SEQ ID NO: 545746 - DNA, 219 bp, Homo sapiens
tgggaggatcatcatgagggccactttctaagaatagcctctctctccctgaagatcaaaagaggtgactgcagcaggagagaggaaagttagacaggggtaagtactttctgatgggaggacaaagccatcaccagtgtccmtccatagagttttttcatcttccccaatggatattctatacctgttaaactctcactccccatttcccctgcccca

SEQ ID NO: 545747 - DNA, 599 bp, Homo sapiens
tgagtaattctctcttggggtctcccatatgattgtgaatggttgcaggtagatggcttctggcctgagtgtccaagatgggtttccygtatctagcatctcagatgggatggcttgaacccttggggactggcagggcatctcactctctttctctgtgtggtgtctccagattgttagcttggacttcctcacagcatggaggcctcaggatagtcagacttcttgtgcgatgtctgccttctcatgagctatccttggaagccccacagcgtcacttcccttgcattctattagttacacagaagcagctcacattcactgtgggagggcataaatacactggaaggcatgactcattgtaggggggtgttttggagactcattatcttggtggaatttttaaactagacattctgaacctaggctagaggttgcaaactcatttatctacatggaactggcagatgattatgagcaaggaaggcctgaagcaagacaattgggactggggcagactgtgctggactgaagaacacaggtgttattaaaggggcacttactgctcagcaccagccgactttgccttacgagactac

SEQ ID NO: 545748 - DNA, 599 bp, Homo sapiens
gtgcattcagcaagtatttattaatgcctccttgtaccaagtctattctacgttctggggatgtagcagagagtaaaacaaagtccctgccctcagggggcttacattgtagttggagacagacaataaacaaagaattgtgtaaaatatcagatggcactaagtaccatagagaaaaataaagccaggtgaaccctagctggcaggttgcacaacatatcttgctctcttttcatgctctcttgtctgccttgaatgactctttttcctttcagcttaactgccttctacctattgtatcacttgggggcctagcttgagggttacaacctctgacacctgtgatcctgcaagtgtgaaattgatgaccgccctccttgcttgtaaggtacttgtgtctactcttaccatacggttataactgttttttaaagtttatagttacttttccatatcccccactagatagtgagtaaattgagggtttctgcatattcttaaattttccacggatctttgttgactaaatgaacagtctctttggaaagatcttcaaggraggagctgcttggtgggagaagaattctcctgtcctctgt

SEQ ID NO: 545749 - DNA, 643 bp, Homo sapiens
ttcttaaaatataattttcaacctagtcataacttttaagaatagaaaaaataaaattttaaaaattgttcttaatatcagttggaaatttaagtgaaatatatggtttttctagtaacatctatacttcacttttctaaaaataattttttacatttaaaaaatttattttttatttttatgaatacataatagttttacatgtgatattttgatacaagcatgcaatgtataatgatgaaatcaaagaaagtagaaaagctatcacctcaagcatttgtcatttatttgtgttaggaacgtcctgatttcactctcccagatattttgaaatatatagaacgttattgttatctrtactcgccctattgttctaccaaacactatatcttactttttcaatctaactgtatttttgtactcattaaccggtccctctttattcccccttacccactacccttcccagcctctggtaaccatccttctactctctattagatcaatagtttttttggcttccacacatgagtgaggacaagcaatatttgtttttctgtgcctggcttattttaactatcacaatttcctctagtttcatccatgctgctgcaaataataggcttttatttctttttaaggc

SEQ ID NO: 545750 - DNA, 630 bp, Homo sapiens
attttagtggttagactatttaatgtaacccctgttttactctaagcatttaaactaattatattttgcatacatgtgttccccatgtcatggaaagcagaataatattgtgaaatgagaactggaacagagattatgcatttgctgagagtaggatcaagttatgattttgtctcctgagatggataagatggtatgtaattttgggcaagagtaaattggcggcagtagagcctagcagtttataccatggactccagagtcagacttccttcattgaaatcctgattgtgacacttacaagcaatgtaacattggataagttacttaacttctckgtcctttagtttcatcatctgtacaatggagataacattaggatctcacagaaaactgggtctgttgtgtccaaagtctttgttctttccattacattatgccgacatatctcatgtgaaaactcattgagatggacaaagtaatataaacttaaaacatctgcagaatgagaaaaaaaagttttaatgatcaaaataataaataaatcaatataaaacagcatttctaaaagctcatcctgacacctcactggcataagccagctatttgaaaagtgatcttgttttaaac

SEQ ID NO: 545751 - DNA, 655 bp, Homo sapiens
caccatgacccccaaaatctggcaatatacttcattcttttaaatatttttatattttttatcaagtgacagtgactgtttaaatkgttaattatttactttcatatattttatatatttttatatctctgaaatactctttattaatattattaaacaaggatcctccatagttcccttgcattactgactgcaacactttgtgctaaattaaaagtaaaaacagcagaggtgccaagatagctgaggggaagcagctagtgtgcactactctcacacagaggagatagagtggcaagtaaatactagctcttcatctgggtcatccaggaggatacactgggattcatcaaggaagcaacatgactcgtggagagcagagaggagcaacacaggtgagctgcccatcctggattagtgcagagccaagggaggctctccaacatggggaaatagtgaatgagtgagagctctcagggacctacacttctgctatggacctatggacctttgcaatcctgggcacaggagattcccttgacctgctactcatggggcctccagactgacatgcagagccatgtggagtctgagcagagccaccactcagacccacttggagcccagagggccctggatctctgaaaaccctggt

SEQ ID NO: 545752 - DNA, 655 bp, Homo sapiens
caccatgacccccaaaatctggcaatatacttcattcttttaaatatttttatattttttatcaagtgacagtgactgtttaaatggttaattatttactttcatatattttatatatttttatatctctgaaatactctttattaatattattaaacaaggatcctccatagttcccttgcattactgactgcaacactttgtgctaaattaaaagtaaaaacagcagaggtgccaagatagctgaggggaagcagctagtgtgcacyactctcacacagaggagatagagtggcaagtaaatactagctcttcatctgggtcatccaggaggatacactgggattcatcaaggaagcaacatgactcgtggagagcagagaggagcaacacaggtgagctgcccatcctggattagtgcagagccaagggaggctctccaacatggggaaatagtgaatgagtgagagctctcagggacctacacttctgctatggacctatggacctttgcaatcctgggcacaggagattcccttgacctgctactcatggggcctccagactgacatgcagagccatgtggagtctgagcagagccaccactcagacccacttggagcccagagggccctggatctctgaaaaccctggt

SEQ ID NO: 545753 - DNA, 657 bp, Homo sapiens
gctgttgaagacctctagtggttactgaaaaaattcaacccagaactactrtatatccagaaatttcacttctaggtatgtatccaaaagaattgaaaggaaggactggaacagctatttgtacatgaatgttcacagcattattatttgcaattgccaaaaagtggaaataacccacgtgtctatatatatatgaatgaattatcaatatgtgaaatatacatctaatgaactactctttagccttaaaatgaaataaaattctgatgtgtattacaacatggatgactttcagaaatattatgctaagtaaaataagttagacacaaaagggaaaatattgtatgatctcacgtgagatacctagagtaatcaaattcttagagacaaaatagtgtgttatagggtcgcatgggaggggatcattgggaatcattgttcagtgggtacagggtttcaggtttgaaggatgaacaggtttggagatcaatagtagtgatagttgcacgagaacacgaatattcttaattccactaaactgtatgcttaaaaatggtaaattttgtgttatgtgtatttcaccaccataacaaccgatacagtagcaagaaaaaatcatgaatgtggaaatatcccaaaagggatgagaaaaaaatt

SEQ ID NO: 545754 - DNA, 570 bp, Homo sapiens
ggccagaagcaattcctaagtggagactgaggtggaaaatctaaagttctgggaaacaggttattaatcatgaccctaggctgagctcactacctcctggaaatccttcagaaatgtcttaggaaaacttggagtactgctccttcaaagagtggtttctttggaagttgccgtgggctcctatgctgactgattatgaattgcagattagaacacataatgtatccgctcttactggaggaagctgcatttccaaaaagaagtctctttaatgtttcaagaaattacaggctttagcttgactcttcagaactgaataatggcccttcatggcaccgaagaaagtatttggtgtattcttactatgtcccaggaacctaggtcagttactgttttagtactttatcagtgtagtctttaacattccataaatgtacattgaggacctgttagtactaagcactgractagaggaccagggtaaagacactgcctctggtcttgtggaattctctgtgcaacaagggaagatagacagaggagtgaataattttaatggcacgtgaaaag

SEQ ID NO: 545755 - DNA, 556 bp, Homo sapiens
gtaggggtagggaccacagcagttgaatttccaggagccagggttggtgcagttatgcgtgtaataaagctcatcaggttgggattgcaggaacgatctgaaaatgagaaaatttgtattatccttggttacagctcatcttgttccaagaaagaacttgaggagttccctacatatcattcagtcatgatgtgaaacatgggaatgctttacttaaaaaatctgaaacttagcagtcagtagtaacacrtttggtcacaatcaatgacagaattaggaaaaaaaaagaaaacaacaacagaatctgtcaaatttcataaacatcattattgattttattggttttgtagtttgacaaatctttttaattctttaagtgtcaaggttttaagcacagaagtttatctctattttggtttttacatagttacttaagaacaaaatataagttatcattggtggaaggggggtctgcattgttttcctttaaaagaagcccatagaatatcctactgagaaacaatcctataataactacaaaaggagatttcctaca

SEQ ID NO: 545756 - DNA, 451 bp, Homo sapiens
cactcccatctacaaagtgaactggcttttaacttacaagatacaaagttatttatggccatatattcagcaaaagccacaaagtgtcacaccaggtgaaaagggaagtccaagtttctgaggtatagagtttcagtatttatcaggtaagcatagctaccaaagccatttttgttctggaagcatttgctgatcccgagaaagcattttttaggttaagctgtatttttggtgtcttcatatatgaggacagaattcttagcttgttgtccgtcaaggatggggaatcagataaaccacttttytagtttgaatggaacccctaagggcataagagggaacttgaactaagccaaccctcacaatagccttgccaccaagcttctaggtgtagggaatgtagaccaagatctttcatcattatggttctcaagtaataatgccatcaggc

SEQ ID NO: 545757 - DNA, 451 bp, Homo sapiens
cactcccatctacaaagtgaactggcttttaacttacaagatacaaagttatttatggccatatattcagcaaaagccacaaagtgtcacaccaggtgaaaagggaagtccaagtttctgaggtatagagtttcagtatttatcaggtaagcatagctaccaaagccatttttgttctggaagcatttgctgatcccgagaaagcattttttaggttaagctgtatttttggtgtcttcatatatgaggacagaattcttagcttgttgtccgtcaaggatggggaatcagataaaccacttttttagtttgaatggaacccctaagggcataagagggaacttgaactaagccaaccctcacaatagycttgccaccaagcttctaggtgtagggaatgtagaccaagatctttcatcattatggttctcaagtaataatgccatcaggc

SEQ ID NO: 545758 - DNA, 564 bp, Homo sapiens
ctgggtccaccaccccctcccgcccacctcactygctcctcccacagcttttgagaccacctgcccaccctgccagcctcccaagctcacctctgctgcctgtccctcatgccgcagccacagggacctcctggctgtccctcaccaaccccaggacctttgcacgtgccatgccctctccccgatgctcttctgcctcttggcctggccaacatctcttttccagcttcacttagatgctgctcaaagtcaccccccaccatcgttacatgtgcctgtgggactctgtactttcctgttgttgcagttgtgacatttagtcacacagcgggcgggcagactaaatggttccgagtagaacccctagttctgccatttgctactgtgtgaccttgggcaagtcgcttaacttctctgtgctatggtttcctcatctgtacaatgagaacaattctgtactatcctcagatggttgttggaaggatgaaatgagttcattttcatctggggaatccagaaccctctgtgtgtgcctctcctatgtctgtcaacactcccgccctt

SEQ ID NO: 545759 - DNA, 564 bp, Homo sapiens
ctgggtccaccaccccctcccgcccacctcacttgctcctcccacagcttttgagaccacctgcccaccctgccagcctcccaagctcacctctgctgcctgyccctcatgccgcagccacagggacctcctggctgtccctcaccaaccccaggacctttgcacgtgccatgccctctccccgatgctcttctgcctcttggcctggccaacatctcttttccagcttcacttagatgctgctcaaagtcaccccccaccatcgttacatgtgcctgtgggactctgtactttcctgttgttgcagttgtgacatttagtcacacagcgggcgggcagactaaatggttccgagtagaacccctagttctgccatttgctactgtgtgaccttgggcaagtcgcttaacttctctgtgctatggtttcctcatctgtacaatgagaacaattctgtactatcctcagatggttgttggaaggatgaaatgagttcattttcatctggggaatccagaaccctctgtgtgtgcctctcctatgtctgtcaacactcccgccctt

SEQ ID NO: 545760 - DNA, 564 bp, Homo sapiens
ctgggtccaccaccccctcccgcccacctcacttgctcctcccacagcttttgagaccacctgcccaccctgccagcctcccaagctcacctctgctgcctgtccctcatgccgcagccacagggacctcctggctgtccctcaccaaccccaggacctttgcacgtgccatgccctctccccgatgctcttctgcctcttggcctggccaacatctcttttccagcttcacttagatgctgctcaaagtcaccccccaccatcgttacatgtgcctgtgggactctgtactttcctgttgttgcagttgtgacatttagtcacacagcrggcgggcagactaaatggttccgagtagaacccctagttctgccatttgctactgtgtgaccttgggcaagtcgcttaacttctctgtgctatggtttcctcatctgtacaatgagaacaattctgtactatcctcagatggttgttggaaggatgaaatgagttcattttcatctggggaatccagaaccctctgtgtgtgcctctcctatgtctgtcaacactcccgccctt

SEQ ID NO: 545761 - DNA, 522 bp, Homo sapiens
ttttgagctcattcataaaaaggaatgaggtactaattcatgctgtaacatgggtaagccttaaaaacatgtgctagacacaaaatatcagccttcttgattgacacacaggtcacaggagcctgggattacaggcgtaagccactgcacccagcctcagatgcccttataaaagggcttataggagggtgccaatactctcttgcccttcctccttccactctgcaaggatgcagtaaagaggccctcaccacattgtgctgccttgatcttggactgcccagcttcaagaactatgagaaataaatttcttttcttacacactatagtacccagtctcaggtattctgttatagcagcacaaaacagactaagacaggtatctttttggaaatccaattaaaagtatattaggactcctcttcctgtyttccaagtctcctatgcctgtcctcctaattttccgtactgcattctagataatttcttcagagctatctctcagtccacaaatgttccttt

SEQ ID NO: 545762 - DNA, 265 bp, Homo sapiens
ctcgggaggccgaggcaggagaatggcatgaacccaggaggtggagcttgcagtgagccgagatggcaccactgcactccagcctgrgtgacaaagcgagactccatctcaaaaaaaagaaaaaaagaaattcacctctgtagcagccagaagcctttactttttagcacagagcaaatggaaagtgtgcctgggacagcacgaggcttggaggttctgcagagctaccccaggcacctgtttcatttggtcctctgtgtgtggc

SEQ ID NO: 545763 - DNA, 326 bp, Homo sapiens
gcctaattcatagagttattgtgaggattaaatgtcatrtgagtcctttgaactaagcttggtacatattaaatacatataagtgatatctacagttagtgttcttatttgctcatgaatacttacttgaagaagatctgaacttatttggggaaccattccttgaatatactctacacggtgaagaatggggtcttgaatgtgtaaattttcgtgtgtgaggatgcgacctaagccagtctggtataatcgccattttgcacattaaatccctgtgatataaaagaaaacagattacgttaccttaaagagcatacattccaaat

SEQ ID NO: 545764 - DNA, 630 bp, Homo sapiens
ttccccacagacatgccagtccttgtagtgggtgggaggctgtcacttcccctccgtctgtgccccgacacctgttgctgtccacctgtgactcagtgtggtgtctccggacccacaagccggtgcctcctctgctggagctccgcttgatctgttttgcgttctcttctgcctccctcgggctcactcttggcccctgggcctcagtaggcctccctctctcagcccttgtctctctgtcattttttgtctctgactctctcagtgtctctttctgtgtttctcctctctctccccatctctgtcacaacctatccctgtcacctcctcccacatcagtgtgtaatatcccttccatcctcacagctctgtcgcctctccctgaacccttcccgcctgtgtgcactcacccttaggccctgcaccaggtgtagacagaggccccggggggaggtgaggcaggaggggctcagacaggcctggggracgttccagggatagcaaggggaggacagtgagctgagcctctgccctgcttagcaggagccccaggaggccagaggggcaggtgctggcctccagaccctcatcccaaggggccacatcccagaaggtaaccctggtgacagg

SEQ ID NO: 545765 - DNA, 606 bp, Homo sapiens
acattatggtgaaggttaaataaaatagcatatatgaagtaccaccaacagttgttgaaatattgttaagtgctcaaatatttatcgttttaaccaacaattgtttagtaaagacttactatgagccagatacactactagatgttgaggtgataatgctgagcaggacatatgtagctcctgtccacagaaaaattataacccagtgagaaaaataaaataaacaactaattactatacaaacatggattgcagtggtagagaataataataggggcacggctattgatacagggcagttagaaagcataatattgaaaatatttaatgatagtataattgacccttgaacaacattaatttaaactgtgtaggtttgcttatcggtggatttgttttcaaccaagtggtgcattgaaaacacaatatttgcargatgggctatactgagggatgactttttgaatacacggggctgagtgtggaacttcagtatgcatagatttttgcatgttggggatcttaaaccaatcaactgcatataccaagggatgcctgtacataatagacgtgggcatgggtatttatcagtttagatttgaaaac

SEQ ID NO: 545766 - DNA, 508 bp, Homo sapiens
tgcctctagtttgagatgtattaaagctaacattttctactccccttcctcaataaattcttcagcctttcttgatgtttaaaggagcattaaagcctctaggctaagctttatttatttgcaagctccattactaagccatccgtgtgactcagtgaaagccttttattgaaaaagtaaacatcttaaaccaaatcaatcacttgctttttctcagtctatcaaaaacttcatatcattttkttgtccatcagatataggtgaaagaaagataataaaaagatatgttgaatgggggctgtggatgggaagtagaacaagctaatattttgtagcattccctataagattcaaggagcattgggaatataatgagaaatgagcttccttccttcatggagcttacctgctcatagaggagggaaataaaaatcgatcaaacatagacattgataaagtaaatgtaaattgtcatagatgctatgcagcagacaaataaggggctgag

SEQ ID NO: 545767 - DNA, 508 bp, Homo sapiens
tgcctctagtttgagatgtattaaagctaacattttctactccccttcctcaataaattcttcagcctttcttgatgtttaaaggagcattaaagcctctaggctaagctttatttatttgcaagctccattactaagccatccgtgtgactcagtgaaagccttttattgaaaaagtaaacatcttaaaccaaatcaatcacttgctttttctcagtctatcaaaaacttcatatcatttttttgtccatcagatataggtgaaagaaagataataaaaagatatgttgaatgggggctgtggatgggaagtagaacaagctaatrttttgtagcattccctataagattcaaggagcattgggaatataatgagaaatgagcttccttccttcatggagcttacctgctcatagaggagggaaataaaaatcgatcaaacatagacattgataaagtaaatgtaaattgtcatagatgctatgcagcagacaaataaggggctgag

SEQ ID NO: 545768 - DNA, 570 bp, Homo sapiens
gaataggaaccctaaagaggtggtgatgtctgtttaagatcatcttgttaagtaaataaatacacactggattggattttcaaacagcatttagccccttcagagaagttgartggaggtgagaggggaggtgacaatccagatattctggcaatagaaaatgttccacaaatcactgatttgtgtatactcaagttaccaatgacagaagcatacatactagtgaatctctttgggatagagatgcttctctagttcaagtggaattaattaaaacaggcatgtagtttgcaatatttccagctccctaactgaaaggctccatgcacataaaccagaacagcttgagcagctgagaaaagctgggccaaaaatgactccaccacctctctccttcctctccttttatattggaatggaaagatacaataatatatattttttaaaagcagaacactcatggtttctgtacaattgcaagtgtgctttgattacctttgaatggcgttaacataaaagtatatatgctcttaaaagtcaagatcataacttgctaatgaagtcgtgaat

SEQ ID NO: 545769 - DNA, 570 bp, Homo sapiens
gaataggaaccctaaagaggtggtgatgtctgtttaagatcatcttgttaagtaaataaatacacactggattggattttcaaacagcatttagccccttcagagaagttgagtggaggtgagaggggaggtgacaatccagatattctggcaatagaaaatgttccacaaatcactgatttgtgtatactcaagttaccaatgacagaagcatacatactagtgaatctctttgggatagagatgcttctctagttcaagtggaattaattaaaacaggcatgtagtttgcaatatttccagctccctaactgaaaggctccatgcacataaaccagaacagcttgagcagctgagaaaagctgggccaaaaatgactccaccacctctctccttcctctccttttatattggaatggaaagatacaataatatatattttttaaaagsagaacactcatggtttctgtacaattgcaagtgtgctttgattacctttgaatggcgttaacataaaagtatatatgctcttaaaagtcaagatcataacttgctaatgaagtcgtgaat

SEQ ID NO: 545770 - DNA, 471 bp, Homo sapiens
agtatatttgtttgaacatccaagcactatcaggaagtgcatagaaggacaaacactgtgcawctgtactgccaagggccacagtctcacaacataaactataagatcagccactgcaactcttacaaactgtcatttatgagaggagaccatgggagtcaaagtgatgcactctaacaacagtgatgtccccaggaagagaatacacaaaaaatggaattaactttattattagggagatgtgtttaaggatttgatttttcctgtttaataattcacttgatacttctattttaaagttaaaaataccaacatgtgtccatccaatgtttccctaaaataatttttatttgccaaaggacatttcatgtgaagctggcaaacagcatattgattaggacaggctgtgtagaaagaagacttatctttaggccccatatggctacatgatcctctgatattgtcagtgtg

SEQ ID NO: 545771 - DNA, 636 bp, Homo sapiens
tacagcagaaaatgacccccttatacacagtgtaaacataagtttctgttgtacttgtagagtctatcttggtctaaaccagtttattgaagcacagataattattacaactaacccaggctatatattaaacatttaatatatgatgagacatgcactaggtttctttggagattaaagggaaagtcacagcacagtttctgcacctaagamgtttaccctgtatttggggaggagcccattaacaggccaaaaacaatgtgtcataaagatagcatgtaatatgaactaagtggtatggtatagcctctaagtgtaattagcctttcaagagagaagagttttctagaggtttcaggagccaggcaaggctatggaaagaaagtgagtgagacttggcctggttgtactggggcatgcagacctttagaaggcatctaggtgagggaaacaaagggaatggaggtggaaattagtttgatgtgttagggaaaatactggggaggacatggtaacaaatatattgagaagaagagtatatggctgaattgcaaaatgagtggtcagattgtggagaacttgggttaggctaaggagatgagatgacatgtggtgggcttgaaaggtcaccagaaa

SEQ ID NO: 545772 - DNA, 657 bp, Homo sapiens
tgaggtaaagataaaggtattgggcagcttcttctggttggcttctgtattctcttaagaggtgacattcttgcctacaggaaaagtgagggacagatgtgatggaagatcatttttggagcaggtgattggctagtcaacaaagaggtgagtgaaaggagggcagggtcttayaagtgttgggtatttgcaatggtccagattttgcagcaagttttcttttactaagcgttcacggttggaaggacagaaaaagcataaagacctagcactgatgacttgtgtagaaagcttcaccataatcactaataaacatttaacatagagaggtggctattgcagaatgatgtcacagacaacactgagatgccaaacagggagctcagggtaaggagagaacctaacactacttgtcaggtcaagactctcaacttggctgctgggagaattacctgggatggctttaaagactattgatacctgggctccaccctcaaatattatgatttaattggtctggggtgaagccaggagcatttgcattttttaagtactccagtttgagaaccctgcagtaaagagatataagtctgggaaaagcaggggagttaagtgattgaaggttctactgaggatagagtacaggatgaaataaaa

SEQ ID NO: 545773 - DNA, 653 bp, Homo sapiens
gaaagatgaaagagtatatctgactcatgtcagtggacttttattataataagagtcattgtttaaaaaaaaaacagcaaaagcaggctttaccttaaaacaacracaaaaatctacccaagattatccattttgcaaaattaatctgaaatgtatattactttgaactaggaataacattaccagtagattttcatagtgaagaaattaccatggcccatttatgagagatcttttggatgacgcttaaaaacatgcagcaggtaaaataactgacaagctcaagttataacctctaacgatccaactcagtgcaggaaaggttgggctaagagggatggcagagtcaaaactttgactaccacaggaaaaatagaagcaaagttggtgtgagtaagaagatttattttaaataatactacttgcagagaaaaatcacgcagcatatatgcaaatctctttgcaagtttaaattgaaatgatagcattgggttagtcctgtggaggggtatgtcagagttggacttcccaatttaggaaattcttccctcagtcccattactctcaggattttgttgtaggagtaaactgaaaaggaagttcaccagctggctaactattcaatgaagctgcagatggagtatttctagtgt

SEQ ID NO: 545774 - DNA, 653 bp, Homo sapiens
gaaagatgaaagagtatatctgactcatgtcagtggacttttattataataagagtcattgtttaaaaaaaaaacagcaaaagcaggctttaccttaaaacaacgacaaaaatctacccaagattatccattttgcaaaattaatctgaaatgtatattactttgaactaggaataacattaccagtagattttcatagtgaagaaattaccatggcccatttatgagagatcttttggatgacgcttaaaaacatgcagcaggtaaaataactgacaagctcaagttataacctctaacgatccaactcagtgcaggaaagrttgggctaagagggatggcagagtcaaaactttgactaccacaggaaaaatagaagcaaagttggtgtgagtaagaagatttattttaaataatactacttgcagagaaaaatcacgcagcatatatgcaaatctctttgcaagtttaaattgaaatgatagcattgggttagtcctgtggaggggtatgtcagagttggacttcccaatttaggaaattcttccctcagtcccattactctcaggattttgttgtaggagtaaactgaaaaggaagttcaccagctggctaactattcaatgaagctgcagatggagtatttctagtgt

SEQ ID NO: 545775 - DNA, 511 bp, Homo sapiens
tgtttaaaaggtttctccattttaatttctaatataataaatagttctttagtgttttcaatgtttcagagtgtaaaatttcctaagaccaaaagtttaagraccattgatatagatcaaccttttctgtcatcatactactgaacaacatgatattattattttttattttacaagattttggaaatgtcccagtactatggatgaagccatcttgactatatttaggaagcattctatctcactagtcacataatattctgattacctcaaaagctccagataattgcaaatggggcatgtatcctctataatgcatgggtacagttacacccaatcttttcactggatgtattaatctgcaacaacaacaaaagaaggaaacattgttacctgtgatgtgtctctcctttgacaactatctgaaatgggatcagaattcaagggcactgtttttggagttcttaaactccaactgaactgaaaccaagaatcatagcctaccaggaat

SEQ ID NO: 545776 - DNA, 511 bp, Homo sapiens
tgtttaaaaggtttctccattttaatttctaatataataaatagttctttagtgttttcaatgtttcagagtgtaaaatttcctaagaccaaaagtttaagaaccattgatatagatcaaccttttctgtcatcatactacygaacaacatgatattattattttttattttacaagattttggaaatgtcccagtactatggatgaagccatcttgactatatttaggaagcattctatctcactagtcacataatattctgattacctcaaaagctccagataattgcaaatggggcatgtatcctctataatgcatgggtacagttacacccaatcttttcactggatgtattaatctgcaacaacaacaaaagaaggaaacattgttacctgtgatgtgtctctcctttgacaactatctgaaatgggatcagaattcaagggcactgtttttggagttcttaaactccaactgaactgaaaccaagaatcatagcctaccaggaat

SEQ ID NO: 545777 - DNA, 449 bp, Homo sapiens
agctttcagtgggacaacatgctactctggttttacaggtgggaacacagaggccaagcctatatagcaagactaggattcctaccgaggtctcatcgcttctagcctagtgccgttttcatgacctctaagagcacatacaagagcagagtcagctcagaagggccatggctataataaacagtagatctaccaagcttcagctcctagccagttttacaactattcyccctgtagtcccacctctaagattactgttctaggatgaactctatggacaagaatcagggccatccaagaacataacatgctgttcctgtgcacacaaaatctagctcttaaattgctaattgaagtatactcccagagataatacattgatgaaaggcatcttgttacattgttctctaggaccaaaaaatatattcttgctgagggaaaggcacaca

SEQ ID NO: 545778 - DNA, 159 bp, Homo sapiens
gactcacatgcctgcaggtaacactgctggcgtgggggtgggctgaagcggggaggtgatttcccattcattgcagtcctgtttrgccagctttactcattatgcccctcatctgactgtcatgggcctgtgagtttgtgtcccaccctcaattaaaat

SEQ ID NO: 545779 - DNA, 574 bp, Homo sapiens
attactaacaacagccaccgtatatcaagcaccttcctgtgccacacggtacgatgagcatgttaacctcccaggggcgtccagccagtgaggggcagaggacaacctgaatttgaacccagatccacagccctaatgactaccttatactacccctccaagcctggttccaaattaggggttgggtcttgctactctgtattcttaatcccctgtttctctttwgctagggacatttggatgggactagagagtgacaaaatgatggtcaatgtagcaaagcccggacttgggacaccttgatgtcttgggaaagacttttcactgcctcccctgccaggtgcttcagactctgggggacagtgcctttctccctgtgcttcgaatcctcctttcctccttcagccctctcttccccctcctccttccttagcccctctagttcatcgggctgtgccggaatctgtggggaaaggagcaggatttcagctaaatataaaccaggctgttccagtttccaaatagaacaaaggagcagggtgttaagttgatttttataaataaagagagaggg

SEQ ID NO: 545780 - DNA, 544 bp, Homo sapiens
acagcactttcttctggtaatgagttagacttgttctccgtacagtcagggggaaaaagtcattttaatgtgcttttagaaagttccgctctgaggtttacaggggctgttggcctgattagtgtttagtttctttcattttactcttccatagtaatggctgtatgattcctgcctttgttggagctctgtttggagccaggtgcagagtgggtggccccttttatggagagggttattagcattgccctggaaatgcctctggctgttctggggtctttgcttttcttttgtgtcttgcctctgatgtgctttctctttgtcttttgtcctyagcctcagactatggcatgaaactgccaatcctgcgttccaaccctgaggaccagatcctgtatcaaactgagcggtacaatgaggagacctttggctacgaagtgcccatcaaagaggagggggactacgtgctggtcttgaaatttgcagaggtctactttgcacagtcccagcaaaaggtgaggcctagtcaggctgctgcttgacc

SEQ ID NO: 545781 - DNA, 605 bp, Homo sapiens
agatagcaatattgttaaagctactcactgaagattagcaaaactgttaattcaagccaagagtcgttactcataaaaatttaagtagcttttacttgctgcatgttggaaaggccaagactcaagaatccagactttttgggcagaataggtccaaaccccacatactaaaaaaaaggttggtggggaggggacaagtgtgaggtaaaagagcatgtggcactctggacctttaggattaaagaaaataaccaacccaggggtctagtgaggagtgcatttgccagagctgcaagcaggattactatggtttataccaaaacctcaaatacagyacctcccttcctggactttcatggaaactccctcttatcattcttggtccttgttttacttatatacttacattcaaaaagattttaagaagcagaggtaatcatttcctccctcttttcgcattttttccttggatgactaagctctcattccacaccaaagaggatgtttattccaaagctgcttgtggtataggataggctccgagactatcccacgtacacaggataggctccaagactatcccacatacatctgtgcaaagggta

SEQ ID NO: 545782 - DNA, 439 bp, Homo sapiens
aatgtctgtcaatgtgacattcacagaagccctgcacatgtgctggctgagggggagagccagtcaggcagacagaaggaagttcagccactgggcatgtgttagcatgggggatgtgtagcctagaagcttcctggctttcagttattattatttttttttaacttaaaaaaaaaaaactccagataattcccatacttgttttttacctttaaggaatgtatttgccttggaggtgccattactgaattatattgacrcagttcattaaaaatctgcttagtataaaactgacttgggtctaaaaaattaggattctactaaataaatgcatccttttttgttgcattgaaaaacattcttagtactgttattaatcttttcacacccccctaccctttgcttgtgtttctgatttactctgctgtgaagaaagttt

SEQ ID NO: 545783 - DNA, 529 bp, Homo sapiens
ttctgtgtgaaaatcttgaagcaaggctggatcctgtctgccaggaatacyggagaaggaatttcggctcccagaataggtttggtttgatcatttataagctctctttcaactctgaattcaaagtttctgtaagttactattttttcctaaattcattttaaaaaattgatcaaacctttctaccgtgtttcatgtgttggcaggtactataaaaaaaacacaagtgagaaactgaaaccttatggtgctgaaatttggatatatttgcacctggggtttggactcacttgcacctggaaaccaaagtatgtggtaataaagtccttcgtggcgacaactttcctccaggaaaattgcaaagttctttacaaaactaagcctctctttgcttcatggaatctctgtgtggtgaaaacatgaaaaaaaaactagtaataaaatatgtataaataagatggaattattgctcccaaccatttttctttgtgggcacaaaccttgcctgagttgtatactatgcagaccc

SEQ ID NO: 545784 - DNA, 536 bp, Homo sapiens
agtgatacaggatccccagcccaagcctctgctatttacagcaaggcccagagttacggagagaaggctgtggattctactcttgaacgcactgtggcatccctgcgtgaccttgtgtgggaatggctgccacaccccctccccacaagccaagcatgctaaagcaagccctgcasagaccgcaggagtagggggtcaggatgtctggttttgttcactggggggcccagtgcctcaagcttcactgaaacatgactgattgcctctaacggacaggaaagggctctggatttcaagggaaaggctgaggaggaaacagatgatggctggagcgggaagaattttgtgatgggagagtctctgcgcatgagacagttggaatctgaacctgcagaaatttgagtttagagttttgcagatagaaagcaccctatacattgcagggaataggaataatttctggattaaaaagtcttacctggtttatcccttccaataagaggaagaagcttgagttggatgactcgatctgcagt

SEQ ID NO: 545785 - DNA, 536 bp, Homo sapiens
gctgcccaggctggagtgcagtggtgcagtggcacgatctcagctcactgtaaccaccatctcccgggttcaagcgattctcccgtctcagcctcccaagtagctgggattacaggcaactgccgtcatgcctggccagtttttgtattttagtagatacggggtttcaccatgttggccaggctggtcttgaactcgtgacctcatgtgacctgcctgcctcggcctcccaaagtgctaggattacaggcstgagccacagcgcctggcctgtttttcttgagaccagtcattttatttgaaaattaagctttgaggtcatagtgctaaatagccagggcctatgatttacttgacaaaaattgttttttatacatttgtcagtttctaattgggtagttggaaaatgccaggaaactattatttctgttcattttttgtgctatatggaatctgttatactgaggggatgtactttataagttattagtacaaggattaatcactgatagtccccttctctcgtcattcttgca

SEQ ID NO: 545786 - DNA, 576 bp, Homo sapiens
ctcagcttcccaaagtgctgggattataggtatgagccactgcacccagcctgtttctttttttagtaagtttttcacggaccgtaaaattcatcccttcataatatagaattctatggttatttatttattaatgaatgaatgaatgaatgaatgaaatggagtctcactctgttgcccaagctggagtgcagtggcacaatcttggctcactgcaaccccctgggttcaagcgatgtttttatttttattttattttttcagaccgggtctcactctgttgcccaggctggggtgtgtaatggcacaatcttgtctcactgyaacctccgcctcccaagctcaagccatccttccgcctcagccccccaaatagcttgggactacaggcgcacaccaccacacccagctatttttgtattttttgtagagatagggtttttccatattgcccaggctggtcttgaactcctgagctcaatcgatctacctgcctcgggctcccaaagtgctgccaccgcatctggccacaattctggtttttagttgtgcaatcatcatcactaatttttatcc

SEQ ID NO: 545787 - DNA, 576 bp, Homo sapiens
ctcagcttcccaaagtgctgggattataggtatgagccactgcacccagcctgtttctttttttagtaagtttttcacggaccgtaaaattcatcccttcataatatagaattctatggttatttatttattaatgaatgaatgaatgaatgaatgaaatggagtctcactctgttgcccaagctggagtgcagtggcacaatcttggctcactgcaaccccctgggttcaagcgatgtttttatttttattttattttttcagaccgggtctcactctgttgcccaggctggggtgtgtaatggcacaatcttgtctcactgtaacctccgcctcccaagctcaagccatccttcygcctcagccccccaaatagcttgggactacaggcgcacaccaccacacccagctatttttgtattttttgtagagatagggtttttccatattgcccaggctggtcttgaactcctgagctcaatcgatctacctgcctcgggctcccaaagtgctgccaccgcatctggccacaattctggtttttagttgtgcaatcatcatcactaatttttatcc

SEQ ID NO: 545788 - DNA, 598 bp, Homo sapiens
ggcacgcaccaccacgcccagcaaatttttgtatttttagtagaaacggggtttcaccatgttggccaggatggtctcgatcttctgacctcgtgatctgcccgcctggggctcccaaagtgctgggattacaggcgtgagccactgcacccacaaacaccttctttacaggaaaacactagcagaaaattagctaagaacttggacagatacttcacaaaaaaaagaaagaaatgagcaagcttttgtacacaacattattcactggttaaagaattctaaatcaaagtgacgtgccatttttagttccccagatagacagtgactacttccttcaggtcttgactctgaagtcactgtcagtgaggccttcctgttcatcctgtctaaaatttcaaaccctaacccctgcatttcctagttttcctccttagcacctgccatgaacacgctatgtattgaacttatttttctggtctattacrtctccccccttgaatataaaatccagtcttgtgtttgctatttattgtccctgtagtacctagaacagttccagatatagaagacactcaaattttttttgttgttgaatcac

SEQ ID NO: 545789 - DNA, 497 bp, Homo sapiens
attagtgataaccaaaagatttacaatcttctaaatagagtgataccatctttggtaaatgagttgaattgttggcatttcttcattttgttttcctcataagaatagaatttcctccatacttattagcttttccagaggtyaatattatcacttcaaacttctaaatgcccatgttgataattggtcccaaaaagacattatcagttggtgcagaagtatattcctgtgagctttccataggtttctccaaaaaaggattgggtattttggatttccagctatcttggtattatctgctattctaatccagccatcacgaaataccaaaggagaatttggttactgaataaagtgtgcccactgtccaataagtgttgtgtgttttccaggatttcctttggttgctgtggacgtttcactgctgctgagttgctgtcattctctctgtctgtcatgctcgtcctcatctgggttctcactggccattggcttct

SEQ ID NO: 545790 - DNA, 541 bp, Homo sapiens
ggggatcattaggaagaaactatrtccaagacttaaaaatcaagggaaaaggctgggtgcggtggctcacgcctgtaatcccagcactttgggaggccgaagtgggcggataatgaggtcaggagatcgagaccgtcctggctaacacggtgaaatcccacctctactaaaaatacaaaaaattagctgggcgtggtggtgggtgcctatagtcccagctactcgggaggctgaggcaggagaaccgcgtgaatctgggagttggagcttgcagtgagccgagatcgcgccactgcactccagcctgggcgacagagcgagactccatctcaaaaaacaaaaacaaaaacaaaaacaaaaacaaaaaacatcaagggaaaaggaaacgtgacatcatgcaaacctaaggtttttatgatggagaacattggtatactacagagaactgcagcatcaggagtaaagccagcagaggtcataagtccagcaggctctttgttccgagttgctgcagatcattctggtggatgtatcctccaga

SEQ ID NO: 545791 - DNA, 576 bp, Homo sapiens
aggtcctggccaatgctccctctgggtgcctgattggctagggggtcaggccagcaggctccagtcaaggacaattgtcactgaagcagaatgagatccaacatataaattcaaactttccaagtctaattccactagaattacattaaactgttgggtcattataaagagtcatgacaaaaataaagtatgactggagcttccagatactcttgaattacctctttttgtcaagtccaatactcacattaaacatgcatctttctagttcacctctattgctcctaaaatctaaatgaagttactcagcttgtccccttgatgcctgtttccacggaaggtgtaagcaggcaggctttgtagtctgataagcctggctcaaatcctgctcttgaaactaagcaacatatttagctgccctgygctacagtttactcacataggtaaaggatcaactactgctgagctgtgtccccccgaaaatcgtatgttgaagtagtaacccccaatgtgaaatattgagaggtggaggctttgggaggtgatgtggtcttgagtgtggatgagtgcccttag

SEQ ID NO: 545792 - DNA, 605 bp, Homo sapiens
ctgagggagggcgccatcagttgtgagatgaatcctggtgacggggatcttcagatgtgaaaatgaaaagtgtatcttagagcaggggagtatggtatccaaaacctttgcgtttctcatctggaaaatgttcagattggagaaagtcagtaaccattttctttaaccagttaatacattcatattacttggcagaaaatagccytcaaagtatttcccaacgtttcgagatgtttagtaatcttattttttaaatcgcagataccttagtcaatgtctgttgaaaatgtaaaccattcacctttatttgatttgttatgcaacctaagttttagttccattaccaacactcgagcttaaattcctagtatggtaataatttaatcaactcaatgtatgtgatttaaattcaatgtatgtgttgactaaaactcatatttgaagtttccttcttgattctaagttctgaaattctgaacagggcctatgtgctgtatctgctgttatgaaaagttgccattgtgccatggtgtgacctgagcccagcatccagcagggcctggcacccgtgggggtagatagtgcacttttgtgcattttttaca

SEQ ID NO: 545793 - DNA, 605 bp, Homo sapiens
ctgagggagggcgccatcagttgtgagatgaatcctggtgacggggatcttcagatgtgaaaatgaaaagtgtatcttagagcaggggagtatggtatccaaaacctttgcgtttctcatctggaaaatgttcagattggagaaagtcagtaaccattttctttaaccagttaatacattcatattacttggcagaaaatagccttcaaagtatttcccaacgtttcgagatgtttagtaatcttattttttaaatcgcagataccttagtcaatgtctgttgaaaatgtaaaccattcacctttatttgatttgttatgcaacctaagttttagttccattaccaacactcgagcttaaattcctagtatggtaataatttaatcaactcaatgtatgtgatttaaattcaatgtatgtgttgactaaaactcatatttgaagtttccttcttgattctaagttctgaaattctgaacagggcctatgtgctgtatctgctgttatgaaaagttgccattgtgccatggtgtgacctgagcccagcatccagcagggcctggcacccgtgggggtagatagygcacttttgtgcattttttaca

SEQ ID NO: 545794 - DNA, 621 bp, Homo sapiens
tcatgtatacagaatgggtgttagaaacagaaaggaggtagagattccagagttacttttcatagaaaattagcttgaaatgctttcttccaatctggaaactactagtcagacaattttaggggccagaaaacctttaggtctaaatcaagaggaaaaacaaaaaggatattgggggagaataatggtgtgtgagtcagttttgcattgctctaaaggcatacccgagattgggtaatttataaagaaaagaggttcatttgctcacagctccgcaggctatacagccacggcatcaccatctggtcagcttctatgaggccttaggaagtttacaatcatggcagagggcgaagggagagccactgcatcgcatggcaagagaaggagaggtgccaggctctttaaacaaccagctctctcatgaaccygtaaccatggggaggggaccaagccattcataagagatccttcaccatgacccaaacacctcacactgggtcccaccttcaacactggggaacaagttccaacatgaaatttggaggggacaagaatccaaaccataccaaatagtgaggttaaatttcaattattctatatacttcctgctgctgtatg

SEQ ID NO: 545795 - DNA, 621 bp, Homo sapiens
tcatgtatacagaatgggtgttagaaacagaaaggaggtagagattccagagttacttttcatagaaaattagcttgaaatgctttcttccaatctggaaactactagtcagacaattttaggggccagaaaacctttaggtctaaatcaagaggaaaaacaaaaaggatattgggggagaataatggtgtgtgagtcagttttgcattgctctaaaggcatacccgagattgggtaatttataaagaaaagaggttcatttgctcacagctccgcaggctatacagccacggcatcaccatctggtcagcttctatgaggccttaggaagtttacaatcatggcagagggcgaagggagagccactgcatcgcatggcaagagaaggagaggtgccaggctctttaaacaaccagctctctcatgaacctgtaaccatggggaggggaccaagccattcataagagatccttcaccatgacccaaacacctcacactgggtcccaccttcaacactggggawcaagttccaacatgaaatttggaggggacaagaatccaaaccataccaaatagtgaggttaaatttcaattattctatatacttcctgctgctgtatg

SEQ ID NO: 545796 - DNA, 663 bp, Homo sapiens
gtggcttaaaacagcagtgactccctcgcagtcctggaggccagaagcctgcaaccaaggtgtgagcagggccaggctccctcagatgcctttgtgggaggatcctcctttggtggcagcatcactccagcctcttctgtcttctgtctatggctttgtctctcctcctctcatgaggacaccagtcatcttagatcagggctcatcctcgaggcctcatctcaacttcattccatctataaagaccctgttccgagtcagatmacatcctcaggcatcaggggttaggacacgaatgcatcttgttgggtaacacacttcaacccatcacaggggcacaactggtggtgtgggcagtgtgggccctcagctttcatcccttctcaggccagggctgctgcatatttctagctgcagttgtttgggatggcagaggggctgcctgactcccgtgtgcattcttccctgtcccattgtggaaaagcagctcttttcctgctggcaaggccatgccctcaccaagacggtggctccaattctcacggctcgtccctggacacgagcagtacgcagcaacaagacaggagccaccgctgtggcagaggggcttggccctcccatcctgcagatcccagagctgcggaggcgggaggtaggatctcc

SEQ ID NO: 545797 - DNA, 513 bp, Homo sapiens
gcaagctacccaagaggtctcctggctctcacacgcatcctctaattgcccatctgcaggtcatccttacagctgaataaaagccagccaactccactgggccctgcacgtctttcatacgttggtgtcatcacaaaagcaaagatcttcccttccccaagacagttcctcaagtccctgtcagtgagacactcagtcaggggtgccaccaggtgccaggcactatgcatgccccccaccttccactcagcatgtggtcttccttgtcaggcatgggaggcggaggttgtggtgagccactgcactccagcctgggcaacaagagcaaactccgtcaaaaaaaaaaaaaaaaaaaaagccagggaaggatctggagtaygtgaagtaagtatctcagaagagacgatcttcccatggtgcgggggatggattccagtcaggcaggcagtttagaggcagttacagccactggcgagggtcctgctgaggaaatgggaggagtgtgatggcgga

SEQ ID NO: 545798 - DNA, 551 bp, Homo sapiens
actgagttatttcatgcctattttatgcttagatgaactcttgagatgctcaagatcacgaaagkctcatggggaagatggggtgcagaggatagagtggtcccagctctactttgagtgggggatctccttcagccacttccttgggcatgcaaagatgattgctcaacagaaactaatcttatactgaatgtcacacgtaacatgtgcttgtatcttagtaagtcagtatagttgaatcaaagaactacatataaacaatagaaaaaaaaatgcccctggcagatggcaaagggaaattctgtttccagtttattccttaattgagctctgtgtaaagtacatgaagagattctgaaactcttttttttttttctctgtctccagctaatgctgttttccagtctttgagctgccaatgtacgatgagaaatccactcattgacatgacagaaaagacagttgtacagcagaaatggtatggtctgttgcaataaattacaggtttccttttcatgttcagcacaagaggcggccctcatgcaattagc

SEQ ID NO: 545799 - DNA, 601 bp, Homo sapiens
ttccagagtggggatgggagaaggtgctggaatgaaggactcaagagacgcatatgaagctcattttgacgctttatcactttgtattgttgagaaatgcttgttctgtcttcaygcctgaggtttcttcttgtcaacttggatgaatggactatagaatgtacacatttcctgcttgcactgtgattgaaagtcccatataaataaaaattagttgacctttgcattgttgcggtattatgccaaatgcagaaaagcttaagggtataataataaaagctaaaatggataaactaagtctgacttagagaattatcaaaatctcaaagcatttcagggacaaaaaatgatttttaaaaagtaaacatttatatacttttaactctatattttatcactgtttcctcctacagcttatttaaatgcacattccagttataataattttgagtaaatcccccagttgacttgaatgtgtacaaacttgctcctggccatttgaatctgatgcaattcagcaaattttgaaatttgtattccagttattcaagtaaatgaatagtgtcatttgattatttgacgtgatttttttttaaaagca

SEQ ID NO: 545800 - DNA, 494 bp, Homo sapiens
ctgattcaggcctggaatattttcaagacagatgttactaggacattggctttacccacagaaatcttctgcagtatgtctatggattctcaattccatggccaaacaatgaccctctgggtgtctgaacatgttggcttgcggtatggggttatttggtttcctgcaatttaaatatacagattatctgtcagcgtcactgactttggtttcagcataatattgagctacktttttttggttctatatttgatatccatattgcttagcttctttgggccactgctacctcatgatcataaaaccattgccaaggaggttatttgtttcctgtttgttgcatagcacgagtgcatctaaacaggtcatgagttgaagctaactgaaaaaagttgactatgaaactgcacattgtgcgtaaacatttggaaggtggaagtgtggataattttcagttttttcatagtacatatttttattcttgaaataaacac

SEQ ID NO: 545801 - DNA, 548 bp, Homo sapiens
tatatctgtggcagagatctgggggatgtgttcccttcacccagttcttcttaagctctgtgccccatctccttcccatttagtacaaaaatttgaaaactgtactgttagtctttctcctcatctatagaatacataataaacttgcttacatgctccaggctgtaggctaggaagctatgtcctcctagtcagttctccagttcctccctacacttgcatttcaagttcttatcaacacagtagttcctgcttacaaaaggctcataaragcaggctgctttgcttccacctctaagagactggggacttttttggtgggtgtggacgtaactagcgaaaggatgaagtagaggggaggatagagctgtatgcaattagaaatgcagaagccatttttcctaggggagaaatagcaaaaatgatatttaaattccatggagatattcattctataattctaccatattatggattaatttctttttactagccagaaaacttaaaacagcatttatttgtagcaccattgctgtaggaaaatggat

SEQ ID NO: 545802 - DNA, 624 bp, Homo sapiens
gtatcttggtagatgtgttacaagtttttccacttaaaagtggcacagtttcagtgttttcttgcagaaaattgatttttaggtaaggatcactgccactgagttggagaggctatcttacctcatttaatcctcatagcaacccattcaggctggtggtattatcctcattttactgatgatgaaacagaagcacagaggtaaagtaacttgcccaaggtcacactgctattggcacggctgagatttagacctaggcaatttgttgtcagggtctttaccaatgtgccattcagaaaaattattttgtttctatcttttgtgaaccgaatgctatttcttcaagtgtatacagagcmagttaaaagtacaagggaatgtttgcctgtctggtagtttgtgtttgtttttgtaataaaagctctactccctttggtatttggagaaagttatgccagtctggattctaggcaattcactggtagtaaaataggtactttgggaaatcaccttaactgctttcaggcgccaagatgctatttactacaatgaagtagtaaatacttctacaaaattctgccatttagtaaataattttgtgccgccttgacgtcgactggcatt

SEQ ID NO: 545803 - DNA, 586 bp, Homo sapiens
tgtgttagacattctacaatttcaggacagacttgccaaacaaagaattgtctggtgtctagaatgacctatttggcattcctgagaagatgtcatgtacaagtcagtctcacctctgcttaatctaactcaagttttttattttttatttttagagacagagtcttactctgtttacccaggctggagtgcaggtaaacgatcatagctcactgtagcctctagctcctgggctcaagcaatcctcccacctcagcctcccgagtagctrttaatagaactataggctcacatcactgcacctgggtaatttttaatttttttttatagagatgaggtcttgctttgttgcccaggctgatcttgaacccccaggctcaagcagtcttcccactttagcctcccaaagcactgaggttataggcataagccactgcgcctggccctaattcacatcttcatttgtgaagatgaacacacgtgtccctttatccttttaatttttgtatttctcatgcagaatgttttctgatcttatttttttccaaatgtgaactcattctataggtaaatataataaacagtt

SEQ ID NO: 545804 - DNA, 617 bp, Homo sapiens
gtttcacactgtctagtttggagcaggatttaatcgtggtttcattaataaatcaaaggaagaatgacagtattgaaaaaaagaacgaaaagaagattgaatgaatgtgggggcacagagggagggaggagagggaagaagctggttccagtctcgtagaagtctagaaagagaagactccagcttttgccatcagtgcctgcaggtgtgatgtgggtaggactttagctgggtgtggacctagaaggagaagcaggttgaaagaggactgtttaagattggccgtagggtgggtggcgctgyttctgctgctgctccagcctttggcgtctacacttttcaaaataaaacacgaaccccagacgtgggcatgcaaggcttgctgtgaagttctgacaagaaaatggacatccttgaaaaacaatggccacacacacaaaaaaacagggagcatgaagtccaacaactcgggatcagatcttgcagacatcatggaagctctggatctccatttgctcatctggatgctggaatgataaccactgattccaatcatccgactataaatcagcaagcagaggaccctttggtttaaccaacactcctatgaaatagag

SEQ ID NO: 545805 - DNA, 548 bp, Homo sapiens
agctgattgtgctattataatgatggcttaagatgtcccctccttttctagttcagtttctaagcggaattacctgttaaacctgccatcttggagttgctaaaatggaaatacaggaagaaaggaattaacctgtggaatggaggatcagtaggctggagggggaacacctgggtgtgtgatctttggccagtcatggctcagtctggactatagtttcttcctctgtaaattggtgggagggaggctctgtccaaccctattttctctctccatccttctagatgatcccacctccccaaactctatggtcttctggatgtgcaagataygtgcactggtgatgcacgcgagcctaggagggggtagattccagaatatgagtttctggggcctcggaaaggaaacagctatttatcatgcatcattatacaccctgctgtctgcagatacttcagtgttactgcaggggattctctgaatttctccgcttttggcttcccattttccccttcccccagctcaatcccccattgatccagtcccct

SEQ ID NO: 545806 - DNA, 548 bp, Homo sapiens
agctgattgtgctattataatgatggcttaagatgtcccctccttttctagttcagtttctaagcggaattacctgttaaacctgccatcttggagttgctaaaatggaaatacaggaagaaaggaattaacctgtggaatggaggatcagtaggctggagggggaacacctgggtgtgtgatctttggccagtcatggctcagtctggactatagtttcttcctctgtaaattggtgggagggaggctctgtccaaccctattttctctctccatccttctagatgatcccacctccccaaactctatggtcttctggatgtgcaagatatgtgcactggtgatgcacgcgagcctaggagggggtagattccagaatatgagtttctggggcctcggaaaggaaacagctatttatcatgcatcattatrcaccctgctgtctgcagatacttcagtgttactgcaggggattctctgaatttctccgcttttggcttcccattttccccttcccccagctcaatcccccattgatccagtcccct

SEQ ID NO: 545807 - DNA, 165 bp, Homo sapiens
gctggcccaggggccacccataattgagaaatgataggaggcacctgtgayttgaccttggctaatgatgaatggacccatatagagaccaggagccaaggattcatgggctggagcatccatccagagagcacatgtggaagaaagggaaaagagatgtttgta

SEQ ID NO: 545808 - DNA, 165 bp, Homo sapiens
gctggcccaggggccacccataattgagaaatgataggaggcacctgtgacttgaccttggctaatgatgaatggacccatatagagaccaggagccaaggattcatgggctggagcatccawccagagagcacatgtggaagaaagggaaaagagatgtttgta

SEQ ID NO: 545809 - DNA, 379 bp, Homo sapiens
gttctaatggttatgtatgctttatttatattttctgagagacattaaaaggacgatgtgtaaaaatacgcaacccaaaccaatggtgatttatggttactcatggaatgatgrcaaaatggaaagttatgaagttaatttccggatgtgtggcggtggggaaggggacactatagcctgcagtagtggcaaaggtcttagttctggcaaaggctggatttggtgggaaatttgtcattgggatgatcatagctctaaggccttttttggaagcagtgtaaagccagtgggaatattaagggtgtttcttttgatgctggagatggggaagggctgcccagacaggttaagtcagttttctaaagtcacacagcaaggg

SEQ ID NO: 545810 - DNA, 379 bp, Homo sapiens
gttctaatggttatgtatgctttatttatattttctgagagacattaaaaggacgatgtgtaaaaatacgcaacccaaaccaatggtgatttatggttactcatggaatgatggcaaaatggaaagttatgargttaatttccggatgtgtggcggtggggaaggggacactatagcctgcagtagtggcaaaggtcttagttctggcaaaggctggatttggtgggaaatttgtcattgggatgatcatagctctaaggccttttttggaagcagtgtaaagccagtgggaatattaagggtgtttcttttgatgctggagatggggaagggctgcccagacaggttaagtcagttttctaaagtcacacagcaaggg

SEQ ID NO: 545811 - DNA, 434 bp, Homo sapiens
cataatgcctctggtggcctctaagtggtaggaagacagccacaactcyaaaatgggcagacaagggcaatctgaagtccctctttgaccttcttctagcatgccacaccagggcagagtagaaccagcacgtgcggaaacactggagctaagatctatgcgagtggctctgggaatccactcatgggggcattggggatctggaagctggcagtgccacccacttcatggaccagacaggcatgaatttacctatggcacttggctggagatgttggtttactgggagcctggagggtgaagggattcggggaactcatactgaaacaagttctcccctttcctgctggacttcccccacactctgcccttcaaatctgatgtccactcagctcttgatgttggagtcagtgattctgcagaacaagtgttta

SEQ ID NO: 545812 - DNA, 601 bp, Homo sapiens
ccggcacttgattttagacttccgccttccagagctgtgagtcagcccatttctgttgttctgtgccactcagtttgtggtgctttgttccagtagcctgatgaaatgaatacaaaaggaaacacacaggtgagcagagggctgaggggctgctgcgtckgcaggcatagaggatggactccagggtcagtcagcattgacttggaacatgagagttgaagttttaagagggaatttggtgttgagggtcagaatcagggctctagagataagattcagacattcttagctcctcatttcatggcgctgggcgagtcatcaagcctccctttgtctcggttttctcatccatataatagggacaacaatggacctcacggtattatgagattaaacagtattacaaatgttaagaacttatcatagtctgtggcatgcagtacacatctgaaacgtcatagctttcttcattcctagttgagtgaccttgggcaagtcactttgcttgtatgaggcctcaatttcctcctctgtgagagagggttgataatcctgaccttacttttctgttaaaagcatgtcataaggtgtaaaaacatct

SEQ ID NO: 545813 - DNA, 634 bp, Homo sapiens
ctgtgccggcacttgattttagacttccgccttccagagctgtgagtcagcccatttctgttgttctgtgccactcagtttgtggtgctttgttccagtagcctgatgaaatgaatacaaaaggaaacacacaggtgagcagagggctgaggggctgctgcgtctgcaggcatagaggatggactccagggtcagtcagcattgacttggaacatgagagttgaagttttaagagggaatttggtgttgagggtcagaatcagggctctagagataagattcagacattcttagctcctcatttcatggcgctgggcgagtcatcaagcctccctttgtctcggttttctcatccatataatagggacaacaatggacctcacggtattatgagattaaacagtattacaaatgttaagaacttatcatagtctgtggcatgcagtacacatctgaaacgtcatagctttcttcattcctagttgagtgaccttgggcaagtcactttgcttgtatgaggcctcaatttcctcytctgtgagagagggttgataatcctgaccttacttttctgttaaaagcatgtcataaggtgtaaaaacatctgtcccaataactggtagaaagtaagggg

SEQ ID NO: 545814 - DNA, 474 bp, Homo sapiens
gcctgtatactgtcaaacacttagtaattgttcagaaaatatagaatggatacattaataacgaatgaatgttaaaaaggaagttgaatttaagcctagtgagggtaacactttatgtctttttttttcctgttgaaaacccaacatctagaacaatgctcagtacatagatgatgatcactaactacttgtttattgtatgtgtgagtgtggaatgartgaataagagaacaaaggctcttttctttgctaactctggaagttagagaaagtaatttattcattttttaatagatgaggaaatgaagtctcagaagaatcaatttatgagaagtcgcttggtgaagtgtagaatgatatacaaatacatatccattattaattgacacaataatgctgtgaaaccaccacacacttcagcagtgtatggtaataaatatttatggctcaggtaagctgggctaggctggatgg

SEQ ID NO: 545815 - DNA, 526 bp, Homo sapiens
ctgaacttcaatgggtgaaatggatgtaaacagtttagcacaattcctgatgtgaattgtgtgctcagaaattaaaagagagagaggaagaaattgggttctctgaggttagtgggggactaggatccctccttgccccctactgaacctgatccaccccagtcctcacccttcttctcttcctgcttattcctcatgcctcatcgctgcattcactcttggtcctggcccctcaccctgcattctactgctggggcagccagcagagacagacatgacaggagacagggaaagkcagaactgggaagagggcttgaagaagattgatactggcattgttgtcatggcaacaccaggatgagctagaggccccactgctgggatcagcttctgtagttcttctcagattcgagagcctttgagggtaggcaagaagctcagataggggccctgagaaaaacaggtggggcctcagggtgacagccagtgagagggcaggcactgggacctgggatgcccttctgac

SEQ ID NO: 545816 - DNA, 520 bp, Homo sapiens
tcaaatacttacaagttaagatttatatagtttttatagtttgcagctatctttaataaagttcataatcttacaactgaatccttttcattaactgttatatttttaaaatcactaactttcactacaaccactgttggattacctaattactttgagaatctctcaaaagcacttggaagractcatctcagaaaacagcaccgctatttcttacatggctgtacaaaaagctgaggggtcttccttgactctgccttattcccacacaacccacatgcacagccactacagatctcacctgcccaacttccaaatgtgccctgtccaggtccactccatcctctggacttctgcattattttcctaattgttatccccactccctatcttgtccctgtccagtccattctccaaatagcgaccagtcagcttctgaaaaagtgaatcaaatcacatctctctcacactctaaccttccacagtcacaatacaatcatccagactccttacatggccc

SEQ ID NO: 545817 - DNA, 561 bp, Homo sapiens
accaccttttgcccccttctgttctgactttataagagacaggatttggattcttcagaaattacagaataattcatttttccttaaccagttgtgcaaggacagcaacaaccaatctaatgatgagaatgtacttatattttgttttgctattaacctacttacggggttagggatttgcggggggggcttgtgtgttttgttggcttgtttgccatgaaggtagatgtgggtggggagaagacacaaggcagtttgttctggctagatgagagggaacccaggaattgtgaggttagcaggaatatctttagggtgagtgagttttcyttgagttgggcacccgttgtgagagtttcagaacctttggccagcaggagagaggtggtagggagcagccagccggcaaaggaaggagggggaaaaaaaccgccaccgggctgacttccacctcccagtggtgagcagtgggggcccaaacccagtttccttctcatttttgttagtttgcgctttcggcctccctattttcttagggaaggggagtggggtccaagtgac

SEQ ID NO: 545818 - DNA, 641 bp, Homo sapiens
atgaagtcttttcttgcggacactccctcctgtctcctattttctgtaaataattttctccttttttctctcttgatgctcaccaccaccttttgcccccttctgttctgactttataagagacaggatttggattcttcagaaattacagaataattcatttttccttaaccagttgtgcaaggacagcaacaaccaatctaatgatgagaatgtacttatattttgttttgctattaacctacttacggggttagggatttgcggggggggcttgtgtgttttgttggcttgtttgccatgaaggtagatgtgggtggggagaagacacaaggcagtttgttctggctagatgagagggaacccaggaattgtgaggttagcaggaatatctttagggtgagtgagttttctttgagttgggcacccgttgtgagagtttcagaacctttggccagcaggagagaggtggtagggagcagccagccggcaaaggaaggaggkggaaaaaaaccgccaccgggctgacttccacctcccagtggtgagcagtgggggcccaaacccagtttccttctcatttttgttagtttgcgctttcggcctccctattttcttagggaaggggagtggggtccaag

SEQ ID NO: 545819 - DNA, 210 bp, Homo sapiens
gagagtttcagaacctttggccagcaggagagaggtggtagggagcagccagccggcaaaggaaggagggggaaaaaaaccgccaccgggctgacttccacctcccagtggtgagcagtgggggcccaaacccagtttccttctcatttttgttagtttgcsctttcggcctccctattttcttagggaaggggagtggggtccaagtga

SEQ ID NO: 545820 - DNA, 638 bp, Homo sapiens
tggcagaaggatgagagacaggcaatggttacatgactccgaaggcctattgactggtcatcagacgggaatggaacttatggatcatctcatttcatgctcctacttttgcagaacaaaaccaggggcttgtggtagagaagggcctcagttagggacacacagcgagccatggcagagttgggtcctctgacttcccctgcttttttcctgatgtcttggctgctcccacctcacgctagcttcctctgtgctgggaagggcccttgctaagctgcttggatccagctcttcctggtaccccttctgttactttgttggggtgagtgcccagatgytcctctgcagtcttggagagccctgctctactgccagcaccctcccaggctgtgggcagaatgaatggccaaagagggtgtccctgaaccttaaagaaccttccagtttccagcagcctctctgctttctttcaactctgctaagcagccagtaccattcactccctgtagcaggaaaggtccttttttcctctgtgctggaacccagttgtgatgagactatttgaaagcagtggtccacgaactgcaatgatggggagactaccacccagctcggcctccaggtctgtgatgatgggc

SEQ ID NO: 545821 - DNA, 592 bp, Homo sapiens
agccttccctcgtctctgtctgtgtagggaaggcaaagacacaggaaaatgacagcttagtgtccggaaccctggggtcactgcaggagctggactccagtctgattgcatagagctgtagtaacccatgagtctgtgagcacagaggggccgggacgattgcagtcatccgtgtctcccgaaagcacagtgcctgtggcttctaggctgcaagcatgaagcctcccattgcagaggggaagaggctgcccttcagcgaaatgtggagtgggctgaggggatcttgggtacggggttttaaaaaacgtaatyctgggttcaaatccctgtgctgccctctatgacctgtgacctgggtcagtttctttatgtccctgagctttggccttcttgtctatgtagcagagataatctcaaccgtctaggtggtggcatgcatgaatgatagcttctatttactgaacacttactacgtgcgtggcactatgcccagtgctttaattggatcttttttttaaaatgggatgattgtaaaggccgggccgaggatctcccctggggatgggcagtcatggtgcttccccgccctggg

SEQ ID NO: 545822 - DNA, 551 bp, Homo sapiens
ggagggtgcgctggggccacatggctgtgccctcactgcaccgtctgcacagcaggctgtggcaggtgctaggggtttgggagacctgagaagaggctgttgaaattgtcttacttgggcggcagagagctggcttgggaaacaggcggtgcggatgggaaggggaaagcaggtggcagtgtggcctctggagaactgtggcgctgacacgggctaagcaggaaggtgggttccatttgggaggacctgggtcccagcagcctggggtgtgctgtctggggctgccgaggggcagagggagcttggggaggccctttatctaggctccgtgggaccctgtgctgtcactgagcacttgctgtgtgtgaggcctgggaccaggcttgggtgtggggaagttccacacggttcttgctttcaaagagtgcactgttggcgatcctgcttctgcaccccacttccctgcaggcttctcgatggttctcctcattgtgcagaccacactcascctctgtgggctcagcaacagtcacagatggacctggctttgg

SEQ ID NO: 545823 - DNA, 572 bp, Homo sapiens
gggtgaccctgctgcatccggggcttctatctggtggtcataatagagggccatgacggaactcaggcctsctcagcgctgaaacctgcagggaaaaaaaaatgaccaagtccaatcagttttaaataaaacaaacaatatgactgtacatggaatgacgaaaaggaagcatcccaaagccaccatcggaagaccatcggcaacttgaaaatgccttgcggactgagcaggcaacctgatgcgaggagatctccaacagggagacatgcagaagagaagcagttagacccggaatcacccaggctgtgacagaaacgaatacaactcatggccatcaaaggaggaaagaaagaaaaggcctgcagcctaactacacacgcaatcctcagtaactttcattccagtcacaataaggacaagttctatttctgtagttccctttaactttttagaccaagtcttgctctgtcacccaggctggagtgcagtggtgtgatcacggctcactgcagcctcaaactcctgggctcaagtgatcctcccacctcagcctctcaagtagctgggactac

SEQ ID NO: 545824 - DNA, 633 bp, Homo sapiens
tggattattgggtgggccattgcatctctctgggcttattttcccctctgtgaaactagtacctttagccatgagttctctaagtttcttttcatgctcatgttctggtatggctccaactgctcctggagagggaagcagggcagagtgggcttttccagcccctgcccagggcaggggtgggatagaggcagacatgggcttcttgagccaaaggaggtggagagcctgtgcatgaggtggacggtggaggatgagaccccactgggtgctcatctcaccccctgcctgccacatatggacaggctatggactgaagagccacgttcgtacccacactggtgagaaaccatacaagtgcccagaggagctgtgcagcaaggccttcaagacctcaggagacctgcagaagcatgtccgtacccacactggtatgctgggccctgcccactccaaccccattccctgggcaaaaggaattcagcttgcctttcagacttagacctggagcscagtgccatccccagcttgctccagcatggccctctttcccacacccctcctcacatcccaccatttgcataggtgaacgcccgttccagtgcccttttgagggctgtggccgctccttca

SEQ ID NO: 545825 - DNA, 435 bp, Homo sapiens
ggctccagggtagccaaacaggaccagggtgaccgctgcttccaggctctggctgartctcaggcctcatgtgattgagctgggggaactcttttcctgccttttcttgtgaaacgtagtcagagcccctccaacccagccacccccaaatcacacagtcagcttctccaagagggcaaagccccaggttagagtgaggctgggggacacctttgccaaggttactgagattcaaggagcagagtctgatgcctctggagctgaagtcttggctctattacccagctctgggggtgcccacctaggtgcctaggactgtgctgtgggatttcaaagccacaatcagaccccactgaaaagtgagttggtgagaccagatcagctccagggggaagaagggatacaggggaaggcacttgatgggaagaagctctg

SEQ ID NO: 545826 - DNA, 554 bp, Homo sapiens
gcaggtgggctccagggtagccaaacaggaccagggtgaccgctgcttccaggctctggctgaatctcagrcctcatgtgattgagctgggggaactcttttcctgccttttcttgtgaaacgtagtcagagcccctccaacccagccacccccaaatcacacagtcagcttctccaagagggcaaagccccaggttagagtgaggctgggggacacctttgccaaggttactgagattcaaggagcagagtctgatgcctctggagctgaagtcttggctctattacccagctctgggggtgcccacctaggtgcctaggactgtgctgtgggatttcaaagccacaatcagaccccactgaaaagtgagttggtgagaccagatcagctccagggggaagaagggatacaggggaaggcacttgatgggaagaagctctgggtttgactctgcctacacaggaacattgcagggattggtggtgcctcttttcctctctctgctgtgatggatatgccccaaccccttcctgcctcctaggattggaacccc

SEQ ID NO: 545827 - DNA, 254 bp, Homo sapiens
gggctccagggtagccaaacaggaccagggtgaccgctgcttccaggctctggctgaatctcaggcctcatgtgattgagctgggggaactcttttcctgccttttcttgtgaaaygtagtcagagcccctccaacccagccacccccaaatcacacagtcagcttctccaagagggcaaagccccaggttagagtgaggctgggggacacctttgccaaggttactgagattcaaggagcagagtctgatgcc

SEQ ID NO: 545828 - DNA, 554 bp, Homo sapiens
gcaggtgggctccagggtagccaaacaggaccagggtgaccgctgcttccaggctctggctgaatctcaggcctcatgtgattgagctgggggaactcttttcctgccttttcttgtgaaacgtagtcagagcccctccaacccagccacccccaaatcacacagtcagcttctccaagagggcaaagccccaggttagagtgaggctgggggacacctttgccaaggttactgagattcaaggagcagagtstgatgcctctggagctgaagtcttggctctattacccagctctgggggtgcccacctaggtgcctaggactgtgctgtgggatttcaaagccacaatcagaccccactgaaaagtgagttggtgagaccagatcagctccagggggaagaagggatacaggggaaggcacttgatgggaagaagctctgggtttgactctgcctacacaggaacattgcagggattggtggtgcctcttttcctctctctgctgtgatggatatgccccaaccccttcctgcctcctaggattggaacccc

SEQ ID NO: 545829 - DNA, 584 bp, Homo sapiens
cagggcagtgtgctggatgcaggaaaaccaagggtgaatcaaaagttgagaaggaagagttggtgaattgtgctatgagcaacagaagcatactggggaagaggactgaaagagagcagtaaccgtgagatccctggtgcccatgcaaagcccaagaagtgatgagcagaagccagaaagctagggctggagcagagagcagtgagaggtggctgcagccagcacaggcggctctcgtgaagcatttggtattagcgggagagttggggaaggaggatcaaagtcaggatgagtctattagtctgttcttgyattactacagagaaatgcctgagattgggtaatttataaagaaaagaagtttaattggctcctggttccacaggctgcacaggaagcatgattctggtatcttcttggcttctggggaggcctcagaaaacttacaatcatggtgtaaggcaaaaaggaatctagcccttcacatggccagagcaggaggaagagaggggagggaggtgccacacgtttaaacaatcagatctcatgagaactcactcgctgtcatgagaacagcaccgagg

SEQ ID NO: 545830 - DNA, 667 bp, Homo sapiens
gactctcacaggatcactcagctctcagtggcagaatgggaactgacccctggtttccccctgcagagtgcagtgtcttttgtgtgggatgaaacatgctcccaatcccattgccacattcctcttctgagtctgccgggactgctgtggaaggtgctcagtgaagcactggtgggtgggctgccatatctgggttccttgcagtgcacctactgaaagcctagaaggaccttcactccatgacagacacagtacccagaggctgggaaagttagggacgaagacgggcagagacaaagggggtgctggactctggcaggatcatccatcgtgctggagtggggaatctccctagagtgtatctcgggagagtgccatgttgttagggagaacctaggctatggagtcagcctgacccagttctgcgctggagtagttaygtgaaaacagtgggcctcagtctcgtcatctgaaatggaatttcagtgcacaactcctaggagttgttcagagatgaatgttaagtgcctggcccagagcctgttcccagttggctgagctttcctctgtgtgcacgcccctcatcacaccagcaaatggtcagcttgtcttctgggccctagcgatgaattaagcgctgctgggagatcccctctgggtgttgctt

SEQ ID NO: 545831 - DNA, 639 bp, Homo sapiens
aacacatactgggcatcaggatataatcattcattcattcactcattcagcaaataattactgagcagctaccatctgtcagccgcattccaagtcctgagaagattcaacaatgagcaaaataaagtccttgctctcaatgagcttaaaacaaagcgtaaagtttgtgcgtcttttgttagatttattcccaaagagtggatgtttttgatgctatactaaatcattttttttttccttggcatactaaaaattttgttatttattctatggctgccaatacggagaaatgcaattcttttgtgtgtgtgggccttgtacccagcatccttgctaaatttatttacccagtctaatagcttatctgyagtactctgggtattttctacatatacaatcatgccatctgcaaataatgaaagttttattcagtcctttctgatctttatgctttgatttctttttcttgctttattacactgagtaggctctcccacccagtatcaagtagacgtggtaaggtgattgtaggcattcttgtcttgctcttgatctcaaaaggaaaactttcaataattcacctttaattacgatacttgctgtaaagttttagtatgtattctttatcagattgaggaa

SEQ ID NO: 545832 - DNA, 389 bp, Homo sapiens
gctgctgtgattgtccacactcagctcccttccccccttccctcccatcatgggcttttcaatccattcctagttgaagcagaggctccccggagtccattcattctggcatctccagctccaggtgaaggatatagctatgcacagaccctactggtgctctggtggatttctcggctcagggaatttcaggatgaaaccaagggccctgcgatgtcatccagtctcctggagcatcctacagggaggaaagaaggcatcgagggatgccccgccctcccaytttttcattcatgtcttcctccctgaacactgcatggagccgctatagccaagagcccaggacccaacctccctgcccaagccttgccctttttggctcaggaggg

SEQ ID NO: 545833 - DNA, 389 bp, Homo sapiens
gctgctgtgattgtccacactcagctcccttccccccttccctcccatcatgggcttttcaatccattcctagttgaagcagaggctccccggagtccattcattctggcatctccagctccaggtgaaggatatagctatgcacagaccctactggtgctctggtggatttctcggctcagggaatttcaggatgaaaccaagggccctgcgatgtcatccagtctcctggagcatcctacagggaggaaagaaggcatcgagggatgccccgccctcccattttttcattcatgtcttcctccctgaacactgcatggagcygctatagccaagagcccaggacccaacctccctgcccaagccttgccctttttggctcaggaggg

SEQ ID NO: 545834 - DNA, 600 bp, Homo sapiens
tgctgctgtgattgtccacactcagctcccttccccccttccctcccatcatgggcttttcaatccattcctagttgaagcagaggctccccggagtccattcattctggcatctccagctccaggtgaaggatatagctatgcacagaccctactggtgctctggtggatttctcggctcagggaatttcaggatgaaaccaagggccctgcgatgtcatccagtctcctggagcatcctacagggaggaaagaaggcatcgagggatgccccgccctcccattttttcattcatgtcttcctccctgaacactgcatggagccrctatagccaagagcccaggacccaacctccctgcccaagccttgccctttttggctcaggaggggccatctgggctcctggtgaggaggggggtgagctgatttagggggcagcgaggcagaggaactgagttgcccccttgccgggctctcaagtcctggcactgccccacctggctgcagaaccctgggcaactcacttacctctctgagcttccatttctttgtaaataggggtcacgatttccatctcacaggaatggtcattctttcat

SEQ ID NO: 545835 - DNA, 645 bp, Homo sapiens
ggagccaagagacaacaggaaacccaaaacaatgatcacctgcttccagacaactttgcttttttgccttgtggggaaacttataaattatttggagagcaatattagtctttttgcttctgaaaaaggttctgcatctttgatagagcctggttttgaaacataactcacagagttgtacaaataccccatcaatagtgcagtggctcatttcattgttctcagygcatggaatcttcattatttgcactgttgataaaaggcagcattttcagcagatctgcactactccatttagctgagaacaatgatttattcctccctcactattggacatcctcaatttccttgggtaataaagaatgctcccatggatgggatgaacaggagcgaccggctgctctgagcctggcaaagtcaggaagagcaagaaggatcctgactggtggctcctgcccagggagaaggacccagagcctgcctccccgcctcactggcaaccacagcctgtggtggaagtccggagttagtacacgtcattgacaaattgcccaggaagcagccgggcccctgatggaaaactgcccatctcagcacagacagtgcgcctggtcccaaacgctcctttctacgtggaggtgaaat

SEQ ID NO: 545836 - DNA, 645 bp, Homo sapiens
ggagccaagagacaacaggaaacccaaaacaatgatcacctgcttccagacaactttgcttttttgccttgtggggaaacttataaattatttggagagcaatattagtctttttgcttctgaaaaaggttctgcatctttgatagagcctggttttgaaacataactcacagagttgtacaaataccccatcaatagtgcagtggctcatttcattgttctcagtgcatggaatcttcattatttgcactgttgataaaaggcagcattttcagcagatctgcactactccatttagctgagaacaatgatttattcctccctcactattggacatcctcaatttccttgggtaataaagaatgctcccatggatgggatgaacaggagcgaccggctgctctgagcctggcaaagtcaggaagagcaagaaggrtcctgactggtggctcctgcccagggagaaggacccagagcctgcctccccgcctcactggcaaccacagcctgtggtggaagtccggagttagtacacgtcattgacaaattgcccaggaagcagccgggcccctgatggaaaactgcccatctcagcacagacagtgcgcctggtcccaaacgctcctttctacgtggaggtgaaat

SEQ ID NO: 545837 - DNA, 645 bp, Homo sapiens
ggagccaagagacaacaggaaacccaaaacaatgatcacctgcttccagacaactttgcttttttgccttgtggggaaacttataaattatttggagagcaatattagtctttttgcttctgaaaaaggttctgcatctttgatagagcctggttttgaaacataactcacagagttgtacaaataccccatcaatagtgcagtggctcatttcattgttctcagtgcatggaatcttcattatttgcactgttgataaaaggcagcattttcagcagatctgcactactccatttagctgagaacaatgatttattcctccctcactattggacatcctcaatttccttgggtaataaagaatgctcccatggatgggatgaacaggagcgaccggctgctctgagcctggcaaagtcaggaagagcaagaaggatcctgactggtggctcctgcccagggagaaggacccagagcctgcctccccscctcactggcaaccacagcctgtggtggaagtccggagttagtacacgtcattgacaaattgcccaggaagcagccgggcccctgatggaaaactgcccatctcagcacagacagtgcgcctggtcccaaacgctcctttctacgtggaggtgaaat

SEQ ID NO: 545838 - DNA, 558 bp, Homo sapiens
ctgcctaactttctttttagctttatggaggtacaacttacttaaaggagggtccagacagagcacagtgagtttccttcgctcaaaaagtggagattggagctcagggagatggacgtggctgggctttgctgggtaaagtagtggagagtcatgaagaggagggttccagaaatctgcataagaacctccttaagtgtttaaagttagaactaaattctgtgcrtggaatgaaattccacaaggataggagctgttagatgaatgattctcagagcccacacagggctgagagactgtaaagctccaattagtaagagtatagagaccttggagaggacctagagcactctgtagagaaccacagagggccacacctttgtagtggggctgaactagccacatagtaaaaggtattctagacgccttctgccctcaacactaacaaaacttaaaaataagccgttcaaggatcaagctgatctgcaaacaactatctaccaagcaaaattatgcattctttaaatgaagatagcaaaatccagacacccaaaaatg

SEQ ID NO: 545839 - DNA, 610 bp, Homo sapiens
tttcggagacaaaaaaacaaaaactatcttctaagaggttggagtttatcaatttacagtttaaaataaagttaaaattcggaacacagctcattcatttaattaacacatactttggttgtttttcactatgagcctttcagtcctactactgttggtctttttaatccatatgcagacattactctaacatttttaaaagccaatttttcaaattagttgcccacattgaaagatcagaagatcttacatgataatccagctttttttttttcttttttttgacacggagtcttgctctgctgcccaggctggagtgcagtggcgtgatctcagctcactgcaacctctgcctcctaggttcaagcaattctcctgcctcagcctccygactaactgggattataggcacccgccaccatgcccagctaattttcgtgtttttagtagagacagggtttcaccatgttggtcaggctggtttcgaacccctaacctcaggtgatccacccgccgtggcctcccaaagtgctgggattacaggcgtgaaatgtagggtcccgccctacggggcttgacgggtgttctccccgtgtgtggagacgagaga

SEQ ID NO: 545840 - DNA, 507 bp, Homo sapiens
aacatttcctagtgacaaatagctttaagatttgtttcagacgtaaaacacagctaccaaggagtgcaattgctggattgcagttgtatggtaagaccatgcttcgctttgtaagaaattttcaaactgtcttccaaagcagctgtacaatttttcattcccacaggccataaattagagttcctgttgctccacacccttaccagcatttaatgtctgtattttggttttggatttttgccattcsaattggtgtatggtggtatcttgttttaatttgcaattccctaatgacatatgatgttgaagatctttccgtgtatttatctgccatctatataccatctttactatatgtttacatcttttccccatttttaaattgggttgtttgctttttaacttgatatttcaagagtttttggtatattttggatacaattcctttaccagatatttgttttgcaaatactttcttcctatctgtggctcgtcttttcattctct

SEQ ID NO: 545841 - DNA, 590 bp, Homo sapiens
aggtcagagctcctgtctggttgaggcaagggctgtggatgcggggtgtggccagcagtgcagtgatgctaatgaagggattttctaatgagttttgtatagattttcatttttaatgaaggcagggaagggatagggcagatcagaaatcaaatcttatttacaagaatcctcttaatagtgatatttaaaagatgcaaaaaacagggatcactgaccacctggtttgtctgttgtgttagccagctctttttttttttctttttgagatggagtctggccctgtcgcccaggctggagtgcaatggcgcaatctcagcttgctgcaacctccgcttcctgggttcaagcgattctcctgcctcagcctcctgagtagctaggagtacaggtgcctgtcaccatgcgtggctaattttggtatttttagtagagacgggagtttcaccatgttggccaggctggtctcgaactcctggcttcaagtgattggaygcctcagcctcccaacatgctgagattacaggcatgagccactgcacccagccaaattctcttcttttgaagtggctttctgtgaggctcaccag

SEQ ID NO: 545842 - DNA, 394 bp, Homo sapiens
gaaggaaggaaatattagtttgcatttttctaaagcatctaaactgctagagataagtgtatttataccatgaagactttctagatctattgtttcatttcattctctttattcttcattcaggatgtatgttgtgttcacagcgaaggtactcccttcagcctgtcccrgaaaggaggattccaaaccgatacttaggccagcccagcccctttacacacccacacctcctcagaccaggtaaggccttttaactgtgctatctccccatttaggttctgtctagagcaatgctatgcaatagaacttcttgcagtaagctctggatctgtgctgttccataaggtagccactaacctcacatggccattttacactaataaggttgctagta

SEQ ID NO: 545843 - DNA, 405 bp, Homo sapiens
gtcccctgggacccatcctctaccgccccagaaccactgttctagagactcagaatttcagccaaagtcaggtcataggatctgaacagcgggtagaaatttaattcaagatattttacttcccagtgtacagtccatcacaggctcctgcttaccgcggtsgtttttagatccgtctttcgcctgtctccagctacatctaatttgctctttaataaatggtacacgtgctcagctatatgtaattcatgtctttccatttcaagagcgacgttgttcatttttttatctgcttggtcactttgagtctcttgtctttaatggcattttcatatcttgcttttatctccttaagcttatcaaatctgacattcactgctctctcctggagggtccagtggctgg

SEQ ID NO: 545844 - DNA, 544 bp, Homo sapiens
acacgcctgtggttgggccccctgaccaaaaagacaacagtaatcagcaaaaagtcctgcagctccccacgtgggaatgtgtgcctcccccgrgggccttcatttcggagtaggagggaagttgtccagggcgggcaccacagattcgtggagttgctgggaacctgcggaaagtcttttccttgggtcctcattcagcaagtatggggtccagcatcttatggggaccgtcgctgtgccggcgaacctgcagaactcaccttgggtcgtcatttagcaagtacggggtccagcatcttacggggaccatcgctgtgccggtgaacctgcagaactcacaccgtgaggtgttccctttctatggagaaacttcctgctattgtccttgggggttacactaagagctaggggagtggaaagacaggtttgcctctgagccctaaattgtacacaaaacccatggtgggccacgtgtggatatgtcaagtcagaggaaagaaccaggccactagcagaacgtgctgtcagtcagtccactgagcac

SEQ ID NO: 545845 - DNA, 497 bp, Homo sapiens
ctgctatgacacgcctgtggttgggccccctgaccaaaaagacaacagtaatcagcaaaaagtcctgcagctccccacgtgggaatgtgtgcctcccccgagggccttcatttcrgagtaggagggaagttgtccagggcgggcaccacagattcgtggagttgctgggaacctgcggaaagtcttttccttgggtcctcattcagcaagtatggggtccagcatcttatggggaccgtcgctgtgccggcgaacctgcagaactcaccttgggtcgtcatttagcaagtacggggtccagcatcttacggggaccatcgctgtgccggtgaacctgcagaactcacaccgtgaggtgttccctttctatggagaaacttcctgctattgtccttgggggttacactaagagctaggggagtggaaagacaggtttgcctctgagccctaaattgtacacaaaacccatggtgggccacgtgtggatatgtcaagtc

SEQ ID NO: 545846 - DNA, 659 bp, Homo sapiens
tcccaccctccaaaactgtgagaaataaatgtgtgttgtttaagccacctaatccgtggtattttgttatggcagcttaagctaagacagcaggacatcctatattttatctggaaaccctgccagtgaggccagatatgagtgaagaagggagaggagtaggaaggaattccttctaataccagtactgtccaamcttgcctccctgtctccaagatgaagggagcaaattgaaccctaaccttcatcacacaccctctgtcaggctgagattttgaagcttcttgctctttatcttgatttcctctgagtgaatgagtgtgtgtgtgagtcattgtaagggagaaatttggaaaatgaggacactttggccttttatccacagaagtggttctgcttcaaatcagagcacaatcccataaggacatgtccaaaagtaagtcttagtgattttacctccctaatcaaaacacggatgaaagctccctgaggggagttttgaactggataattctttgttatgtgagcctgtcctgtgcgttgtaggatgtttaggaccattcctggcctctgtcctctagtaataacctcttcccctcagttacattccaaaatgttttcaatcgccagcatcacctgtgaagtaaaattggtcccag

SEQ ID NO: 545847 - DNA, 488 bp, Homo sapiens
aagaatttgattcggatgtagaaacttaaacaaaaagacttgtttatttcctctttggggattcttttctcccactatgtgtatcagaggctaattgctgtggacacgcacgtgcacacacacacacacacacatacctgcamacaccagcaccggcagtctctgctcttgtactcacatttcatcctgaggatgcgggtgcctctagaacaagagcccacagtcaatgcggagtagagtttggtgaggagccagcaggccggtgggcccccgtcttgccatgagtggttctttaggctggttctcggcgggaatcagagtctgcgtgatttctgccatggcttcccagaacctagttgtcccgtctccaactgcagccttctacgtgcaacaagggaatgtgggcttctttgaaacaggcttcttagagcaggagtgtaggcagccaagtgtgaagggtgtcagccggggtggcacgccctggggga

SEQ ID NO: 545848 - DNA, 495 bp, Homo sapiens
ggcatttacttacagcattgttttgcccattaaagaattacaaaaataaaaatatgtttccattgatgtatcaatctgaaaagcacttaaagcagatgtgcatttgtattacacaaattcaatgtaacaaatgtkttgggtaccttctctgtacaagacatcaggctaagtgcttctaagtatacaaatataaataggactcagtccacattctccataagatcatctcatggctggaggtgacataagatatacatgctgactttaataaagagcaaggtaaaacacagaaaagactgccacttaagacagcaagttgaacacatgattagatctgttccttcctgaaatcccacaagatttgtaaaataatttttaaaaagacacataagaacatagagaacaggagaaaagaaaaagtaaaaatattggttcttgggatggtgatgcatacctgtagtcccagctacttgggaggctgaggcaggaggatca

SEQ ID NO: 545849 - DNA, 337 bp, Homo sapiens
gaaaacagtaaagtgttctgcaatctctaagtgtctagaaactctgyagctgcagtctctttaagatctgcctgagcatcacatacccttaaacagattttctacccagggaggtaaagtttcatggatctgccaagacacggactgattaattaattattccatttatttaacaaaaatgtattgagcactaatatgtgccaggcacatttatagatcctggagagacagacttggagttgctacagcaaaatgccataaactgagtggcttaaaaacaacaaaaatttatttctcacatttctggaggctaagaagtccaggaccaaggcatcag

SEQ ID NO: 545850 - DNA, 564 bp, Homo sapiens
gaaggggaggacagcccagctcctgcctcccagcatctctgttcttctgaggagagcagagcccctcttggaaagggcccattccaaggtctcaaagatttctctatgagatctgggaggctgcacagctttgttgggcacatgagaatggaaccagaagacccccaactctacacccaattcctcaccatggaaaggaagtggaggcaccttccaggcagccccctaggtggcrgctgttcccaacacacatttatttagcatgagcctagggcttggttctggggataaattcttaagcaagacaatatgaaacaactgaaataatttgaaacaatatgatgagcttaaaatccatgcagtccccaaattccaggctggtctgggtcaagggagaatgtagtcagtgagggtttctaagcacaagtgagcagtaacaaggaatcaggaagatgggtgtgagttggccatgccaaagatattttctggagctgggatggcaacatgggtattccaggcaagactggccaatacctccaaggtctgaagatagaggaagccatt

SEQ ID NO: 545851 - DNA, 614 bp, Homo sapiens
tggctgcaaatatgaaagcaacttgacctctgccttcagggaccggacagtctggtggggaaggcaggctcaagtgcaagttatttttttaaaagcaggctataagaattattcattcaatgagaacacatggacacagggagaggaacatcacacgctgaggcctgctgcagggtggaggtctgggagaaggatagcattaggagaaatacctaatgtagatgatgggttgatgggtgcagcaaaccaccatggcacatgtatacctatgtaacagacctgcaccttctgtacatgtaccccagaacttaaagtataataataataaaaaaagaattattcattcaaccaaaatagtgccattcattctaagtactagggatggagtgaattatttacaaaacagataaaattcctgccctcaaggggcttatattctggtgccagaggttgggtaaggaacatataagcaagcatagcagtagcaatgagggctgttaaaaaataaagcaggatgasggtatagagatccacctgtgttattctgggtaggatggtcagagaaggaagtggtaatatttgagcaaggccgaaatgtagtgaaggggagagcc

SEQ ID NO: 545852 - DNA, 646 bp, Homo sapiens
tgaaaggaaagtaatcaaggccaggaaaaagccattaggaaacaatctccagaatccacagagctgggaagaacccatgtgctcaccagctagagggtaaagaccttgtcaaatgggtaggttactcaaaatttcatagtgggactgaawtatccctggccaacagcatgctctggatctaggacgaccagtttgtcccggtttgccttgggctttctcagctttaaaactaaaagtcccatttctcagaaactcttcaatcccagttttacagtgaaagtcccatgtcttggaaaactccttaatcccaggcaaactagaataatcaatcactccatgtagatctgtcccaagaaaagcttaaaaccaagtcttgaatggatcaagtttattacaagtaacttaactgcatctcagaaaaaactaaaccactgtttaaaggaatctaacaaaacccagcacccaacacatcacattcacaatgtaaaagtagtgacattcaatcacaaattacgaggaatgcaaagaagcagaagaatatgacccacaacaaggagaaatcaacgaatagaaacagacgtggaaatggagagatgatgggaagagcagaaatggaagttaaaacaactgttataaagaggttctc

SEQ ID NO: 545853 - DNA, 491 bp, Homo sapiens
cactacagtgtgagaagcactggtctagcacaagttacttatttgagcctcagtactctaacctgtaaagtggggatggtgatagtacctgcctcatagaattgttagaggaataatcgagaaaatgtgtgtacagtgcttaacacagcacctgcagcaggataagtaactactaaataatggcagttattattagtattaatatacattcttaaagagcaaagatcaagattaaataaaagaatgcaaataaagctttcagaataacctcgctaggccctcaacaggggagagctgttgttcatcttaatgactctctcctgtttttcctacccaccccatctcgggctgrtgccttgctaaagtgtttattggtgtttattgagaagaagacagtggccaagttaacaggcccatatggagagggagccctgggcctcatcagcgctaattgcattctctggccaatgccaaggccctcctcccaggca

SEQ ID NO: 545854 - DNA, 509 bp, Homo sapiens
ctgtgtcctcggcaaggccctcccgctcgctgagcctcaatttcttcgtctctgctaagttaacatgtccttactcccaggatgagacgagagggtgcttgccaggcacaaagcacagtgctagcccagaaagtcctccctggagtcagttcttctttgtattattattccaagtcccaacatggtttaagctcaacatcacccttaaaagaatcactggtttttagcttcgatttttaacacgaacccagmgactgctccttgcaaggatgaagtgacttatgcgaggcaagacagagggtaagtgtccccgggcccggctcgttattaagcagggagctctcaccgtccggaggtgcagagggctggggatgctgccctggctgccctgcgccgagccaactctgcatcaggaggcaggtgccgttatcatcccattatttacagatggggaaactgaggctcggtgaaaggttataattttccaagtccatagcattcgtaaaagt

SEQ ID NO: 545855 - DNA, 509 bp, Homo sapiens
attactcacttggagcacctcactcctcagatctggctctagttctaaatatcaaaccattctcaaatagcaaagctttgtcacctccctatacatatctcatttaaatatgtaaaggatctgtaggcaattccaaaaagaaggctctaaaaatatttaaaaagcaatggtcgtaccttatagttttaccttatagtstatatcaataatagccttgtaattaaaaaacaatcatcatactatttataatctatgattattcacatcacaaattgaatgtagagagactttcttataataaaataaaacttaaaacaaagatagtgtgacacacaaaaagcatctaggggcttaaggaaaataaaagactgctccaaagaaagtcattggcccagtccatgttctgctctctgctggccaccccagcctcctcctccttcaggcagaaggatctgctggaggacaatgttggaacctcagagccccacagacctcagggagaggaagca

SEQ ID NO: 545856 - DNA, 567 bp, Homo sapiens
cataggtggacattttttttctttatatcgcttctgtttcttttttttttttctcctcgaaaaaatgctgcttaaacggcaccgacttgacatggcttgtctcctaaccytggagtggcggccgggacgccggcctggatcagtcgggggtctttgatgccgcctccatgtgaaacctgacgtggaagacccaccggggcggttttggggtccgaggtccgtcaggattcatcctgcctcaccctgctccctttgtctcttcccctgacccttcctcgggacacccggagagggtctgagggtgagggtgcgggcgctgcgtgtgggcttgcactcgagggtggggtgggccgagggcagggccgcagccgcgagaacaatgggcagaggaggcgcgtccacctgtccgcccggccgcctgcccggcttacctcacctgcctggctccgtgtgcctgctcacgccccaccgtcccgctgtccgccatgatgggcttggccgtccgtccgagcactttcagccactctgggaagcaggtccctgctcttggccactgtgtggctggga

SEQ ID NO: 545857 - DNA, 580 bp, Homo sapiens
ctcctcctccaaatgagaaatggcctctccttcttgaccctcccctgttgtctcttctgtttttttgactttgctgttggtgactggcaaaggagaaggtcaagttcctcactctctcatggtggtattgtgtcgcgtcatcctctagagggcgccagtcctcttctccggggtcttctacgccttctggtctcctctgatgaaagaagattatatgaccacaaggtggcgtagcacaataagggttattattattctatgccccgatcatagactagagtagacagccaggcttaatgtggctactatgaatgagagacctaccctctgggccgtgtcctggcgagaagcgcgcaagcccaacatgggtcccctggtttggattcaagwggacagccacctcctttggagtcctggttgggacagcaatataaacgtctttagtcacgtgaagtaacagttttgccccacctcaacaaatttggggtcttgatattgctccggaaaggaacagaaatgatgtcatctgtaatagcaaattcaaatgcgacaagaacagaggcatgctagctgtttacaa

SEQ ID NO: 545858 - DNA, 442 bp, Homo sapiens
gaggctatggaaaaagcattcatttaggaagccagtagtaaacgactgaggaaatagtcattaaatataacactgcacattcatcaaataataagatcttaatgcataaccctattgttgggtggtgartgaaatattagataccattctttcctcctagaggcccagttttacatagaaattgtaactttgtgttgtcatcccactgataatattaaggccaggcacaaggtttttcaacttttgaagtttattttctcactcgaaaccttttatgtaaactcctttgaatacccacataaaggaaagaaagttggtgctgataaactagtgggcagcaggttcatggtggttcagggtcggtcagcaaaccagtgccaacactgaagatgatgccaaacaaaattgactgcaatctgttctagccaggatcatggtttag

SEQ ID NO: 545859 - DNA, 579 bp, Homo sapiens
ctacgcactgacaactcgatcatccatgtagaagacgctaaggaatctacaaaacaccacccagggcttggctccagtgaggaagcattgaattggggaagggggtgtccagggtagtcctgggaggcccaggaaggctgaaagggggaagagcttcagaagctgcctccacccagaaggccaccaaggatgctgagttattttaaggcaggccaagagcctgggttccctacacaggcgaggcttgttctggttgggaaacctgagagcagcaattgaagacagattgttggcgggactgcccggccgccgacctcatggctaatcccactccctggtacaggatgtttgggctgagtgcagggactcgctgccaggttctcggagtgcacactggaggggtggggggcagggtctggctgcaagggaaaggcctcatcccggactccttttatccccacrttataccccctgtggtgtgggaggggcagcagggcagcaagagccattcccacggggaggggtgagtgactgtccccaggaagagggcctcaggaagtggaatctggcccacatcgc

SEQ ID NO: 545860 - DNA, 566 bp, Homo sapiens
cgctgttagcctgaacctcagcttccccatccatgaaatggggacactaacatcacctgtcaggtggctgtgaacggaggcctgtgactggcctgcctcagcactgcccacagagctgtgcaggaacgttagtattttgccctgtgcttccgtgcacctgcagtactgcccgagccccaggctccggtgatggccaggtgcagaagcaggagccacctccatcccagcacctgagtgccggttccctcagcccaggccacgtctctgggcttcacttagctcccagattccacaccccatggcatggtgggggcagccagccctgaactggggtccagcctacagcttctccaggaataaaaagtacagccaccccaaaagggcctctgaggactagatcatgcagtcactgtgtwtggggggatggtatgtttattgcatctccaccagcacccccagatccatggttaagagagctgaccggagcaggaacaggagactttgtcaccctctgactcctggtggccaggggcacagtgaaaagggtaggcagcttgcaggaagca

SEQ ID NO: 545861 - DNA, 477 bp, Homo sapiens
aagtaactaagcaagatacaggatactagatgttatatacttttatatgcagcttcttaaagccagagagccagagaactcagaccttggtacttttctcaagagtatccactctctatgcagtcagttggatggtttaaaataacatctacatgccaatgagtccayatttacatcttcaggcaagaccctctcagaaagtccagattccagccccaatgcaggctcaatgtgtgcacatttgcaaattccgccaggatccttcacccaaactccagatttaatatccaaatgcttggtccacagctctgcagggagatccaacatctcaaattcaacatgtccaaaatttaactccaaatcctgctccaacttgcctcaaggaatggcaactccatccttccagtttctcaggccacaaaccttggccatccttgactccctgctttctctcacccccccacacactctcttatg

SEQ ID NO: 545862 - DNA, 531 bp, Homo sapiens
agcactcagtaatctcagtaatcagactgagagaatagattgaaagcttgaattctcatcaatgcctgataatatggtctccagacatgcatattatcagaataaggaagtgatgatataattaattcaattcaatacagtgagcacactttgaatataatcataaagccatgagctaggaaaataatccagaagtgctgaataaaaagcaactatttttgtttgacaatagaattatatttggctatwaatgtctactttgtttatgctttgtattttacatcagtggtacaacatgctttatgcggtattagagttcaatataaaccttgaagaagctggagtacataatttatttcctttattgttataaaaatcaagttttatttaaaaataatcacacttccaggattatcacttatagcaccacaggaaatctagaagttctgagtgaaagtatttattttgagaagcaatataattatatttggccataaatgttcacattgtttagggcttatattttatgtt

SEQ ID NO: 545863 - DNA, 140 bp, Homo sapiens
tggggaaatgagtccctgagtccagaagaggatctaggtggtgcacatagcctccactatagttcacctttcactgctcagtgataagctctggaaatayctcctccagattaggattggtctcttcctgggaaacctga

SEQ ID NO: 545864 - DNA, 451 bp, Homo sapiens
gtggctcatgcctgtgatcctagcactctgggaggtcaaggcaggcagatcacctgaagtcaggagtttgagagcagcctggccaacatggcaaaaccccaactctactaaaaatacaaaaattagccagacatggtggcgggtgcctgtaatcccaactactcaggaggctgaggcaggagaatcatttgaacccrggaggtggaggttgcagagagccaagatggcaccactgcactccagcctgggcgacagaatgagactccgtctcaaaaaaaaaaaaaaaaaatttatggaggctcttcagatatttttctttcacccaatctatttactagcaacttgaggactagatttgcccaaacatatgcaggacatctgccttgggcttgccctgtggtgtgggattatgtgtcctatgctgtacaggaccagagtggaaaccatgagc

SEQ ID NO: 545865 - DNA, 627 bp, Homo sapiens
tgttttgaagatcaaatggattagtattaatgtatgcaaagtactctcagcagtgtctggcacacaataagtgctttttaagtgtaccaaaagctttacattccagttactgtaaatcgtaacaacakttagggcatctgctgcctattcctggccagcttaaagaataggggcttccgtgaagatgtctcctgttccaagcaaaaatttgtatcttaaaaaaatatgtatgactcttaaaataagttatacattcacatagatcaaaattcaaagggtacaaaagagtatctagaaaaagtccttccagccacccagttcctcaattcagaggcaaccaatgttaccaatttcttgggcattctttcggaggcttttttttttttttttttttttttgagacagagtcttgctctgttgcccaggctggagtgcagtggcatgatctcggctcactgcaacctctgcctcccgggttcaagtgattctcctgcctcagcctcccaagtagctaggattacaggcacacaccaccacgcctggctaatttttctatttttgtagagacgaggtcaaccatgttgaccaggttggtcatgaactcctgacctcaggtgattcacctgc

SEQ ID NO: 545866 - DNA, 627 bp, Homo sapiens
tgttttgaagatcaaatggattagtattaatgtatgcaaagtactctcagcagtgtctggcacacaataagtgctttttaagtgtaccaaaagctttacattccagttactgtaaatcgtaacaacagttagggcatctgctgcctattcctggccagcttaaagaataggggcttccgtgaagatgtctcctgttccaagcaaaaatttgtatcttaaaaaaatatgtatgactcttaaaataagttatacattcacatagatcaaaattcaaagggtacaaaagagtatctagaaaaagtccttccagccacccagttcctcaattcagaggcaaccaatgttaccaatttcttgggcattctttyggaggcttttttttttttttttttttttttgagacagagtcttgctctgttgcccaggctggagtgcagtggcatgatctcggctcactgcaacctctgcctcccgggttcaagtgattctcctgcctcagcctcccaagtagctaggattacaggcacacaccaccacgcctggctaatttttctatttttgtagagacgaggtcaaccatgttgaccaggttggtcatgaactcctgacctcaggtgattcacctgc

SEQ ID NO: 545867 - DNA, 627 bp, Homo sapiens
tgttttgaagatcaaatggattagtattaatgtatgcaaagtactctcagcagtgtctggcacacaataagtgctttttaagtgtaccaaaagctttacattccagttactgtaaatcgtaacaacagttagggcatctgctgcctattcctggccagcttaaagaataggggcttccgtgaagatgtctcctgttccaagcaaaaatttgtatcttaaaaaaatatgtatgactcttaaaataagttatacattcacatagatcaaaattcaaagggtacaaaagagtatctagaaaaagtccttccagccacccagttcctcaattcagaggcaaccaatgttaccaatttcttgggcattctttcggaggcttttttttttttttttttttttttgagacagagtcttgctctgttgcccaggctggagtgcagtggcatgatctcggctcactgcaacctctgcctcccgggttcaagtgattctcctgcctcagcctcccaagtagctaggattacaggcacacacyaccacgcctggctaatttttctatttttgtagagacgaggtcaaccatgttgaccaggttggtcatgaactcctgacctcaggtgattcacctgc

SEQ ID NO: 545868 - DNA, 621 bp, Homo sapiens
acaggcgcgcgccaccacgcccaggtaatttttcctatttttagtagataccgggtttcgccatgttgcctaggctggcctcaaactcctgggctaaagagatccacctgcctcggcctcccaaagtgctgggattacaggagagagccgctgcgcccggcccgtctccacttttaaaatttccagtgacagaaattgtggaaagcaacacgagttgtatgtgttttaatatcctagattcgaagacaaacataaatgtaaataaaaactgtcagagctctctgcaatcttcagtttgggtcttccaggctgctgcagcgttgttcacaaatccacacacctctaaaggcaggcacagagcgctttcctgggtagtcgggtggcctgttggtagttgcaggcttctggtttcccatcttaatggcgatggcagggcaacctgtattggtggtgcttttgcacaagcagttctttctgccsggaacgcccttccccagcctttgccttaatgaataccactctctcttcaaatctctgctcaacaggggcgcctttttgaccagcttagtcgttagactccctaatacagttcatagttttcacatttttgtagaatctatt

SEQ ID NO: 545869 - DNA, 596 bp, Homo sapiens
tcttccttacaacaagccaggtgtgcagcagagtgagctaccagtatggtaggtaatatattacatggttaagatcagagtgaactggacataaatttgcatcatgccggcatcatgaaagagagaaaaactacagaacttacatctgaggaaacagacatatataacaactagaagcaagctttaaataagcaaagttttatatcctcagaaaaataagtgagattattttattgttgaagaaacaacctgtagaagttttggaaatataaactttaattgtgttaatattmaatagagaagctaaatagcagaatagagacagcaaaagagttcattagtaacctttgaagattggcctggggaatcaatctagaatgtaagagaaaagaatgaagaggtcaaaagtgtaaacataatgaatagtaagaaaagaatgatcaaaacttacataaatgtgtttattgagactccagaagagaagacagaatactgttgaaatactatctgaaagagaactaatagctaagaattgaatttggttgcatataagtaaatggaagaaagtgggctggaaaaaattatagtctagagct

SEQ ID NO: 545870 - DNA, 596 bp, Homo sapiens
tcttccttacaacaagccaggtgtgcagcagagtgagctaccagtatggtaggtaatatattacatggttaagatcagagtgaactggacataaatttgcatcatgccggcatcatgaaagagagaaaaactacagaacttacatctgaggaaacagacatatataacaactagaagcaagctttaaataagcaaagttttatatcctcagaaaaataagtgagattattttattgttgaagaaacaacctgtagaagttttggaaatataaactttaattgtgttaatattcaatagagaagctaaatagcagaatagagacagcaaaagagttcattagtaacctttgaagattggcctggggaatcaatctagaatrtaagagaaaagaatgaagaggtcaaaagtgtaaacataatgaatagtaagaaaagaatgatcaaaacttacataaatgtgtttattgagactccagaagagaagacagaatactgttgaaatactatctgaaagagaactaatagctaagaattgaatttggttgcatataagtaaatggaagaaagtgggctggaaaaaattatagtctagagct

SEQ ID NO: 545871 - DNA, 601 bp, Homo sapiens
ctataagcatcctctgatttatggctaagtggttagttttccccttttttcactgaattatgaaaaatctcattcatagatatatgacatattattctgttcttgagttgctataaagaaatacctaaggctgagtaatttataaagaaaagagatttaattgacttaaagttctgtagcccatgtaggaagcatggtgccagcatctgcttctggggatagcctcaggaatcttcccgtcatgagggaaggtgaagagggtacaggcatatcacatggtgagagggagtaagaaagagagaactggggaaggttcagactcttttaaacaaccagatctcaaaactgtaaactaactaagcaagaactcaccaatcagcaaggagatggtgctaaaccattcatgagagatccgctctcatgacycaatatctcccaccaggccctacctccaacactggaaatcacatttcaatatgatatttggaggagaaaaacatccaaaccatatcatatgggaactccattagtgacatatgtgaagagtcaaaatccctaattggatctctgatttgcctaattataagtggaaggtgttttt

SEQ ID NO: 545872 - DNA, 518 bp, Homo sapiens
ctggatagaggttgaagacgtggaaagcgctgagaattcacaggggtcagatcatgatatcaaaggagccactgaagaatgtcatgcaagtgaaacaaagatrgatcgggatttttaaataaaaagtctggcactggcagaaagatggaaaataagttggaggagagaaaattgagtatattagggttctccagagagacagatccaataggatatatgcacacataaaagggagtttattagagagaatcggcccatacgattacaaggcaaagtcccacgataggcatctgcaagttggggaaaaagagaagccagtagaggctcagtccaagtctgaaagcctcaaaaccaagaaagctgatagtgcagccttgagtctgatgctgaaggcaggagagccccaagggagacccggagtccaaaggctgtagaacctggagtctgatgtccatgggcaggagagaggaagaaaagcttgtagcaagggaagagagagagcaagaaatgctgcaagc

SEQ ID NO: 545873 - DNA, 578 bp, Homo sapiens
gttgaagacgtggaaagcgctgagaattcacaggggtcagatcatgatatcaaaggagccactgaagaatgtcatgcaagtgaaacaaagatagatcgggatttttaaataaaaagtctggcactggcagaaagatggaaaataagttggaggagagaaaaytgagtatattagggttctccagagagacagatccaataggatatatgcacacataaaagggagtttattagagagaatcggcccatacgattacaaggcaaagtcccacgataggcatctgcaagttggggaaaaagagaagccagtagaggctcagtccaagtctgaaagcctcaaaaccaagaaagctgatagtgcagccttgagtctgatgctgaaggcaggagagccccaagggagacccggagtccaaaggctgtagaacctggagtctgatgtccatgggcaggagagaggaagaaaagcttgtagcaagggaagagagagagcaagaaatgctgcaagctgcttatcctcctccttctggctgctttgttcttaccctgctggcagccaattggatggtgcccacccac

SEQ ID NO: 545874 - DNA, 597 bp, Homo sapiens
ataagagaagaacaataattcgctttgatccaggtgttcactagtttatggcaaatttggaaaataagagagtttcaattaattgccatytcaactgaataatgaatccaaaatgttggatatctctgcaaggagttctactgaggtttttagtgcataaaaatgactactgcctgttttctgtgctagttaactcctgaacaaggtagtgaggcttggctctagcatagggttgagtgagttaggtgaaccaaacagattatactgctttgattttttttcttatctatatatttctgaatttgggaaattaatcggtgggaataaaataaaagatgtaagtcagcctttgctcatgactcatttcattcactaatagctaagaattaggtttatgatatacataagtaacctatatggtaagaaagtgaatcacatttgtgaaagtgactgatttccagtatggataatagttttatttaaaaagaaagtaataaacaccaacccaataaactttccaaccaactaacaatcaaacaacaacagataaataaaatagctgagcatacttagtgagagtttgattttgtgtttctt

SEQ ID NO: 545875 - DNA, 631 bp, Homo sapiens
aaaaaactgtgaacattacttatgtgactattttacccccaagtggctgtattagtacagaatgaattgctagtactgatacatccatgtaggcctagttgtacaacgcagatgtcaaagtattgcattcactttatccatggaataaaaygaacggcttgttggcttgtatacattttataatttttctctgtgccttatttaagaatgcctttatacaacataaaattgttgatctaactttataagataaacccaatgtaaatagatttacttctaaattataggggaagttaagataaataaatgaatattatatggcaaatagtaatttagttttcttttttcaaattaaatgcctatctgccattattattgtcaatattaaaatataccacaaaaaaacttacttttgaaaacaaatattttagtttataaaatactaggtatttttaaattttggtgatgtgtaaaatttcaaaactcattaaaaattgtgatgacctaaaaagatgcaataactccagtttagaaaaattagtttcactattgcctttacattacatacacacatgcacacattcgttttgtgtgtgtgtatatatatacacacatatatatacatgtgtgt

SEQ ID NO: 545876 - DNA, 615 bp, Homo sapiens
atgtttaaaactagggtatttgggaagtaaaagaagtgaattataatttacttgaatkttttttacaaaatggcatatgatctaacttgaattaaaatgcaacatttaaaaatataacttcaaaagagacacgaatattgattcatctctttccaagcattgcagattacatcgtatctcagtaaaatctttattttatagatatacaaagatgagtgaatgagaatataaagaaagtgaaattttgccttggaatatccagtgaatatgaaagatactttctgccattgtcagctatttaattttatcaaaatgtctaccaaaacatttatacccttccttaatttactatgttccccaaaggtccctgcactcaaaagcttcagccaagcagtcacatatttaggagaagaaacccatcatagcctattcaaactgacaaataactatgtagcagtaacatccatataaatcttacaagtgtccatgcttgttgaataaaattctattttatcatatataaaaatattagttgtgtaaagtgttaaatattatatcatagctatgcaaatgtattcttctagaacatccaacatgataatgagaagtgaggcc

SEQ ID NO: 545877 - DNA, 553 bp, Homo sapiens
gctgttcaggcaaatccctagcagaaccataagtttctgaagttccaaactctcagacatcttagctcacactccccctcactcccacccacataatttgaaaatccctctatggtagccttcacccctgcacttgttggcttctgacaaatggaaagtcctgacacccttgtgatttactgggatatcctgtggcacctctccaagttggtggtctgcccagacactcattgctgtggtgatgccaacactctaccattttccagcggtaascttggtcaaacatctcctgacatttcaaggagctctgataatttcttgatggtttggaatgttgggttacctagactattcactataggtaatttctccaccagataatgaaggagacagaaccataaagagttaagactttttttttttggccaggagttaatttctctctctctgaggttcacagtaaatattatggattcaatgcacccgtttcattaagctattaagctaaatgtctcagcaggattgatacatttatgagtttagtgcaggcaat

SEQ ID NO: 545878 - DNA, 512 bp, Homo sapiens
actggctgccaagaccatgggctgtgggcatcctcagggcaggagctgggtggaagaggggcctcttcagtcctcttggcagtgaaggtaaacagatgtcagcagggtggactcgcactttgagcctaaggtagsgaggaggcttctgagccgacctggggatggcggcgcactctgatacaggcagtgcgcggctgtctcgtgctgagatcaggattttgagtaaagcagagatttctggacgtttgtccttcagaaattagcggagggacaagggcattggcgctgtggagaggtagggacccatgggtatggggcggaagaccagggcacgaccagacaccgccagggtgctgcacatgtaggtagcagggggaggtggtccaggcaagatgggatgggaggggctcaggagcagccaggttctagtgctggtgatgaggtgggtggtggcaggggcatgtggaagggtcttctgaccatggcttacagagggcttggtgctggggggc

SEQ ID NO: 545879 - DNA, 623 bp, Homo sapiens
ctgattcagtatgcctcacgaatgggacttgctttaccaaggtacccacaggcagtacagtgtggtggcacacagggtggactctggagcccagactctggtcccttcgtgaacacctgcttcccccttacctgccaggccacctggaaaaggtatttaatcaggtgaaggagaaaatacgtgtaaagcacttggaataataaggattttcaaaatgtcaggtattcttctatgttataaaaactagtacaggctgggtgcagtggcacactcctgtaatgccagcactttgggaggccgaagcgggtggatcatttgaggtcaggagttcaagaccagcctggccaacatggcgaaaccccgtctctactaaaaatacaaaaattagccaggcgtggtggcgtgcacctgtaatcmcagctactcgggaggctgaggcaggaggatcgcctgaacctgggtggcaaagattgcagtgaaccaagattatgctactgcactccagcctgggtgacagagcaagactctgtctcaaaaaaaaaaaaaaaaaaaaaaaaaaactagtatagtacagtgcctgtcacatagaaggtcccaagtaaacatcagttccttcccttctt

SEQ ID NO: 545880 - DNA, 385 bp, Homo sapiens
ctggaggtcctgcatcggcttcctcccatgcagcctcttttgggaatccacggacatgcggggtctgcagctcatcctgcactgtcaggcgcctgctagcagtttacagagtgttcattttyacctcagtaaactcagcagccatcatcatagtaggatttcttgctactctcccttactgtcacctcctctgtatacgtcacttactatatagacatggatgaggaaacaagttcccatttattccaaattacatttgttattactaaagttaaacacccgggacagcgttgtaggcttagcaaattaattcacagtgcattggatgttgctaatccatctcgacagatgcttatcttggaagcgatttatggttcttcataat

SEQ ID NO: 545881 - DNA, 612 bp, Homo sapiens
gagaagggggaacgtcaggaaaggagaaagtcaagaatggaaagaggcggaaattagactccctacccttgtaggaaaaaaaccggtagcggttccagcaaaatccaatcccaaccttcctgagacccagaggcgacttcacagcagaatctaattctgagtggaattgaaggccttgctgcagactgtgtacttttaatcatgtttaaataaaacatgggaccatgggtgtgatctcctcactgagcctggcttgtcagccgcttgggcaaagtcataaatagttaataggcaaccacttatggctctacttctgttaaatctagcatcaattatatatggttcatgcattatttatttggtgttactttggggtatatcttccaccttcgggggaaaagtgtaaagaatgggaggcgtagagcagatttgaggatagcttgtttccctctgtactggtcaatttgtgaaggccttgttcccctccatattggtcagtttccctcgaaggaaaaarcccattgatgattaggagatgattaggagatgaatttggatctgagaggactttaccagaccaccaggaaaaaagatcggggcggtgatgtgctg

SEQ ID NO: 545882 - DNA, 485 bp, Homo sapiens
tgaacatttttgaatcatatgttttcgtgcacatgtgtagcatttctaaaaggaaaattcttaaaaatttaatgagcattttaaagtttgctagaaattgccaaaatatcctgcaaagtacttgtactttgttctaacagtrttaggatttcctattccctcatgatttttgttgtcaatccaatggaagaaaattgcttctttgttttaatttatatttactttacgaatagtaaagttgaatatcttttgttatctatttgtagttattaatctgtgaattgttgccatatttttctattgggttgtttgattttttatttatagaaaaaatttgtatagtcatttgtttgttatacatatcacaagtattttctcctaatctcttctttatattttaactttgtataagaaataatttgccgtatagaaatagtgctggaaaacatgtcttttgagaaagaacataccttgttctatttttt

SEQ ID NO: 545883 - DNA, 485 bp, Homo sapiens
tgaacatttttgaatcatatgttttcgtgcacatgtgtagcatttctaaaaggaaaattcttaaaaatttaatgagcattttaaagtttgctagaaattgccaaaatatcctgcaaagtacttgtactttgttctaacagtattaggatttcctattccytcatgatttttgttgtcaatccaatggaagaaaattgcttctttgttttaatttatatttactttacgaatagtaaagttgaatatcttttgttatctatttgtagttattaatctgtgaattgttgccatatttttctattgggttgtttgattttttatttatagaaaaaatttgtatagtcatttgtttgttatacatatcacaagtattttctcctaatctcttctttatattttaactttgtataagaaataatttgccgtatagaaatagtgctggaaaacatgtcttttgagaaagaacataccttgttctatttttt

SEQ ID NO: 545884 - DNA, 665 bp, Homo sapiens
tggttgaatggcattcctattagtgttcctgataggcactcataaataaacagaacattaagtaacagaatttctttgcattaaattatatgtaactaaataaaaccaaattttgacatggttcaggatgtgggaagctagcaaacatatgcactgcaaaatccagcttggtttctttcagatttaaagacgtgtttagattctcaagatacaaaagctgatgaactgaattatgaagttgaatttcattcatttaattttttccacagaatttaatgaaaatagaaatgatcaattcttagatactgcaaatattagattttcagaggaatgttttgtacagagtgcatcctagcaaaggatgaaaaacactagaatgttttgaaactttcctggatatttggctggttaatctcttctaartgaaattcaagagaagagatgcaattctcaaatatatctcaaaataactaaaattaaaactaggagttacttcatgctgggatgcatgagttttccaacaatagacagtgaaggacatattgtttggaatattgctattataacatattgtatgaacaatcatatcacataccaaattctgaattttctttgtttctagtctttactattgctactgactcaaaggcattgcagtgaaggag

SEQ ID NO: 545885 - DNA, 558 bp, Homo sapiens
tgtacagccgggtgcggtggctcacatctgtaatcccagcaccctgggaggccgaggcaggctgatcacgaggtcaggagatcgaggccatcctggctaacacggtgaaaccctgtctctactaaaaatacaaaaaaaattagccgggcatggtggcaggtgcctgtagtcccagctactcaggaggctgaggcaggagaatggcgtgaaaccaggaggcggagcttgcagtgagccgagatcttgccactgcattccagcctgggcgacagagcgagactccgtctcaaaaaaaaaaaaaaaaaaaamaaaaaacaaaaaacaattgtactgctcatttcagtgttcttaaaaactgaaccaactctctccctgtaactgcagcccactggttcaagttctaccccagaatgtttgagccctgctaataaagaagactgcaactaagccttcctcttacaggacccacagcaatttccactttgtgaacagactgatcctttcataatgttcatcatgatactgaaataaatgtttttttttcagtttggtctcttg

SEQ ID NO: 545886 - DNA, 558 bp, Homo sapiens
tgtacagccgggtgcggtggctcacatctgtaatcccagcaccctgggaggccgaggcaggctgatcacgaggtcaggagatcgaggccatcctggctaacacggtgaaaccctgtctctactaaaaatacaaaaaaaattagccgggcatggtggcaggtgcctgtagtcccagctactcaggaggctgaggcaggagaatggcgtgaaaccaggaggcggagcttgcagtgagccgagatcttgccactgcattccagcctgggcgacagagcgagactccgtctcaaaaaaaaaaaaaaaaaaaaaaaaaaacaaaaaacaattgtactgctcatttmagtgttcttaaaaactgaaccaactctctccctgtaactgcagcccactggttcaagttctaccccagaatgtttgagccctgctaataaagaagactgcaactaagccttcctcttacaggacccacagcaatttccactttgtgaacagactgatcctttcataatgttcatcatgatactgaaataaatgtttttttttcagtttggtctcttg

SEQ ID NO: 545887 - DNA, 335 bp, Homo sapiens
ttcaataacagtaaaagacagagcacaataattactcatttgccttactctttctcaatattagccatgctggcctcagacggagatatgggaggggaagactgaaaagaatacacccaactttcttcattctccatgttttctctcttcttctcatttgaggtgtttatttcatatttgtatatatgactctttcagaytgaatatatattaatcatgttgtataacaataattatcggaagaatttgccttaataatgttcatctcactaatcatatcaaccagtgatatcaccctattttgtattcttactttcatatcttattttgaatac

SEQ ID NO: 545888 - DNA, 548 bp, Homo sapiens
ccttctctctgtgtcttcccaatggcagagagagagagagagagagagagagtgtgttctggtctctcttatcttataaggacacyaacctaacctggggggtcctatcttcattacctcctctgaacctaattacctcccaaaggctctaactccaaataccatcatatcaggggcaagggtttcaacatagaattttgggggacacaaacattcagtggttttgtttctggagtctttatgccattccattggacaatttatcctgtgcctgtcttctgctgtcttaattactgtagcttcagaaaaagtcttttggtagggtaatctatccttcaggagtgccttaagtatttttggtctttagctcttccacatatgttttaaaatcaagttccataaaaaaaaaaaaagccttttggatttttgctgcaattggatcaaaactatataaatcagattagggaaaatcgatatctctgtgttgtgtattctcatgacaaggcatatttctaaattcattttgttgatttatgtttgctattagg

SEQ ID NO: 545889 - DNA, 548 bp, Homo sapiens
ccttctctctgtgtcttcccaatggcagagagagagagagagagagagagagtgtgttctggtctctcttatcttataaggacaccaacctaacctggggggtcctatcttcattacctcctctgaacctaattacctcccaaaggcyctaactccaaataccatcatatcaggggcaagggtttcaacatagaattttgggggacacaaacattcagtggttttgtttctggagtctttatgccattccattggacaatttatcctgtgcctgtcttctgctgtcttaattactgtagcttcagaaaaagtcttttggtagggtaatctatccttcaggagtgccttaagtatttttggtctttagctcttccacatatgttttaaaatcaagttccataaaaaaaaaaaaagccttttggatttttgctgcaattggatcaaaactatataaatcagattagggaaaatcgatatctctgtgttgtgtattctcatgacaaggcatatttctaaattcattttgttgatttatgtttgctattagg

SEQ ID NO: 545890 - DNA, 624 bp, Homo sapiens
ctctgcttgtagcccagtgacactctgaccttgagcacagtggctctgggaacatggaaaagtagaatcttggcacgatctttggaattttcattgcagacaagatcagcagcaccaaagggagcatcttttgagcrctgggtatttatgaacacagatggatgggcatcctttaggggaatcccagacataagtggtgggaaagggctgtaggacttcccagtagaaggctggagaatttagaaagggaagttcagacaaaacccgtagctaggtggatgtaacttgtgagatttgggtcacatgaaatccatgtggcaggtaatttgcaaaaagtggtattacttatcaagttcaaggggcaatattactgatttttatacacaatgaactcctttactctatttaaagccaaatattagttactttcttgatagaaggctttctaagacacagctttccttaaatctaagaatcagtcatggacttttctagagcaagggcttgaagaatgcttaaaaagtcattaagaccagccctgggcatttgttttgaaatgtttcagcaggtttttgcaccatcaggactgtggtcagaacattatattcaataaaaatagatgga

SEQ ID NO: 545891 - DNA, 620 bp, Homo sapiens
tgctgttggcttttttctttagcttttctagggatttagcattcatttctcttaactgctcagatcctcctattgctggggaaaggctgtttaaagaaccataaaagacacaatgattataaaaactaaatgacagccttcttctccaatgttggataatcagcaaattttaagcaaaagttaaaagtactcgaatttatggaataagtaaagagtttgataacaaaatacttttaacaagatagtgtaragctttacctgaagatagacagaggcagagagtggaaaaatgagggaaaggaaggagggacagactgagagaaatgagggctaactttgtgttgggcagcttacatatattatttcatttaaatttcacaagaattttgcaaggcaggtgtatttctatttattttacaatcaaaggaactgagtatctaaaagatggtccaatttgcccaaagtcaaacagctagaaagttgtggagctggattcacagcgcatctgtctggttgtaagcccatattctgcctgtaacgaaaggtgaacttcaaaatattgtaaagcagaggctgcaaataaatgatctttaggctgaatctggccctcagatgtactc

SEQ ID NO: 545892 - DNA, 292 bp, Homo sapiens
taacggttctgcaaatctgccctgaaccttgttgcccgagggtaatggttcctggaacctgccctgatctttgttgcctcagggtaatgtttcttccatggatgcttttttccmctgcattcatttcctgtggctgctgtaagaagtcactccaaactgggtgacttaacagaagtttactatcttccagttctgaaggctggagttgaaaactaaggtgtcagcagggccccgctcccccaaaagtctccagggaaccatagtcccttgaccctcccagcttctggtggct

SEQ ID NO: 545893 - DNA, 395 bp, Homo sapiens
aaactccttcaaatgtaactccttctaattgtctaccctaggtagacagagagaatacatctaattccccttccagaagaccaaccagcaagtattcaagaagagtcatcattcccctccctagttctcctcaaatcaaaacaacatcacctcccctgttcattgcttccaaatcacagtttccagrcctggcacttttatctacacatgctcttctctctcttttcaaatacaaatctccaaaactcacttcattcattcaacagcacttcactgaacatccattatgtgtcagggaatgtaatgacatttaagagttatcaatgagcaaaacagtcaaaaatccccaccaatgtggagcttatattcaaaaagaactaacccagaacaatatg

SEQ ID NO: 545894 - DNA, 395 bp, Homo sapiens
aaactccttcaaatgtaactccttctaattgtctaccctaggtagacagagagaatacatctaattccccttccagaagaccaaccagcaagtattcaagaagagtcatcattcccctccctagttctcctcaaatcaaaacaacatcacctcccctgttcattgcttccaaatcacagtttccaggcctggcacttttatctacacatgctcytctctctcttttcaaatacaaatctccaaaactcacttcattcattcaacagcacttcactgaacatccattatgtgtcagggaatgtaatgacatttaagagttatcaatgagcaaaacagtcaaaaatccccaccaatgtggagcttatattcaaaaagaactaacccagaacaatatg

SEQ ID NO: 545895 - DNA, 395 bp, Homo sapiens
aaactccttcaaatgtaactccttctaattgtctaccctaggtagacagagagaatacatctaattccccttccagaagaccaaccagcaagtattcaagaagagtcatcattcccctccctagttctcctcaaatcaaaacaacatcacctcccctgttcattgcttccaaatcacagtttccaggcctggcacttttatctacacatgctcttctctctcttttcaaatacaaatctccaaaactcacttcattcattcaacagcacttcactgaacatccattatgtgtcagggaatgtaatgacatttaagagttatcaatgagcaaaacagtcaraaatccccaccaatgtggagcttatattcaaaaagaactaacccagaacaatatg

SEQ ID NO: 545896 - DNA, 573 bp, Homo sapiens
tttcccatttaaatattgaagtcctcaaaatcatctttggagaaakgtacagaccacagattgtttctgtgattccatgtttctttctcccaggcatgtccttaaccttggaaaaataaacttctaagttgattaaggcctatctcagatactttttggtttgcagtagctaagcccaaaggtttagacttgggtatcctgggttcaaatcccagctctgtcctttcctggctgggcaatcttgagcttaacttctccagttttcttatatgtggcagagaaataataatagtatctacttcattggattgctgtgagaactaaatgagatattcataaaaagtgcttagtgattataatgcctggcactcagtaagctctcaattaattcacagctacagggaatgccactggaagcacagaagtacttaccattttctaacccattaaaacagttccctagtccactattcaggcagactgtacagtctaccttgtctagtttgtaaattaagttatatgttctccattataaatgcccaactataactgtttcatactgcagataagcaa

SEQ ID NO: 545897 - DNA, 541 bp, Homo sapiens
atcatctttggagaaaggtacagaccacagattgtttctgtgattccatgtttctttctcccaggcatgtccttaaccttggaaaaataaacttctaagttgattaaggcctatctcagatactttttggtttgcagtagctaagcccaaaggtttagacttgggtatcctgggttcaaatcccagctctgtcctttcctggstgggcaatcttgagcttaacttctccagttttcttatatgtggcagagaaataataatagtatctacttcattggattgctgtgagaactaaatgagatattcataaaaagtgcttagtgattataatgcctggcactcagtaagctctcaattaattcacagctacagggaatgccactggaagcacagaagtacttaccattttctaacccattaaaacagttccctagtccactattcaggcagactgtacagtctaccttgtctagtttgtaaattaagttatatgttctccattataaatgcccaactataactgtttcatactgcagataag

SEQ ID NO: 545898 - DNA, 554 bp, Homo sapiens
atcatctttggagaaaggtacagaccacagattgtttctgtgattccatgtttctttctcccaggcatgtccttaaccttggaaaaataaacttctaagttgattaaggcctatctcagatactttttggtttgcagtagctaagcccaaaggtttagacttgggtatcctgggttcaaatcccagctctgtcctttcctggctgggcaatcttgagcttaacttctccagttttcttatatgtggcagagaaataataatagtatctacttcattggattgctgtgagaactaaatgagatattcataaaaagtgcttagtgattataatgcctggcactcagtaagctctcaattaattcacagctacagggaatgccactggaagcacagaagtacttaccattttctaacccrttaaaacagttccctagtccactattcaggcagactgtacagtctaccttgtctagtttgtaaattaagttatatgttctccattataaatgcccaactataactgtttcatactgcagataagcaatctgttaggc

SEQ ID NO: 545899 - DNA, 620 bp, Homo sapiens
ctgatggggaagctctttgatcaaagctttggccaaccttccccctagcccccagtttcactccacactgggttcctcttcccagtggaaggtgagtgaataggcagagaaatcttaaagagagagaccacctccagggatgcaaaagccagagcctgcacagccttgatctcctgaagctcaagaagctgtgggtgagctgagccctctacacttccttcccagtgagagaagacaggccctttctttctcttggctttgtggtgaggcctagtgtctccagtgggatcaaagaggcaaagaaagaagctcacaggtgaagaggaaccaagaaggggtcaaggataacaattagtcctaaaagtaaggtaggtctaaggctaaagktatggcaccaaagccaatggaagaagaggaagatctacaccaaagagacaacctctaccagctctgtccagtcctgccctgtccagcgaactacttctgggtgctacaaaagccaagaagacatgatttgtaagctcctgaagctcactggtttctagacagcaggcgattacaaagcccaataatacatgagtgccggaggtgagtgcagggtgctaggagcaaacagagga

SEQ ID NO: 545900 - DNA, 623 bp, Homo sapiens
tttttccaccataagagaagcctttcccaggtttctaatctatgggagtgacatatgctttgctgagtgactccaccacacagcagacagtattagacaaggacaatattagacagattccctgaagtctgttttttcacagaccttcacaacagccttggtgggaattctaattttcctactttatttataaggaaattaagtaaaattaggagagcctaatcactctaatcaaacctccagaaactcttcattcacctgtctcaattggatcccctgaggctcacttcttgttcatgtcagttggcagcagtaaatcagtaccattgcttactcctttgatggggaacagagatttctgctttaagagagctagaaatagaattatgtaaataccgttagcttacagcacttctcattatcctccatactaggattggcatacatctcaaattctacattaatttccccccacaatttatctatatatctatatttccttgaaaagtttttgcaaacataggagatatatatatatgtacatatatgtgtgtgtatatatatatgtgtgtgtgtrtatatatgaatcagaaacatttagaaaatgtcaaattagaaaataa

SEQ ID NO: 545901 - DNA, 222 bp, Homo sapiens
ctggacggtgggagggatcaagaatgactgccgtcaccatggaaactccttgatggtgagattgctttgagaaccaggaggggatgagataagcaccagaggaacactgggcagtcagggcccagcatccaccaaccctttcttccagataactcctttgttctctgggctggtctccctyttgctcctataggggccctttctgactcttcacctgttttg

SEQ ID NO: 545902 - DNA, 655 bp, Homo sapiens
ctgtcataaagtttatgtattatgaagctcataggctttacagagaagtctctcaggtgtttgcctatgaaatgtttttgccagtttaacctgaggcttttttattgtggctttttactatatcattttattttacatactcaggttctttccttcatggtttatatctcaagcttgaaaagcaaaaaatattcactcgttttctttttaagatcataatattaataattgatttgttcaactttttttggtgtaagaagttaggtacaatttcacctttatcttttcctcccaatagtcccaacagcacttactgaataacccatcttggctgacttgacatgtcccttttatcatatactacatcctcatttacagtcatccctttgtatccaygggagattagtttcaggacctgctccctcagccccaggataccaaaatctgagagtgttcaagccccttatatagcagagtatttgcatgtaccctatgtacatcctctcatatattttaaatcatctctggattacttacaatatctaatacaatgtaaatattatgtaaatagttatactgtattgtatagggaataatgacaagaaaaaagtctgtacatgttcagtacggttgcaatttttacaaatattttcaa

SEQ ID NO: 545903 - DNA, 600 bp, Homo sapiens
tcaaacattcaaaaatccactttaattggtacaccatcagggaaaacatagtttttaatagactattttttaaaaagcttcagtagtcagtctttgccacaaggcggcagtgttatccagtttaggaaccaaaaatctaagaaatattgtaagcttgtttattttaatttgaagttttcttttattccaggtattaacagaaaatttataaaagcctaattttagttttaacatactattttattaaagatctagtttaggtagtgaggtttgtaggccaagacttcccaaattctttttctaaaacttcaaaatgtacatgcattgtctgctctaccaaaatgttttgaattaatgtaacatatgaagccacccctcagagatctataatacatacaatcccctttttctgtaggtgctaagtaaaatccagacacttttagtagcagaatgtatccaaatcatgagacaacraagtatgttacctgcagcaaatttgtaagggtctgtagcaacctcaattctggcttccccagaagaaagaattagactgaggggcataaggtggaagaagagaccaaggcaagttttagagcagga

SEQ ID NO: 545904 - DNA, 619 bp, Homo sapiens
aaatatttcttggaaactctggaggctttttgtaaaaatatcagttgacaatgcctagaaaaaggccctatttaagaygcttaaataccttgcatttgatatgtaagtcagggaatgccaagttagagcctactttttatgttaaaaaaatctggttttactttagctcctcaaatactttaaggagaatcagaggaaattggtggagaaaaactatccttaagagggattttggataccattagtaacaattaatgatacttaaaatatctaggtatttttattttaataaccaagaataaaatgaagtttagtgtcttcttaaattaagcgaataaaaggctaaaataaaaaaatgttcaagtactagaataggataattcagcatatatttatgaagtaacttgttctcactttgagtcttaattatgaagaactttaatttaaatcccgctttttctccttcaaatagtcctccttttaaactgcctagtaacccaacaaaatattactgtaatcttgttgttttagtctcttcaaatatccctgttcctgtgctagtactttgagaaagcttgtctctccacagtatggttgaggtgaaatggggcagatacta

SEQ ID NO: 545905 - DNA, 477 bp, Homo sapiens
atttcaggtctttttcattacaggcccagcaaaccctaaatgatcttgaagatcccagaattgacctaccctcacaagagttaatctgaggataaatgcaraccacaatacatttcaggctcttcctccccttctgtatctccaatctgcttccaaaggagcccatctttcctttgagctttttatcttttacatcttccctatcatccatcaccccagcttagattactgcaacagcttctcatttggtctccctagcttcagcctttcctactttgtcagtccttcctgtggatctagattattaatcattttatgtatgttttactcacatgtaaagcattgggtacttggaatttttctaaacattacaaacatattaattcatttaatcctaccaataatcctataatattggtgaggaacctgaggcacaggagaggttaaagtaagttgcctaagaccacatagtaagta

SEQ ID NO: 545906 - DNA, 680 bp, Homo sapiens
ctgacaaggaatgtgaatagaaattgcccagctaggtctgtgtatatgttacagcctgggtgtagcacggagagtgtgagtgctagactaattcaaggttgggggcttctcagggggtaagaatgaggagcagaaggctggagacaagarttttccccagggtttgtaagtattgttgatgaaccatgggtgtgtgctgcttagagaaggaagggaagccatgaggggacccagaggtatcatgtaatgaagggactgagagagctgggtatctccatgaaatgtgagagtgggtggggtgggagttcacacgagctgagatgcacagggagtttcttgctagttggatttaacattccatggaggacatattctgaaggatgatgtattagttttcacactgctataaagatacaactgaagactgagtaatttttaaaggaaagatttaattgacacattgcacgtggctggggaggcctcaggaaacttacaatcatggcagaaggggaagcaggcacatctcacatggcagcaggtgagagagagagagagaagtccaggggaaactgccatttataaaaccatcagatcttgtgagaaccctctcactatcatgagaatagcactggggaaaatcacccatatgattcagtcacctcccaccaggcctcttctca

SEQ ID NO: 545907 - DNA, 611 bp, Homo sapiens
ggagagtgtgagtgctagactaattcaaggttgggggcttctcagggggtaagaatgaggagcagaaggctggagacaagagttttccccagggtttgtaagtattgttgatgaaccatgggtgtrtgctgcttagagaaggaagggaagccatgaggggacccagaggtatcatgtaatgaagggactgagagagctgggtatctccatgaaatgtgagagtgggtggggtgggagttcacacgagctgagatgcacagggagtttcttgctagttggatttaacattccatggaggacatattctgaaggatgatgtattagttttcacactgctataaagatacaactgaagactgagtaatttttaaaggaaagatttaattgacacattgcacgtggctggggaggcctcaggaaacttacaatcatggcagaaggggaagcaggcacatctcacatggcagcaggtgagagagagagagagaagtccaggggaaactgccatttataaaaccatcagatcttgtgagaaccctctcactatcatgagaatagcactggggaaaatcacccatatgattcagtcacctcccaccaggcctcttctc

SEQ ID NO: 545908 - DNA, 420 bp, Homo sapiens
agggactgagagagctgggtatctccatgaaatgtgagagtgggtggggtgggagttcacacgagctgagatgcacagggagtttcttgctagttggatttaacattccatggaggacatattctgaaggatgatgtattagttttcacactgctataaagatacaactgaagactgagtaatttttaaaggaaagatttaattgacacattgcacgtggctggggaggcctcaggaaacttacaatcatggcagaaggggaagsaggcacatctcacatggcagcaggtgagagagagagagagaagtccaggggaaactgccatttataaaaccatcagatcttgtgagaaccctctcactatcatgagaatagcactggggaaaatcacccatatgattcagtcacctcccaccagg

SEQ ID NO: 545909 - DNA, 603 bp, Homo sapiens
gctcagtgacatttctctcagactgccatggcagtgcttttggccactgaactttagaactgcagcaaatgccggaaccctcattcagggaattccttttgttctgaaaatcttactgatcacttgaaatgtcttcatgcatgcctttccaagactcttgggtccctatactcattttgctctactttgatgtgtcaatccatctttggattacttgccttctttctgtcctagccatatattcaccctgaactcagtctaggatactattgacatggactataacaccttccattagtcctactcyctcacccttttcctcaccacgcagagtatgtctgtgtacacacacacacacacacacacacacacgcttggaatagaagatcaaacgcatttctaaggatgtgagcctttgacctcttgcttaaaaatgttgctatgatgtcacccacggatttcatcaccaagtctttggactggaagtgaggattggaggtgccccttagcgagtagattttaatccatgtctctgactctaggcacagtcatatttcaaccacaggaatgaaaaactgatgaacaaaaatagtactctgactt

SEQ ID NO: 545910 - DNA, 583 bp, Homo sapiens
tgaacttaagagtaaaaaaaaaagaaaaaaaagtgctgtattcagtcattaacattgcagcaaattatctacaccactgagttctcagaaaccaaagtgacatagttcttggaactactgaagccatataattcaggcatttatgagagtccattgtgtacacagcacttgttagagctaaaggtaatatgcaaaagcaaacagaacagataagaaaattcagagattaaaatatcccaaaagagccgggcasagtggctcacacctgtaataccagcactttgggaggctgaggcaggtggaacaccttaggtcaggagttcgagaccagcctagccaacatggtgaaaccctgtctctactaaaaaatacaaaaattacatgggggtggtggcgggcgcctgtaatcccagctactcaagagactgaggcaggagaatcacttgaacccaggaggcagaggttgcagtgatctaaaatggtgccactgctctccagcctgggtgacagagtgagactctgtctcaaaagaaaaaaaaaaaaaaaacaaatcccaaaagaaaaatctcatttcgctatggca

SEQ ID NO: 545911 - DNA, 583 bp, Homo sapiens
tgaacttaagagtaaaaaaaaaagaaaaaaaagtgctgtattcagtcattaacattgcagcaaattatctacaccactgagttctcagaaaccaaagtgacatagttcttggaactactgaagccatataattcaggcatttatgagagtccattgtgtacacagcacttgttagagctaaaggtaatatgcaaaagcaaacagaacagataagaaaattcagagattaaaatatcccaaaagagccgggcacagtggctcacacctgtaataccagcactttgggaggctgaggcaggtggaacaccttaggtcaggagttcgagaccagcctagccaacatggtgaaaccctgtctctactaaaaaatacaaaaattacatgggggtggtggygggcgcctgtaatcccagctactcaagagactgaggcaggagaatcacttgaacccaggaggcagaggttgcagtgatctaaaatggtgccactgctctccagcctgggtgacagagtgagactctgtctcaaaagaaaaaaaaaaaaaaaacaaatcccaaaagaaaaatctcatttcgctatggca

SEQ ID NO: 545912 - DNA, 645 bp, Homo sapiens
gctggagggagtcaaatcaccagaaccgccaatagggctgagttcaagcacttaatcctctcagctctctagctstagtggtcgaagctctgcctaagggaagaagatgtgaagatgatatgaggattttcaattgttatttttacttactttttgattgttttaatgacaagtcaacgaaatcactttggggttacacactctccttaaaatgcagtgtacaagtcctcattatgctgagccattgggagcttttcatggaaggagtagtgataactgaatataaaaacttagttttgctccttctttgctcctacagtcactgggaaaatgctcatttgctctgtggggagactccatccttggcttttaggtttctgttttacatctcagatacataatcactagatactagataatgggcctgagaatcagttccttacccacacaaaggcttgttttttttaggagaccattgcaacaaagccaggattccttgcatcactaggaggctttggtggaagcgtttatccatgccaaagaaatgcttatattgagttcagcaattaacatatctgtgttagcatttatcatatgtattcaatttattctgctttataaggcagagggtttttacaaatgttt

SEQ ID NO: 545913 - DNA, 518 bp, Homo sapiens
ctggagggagtcaaatcaccagaaccgccaatagggctgagttcaagcacttaatcctctcagctctctagctgtagtggtcgaagctctgcctaagggaagaagatgtgaagatgatrtgaggattttcaattgttatttttacttactttttgattgttttaatgacaagtcaacgaaatcactttggggttacacactctccttaaaatgcagtgtacaagtcctcattatgctgagccattgggagcttttcatggaaggagtagtgataactgaatataaaaacttagttttgctccttctttgctcctacagtcactgggaaaatgctcatttgctctgtggggagactccatccttggcttttaggtttctgttttacatctcagatacataatcactagatactagataatgggcctgagaatcagttccttacccacacaaaggcttgttttttttaggagaccattgcaacaaagccaggattccttgcatcactaggaggctttggt

SEQ ID NO: 545914 - DNA, 645 bp, Homo sapiens
gctggagggagtcaaatcaccagaaccgccaatagggctgagttcaagcacttaatcctctcagctctctagctgtagtggtcgaagctctgcctaagggaagaagatgtgaagatgatatgaggattttcaattgttatttttacttactttttgattgttttaatgacaagtcaacgaaatcactttggggttacacactctccttaaaatgcagtgtacaagtcctcattatgctgagccattgggagcttttcatggaaggagtagtgataactgaatataaaaacttagttttgctccttctttgctcctacagtcactgggaaaatgctcatttgctctgtggggagactccatccttggcttttaggtttctgttttacatctcagatacataatcactagatactagataatgggsctgagaatcagttccttacccacacaaaggcttgttttttttaggagaccattgcaacaaagccaggattccttgcatcactaggaggctttggtggaagcgtttatccatgccaaagaaatgcttatattgagttcagcaattaacatatctgtgttagcatttatcatatgtattcaatttattctgctttataaggcagagggtttttacaaatgttt

SEQ ID NO: 545915 - DNA, 649 bp, Homo sapiens
ctgaacaattattatttaaatataatcagagaattgaatcgcctttgattagtaaaccatctcagaatataagaatgggtgatatcttctttgtggtstttaataagacatacttagcctattaacatgagatgggaggatagtcagagctgtttatgtattattttgttttgctatttcagatcttctttccaactgctgtgatcctcagctttgttttatctctttatttcatcttagccatctgattatctcaattttttcccccgagccacagcgtctaactcccctatgcaggctggttgtctgtatgaatatgaaatgtgtccatcccctgaaacttagatgtcttactttgtactttgtgcacccaaagacacatcattaacacctccatgtatattggactttccctactgataggagagggagaggatgaagaaattggtcttctttattgaagagaaggaactgagatactcaatattaaaagaagtgtagagggttgggtgaggttttcaataataaaatggagcaagtgaggtcaggaaggggagaggtgagtgccatagagagccaagtggaatgaacagtttcctctgcctgaggaattcctcatttaattaggtgaaagattccctatcatcag

SEQ ID NO: 545916 - DNA, 604 bp, Homo sapiens
ctttgattagtaaaccatctcagaatataagaatgggtgatatcttctttgtggtgtttaataagacatacttagcctattaacatgagatgggaggatagtcagagctgtttatgtattattttgttttgctatttcagatcttctttccaactgctgtgatcctcagctttgttttatctctttatttcatcttagccatctgattatctcaattttttcccccgagccacagcgtctaactcccctatgcaggctggttgtctgtatgaatatgaaaygtgtccatcccctgaaacttagatgtcttactttgtactttgtgcacccaaagacacatcattaacacctccatgtatattggactttccctactgataggagagggagaggatgaagaaattggtcttctttattgaagagaaggaactgagatactcaatattaaaagaagtgtagagggttgggtgaggttttcaataataaaatggagcaagtgaggtcaggaaggggagaggtgagtgccatagagagccaagtggaatgaacagtttcctctgcctgaggaattcctcatttaattaggtgaaagattccctatcat

SEQ ID NO: 545917 - DNA, 649 bp, Homo sapiens
ctgaacaattattatttaaatataatcagagaattgaatcgcctttgattagtaaaccatctcagaatataagaatgggtgatatcttctttgtggtgtttaataagacatacttagcctattaacatgagatgggaggatagtcagagctgtttatgtattattttgttttgctatttcagatcttctttccaactgctgtgatcctcagctttgttttatctctttatttcatcttagccatctgattatctcaattttttcccccgagccacagcgtctaactcccctatgcaggctggttgtctgtatgaatatgaaatgtgtccatcccctgaaacttagatgtcttactttgtactttgtgcacccaaagacacatcattaacacctccatgtatattggactttccctactgataggagagggagaggatgaagaaattggtcttctttattgaagagaaggaactgagatactcaatattaaaagaagtgtagagggttgggtgaggttttcaataataaaatggagcaagtgaggtcaggaaggggagaggtgagtgccatagakagccaagtggaatgaacagtttcctctgcctgaggaattcctcatttaattaggtgaaagattccctatcatcag

SEQ ID NO: 545918 - DNA, 600 bp, Homo sapiens
ctgtacctaagtaacaagaacagactgagtactggaagaggaatgtattctctctcaacatcaatgaccttgaatgtgagagtgattacagagttttgacacctagcagtgcctggacccaggtctcaaatcctgtttgtactcctgctcctatagacacaactgcttttcccaaacttgcagaaactggactcccactaagatggaaragggtgccggccgcggtggctcacacctgtaatcccagcactttgggaggccgaggcgggcagatcacgaggtcaagagatcaagaccatcctggccaacatggtgaaaccctgtctctcctaaaaatacaaaaatttgctgggtgtggtggcacgtgcctgtagtcccagctactcgagaggctgaggcaggagaatcgcttgaacctgggaggcggaggttgcagtgagccgagatctcgccactgcactccagcctggggacaagtgagactccgtctcaaaaaaaaaaaaaagatggaagagggaaagggtttgagacactagctggatttgagagatatgtttagctgaggtcttaggaaggagactgcaaacttgccagcattgt

SEQ ID NO: 545919 - DNA, 520 bp, Homo sapiens
gaagggcatttgaggactgatgtggtagaatttcaaagaggtgtgagtaggaagtgatggtagcaaggaaaatctggggtttgctttctgtagattaacacttgttgttcatctgtatgatatgcatgcatgtgtgtgtgtgtgtgtgtgtgtgtaaaacawgcccacgctggctcacactgtggcctgtggcctgtcattcctttctcagcccagctaggtacttgccagaaaaagtaggccctccatgttcctgtagatagcaggaaaccttcttggaagacgtcccactgtggcgtggcttgttctccacggccaaggcgagctccctggttgggttttctcagcgtttccttctttacactatcatgcccacattaatatccacccaggaaggaaacaaaggtgtgtcggatttatgtgaccttgtgtgttgacagagagggagtccagagaatgaggtcagaagcaggataagcctggtgcgtacctggtggccacacctctgctggttacctgg

SEQ ID NO: 545920 - DNA, 609 bp, Homo sapiens
ggcaaattcgctatgcatcaggctgacggcctggaggaagcggcgatcmtgcggggtggccacctgcggcaggtttgcttccagaagaggacacagagttgtgaagagcagacagttaccttctgccctcccaccccatgaagcccagtactgaacacggggactgagcacggctcaaggccatgagttggctgcccggggcagagacaaaggcccggggcattgggcttcggctgccgccgctgtgcgatgcagcacccggtttctgcgtgtggatctcaacattctgagacaaaccctatcacagatatgtgaacatgaacttctctcaaaacactgggaaacgccaaaaacagacacatgagcagagaagcgtctgcccagtgaacgccacactcagtgggactgggctcccggtgagaagagagccctgaacgcaggtcagacaactctgtgcacagccgtgtcatcatgatgctggggctcaagttctcatctccacccatctagaatctggcatccccgtcgccccaggccccttggctggttcttacccatcagcaagctctgaatgcggtcgtaatgtgtgaagttgtaggtgctgctcgt

SEQ ID NO: 545921 - DNA, 609 bp, Homo sapiens
ggcaaattcgctatgcatcaggctgacggcctggaggaagcggcgatcctgcggggtggccacctgcggcaggtttgcttccagaagaggacacagagttgtgaagagcagacagttaccttcygccctcccaccccatgaagcccagtactgaacacggggactgagcacggctcaaggccatgagttggctgcccggggcagagacaaaggcccggggcattgggcttcggctgccgccgctgtgcgatgcagcacccggtttctgcgtgtggatctcaacattctgagacaaaccctatcacagatatgtgaacatgaacttctctcaaaacactgggaaacgccaaaaacagacacatgagcagagaagcgtctgcccagtgaacgccacactcagtgggactgggctcccggtgagaagagagccctgaacgcaggtcagacaactctgtgcacagccgtgtcatcatgatgctggggctcaagttctcatctccacccatctagaatctggcatccccgtcgccccaggccccttggctggttcttacccatcagcaagctctgaatgcggtcgtaatgtgtgaagttgtaggtgctgctcgt

SEQ ID NO: 545922 - DNA, 609 bp, Homo sapiens
ggcaaattcgctatgcatcaggctgacggcctggaggaagcggcgatcctgcggggtggccacctgcggcaggtttgcttccagaagaggacacagagttgtgaagagcagacagttaccttctgccctcccaccccatgaagcccagtactgaacacggggactgagcacggctcaaggccatgagttggctgcccggggcagagacaaaggcccggggcattgggcttcggctgccgccgctgtgcgatgcagcacccggtttctgcgtgtggatctcaacattctgagacaaaccctatcacagatatgtgaacatgaacttctctcaaaacactgggaaacgccaaaaacagacacatgagcagagaagcgtctgcccagtgaacgccacactcagtgggactgggctcccggtgagaagagagccctgaacgcaggtcagacaactctgtgcacagccgtgtcatcatgatgctggggctcaagttctcatctccacccatctagaatctggcatccccgtcgccccaggccccttggctggttcttacccatcagcaagctctgaatgcggtcgtaatrtgtgaagttgtaggtgctgctcgt

SEQ ID NO: 545923 - DNA, 448 bp, Homo sapiens
cttgctaggagctctgtgcaaggaagctgctgtgcagtcttatctcttcttctgtatttcaaggtgactagctcatttatggagggtcacaagccctgcatgatagtaagatcagcttagaataatacacatttaagaataaaaacaaggaaagccccaagacaccatttgccctgcagcaatttcaacctgctgttcttactgctaccacyttccctgcctactaaagcaaggctgttactatagcaacgaatctccagcgtgggccccagggaaggtcagtttaccactctaagcctctaagcggggaaggggctgcaatagtttaagagccctccagagccaggcaggatttcagacatcccagccttctaggaaggagcttcagatcaggtacgatgctggggctatggagggaaacactgggtttctagggaactcccaaccc

SEQ ID NO: 545924 - DNA, 455 bp, Homo sapiens
ccgcagctgtcaaagagtcaggatgatgcactggggcagaggaggcttgagaaatagcgggtgggacagtttcagggcaatgtgggaagaggagccctcctggacccctgggccctgggcgcacactcccaatgtggagagactggtctagctcaatgttctgggaaggttttgggtgaagtggatccaagagtaggtctgacctaaggcacaaaagactgttttcctggtgatcaaaggacttgagacagctttttttttttttttttttttttgagacagggtcttkctctgccacccaggctggagtgcagtggcttgatcatggctcactgcagtctcaacctcccaggctcaagtgatcttcctgcctcagcttccctagaggcagggactacaagtgcacgccataatgcccagctaatttttgtatcttttgtagagacagggtttca

SEQ ID NO: 545925 - DNA, 626 bp, Homo sapiens
gacaggggcacagacccactcaagactgaggtaaaagcaaaggtcattgcagagggagaaggaaaatccagaagagagatgagtggcctgagatacagcatcaccggggcttagaagcatgccaaaggctgcttttctctacagagagcctggcagcttgatggtgtgtgggcagatccatggcatgggctgttcccaggcctcagaggggcttgagcagagccttggatgagaggacatgactcctcaggatacttttctttgttgcatgttgagtttaagttcaggcagccatatgctttctataaacctgcacttgggcagaactttgtttttattttatgtatcttcatgcatttgggaaggatctaacaatgagaaataaatctctttgcagtctttcctacaatagactgggataagcatttaagttaatmtggggaatagccaaatattgtaagattctgtaaatcctgggctgcttgccaaaaatgggttaattccacacaaaggaataggaggccacagagcaacgcctgtgaacagatcactccttgcggatctggagccaaactctccagaatgagtgagaccggctctggcactcactcaccgtgtggcctgag

SEQ ID NO: 545926 - DNA, 469 bp, Homo sapiens
ctggaacacagcctgcggcggcgcaccacgcagagcaccaagcacggtgagtccacccctccccagctcacaggctgggccaggccctgcgccctaggaagagaggagaagaggggccagcccagctcccacatctggcattggtgcccagcacacctctcgcctctctgagaatgaaagaagcccgaggccgcccttggygggttgcaggggttggggtggtcatgggtcatgctgtgatcagggaaggagggttggggtggcgtcccagcacaggtgcaggcatagaagcagaagctcgagccaggtcatgtgggcccatctcagccccaccacgggctggccgtgagaggctggacaagttcacttcttttccgtggattgggtggggcagcagaccccacctcccaggatggatgtgagcgttcagtgaatgagtccaggtaacgccaaggaactgcaccaactt

SEQ ID NO: 545927 - DNA, 442 bp, Homo sapiens
ggagggaggagtggggagaagcaggagatgggcacccagagaaccaagcgccccttcctttcccgtgcccaagacgcccggtcacctccctggccagcggcgccccttaccctggacagtgacccggtgccctctgtgcaaggctacctgtccccctcccagcccgcccccacccccctgccctccagaggagactcgagcagggaaaggcggtgcggcgcccagcacgggcagaaggtcaaagggagtcagggcggtgtcaggtgtctccctgatgaagtgttgggggggcggcggggggagaaggagacaggaaaacccagagaaggggcctgctgggagaaccagcgcttckagagcggcgggaaggatcagcgggcagggagagcagtccgaggagcaggcgggggtccctgggcggcgcgtgctcacctggtcactg

SEQ ID NO: 545928 - DNA, 550 bp, Homo sapiens
ctgccctcagcagcccccagtccacagcatcccatactcaggtgggacccgcagacttagggtacacagcctggcagcccaccccactgtctccctcagcccccaagtgtgagacattctttcacagagactctctgcctgtgtccttctgaccccagggtacactggaggggaggggctaagccaacagaaccttccagaaaacgtccctttgtgctcgagccctgccagcaggcctggcccagcacccctgatgcgtgtgggttgggggcaactgtaacagggccttgtctcaagaaccccacggctctcctcgcccaccagcctgccagcccgtaccgagccactgtctgtagagggtggaagggctggcatggagtcaggctcttcagtttctctccragcctcacaagacctgaaaaggggggcaggcagtggggcttggagagggaagtgggctgccccaagtcacactgcagatcagccacagaccccaagtcggtgggactcggaggctgctcctgttcccactgcaccacttcccctctgc

SEQ ID NO: 545929 - DNA, 489 bp, Homo sapiens
aggggctgccagagcagggctgggggcggatacttgggggtagctcaggtcaccactgcccaccacagccacgccctcattcatgccacacctcagagtagcttccaactgcctcagcttgcccaatccttcaaacaacctccggagacatccagagcctgacctcctgctcaagaggaaatgaaggcttaacaaggctggctaggtcgaacaaactgtctagggtcacccagctagtgactccagagctgagctctgaatcagggctacttccaaccaatgcccaggcagctcgggccccagatgctcaagaccagggagcagaagatacagggataggaaggagggagggrcagcgggtggccctcaccacagataagaaggtgccatcaaaaaggaatgggcccaggggagctgtggggccagagagggacaagactgctctaggcccgggcacagatgttctagacacgtccgctggaagaacac

SEQ ID NO: 545930 - DNA, 519 bp, Homo sapiens
ttaaaaggtgctgggtcctacacgctcccctgccctggctgcactagtcactttggataatcagtgcactcttcattttattccttcacaaatagggcactttaakacaatgtcggtgcctcagaacagccagtgaggacctttggggtaggagaggggctccggatggatgcaggaccaggaaacagcatctttccctcccctggggccacagcttccctcacaggcccacctgggagtagagagacaagaggagctggagtttggagacggaggtcagaagagtgagggcttctctccgacctacctggagttctttccatccatccccctgctttcctccccagaagcaaggtgggcatctgctcatttcatcctgctcaggtgcctttccctcccctggaggacgcaagcctcagggcatcgctggggtttggcgtctagctctgccactttccagttgggtaagccaaggcaagttagtgagcctgtctgggcctcagtttcttcatctgtaaa

SEQ ID NO: 545931 - DNA, 619 bp, Homo sapiens
cagctgctggatgagcctaattagaccaaattaataatttattcaagcaaaatgagacatgccaagactctccagggaggctgtaaaatgataatgccttcttattagggaaatgtgtcaacaccccatgcaaactctgggtctgggatagaagcaggaggcttgacttgattcaccttgtgaggacagctcctgggtccttccacctgcatctccccatgtgtggtatctcctgtctcattacgcactcctcctccttcttcataccccttccttctcctcttcttccttccccggtaattctccccctccttctgctcctccacctctcttcctcctccttctcctccctctcccscttcttcaccctgacacctcattaacctaaactttcaaatcattctccccaccagaaaggaaagccggatgacaagctaatatttccatgtcacacactgagtgattcttacataaaaattaacaggcacttgacaaagtcataattactaactaatgatgcattatgcaatttccataattagtcatgttattgatatttcctcccaaccacagagatggggggggcacctttatttatagctagagaaatggctaatct

SEQ ID NO: 545932 - DNA, 577 bp, Homo sapiens
cagccactgaagggtgatgtgtgggaggggacccctgtgctgtgattgacatggttgttttccagcaagaagaatttccagagctgacatcagcaggccataggttgacccgcttccgaaaggcctctgcaggcaggaccagtttccccgggaggtgtgcttcttggcccaagatgctgatgtttgtttttattaatagctggctgtttgttctactttggaccaagagtccaggttcacagttatttataacaactaaaaattacttctggatccagctctggctgctttgtgtttcccgcaaatatttcccgatttgaaacagagactccgtgttctgcttggacccacccatgttttcatggctgtcaagagcctactgtgtgtcaggccctccactggctccggtgtcccagctcccacggaaggtctagaaacagaggcagaggtgcccagcccatctyaggaagcgaactccacctccagcacggagagctcccacctggtcccagggggctgaggcccccaccgcctgccggctcctttcagaagggcggcttaggcagaaaagcctctt

SEQ ID NO: 545933 - DNA, 692 bp, Homo sapiens
gctgtgtgtgtgaggccagggtaagagctgctgtcacacagaagaggctgaggctcaggatcgctgaggaccttgtcttcaggcccccagccagtggttgcattcaagtgcaggctctattcccgcatttggagccacatccttggggtgtgtgagatgaatattttaaaaaagtrcttcatgctcctagccaggcgtggtggcgcatgcctataatcccagctactcgggaggctgaagcaggaaaatcgcttggactccggaggcggaggttgcgatgagccgagatcgcgccgttgcactccagcctgggcaacaagagcaaaactccgtctttaaaaaaaaaaaaaaaaaaaaaaaagtgtttcatgctccaaaaagtcattaaggagaaaagtggggaagagatttcatgggtattattacttttctttccaagatctgtacctacccttgaggttgaggaggggtggtgacagggatggttcacatgaatggagaaagtggcaggacaaaagatctgagcagctttcagagccctgacacaggagatgagaagtccagcaattcactccaagcatccctgttccttcccctgcttggatttttttttgtttttaatgaaaactcaattcccaacagaagacagctcccagcatctaatagagcagagaaaagcagcacagagaact

SEQ ID NO: 545934 - DNA, 692 bp, Homo sapiens
gctgtgtgtgtgaggccagggtaagagctgctgtcacacagaagaggctgaggctcaggatcgctgaggaccttgtcttcaggcccccagccagtggttgcattcaagtgcaggctctattcccgcatttggagccacatccttggggtgtgtgagatgaatattttaaaaaagtacttcatrctcctagccaggcgtggtggcgcatgcctataatcccagctactcgggaggctgaagcaggaaaatcgcttggactccggaggcggaggttgcgatgagccgagatcgcgccgttgcactccagcctgggcaacaagagcaaaactccgtctttaaaaaaaaaaaaaaaaaaaaaaaagtgtttcatgctccaaaaagtcattaaggagaaaagtggggaagagatttcatgggtattattacttttctttccaagatctgtacctacccttgaggttgaggaggggtggtgacagggatggttcacatgaatggagaaagtggcaggacaaaagatctgagcagctttcagagccctgacacaggagatgagaagtccagcaattcactccaagcatccctgttccttcccctgcttggatttttttttgtttttaatgaaaactcaattcccaacagaagacagctcccagcatctaatagagcagagaaaagcagcacagagaact

SEQ ID NO: 545935 - DNA, 413 bp, Homo sapiens
gtcactcacggggactgcctcaacgcccttcgaagtttcttccaactccacacagccaggactttgcctcaaggcacttcagattcaatcaagaaaacagtgctttatctccagccctgctcagagcctttcccggctgtctgaggcactcacctgtctggctacagcaagccctctaccggcattaggctgaccgcagggggccccaggccactcctggacacagatgcaacatgtctccacatgtggaggcyatgccatcatcacacatgtccactggccataagacaagttgcccttgaaggtgggaagagaaactgttcccagaatggggggcaggtggcctccagggctggatttgctaacagggatttctcaagcagcagaagtttcaaggtgacctggtgaagtgg

SEQ ID NO: 545936 - DNA, 409 bp, Homo sapiens
ggaaaggggacaaggaggcaggaactggagggggcccagccggcaactggatggctgggccagcaggaacatccatgagggccttctggggaagtggcaacagagggacactgtgcaggactggcactgcctctaaggcagggacccagaggccagagagggcccatctccaggcttctgtttgggaggactggggtcacttatgagacaggaccagcaggggcagtgggccacagatatggctcttcccacttcccaggggccagtatgtaggaatgaggggtrggagccccttgtgccctcacccctaatctcccacctaggcaggtgtcttcactggaatggaaatggatggatgttgatgaggggtgggtggagctatctcccaacacacctttaaacacttggg

SEQ ID NO: 545937 - DNA, 516 bp, Homo sapiens
gccacagctcctagttggggcctaagaaattattgctaaattagtgaatgaacgaacaaagagacaaggcagacatcatttaactgatcattcttattgctccaggaaaaaggaacaataagccaaaggaggatttaagccaaatctttggctatttgacagggtcttgagagtgaatccaactgcctactccgtcctgyccacctccacgtctgtgcctcggtggggaagctggtccaaccagtaggatggcagtcgtcaggggcccagagtggctgacctggggccctttggctccccctggtgacgcctcacacaggtctcagtggaagaggagggaaggaagctcccctcttgcttccttccaggtacaccctctcggacccaaccccagcggccgaccccagtcctcagcactgggaaagccagaggccctggacccggcaggtctgctctcagaccacaccctgtaaccttagctaaatctactgacatctctgtgggttcaggttcctc

SEQ ID NO: 545938 - DNA, 582 bp, Homo sapiens
tgtgggtcccaggactcagtgagcagtagggtgccaaactcatcctggattgcctggacatttccagtttctgcagtgaaagtcccatgtcctgggaagcccctcagtcctgggagaagcaggatgggtgatcatctagtgggcaggtatggaaggttccacactgcccgtgcccatctgtggagaagaacatgctttgtggtgtggatggtggagtgggggtagaacatgagccatggctcacaacatgagccatgtgtccctgggtggccttacgagctcaacaagcttggggccgtaactgtccttggccttcacccacaacctaaattatcctggacacagaccagatactcaatgagtatttgctraatgaacaaatcagtgaatgagtgaatgaatggatgaaggtgaagcagggcatgtttgctccaggcagaacagattcaagtctctgagatatttcagagcattgaacagagcattgaaccaaatgaaggctcagtggtaacggaaacaggctgggcagcagcaggaagctcagggtcatcatcgctctctttaaattgctccaatggtgag

SEQ ID NO: 545939 - DNA, 582 bp, Homo sapiens
tgtgggtcccaggactcagtgagcagtagggtgccaaactcatcctggattgcctggacatttccagtttctgcagtgaaagtcccatgtcctgggaagcccctcagtcctgggagaagcaggatgggtgatcatctagtgggcaggtatggaaggttccacactgcccgtgcccatctgtggagaagaacatgctttgtggtgtggatggtggagtgggggtagaacatgagccatggctcacaacatgagccatgtgtccctgggtggccttacgagctcaacaagcttggggccgtaactgtccttggccttcacccacaacctaaattatcctggacacagaccagatactcaatgagtatttgctaaatgaacaaatcagtgaatgagtgaatgaatgratgaaggtgaagcagggcatgtttgctccaggcagaacagattcaagtctctgagatatttcagagcattgaacagagcattgaaccaaatgaaggctcagtggtaacggaaacaggctgggcagcagcaggaagctcagggtcatcatcgctctctttaaattgctccaatggtgag

SEQ ID NO: 545940 - DNA, 576 bp, Homo sapiens
gggtctggaggcctcaccccacccccgcctcccgctccacacgcccgcctgtgaggttcggggcgcggctcccctggggagggctccctgtcacctgttcctcccatctgagagctcgccagaggactgtgggtggcagcgggtgcggcagatccggcgtgtgggcgccgactgctcctgcctcactgccacggtgccctcggttaccacacagcctgcgcgggggctggtttgcaggaagcccccagagagtccccacccgaatcctcctttattttaaatctgtgaagctcatgtctgcaaaacgcacccccgatcccccagcctaagctctgaaaatgctgtrggagaaggggctctgcttcgagtcggatgggtggagggaccctggctggggcagctcctggtggtccctgctggctggctcgggccaggcctgccaggagctggctgagacaccgttactgtgtctgggaaacgggtgccctgggccccctgcatggcgtgtcagagggcagcgggacagacagcaggagaggagtctgtggctggaaccaggcaggtggcgcccagagc

SEQ ID NO: 545941 - DNA, 334 bp, Homo sapiens
aaaatgtttgagaacttctggcctacaggataaaatccaaacctctgtatatggtccataagtccttctatcatggcttctgccacctctgctcccttctcttctgtctcatttcctttccactctattattcagtaagatgaagatacttttattccagaactatggtgttttacatctccttacctttgcttaatgttccttttgccttgaatatgtattcttctccagctctttatataaagtactgtctccaaatgyctcttggcatcatttcagttctaacctctctgtacctcttattctgtctttataactctatctgttggtatgc

SEQ ID NO: 545942 - DNA, 334 bp, Homo sapiens
aaaatgtttgagaacttctggcctacaggataaaatccaaacctctgtatatggtccataagtccttctatcatggcttctgccacctctgctcccttctcttctgtctcatttcctttccactctattattcagtaagatgaagatacttttattccagaactatggtgttttacatctccttacctttgcttaatgttccttttgccttgaatatgtattcttctccagctctttatataaagtactgtctccaaatgcctcttggcatcayttcagttctaacctctctgtacctcttattctgtctttataactctatctgttggtatgc

SEQ ID NO: 545943 - DNA, 253 bp, Homo sapiens
ggatccagccctctgggaaggggctgaccagaaccaggcagggggtttctgtctaggacaagtagggtccattttcaggggagctgaaatatttgcagggggtgctctgagacccacagccaataaatagggaagcaacatgcttttggkcagggtccatgtggttagggttgattttgatggggctggggggcttagagttagaccccctgccctggtcaggccccactccctggctggtgggggcgggagg

SEQ ID NO: 545944 - DNA, 585 bp, Homo sapiens
ctgtaggtcagtagttcaggcacagcatggttttctgctcagagtctcacaagattgaaattaaggtgttgctggggctgtgatgccatctgaggctcaaagttctctttcaaactctctcaggttgttggcagaactcagtttcttgcagttgcaggactgaagtccccayttccttgctggttgttgtccagggattgcttttacctcctagagaccaccctcagtccacagacagttcacagcctggatatctgctccttcagggccagcaaatggctgtctctcacttgaaatctttctgacttctaagggtcacctgattagaccaggcccacccaggataaccttccttttgattaactcaaagtcaacctaagacagtatgaaatcccatcatatttgcaagttcaggccacagtcaaggggaggggattattcagggtgtgttcaccagggagctagaatcttggcggccagttgagttttctgccctccacagacaggatgtgggaagccaccaggaatagtgcacttccctggggatagcagtggtgggacttgattaccacccctggttatgaa

SEQ ID NO: 545945 - DNA, 585 bp, Homo sapiens
ctgtaggtcagtagttcaggcacagcatggttttctgctcagagtctcacaagattgaaattaaggtgttgctggggctgtgatgccatctgaggctcaaagttctctttcaaactctctcaggttgttggcagaactcagtttcttgcagttgcaggactgaagtccccacttccttgctggttgttgtccagggattgcttttacctcctagagaccaccctcagtccacagacagttcacagcctggatatctgctccttcagggccagcaaatggctgtctctcacttgaaatctttctgacttctaagggtcacctgattagaccaggcccacccaggataaccttccttttgattaactcaaagtcaacctaagacagtatgaaatcccatcatatttgcaagttcaggccacagtcaaggggaggggattattcagggtgtgttcaccagggagctagaatcttggcggccagttgagttttctgcyctccacagacaggatgtgggaagccaccaggaatagtgcacttccctggggatagcagtggtgggacttgattaccacccctggttatgaa

SEQ ID NO: 545946 - DNA, 600 bp, Homo sapiens
cctctcctttgctggagcttcctccttccagggcatgatttggaaggacagagttttactgttattgaggacacagagttctctaaagtgcatagcccaggggatggaatggagcaggggatgtatgtatgtgtggaaaaaatccaccttggtttgaattcttgtctggccatttctgaaatayatgaccttatggggacccttccctatgtggtcatctctacaggagatttcatatccctacccaactggtgtcaggttggccaggtgactttcagccaatgggatgaaagtgagtggaggtggtatgtgccactttttggcagacactgtaagaacccttgtgtggtcaccttttcccttccctctttgtgacactatggtaatttttactatttcctaagtgttgtgcttcaccttccctttttaccttggccttgagaccatcaggtttccataagggagttgctccctttgccttcatcctggaatgaagtgaggaggggcagagcaaaaacagagctacaagggtttgtcagattgcagaggaatgaatgattgctatctaagccaccgagacctttgaaggcacctgttagc

SEQ ID NO: 545947 - DNA, 600 bp, Homo sapiens
cctctcctttgctggagcttcctccttccagggcatgatttggaaggacagagttttactgttattgaggacacagagttctctaaagtgcatagcccaggggatggaatggagcaggggatgtatgtatgtgtggaaaaaatccaccttggtttgaattcttgtctggccatttctgaaatacatgaccttatggggacccttccctatgtggtcatctctacaggagatttcatatccctacccaactggtgtcaggttggccaggtgactttcagccaatgggatgaaagtgagtggaggtggtatgtgccactttttggcagacactrtaagaacccttgtgtggtcaccttttcccttccctctttgtgacactatggtaatttttactatttcctaagtgttgtgcttcaccttccctttttaccttggccttgagaccatcaggtttccataagggagttgctccctttgccttcatcctggaatgaagtgaggaggggcagagcaaaaacagagctacaagggtttgtcagattgcagaggaatgaatgattgctatctaagccaccgagacctttgaaggcacctgttagc

SEQ ID NO: 545948 - DNA, 553 bp, Homo sapiens
ttgtttaccactgtggatgtctgaaatgggcagggatgtgtgtgtgtgaggagagagagagagagagagaaagaagctgtcctgtgagcccatgggtgaaatataactgatagtgaccatagaaacttttgcgagtgtgtgcacctatgtgtgtgtgctgacaaacagaacagtcctgtgtgtgtccatgggtgcaacaatgatgagaatccttccatgtgactgcggcaggggcctgtattgcgtgtcactgtccctgtagcaatgaagaactgtcggtgtctgggtcttgaagtggctggtacacagtcgtgttcaataaatgcttaaggaatgagtaaccgaacgcagggaaactgacctggagcaggtgtccaacgacctggtcttacaagccttttctctagaggtctgtctgtccacctcccgacatatggggtctcctgtccctcctggtcacccagcccagagcctggcactgtgtaggtgctcatggaatatttgytgaataaagtaaccagtgaacaaaagagttcctggagtacggaggtgg

SEQ ID NO: 545949 - DNA, 485 bp, Homo sapiens
taatgtcacccatggcaatgctacatgagtgaatgaaaatgtctaacgcatattaagtttaatattagcttcctgtctaagtgtatgcattgtaaataggaataattgcctaactgctttcttacatcatctgtttgaagcttttacataccaaaatacatatttttatacattctatccttattatccttttataatacagttagagttaggacattttattattaatttattttgaaagcatgcacgtagatgggttacattatcaattttatttcaagagagtaaaagggctgttacaaaaaattgtcgtaagaagggagtgttgtttctgatagctatgaraacaccttttgatgatctcagagcctccttccagctctgactcttttgtatctaaaagttaaatattgtttgtccaaggggaacaccaagacctattctcctcgtgggagcaagaagatgaagtggagaggaaggtttga

SEQ ID NO: 545950 - DNA, 533 bp, Homo sapiens
cctatagtcccagctattcaggaggctgagacaggagaattgctagaacctgggaggcagaggtggtattgagccgagatcatgccactgcattccagcctgggcaacagagctagactgtgcctcaaaaaaataaaaagcctacaaataatgcttttgaaacaayataaaattattttaacagctttcaccttaatgtttgaaagcagactgtatcatcaaatgacctttttcctgacacttttttattttaaaaataaaactagactatcaaaaatggttctttgtattttttattagataatgatcattattaatacgatagacttactatataccttttacacatgtactttaaggaattaattactcaaatatttttgtgtctaggacaaggatgaaactgaaacagttaagcagactcaaacatctgaggtgtatgatggtcccaaaaatgtaagatctgatatttctgatcaagaggaagatgaagaaagtgaaggatgtccagtgtctattagtaagtttaaagg

SEQ ID NO: 545951 - DNA, 2183 bp, Homo sapiens
gtgtggtggtgcaagcctgtagccccagctacccgggaggctgaggcaagagaatcgtytgagcccaagaggcagaggctgcagtgagcagagatcacaccactgtactccagcctgggcgacagagcaagactctgtctcaaaaaagaaagaaagaaaaaaaaaaaaaaacattagctagggctaatttcaagcttccatttgcccgggcttgggcactgcatcagcaaacttcaggccttggacttgactgcctcccaaggcacacacaaatctcatgaaccctaaaatgccaaggaaagtgtttgattcgtggctattagaaagcaagattagaacaaagttttgtaagagttcatttttaaaatccattttgcttggctgggtgcagcggctcatgcctgtaatcccagcactttgggaggccaaggtgggcagatcacgagggcaggagatcgagaacatcctggctaacacggtgaaaccctgtctctactaaaaaatacaaaaacaaaattagttgggcgtggtggcaggtgcctatagtcccagttactcgggaggctgaggcgggagaacggtgtgaacccaggaagcggagcttgcagtgagccgagattgtgccactgtactccagactgggtgacagagcgagactctgtctcaaaaaaaaaaaaaaaaagctaatgtccacaaggcacagtggctcacgcctataatctcaacactttgggaggccgcagcaggcagattgcttgagcccaggagtttgagaccagcctgggcaatatagcaaaaccctgtctctacaaaaaatacaaaaattagctgggtgtggtggcatgcgcctgtggtcccagctgctcgggaggctaaggtggggggatggcttgagcttagcaggtggaggatgcagtgagtcaagattgtgccactgcactccagcctaggtgacagagcaagaccctgtctcaaaaaaaaaaaaaaaaaaagccagtgtgccagtgtgtaactcccacatctgaccacgatggagcagcagggcccagatttaccctccccctgaagcaacccaaaacccaggtaaaatgcatgaaacaacgggctttcaggtactccatgtcaggtaacaaaggacctgagagagaggaaacaaacatggtgagccctggggagtctccaggacccagcactgcaggctggggaagatggggagaatccagcacaggagagggctgagaactgggggagactgaggcagccagaggtcatgcacagaagacagtgaggagggggctgcccagagaatctgagagatctgatcggcgcatgtgtcttgggaaactacctgagaccagacagaaccacctggaaggactggaggggacagagcccacacagggcaggggacagtgcctgttcccagaatctggactgggaaaagcatataattcctggggcgttgggtcatgccccagtagttgagaatcattagccctagactgggcactgctccatacccacctaacaaatcttttgcagaagacccaaaaggatcaaactgactcttaataactgcatcccagaacagagctcaataatagtatttctagaaatacaaaaatgcccagaacccaacaaggtaaattcaagtgtctggcattcaaccaaaaattaccagtcacacaaagaagcaggaaaatacacctataaaggggacaaaaaaaaatcagtcaatggagactgacttggaacagacacagatgtcagaattagcagaaaagatcaataaaacaggtattctaactattccatacttttttatttttatttccttgcttagatgcctcacttgtgtgccctaactccaccttatcacatatgatgaactatctgttcatgtgtctgtctcggtaactaaactgcagaactccgtcagtcaggggctttggtcctggtttgtctttgttgttccgggtcctggcccagagcttggaccacattaagtattcaaatggtttgttgaagaaattaacatgttaaaaacaaacctttctcacagaacactgttcctccttcagtgttcaagatcccagacctttgggtccctttttacctacttactccctaccaaaagttctctctccttcgactccagggtggttttataaacctcttatgca

SEQ ID NO: 545952 - DNA, 2183 bp, Homo sapiens
gtgtggtggtgcaagcctgtagccccagctacccgggaggctgaggcaagagaatcgtttgagcccaagaggcagaggctgcagtgagcagagatcacaccactgtactccagcctgggcgacagagcaagactctgtctcaaaaaagaaagaaagaaaraaaaaaaaaaacattagctagggctaatttcaagcttccatttgcccgggcttgggcactgcatcagcaaacttcaggccttggacttgactgcctcccaaggcacacacaaatctcatgaaccctaaaatgccaaggaaagtgtttgattcgtggctattagaaagcaagattagaacaaagttttgtaagagttcatttttaaaatccattttgcttggctgggtgcagcggctcatgcctgtaatcccagcactttgggaggccaaggtgggcagatcacgagggcaggagatcgagaacatcctggctaacacggtgaaaccctgtctctactaaaaaatacaaaaacaaaattagttgggcgtggtggcaggtgcctatagtcccagttactcgggaggctgaggcgggagaacggtgtgaacccaggaagcggagcttgcagtgagccgagattgtgccactgtactccagactgggtgacagagcgagactctgtctcaaaaaaaaaaaaaaaaagctaatgtccacaaggcacagtggctcacgcctataatctcaacactttgggaggccgcagcaggcagattgcttgagcccaggagtttgagaccagcctgggcaatatagcaaaaccctgtctctacaaaaaatacaaaaattagctgggtgtggtggcatgcgcctgtggtcccagctgctcgggaggctaaggtggggggatggcttgagcttagcaggtggaggatgcagtgagtcaagattgtgccactgcactccagcctaggtgacagagcaagaccctgtctcaaaaaaaaaaaaaaaaaaagccagtgtgccagtgtgtaactcccacatctgaccacgatggagcagcagggcccagatttaccctccccctgaagcaacccaaaacccaggtaaaatgcatgaaacaacgggctttcaggtactccatgtcaggtaacaaaggacctgagagagaggaaacaaacatggtgagccctggggagtctccaggacccagcactgcaggctggggaagatggggagaatccagcacaggagagggctgagaactgggggagactgaggcagccagaggtcatgcacagaagacagtgaggagggggctgcccagagaatctgagagatctgatcggcgcatgtgtcttgggaaactacctgagaccagacagaaccacctggaaggactggaggggacagagcccacacagggcaggggacagtgcctgttcccagaatctggactgggaaaagcatataattcctggggcgttgggtcatgccccagtagttgagaatcattagccctagactgggcactgctccatacccacctaacaaatcttttgcagaagacccaaaaggatcaaactgactcttaataactgcatcccagaacagagctcaataatagtatttctagaaatacaaaaatgcccagaacccaacaaggtaaattcaagtgtctggcattcaaccaaaaattaccagtcacacaaagaagcaggaaaatacacctataaaggggacaaaaaaaaatcagtcaatggagactgacttggaacagacacagatgtcagaattagcagaaaagatcaataaaacaggtattctaactattccatacttttttatttttatttccttgcttagatgcctcacttgtgtgccctaactccaccttatcacatatgatgaactatctgttcatgtgtctgtctcggtaactaaactgcagaactccgtcagtcaggggctttggtcctggtttgtctttgttgttccgggtcctggcccagagcttggaccacattaagtattcaaatggtttgttgaagaaattaacatgttaaaaacaaacctttctcacagaacactgttcctccttcagtgttcaagatcccagacctttgggtccctttttacctacttactccctaccaaaagttctctctccttcgactccagggtggttttataaacctcttatgca

SEQ ID NO: 545953 - DNA, 2183 bp, Homo sapiens
gtgtggtggtgcaagcctgtagccccagctacccgggaggctgaggcaagagaatcgtttgagcccaagaggcagaggctgcagtgagcagagatcacaccactgtactccagcctgggcgacagagcaagactctgtctcaaaaaagaaagaaagaaaaaaaaaaaaaaacattagcyagggctaatttcaagcttccatttgcccgggcttgggcactgcatcagcaaacttcaggccttggacttgactgcctcccaaggcacacacaaatctcatgaaccctaaaatgccaaggaaagtgtttgattcgtggctattagaaagcaagattagaacaaagttttgtaagagttcatttttaaaatccattttgcttggctgggtgcagcggctcatgcctgtaatcccagcactttgggaggccaaggtgggcagatcacgagggcaggagatcgagaacatcctggctaacacggtgaaaccctgtctctactaaaaaatacaaaaacaaaattagttgggcgtggtggcaggtgcctatagtcccagttactcgggaggctgaggcgggagaacggtgtgaacccaggaagcggagcttgcagtgagccgagattgtgccactgtactccagactgggtgacagagcgagactctgtctcaaaaaaaaaaaaaaaaagctaatgtccacaaggcacagtggctcacgcctataatctcaacactttgggaggccgcagcaggcagattgcttgagcccaggagtttgagaccagcctgggcaatatagcaaaaccctgtctctacaaaaaatacaaaaattagctgggtgtggtggcatgcgcctgtggtcccagctgctcgggaggctaaggtggggggatggcttgagcttagcaggtggaggatgcagtgagtcaagattgtgccactgcactccagcctaggtgacagagcaagaccctgtctcaaaaaaaaaaaaaaaaaaagccagtgtgccagtgtgtaactcccacatctgaccacgatggagcagcagggcccagatttaccctccccctgaagcaacccaaaacccaggtaaaatgcatgaaacaacgggctttcaggtactccatgtcaggtaacaaaggacctgagagagaggaaacaaacatggtgagccctggggagtctccaggacccagcactgcaggctggggaagatggggagaatccagcacaggagagggctgagaactgggggagactgaggcagccagaggtcatgcacagaagacagtgaggagggggctgcccagagaatctgagagatctgatcggcgcatgtgtcttgggaaactacctgagaccagacagaaccacctggaaggactggaggggacagagcccacacagggcaggggacagtgcctgttcccagaatctggactgggaaaagcatataattcctggggcgttgggtcatgccccagtagttgagaatcattagccctagactgggcactgctccatacccacctaacaaatcttttgcagaagacccaaaaggatcaaactgactcttaataactgcatcccagaacagagctcaataatagtatttctagaaatacaaaaatgcccagaacccaacaaggtaaattcaagtgtctggcattcaaccaaaaattaccagtcacacaaagaagcaggaaaatacacctataaaggggacaaaaaaaaatcagtcaatggagactgacttggaacagacacagatgtcagaattagcagaaaagatcaataaaacaggtattctaactattccatacttttttatttttatttccttgcttagatgcctcacttgtgtgccctaactccaccttatcacatatgatgaactatctgttcatgtgtctgtctcggtaactaaactgcagaactccgtcagtcaggggctttggtcctggtttgtctttgttgttccgggtcctggcccagagcttggaccacattaagtattcaaatggtttgttgaagaaattaacatgttaaaaacaaacctttctcacagaacactgttcctccttcagtgttcaagatcccagacctttgggtccctttttacctacttactccctaccaaaagttctctctccttcgactccagggtggttttataaacctcttatgca

SEQ ID NO: 545954 - DNA, 2183 bp, Homo sapiens
gtgtggtggtgcaagcctgtagccccagctacccgggaggctgaggcaagagaatcgtttgagcccaagaggcagaggctgcagtgagcagagatcacaccactgtactccagcctgggcgacagagcaagactctgtctcaaaaaagaaagaaagaaaaaaaaaaaaaaacattagctagggctaatttcaagcttccatttgcccgggcttgggcactgcatcagcaaacttcaggccttggacttgactgcytcccaaggcacacacaaatctcatgaaccctaaaatgccaaggaaagtgtttgattcgtggctattagaaagcaagattagaacaaagttttgtaagagttcatttttaaaatccattttgcttggctgggtgcagcggctcatgcctgtaatcccagcactttgggaggccaaggtgggcagatcacgagggcaggagatcgagaacatcctggctaacacggtgaaaccctgtctctactaaaaaatacaaaaacaaaattagttgggcgtggtggcaggtgcctatagtcccagttactcgggaggctgaggcgggagaacggtgtgaacccaggaagcggagcttgcagtgagccgagattgtgccactgtactccagactgggtgacagagcgagactctgtctcaaaaaaaaaaaaaaaaagctaatgtccacaaggcacagtggctcacgcctataatctcaacactttgggaggccgcagcaggcagattgcttgagcccaggagtttgagaccagcctgggcaatatagcaaaaccctgtctctacaaaaaatacaaaaattagctgggtgtggtggcatgcgcctgtggtcccagctgctcgggaggctaaggtggggggatggcttgagcttagcaggtggaggatgcagtgagtcaagattgtgccactgcactccagcctaggtgacagagcaagaccctgtctcaaaaaaaaaaaaaaaaaaagccagtgtgccagtgtgtaactcccacatctgaccacgatggagcagcagggcccagatttaccctccccctgaagcaacccaaaacccaggtaaaatgcatgaaacaacgggctttcaggtactccatgtcaggtaacaaaggacctgagagagaggaaacaaacatggtgagccctggggagtctccaggacccagcactgcaggctggggaagatggggagaatccagcacaggagagggctgagaactgggggagactgaggcagccagaggtcatgcacagaagacagtgaggagggggctgcccagagaatctgagagatctgatcggcgcatgtgtcttgggaaactacctgagaccagacagaaccacctggaaggactggaggggacagagcccacacagggcaggggacagtgcctgttcccagaatctggactgggaaaagcatataattcctggggcgttgggtcatgccccagtagttgagaatcattagccctagactgggcactgctccatacccacctaacaaatcttttgcagaagacccaaaaggatcaaactgactcttaataactgcatcccagaacagagctcaataatagtatttctagaaatacaaaaatgcccagaacccaacaaggtaaattcaagtgtctggcattcaaccaaaaattaccagtcacacaaagaagcaggaaaatacacctataaaggggacaaaaaaaaatcagtcaatggagactgacttggaacagacacagatgtcagaattagcagaaaagatcaataaaacaggtattctaactattccatacttttttatttttatttccttgcttagatgcctcacttgtgtgccctaactccaccttatcacatatgatgaactatctgttcatgtgtctgtctcggtaactaaactgcagaactccgtcagtcaggggctttggtcctggtttgtctttgttgttccgggtcctggcccagagcttggaccacattaagtattcaaatggtttgttgaagaaattaacatgttaaaaacaaacctttctcacagaacactgttcctccttcagtgttcaagatcccagacctttgggtccctttttacctacttactccctaccaaaagttctctctccttcgactccagggtggttttataaacctcttatgca

SEQ ID NO: 545955 - DNA, 541 bp, Homo sapiens
ggcttctggctgcgattctggggcagagaggaagagccggcatcccgcccacagcctgtcccctcaccagcctgggggcccagcttggagatgggcactcaggtatacacaggcccggaagagggcgagtgaggctgggaaggagagcagaggtggccgtgagcctggagaggggggaggaaagttaataagagaggagagagcgggagagtttcacagaaggagagaaagcctcgaggaagccgtggagacgaaattgagcaaaggggagaaaacacaaaaaacccaaagaagaaggtaggggagaaacagaaggacacgaaaaggcaataaaaagcaagagcgaaagagaagagagaaaacgaagggaaaatttaagacagaaagcgaagtcataaaaaagaaaaaaaggaaagactttagtttttttttttttwaaaagaaaaacataaaaaacaaaggacatacaaaaataagaggaaaggcaccgactaaaagaaagacaaagaatgattaaaaataaagtgaaaaggaaggcgag

SEQ ID NO: 545956 - DNA, 544 bp, Homo sapiens
cctcccaaccggcctgtatttgttttaaagaccaagagacaaggggaacaagttttgcagatgcacccgatttgaccggtagacaaaggcgggtgccgcgctgtgtctaatgtacrcaccagctcggagtccgaacagccaaggggagctcagggcctgtttgcaaagccttctcgtggtttctgtttccctgctgccggcgtcctttctgaggaacctgggcctgtgctctgctccagctctgtggtttttttccaggccctccttgctgtccccaggcacacaggccctcctgaggacagcggcagcccagccgctggctcaggccagcccggcaagggccttgtcggcgctgggcttcacccgggagcccacgtcccgcagcaccctccagcctgcagaggcttcgggtgggggagggagcgggcctgtcctagaggctggctcctggcatctgtcttctgcccaccgcctgcagggagttgcttgtgaggggaggcagaggggacggcaagtgagggccaatccttgtgttgtcctgaag

SEQ ID NO: 545957 - DNA, 549 bp, Homo sapiens
ctgttgcgaacccagccccagggaaagaattggacagtgaagattccctcccagacacttgaagccagtcttcatctagtcccttttaaagaaaatgggcctgttctcagaaataatcagacacacaacagagagctcaaggacggatgggataaagactatcaaaatatttcagacagatggtcatagtgggactgactgccatcagtggaatggctccatggttttccctcaaggccgaatgtattttatttatttatttatttatttatctttaaaatagagacaaggtcacacactatgttgcccaggctggtctcgaacttctgagctcaagtgattgtcctgccttggcctcccaaagtgttaggattacaggcatgagccaccacacgcaactccaaatgtcttttagaacaactacatttggtagaacagattggaactgacagatttatgtgtggattttgagtctrgccacaatctcaatgaaacacctattgaagggcattaaggtcaatagggtaggaaacagcccacccctcctcc

SEQ ID NO: 545958 - DNA, 541 bp, Homo sapiens
tggataacacagtctctgctagcattctccaagataatgttataatttttttcctttccatactctattctttggaagtaagtcactaaatctaggctaccctcaagggggagtgggaattaaactctaccttcctaaatgtaattttttcaataccatcctaatccaatgtaaacctaagataaaaagtaaaaccagtggttcacgcctgtaatcccagcactttgggaggccgaggtgggtggatcacctgaggtcaggggttcaagaccagcctggccaacatggcaaaaccccatctctactaaagatacaaaaattagctgggcatggtggtgggcacctgtaatcccagctactcaggaggctgagacaggagaattgcatgaacccgggaggcagaggttgcagggagccgagataatgccattgcactccagcctgggagacaagarcggaactccatctcaaaaaaaaaaaaaaagaagtaaaactgtggtaaaaatgaatttgtagtcatttagagaggcctaaaatttgc

SEQ ID NO: 545959 - DNA, 1089 bp, Homo sapiens
gatgtgagaattgcattactttagtgcatgtgtgtccatgcatacacttatgtgtgcgcatgcatgtgtacagtagagctgctgaagcaaaagacttattccaaacatgaacgatgatatctgaaagaaaatataccttctttacttgaatgcactttttctaccaaaaaaactattaaataactaatttctataagacatgaataaagacaactataatgacaaacaagattcaaagggtaccctagaacttaaagtataataaaaatatatgtataaaaaaagatttaaagggtgcatcagcagaaacacacactattctgtcactgtttaccctatttcagtggatttaaggatcactgattatacgatgtacccttattttatgtgctactatgagagaaaaaaaattatcaggtaaattataactcagtacttcctcatcacatcaactgcaagacacatgctgatcacagggatgttagagtgaacacaatggaatattactcattgctcacacacctgtcaagatgtgtgatccttgatgggtcctttaactcttctggttatacaatgttgaactatatagcatttgtaagatcctcttatgttctgaaaattctgtgcttccaggtctgtggttttctcccagaactaagatattttggagccctggggccttccaggccacaaagaacaggagctacaggtgggatctgtggtttggaaagactaagaggctccaagcctttggggcagccccttcctcagctctaacaagaaggcaccagtgaaaagacagctttcctccctcagccaccgcctctctctcacccatacctccgttcagggctttttcccacttattcctatttcttggttcctcttttcccaggccagaagagaaagcagcagaaaggaakatcccaggcctttttcttccatctaatcaagacttcaggatggctttcttgcagtcagggaatggttgcctgggtaaccaagtattaactataaggatctccccttctctctttttgctagactaaccattctggtttctccctcctgtctgagtagggagttaat

SEQ ID NO: 545960 - DNA, 1559 bp, Homo sapiens
ataaatacaaccagataatcatgaagagacagacttccctgatgcttcaggagttttcaaaaatccatttgctttcagggtttaaatgagcaataaatcccgtgtcatgctaaggcccaagctgacttatacccttctctgtgcatgtggagataactccaacagtggcggaaggtattacttatgcagccaggaaaaaaaaaaaaccacaggcgactgttagctgagcacagccccgtgcccacagcaagttctgtgcgtgagcctttcccagcttcacaatagctgtgggaggtgggagaacaggcagcgggtgaggtcatccacccagcgtccccaaggtggtgaggcacagcctagcacctatctcttaggccacttctgcaccttgcacaaatgaaaagaagaagcaccattcagagagagagaaaaagtgtgtgcatgtgtgtgcttctgcgtgcatatgtgtacatgtgtgtgcatgtgtgcgtgtgtgtgtgcattgtgtttgtgtgtgtctatatatggtgaaagatgctggtgcaacagagagagggaagtatttttttcagtttctgagacagcatcacctggccttgccatgctaaaagctgaccctgctcactccaccctcaggtatgggtgatccaacagcagctgccccagctccccttcccgtccctgcactccggccaggccggagcgcctgtgtcctggaatatgccctgctttactaccacctccctgtttatgcacacacctctccctgtatttggaacttggcatctggcagcttcccttatgaaaattctccttgtcctttcccctgggatgcacagtgctgcgccgatggcagcccgtattatagggacgaggagggaggtgtggggccactgctgggccctggcgaagctgtgaggagtgagcccctcggggtcctgtccctgggagcccaccacagccatggaagatggacagcggatgaggcagacgcaagggcctcgtgccaagaggagctgtacagcgggggcaccatgctgggcagacgaagggtgggatttgctcactggctcaacacagctgagtcctagggcttctgaggaggatggcagcagagccgcctaccttctatcaccagtgggttgtggtagtgaacttccaggcggagatatctggaggaccctggacccccgaaggcaaggccggcttcctctgggtagtaaaatgcctgtgtggggcaaggtgtcagacagacrggtgtgtcctgagagggccccaggtctgggcaggggcaaacccagtcaactgttggggcctgagcctcaggggtggtggagggggcgcagcaggattagagcgatgcttcctcctgacaggcagctcattacacgccccaggaacatcctgtgagactcgggtcagggagttggggagaggagctggtgcctagggctgagccttcccccaaaaccccttctctagacaggtgtaagagctggggagacccccatcgtctcagcctgtggaggcctcaacactggccccaccgccagccagcc

SEQ ID NO: 545961 - DNA, 1559 bp, Homo sapiens
ataaatacaaccagataatcatgaagagacagacttccctgatgcttcaggagttttcaaaaatccatttgctttcagggtttaaatgagcaataaatcccgtgtcatgctaaggcccaagctgacttatacccttctctgtgcatgtggagataactccaacagtggcggaaggtattacttatgcagccaggaaaaaaaaaaaaccacaggcgactgttagctgagcacagccccgtgcccacagcaagttctgtgcgtgagcctttcccagcttcacaatagctgtgggaggtgggagaacaggcagcgggtgaggtcatccacccagcgtccccaaggtggtgaggcacagcctagcacctatctcttaggccacttctgcaccttgcacaaatgaaaagaagaagcaccattcagagagagagaaaaagtgtgtgcatgtgtgtgcttctgcgtgcatatgtgtacatgtgtgtgcatgtgtgcgtgtgtgtgtgcattgtgtttgtgtgtgtctatatatggtgaaagatgctggtgcaacagagagagggaagtatttttttcagtttctgagacagcatcacctggccttgccatgctaaaagctgaccctgctcactccaccctcaggtatgggtgatccaacagcagctgccccagctccccttcccgtccctgcactccggccaggccggagcgcctgtgtcctggaatatgccctgctttactaccacctccctgtttatgcacacacctctccctgtatttggaacttggcatctggcagcttcccttatgaaaattctccttgtcctttcccctgggatgcacagtgctgcgccgatggcagcccgtattatagggacgaggagggaggtgtggggccactgctgggccctggcgaagctgtgaggagtgagcccctcggggtcctgtccctgggagcccaccacagccatggaagatggacagcggatgaggcagacgcaagggcctcgtgccaagaggagctgtacagcgggggcaccatgctgggcagacgaagggtgggatttgctcactggctcaacacagctgagtcctagggcttctgaggaggatggcagcagagccgcctaccttctatcaccagtgggttgtggtagtgaacttccaggcggagatatctggaggaccctggacccccgaaggcaaggccggcttcctctgggtagtaaaatgcctgtgtggggcaaggtgtcagacagacaggtgtgtcctgagagggccccaggtctgggcaggggcaaacccagtcaactgttggggcctgagcctcaggggtggtggagggggcgcagcaggattagagcgatgcttcctcctgacaggcagctcattacacgccccaggaacatcctgtgagactcgggtcagggagttggggagaggagctggtgcctagggctgagccttcccccaaaaccccttctctagacrggtgtaagagctggggagacccccatcgtctcagcctgtggaggcctcaacactggccccaccgccagccagcc

SEQ ID NO: 545962 - DNA, 776 bp, Homo sapiens
ttcagagggtgcaagccccaagccttggtggcttccatgtggtgttgagactatgggtgcaaagaaggcaggagttgaggcttaggaacctttgcctagatttcagaggatgtatggaaatatctggatgtccaggaagaagtctgctgcaaaagcagagccctcatggagaccctctcctagggcagtgcagaggggaattgtgggtttggagcccccacacagactccccacaggggcactgcctactggagctgtgagaaggggrccatcatcctccagaccccagaatggtagatccactgacagcctgcaccatgcacctggaaaagctgcaggcactcaatgccatcctgtgaaagcagctgtgggggctttgccctgcagaatcacagggatggaggtccattccaggttcttataaatggtcacctcttgtggaattcctagtgccaatctctttgtctagtctggttgatgttgtcacccctgtggcagaaatcatctgttgccattaacagtacatcaatatggtataggagggagtctattgactgattgattgattgaaatattccaaagccttgggagtgcaccccttgcatcagtgttgtttggatgtgagacatggagtcaaaggagattattttggagctttaagatttaatgactgccacgctgggttttggacttgtatggggcctatagcccctttgttttggtcaatttctcccttttggaatgggagcatttgcccaatgcctgtacccccattg

SEQ ID NO: 545963 - DNA, 1030 bp, Homo sapiens
gattacataagagacacagtaggtaagcccctgcacggtttattacttccagtgacttgactagggttggcggaagaagcaccaggtccctagaaccctaggggtgtcagctaaagttacccccgataggtgcactcttctcctaatgacatcattatttgtggcaccctccctcccaaactccatcacttctcactgtctgggttcaactgcggtagaaatggttttcatttgatttttattttattttatttttttgagatagagtttcactcttattgcccwggctggaatgcaatggcacaatctccactcaccacaacctccacatcccgggttcaagcaattctcctgcctcagcctcctgagtagctgggattaccagagtgcgccaccacgcctagataattttgtatttttattagagataggatttactgtcttggccaggatggtcttgaactcctgacctcaggtgattcacccgcctgggcccccaaagtgctgggattacagcacgcccggcccttttttcttttattgtgactccttactttagtttattttttattggtacatattagatgtacatattttcagggtacatatgataatttaattcattcatataatcaaattagggtaattggaatatccattaacttagttatctttaggctaagaacatttgaactatcctcttctagctattttgaaatgtacaatggatggatgttgactatagtcaccttactgatctatcaaataccttgtcttatttcttctaagtgtatatttgtctttttctctttcctatgtctattagtccattctcacattgctataaagacatgcctgagactcggtactttataaagaaaagaggtttaattggctcatggtttcacaggctgtacaggaatcacggctggggaggtcccaggaaactttcaatcatggcagaaggtacaggggaagtagatatgtcctacatggctggctcaggaggaaaagagagagcaagcaggtg

SEQ ID NO: 545964 - DNA, 1030 bp, Homo sapiens
gattacataagagacacagtaggtaagcccctgcacggtttattacttccagtgacttgactagggttggcggaagaagcaccaggtccctagaaccctaggggtgtcagctaaagttacccccgataggtgcactcttctcctaatgacatcattatttgtggcaccctccctcccaaactccatcacttctcactgtctgggttcaactgcggtagaaatggttttcatttgatttttattttattttatttttttgagatagagtttcactcttattgcccaggctggaatgcaatggcacaatctccactcaccacaacctccacatcccgggttcaagcaattctcctgcctcagcctcctgagtagctgggattaccagagtgcgccaccacgcctagataattttgtatttttattagagataggatttactgtcttggccaggatggtcttgaactcctgacctcaggtgattcacccgcctgggcccccaaagtgctgggattacagcacgcccggcccttttttcttttattgtgactccttactttagtttattttttattggtacatattagatgtacatattttcagggtacatatgataatttaattcattcatataatcaaattagggtaattggaatatccatyaacttagttatctttaggctaagaacatttgaactatcctcttctagctattttgaaatgtacaatggatggatgttgactatagtcaccttactgatctatcaaataccttgtcttatttcttctaagtgtatatttgtctttttctctttcctatgtctattagtccattctcacattgctataaagacatgcctgagactcggtactttataaagaaaagaggtttaattggctcatggtttcacaggctgtacaggaatcacggctggggaggtcccaggaaactttcaatcatggcagaaggtacaggggaagtagatatgtcctacatggctggctcaggaggaaaagagagagcaagcaggtg

SEQ ID NO: 545965 - DNA, 1030 bp, Homo sapiens
gattacataagagacacagtaggtaagcccctgcacggtttattacttccagtgacttgactagggttggcggaagaagcaccaggtccctagaaccctaggggtgtcagctaaagttacccccgataggtgcactcttctcctaatgacatcattatttgtggcaccctccctcccaaactccatcacttctcactgtctgggttcaactgcggtagaaatggttttcatttgatttttattttattttatttttttgagatagagtttcactcttattgcccaggctggaatgcaatggcacaatctccactcaccacaacctccacatcccgggttcaagcaattctcctgcctcagcctcctgagtagctgggattaccagagtgcgccaccacgcctagataattttgtatttttattagagataggatttactgtcttggccaggatggtcttgaactcctgacctcaggtgattcacccgcctgggcccccaaagtgctgggattacagcacgcccggcccttttttcttttattgtgactccttactttagtttattttttattggtacatattagatgtacatattttcagggtacatatgataatttaattcattcatataatcaaattagggtaattggaatatccattaacttagttatctttaggctaagaacatttgaactatcctcttctagctattttgaaatgtacaatggatggatgttgactatagtcaccttactgatctatcaaataccttgtcttatttcttctaagtgtatatttgtctttttctctttcctatgtctattagtccattctcacattgctataaagacatgcctgagactcggtactttataaagaaaagaggtttaattggctcatggtttcacaggctgtacaggaatcacggctggggaggtcccaggaaactttcaatcatggcagaaggtacaggggaagtagatatgtcctacatggctggctcaggaggaaaagagagagcragcaggtg

SEQ ID NO: 545966 - DNA, 1224 bp, Homo sapiens
gggaaaaaagcatacttaattagctaagacttcttattctaggcttgaccctgtgttcgacatctattgaatttgtagttgcatgggctgctctctgacactggttactgacctggaagctatattaacgttaggggaggtggtgtatgggcattagaggtatccttgcaaggaaagacttgtcttatctcaatatgtctttttttttgcacacaagaaagtcagtgtttgagtcttctaaaatcttcctatttccaagttgcagagtaccattgattcctaaacaaagacctaatttttgactcagagacgtggcaaggtagtgaatcaccattataatttaacaatcttcaagataaaattatctctctgatatttagattttgcccaattattaagatatttgggtgtttcgttaagaatggaagactctagtctcttgagcagagactataaaggcctcagatgatcatttttacttttatgctcttttctttaacaccttcaacacagttggaagcagccgatattccccagagttgttgtgttttttaaaccaaatgcatggttcagtggtagaaaactgggctgatccaagctgttttcagtaaacacttcatttcaggtgacctatttcatattaaataatctctagatcctgtcttcgaaactaactagatcagataacctaccctggattttctccttttagggtctgtgagccgcagtcacttttgtgaaaatgatcgcaatgacaagatagagttgtagatggggaaaatgttttgactaatttaagcatagtggtatttcatatgagaatttaagttacacacatttgaaaattataatggagtctcttggctgagctttaaaaaaaaatagcgtttaggctaaacagggaactgctacctctcctaaaatcagaaagatgtcacagtaattctccattctctagaattatcaggaagcacctttgtgatgatttacttctgttsttgggagtgtgagcccgtgtagtcttggaaccatcagttagaatgatggctttctgatcccaaagtcattcgttctgaaaacaatatttttcataaatttgaaagtgagaagttttgatcttgccactcccaagtaactctcttaataagaggcatcagcatgcttcagtgacagctgtcactttccagtgctgagagtcgtctttgagttctccatttcactccc

SEQ ID NO: 545967 - DNA, 1474 bp, Homo sapiens
tttaatgtggattgatccagtctagtagactgtattccaagttggaagattctcctgatggctctgagtctagtaggtgtagtgtgtaatttaccttttatttcttataagtctggctctttaatcagggagaagaaactgctattgaatattgaagaacattccacatctttattttttaaaaatttgtttgattactggttgcatgacctcactaaattttcttggtgaatcatctcagcacacatgcccttctaaaactgtatctaaccttcactgaagtgcagttttaattttcagtttttaagataggtaaggctagtttaaaggaaataataatggatgctaaagaaattctctaacggctagatgagtaatctaagtaggatgtttctttttttgattgcagtttaatttacataatgacatttttaaaaaaaattttctctgttgggtaaatttcttcataacgagtgaataaaaataattttgaagagataaaatgagttgtttttattctgtttcaggaattcatttaaacaacaacctaaaccacttgaaatttggcttggattatcatagactgtcttctcctacacaaacagcagcaaagcaggggaaaatgkattctcccacatcaagagcaggcagcgacaagattgtcctgttggtgtgtaaccgagcctgcactgggcaacaagggaaaaggtgagaaccagattattttccagtaagtacctagactgtaacagttcagtattttcaaacatgttaaaaagcatgggcaaaaagttcttacttttagtagttaatttttgattctgatatttagaaagaatacatgtacaagttgacctgatttggggggttggtcgggggagagtaaaattaggaatctggggttttttgttgttgttgttgttgtttgtttgtttgtttgttttttgatatggagtctcgctgtgttgcccaggctggagtgtagttgcgcgatctcggttcactgcaacctctgcctcccaggttcaagcgattctcttggctcagccttccgagtagctgggattataggcgccagccaccacacccagcggattttttatatttttagtagaaatgaggtttcaccatgttggtcaggcaggtctcaaactcctgacctcagacgatccgcccgccttggcctcccaaagtgctgggattataggcgtgagccactgcatctggccaggagtctagttttaaaagtcccatttcatatgtgtattttcagttcaggctcctcttggggctctagacccatttccagctactttcctgacagcttttttatttttatttttttaattgttaacatgtctacttggatggtgcatgtccctcagtcttctgtcccaaattgaacttatgtcttatgtcccaagttgaattgaagtatgtccaaattttctttccttttaaaactggctctcca

SEQ ID NO: 545968 - DNA, 476 bp, Homo sapiens
aggctgaagtgatcctcccacctctgcctcccaagtagctgagactacgggtatgtgccaccatgcccagctaatttttaaatttttctttttttgtagaaatggggtcgtgctatggtgttcaggcttgtcttgaactcctggactcaagagatcctcctgcctccgcctcccaaagtgctgagattacaggcgtgagccaccacgcctggctttttctrccctatttgtattgtagcaataatctcttcatttcatggttgcaatattttagtttcgggttaaaatgacctttggtggttagcttagtaacttaaatcattacttaatgccattttagtgggatataatagtctaaaatgcaaagaaataattagggataattttagtttttttaaaccccgtgtttgaccatttaacatctgcgttaaccagagaattgattgctactcttctttgtaaaccattttgtgtgt

SEQ ID NO: 545969 - DNA, 476 bp, Homo sapiens
aggctgaagtgatcctcccacctctgcctcccaagtagctgagactacgggtatgtgccaccatgcccagctaatttttaaatttttctttttttgtagaaatggggtcgtgctatggtgttcaggcttgtcttgaactcctggactcaagagatcctcctgcctccgcctcccaaagtgctgagattacaggcgtgagccaccacgcctggctttttctaccctatttgtattgtagcaataatctcttcatttcatggttgcaatattttagtttcgggttaaaatgacctttggtggttagcttagtaacttaaatcattacttaatgccattttagtgggatataatagtctaaaatgcaaagaaataattagggataattttagtttttttaaaccccgtgtttgaccatttarcatctgcgttaaccagagaattgattgctactcttctttgtaaaccattttgtgtgt

SEQ ID NO: 545970 - DNA, 1800 bp, Homo sapiens
atattacattaatgatttcacttactaatctatagatttgtaattttgcatttctttgcctgtatttctgaaagaaatatattgcattagtgatttcacttattaatctttgctgtaagtatttctctccctctttttaaggagaactcaataaagaaratgacagaattttggtagctcaaggaggtcttggtggtaaattacttacaaatttcttaccattgaaaggccagaaacgaataattcaccttgatctaaaacttatagctgatgtaggcctagtagggtaagtatcgttcatatttttattattatactttcagagagagagttcttgaatagaaaataaatgtaaatggtaatttggggccataattatttctaatttatggaatttgtgtgttgtgtatgtacttggaaaatatgctgctaaatattattttcaaattgccaacacagagtttcatagttattgcttatttataaaattaagaccagagcaattgaatagatcagtgggaatgttagagaatgcataaagaaagaaaaatcaatcaaatgcaatattacaagatggttaaataatgttaccagatattaataataaatccaaacaaaccgtattattattaaaaatatatagaaggaaataaacagggaaaaatggttgacataactcttttgggtcttaatagagacattaaagtatcgttaatcaaatggctaaagaccagtacagacaatctcaatcctcagacttacgcactgttgccgccaaattgaatcctgctatgactgtatatccttcttgcctctgcttaggatctatctagtctcagcaatgtaggcctcacaagagtgtcctcttccaccagcctccattctttcattaaataatgctgtttagctgtggggtttgcagtgcagctgcccactggaaggggatagatagtaagatacagaatacataaaggaagagaaaacttcaatttgcatttgctctctctcccccatcccccctccctcctatcctctccctctggccctatcacagtattacacagttattcagatggaaagcttaaggacaagataaggaaaactgccttattactgtcctactccaaattcctagttctattttttgcttccccatagcttctttctaagttcttttcatgttcctcttcagtcatctcactgcttctttaccagactcttaagtctgtatccctcgtcttttgccctgcctgaccagccactagagcttaccaccattggtttagggttcacagaggccccattcctgctaaaattataacaaggaaagatgtgatcctggcttgccatttacatttatttttttcaataaagcacagttacaagagttattagatgtaagttctataatcctctatatttttaggaacattatgggcttaatagggtcttatggacaagactggcagtccagccaatcacagttgcattttgcataaacatgtgtttcaagttctgaagagacaactttacagtctaagaggagcctagcacggcttagtcataaaagtggagtggcatggaggactcaggttagactatttaggttaggatctcaaatcctctggaggctggccagctggtcttgggtaaattacacagcctctctaagcctttgttttctcttctttttttcttttcttttctctcattcttccttcactatagttttttgcttttcaccacgtcatttgttttctcatctttaatagtgtatggagataagtctttccttaaaat

SEQ ID NO: 545971 - DNA, 1800 bp, Homo sapiens
atattacattaatgatttcacttactaatctatagatttgtaattttgcatttctttgcctgtatttctgaaagaaatatattgcattagtgatttcacttattaatctttgctgtaagtatttctctccctctttttaaggagaactcaataaagaaaatgacagaattttggtagctcaaggaggtcttggtggtaaattacttacaaatttcttaccattgaaaggccagaaacgaataattcaccttgatctaaaacttatagctgatgtaggcctagtagggtaagtatcgttcatatttttattattatactttcagagagagagttcttgaatagaaaataaatgtaaatggtaatttggggccataattatttctaatttatggaatttgtgtgttgtgtatgtacttggaaaatatgctgctaaatattattttcaaattgccaacacagagtttcatagttattgcttatttataaaattaagaccagagcaattgaatagatcagtgggaatgttagagaatgcataaagaaagaaaaatcaatcaaatgcaatattacaagayggttaaataatgttaccagatattaataataaatccaaacaaaccgtattattattaaaaatatatagaaggaaataaacagggaaaaatggttgacataactcttttgggtcttaatagagacattaaagtatcgttaatcaaatggctaaagaccagtacagacaatctcaatcctcagacttacgcactgttgccgccaaattgaatcctgctatgactgtatatccttcttgcctctgcttaggatctatctagtctcagcaatgtaggcctcacaagagtgtcctcttccaccagcctccattctttcattaaataatgctgtttagctgtggggtttgcagtgcagctgcccactggaaggggatagatagtaagatacagaatacataaaggaagagaaaacttcaatttgcatttgctctctctcccccatcccccctccctcctatcctctccctctggccctatcacagtattacacagttattcagatggaaagcttaaggacaagataaggaaaactgccttattactgtcctactccaaattcctagttctattttttgcttccccatagcttctttctaagttcttttcatgttcctcttcagtcatctcactgcttctttaccagactcttaagtctgtatccctcgtcttttgccctgcctgaccagccactagagcttaccaccattggtttagggttcacagaggccccattcctgctaaaattataacaaggaaagatgtgatcctggcttgccatttacatttatttttttcaataaagcacagttacaagagttattagatgtaagttctataatcctctatatttttaggaacattatgggcttaatagggtcttatggacaagactggcagtccagccaatcacagttgcattttgcataaacatgtgtttcaagttctgaagagacaactttacagtctaagaggagcctagcacggcttagtcataaaagtggagtggcatggaggactcaggttagactatttaggttaggatctcaaatcctctggaggctggccagctggtcttgggtaaattacacagcctctctaagcctttgttttctcttctttttttcttttcttttctctcattcttccttcactatagttttttgcttttcaccacgtcatttgttttctcatctttaatagtgtatggagataagtctttccttaaaat

SEQ ID NO: 545972 - DNA, 1661 bp, Homo sapiens
aagctaatcattttatatgtattacataaacttaatctctataataccaccatgaggttggttctattactatccccatttgaacatgaataatttatagactggaaaaataaagtaactcatctaaaatcctatagttactggcagaactagaattcaarccaagattatcagaattgagaattattttctttgttactattacactggtggaatattcacacagagtcctaaccctcacccacatagaggaaatattaaacatgcttcggtctatcttctattgaaaccccactcacagaagcaaggatgggtgtctgaactgcaatttttataaacttcatgagtatacttcagtgttcactgtaatgataccctgatatccagtaagaatgtccatagcttcatactgacttcattgaaaactgattttaaccctcacacataaccccttgcttaagattgttgagtaccccctgaattgaggaaaaccacaatggagaatcacttctccagcacattatactgtaattgtgagagtgggtatgagggtgagagaggaaggattcaatcagaaccacgtgactccattaaataaggatttaaagtcaaacctgactgggctaatttttattttgcctttgatctccagaacaagctttatcacccagcattgatagccctattacagccacactaaggtaatgcatcattgataggtaacttggttataaaatagatctaggtgctgtgcagaggtatggatccaaacaccacacatggtaacaacctgtcaagggggcttggttctaatctgggaattttccactccccagaagaggaagtaacgccaagatgacacaccaaccacaccttaagaacaagtatctaaaaacagaagtgaaactctcatttgcaggtttgcaccctcctcccacatctcccagattaggcctgcctatcatgggatatagatttttatggtgatgaaaagaggtaaatttggagcaatttgtggaatgtagagaggaccttaacctaaatatgagtttctgaaaatatgccctctttaagatcagcttatgacagcataactcaatgaaatcccttctaaattggtccagcaagacaggaaatctcctgtagtactcccaagaactgcagctactgaggagcacagctgggttagaggaggtggcaggaataggggagggaaggtttgtcacatcagtgacggtattaaacaccacacaggaactagtcctaggaaaagtgggcactcaatatacatctgaaacaaatttaaaaacctcttaaacaccctcttaaaatataccactataaataaaacctcattctttatattttgcgtgaattttaaagtgccactatctgaagaaaaaaaccaatcagccagttacattagcatgatggccactgaggtcaaggcattcttggttccttgatttcagtcaaggctcctaatatataatggcctgtatgtgaagagcatatagatgtatacggctgggaaggcatgatattttaaaatagtttctaccacagtatttccaaaaaacaatgctttcctcattaaaacagtggctgcaatgccacacttctatcacattttccttccttttcagctctactcttggagc

SEQ ID NO: 545973 - DNA, 561 bp, Homo sapiens
aaacatcaagttgagaactgtatgcatttaaaaagaaagtagaggtgatggatgtactcaagctatgaaaagaaattacccatgtggargaaaacagagctcaggggataaagtatgggtagattggtggtttactgtttatttaatattaattatttagtttaattttttatctggataatctattcttttatattataaatgtagctaataaaaattaattaaaatattttttaattcctttgctttctactctcttctaaggcaggtacttatttaacaaagtatttattgatttattcagctaatatgtattgaccacctatttctctttgtgattatctaacctcggaagatatggaaagatatagcaaatgccaaaaaacttttaacatttgactccttctggaatataagcaaaattcatactatgcgtaggttagctctggagtagacaagcatccaagaacacctccagattgcttggcataacctgcctagagaaatgttttgatatatacaattacaaaccctccttccctaagtaagataaagcagttg

SEQ ID NO: 545974 - DNA, 986 bp, Homo sapiens
tggtcttgaactcctgacctcaggtgatcagcccgtctaggcctcccaaagtgctgggattacaagaatgagcactgcacctcccctggccaattcttttaagagtgttttgttattgttgatttaaaattcaataatattaatttgtttcctaaaatgagacattggaattgtttgctctgaacacaaacacattacttatttcaagttagtagaacaaacatttacaaacattttaaagaaggaattcatgttttccaagcctctaccacatgaaaaaaaaacagccatctcattattgtaaatattgacagtgattaagttgttgggtatatagtaggtagttcctaaatctgatgrctacatggatgaatgaataaaaaagtagaaaagctaaggagaggactaaatttaaaaaggattttcttgcagagaaagcatacttctacggtggatgttagctatgttgtttgtacaaatgccctgaaaatgtttttcagctcaggtgctgtagaaataatgtttttctttccatgactgtaccccatcacattttttaactaaaatgatctgaaggtcaattgatcaatgtgttaattatgagtaaaacaatgtgctaactacaactaacctgcctcccccaggcaatacctgtctacttttttgatactgtgggagatctgtctttggaagtggtcatttctaccttcttttaaacctgcaacttttgccctgccactctcatccagatctggctcagagaatatagagaatatatctgctagtgtcccactgtcccatgtttagcaggtccacacttctggtctcatttctactccctctttgtgttcttagcccatcacccaatacttggttcctgatacagccctgcaaaggccacacttctgcctcttatcacacgaaccaccagatctgggtatggtatctgtagctgcttgtcataggggtgagcccttgagatggag

SEQ ID NO: 545975 - DNA, 639 bp, Homo sapiens
gatcttctttaaaaaatattcatgttttgtctgtgtctattttttcttgatccattgtggtcagagtggccttgcccaatgttggtgttcaatgcaattgtttatgggcaacaggggaacaccagggcttaggtaayagtgcgaggcaggctcctgaatgtcaggggttgcttttgtctaatctcatctaatcccatgactttaaattccatcaatatactgaatattctcaaatttatatccctagttcttatagccatgaatggccatgacagccaaaaagtcttcacctacaaggcttttcatactgaacatatctgaatctagtgtcctgatggtcccctcccaatctgcttattggggtacacttccccatctttgtttagataactccatcctttccagttattcagaccccaaacctttcttgactcgtatatactttatctatcatacatctgatatttggcaaatcctgatggctgcacttacgaaatgtacccagaatttgagaacttgtcacctctccagggctatccctctgttccaagtcaccatcatgcccctcctggactactggaataactcctaactgcccccaccctgattctaccttttctccacttaagtcgattctca

SEQ ID NO: 545976 - DNA, 949 bp, Homo sapiens
gctcagactagtctcaaactcctgggttcaagtgatcctcctgccttagcctcccaaagtgctgggattgtaagcatgagccaccacacccagcctcctgcccctttttttcaggaactaaagtcatagtactctatgctaataaaatgagctaaattcatgtactggattctgttgcccgggctggagtgctgtggcgcgatcttggctcactgcaacctctgcctcccgggttcaagaaattctcctgcctcagcctcctgagtagctgggactacaggagcacactgccacacccggctaatttttcatattttagtagagacggggtttcaccgttgttgcccaggctggtcttgaactcctgagctcaggcaatccacctgccttggcctccgaaagtgctaggattacaggtgtgagccaccacgcccggccagttgtattagttacttatgtctctttgtatatgaatttagttcttgacttttctggtcttgtgtttcctccgtaattaaatcagcataaacatttggtgaatataaaacttcatgtggttgtgtgtagtggctcatgcctgtaatctcagcactttgggaggctgaggcagaaaaatcacttgagctcaggagttcgagaccagcctgggcaacatggtgagaccccatctctataaataaaaacaaaaaaacccaaacccttcatgtatacatataggtatacatgcatacatatgcagtgtgtatgggtgcgtctcttcagtttttctatttaaaaattttttaatttaattttaaaattattgttattactttggaaacagggcctcgctctgtcgtccaggctatagtacagtggtgtgatcrtggcttactgcagcctttgacctgggctcaagcgatcctcccacttcagcctcccaagtagctaggactgtagacatgcacca

SEQ ID NO: 545977 - DNA, 1041 bp, Homo sapiens
gaggtcatgacagagaaaggcaggtgggcatatgcctttgttttgtaagaaaaaggagagtagttttatcctaatataaaagtcaatttgttccacactatgaaagagctcagtaaaatatgagacctggaaaatgaattttatttgccttggtttttaataactaaatctgaaaagaaggcataaagtaaattaaaatcttaaatgttggttcatttttgatgggtttatttccttggtttgatgattaatgccttcgtttacagaatgaaagattattctttaacttctctgaaatctgtctggggagcagagaacctgtgcctaccagaaccattttctgtgctttatgtgtgtgctttattttgactttattatgtccttgattgttgaagaaaaatccagagaacaaacttttctcacatgtgaaagaactaaggttctttatgagcatattatcttttatgtttatttcaaaatattttcttgtcacattgattaaacagatcaccatgcagttgtttctcaggtgcttatgatctaatcaaaatcaagtgccccaaatctcctgacaaccctttcgactttgccttgcaaagatcagctcctatatttagaaaaaataaaataaaaatgtcatgatatcttttacaccgaaaaatacctttgaaatttcccaaaggcccccaaccactcacaaagatttactttcttactgtatgaaaagacaaacataamaaaaattttgttttatgtgctatgtatttcttaaattagcccaacagtattgcaagagccccatgggaaaagctgtcaaattagaagagatgcttaacctcctcttgagtttgtagaggtacaatgttatgaatatgaacatgagtatttcagaaagtatatttcttataagaagattctggggatttgccttactcttgggagacattgatcaaacccttatgaaataattattctctatactctaatgggaattgtatcctcctgcattctgatattaattacagtaataaattgaccaca

SEQ ID NO: 545978 - DNA, 1349 bp, Homo sapiens
ataattttacctacataacacaaagggaacattttagagtatacacaaattttcccattcttaaaaatctcaaatatgtatgacttacataatcggaagcaagcaataaaatttattataaaattagcacttttcaaaagatcatattgtaaattgattaacatttacaaatatggattttgaaaaatggtaatcttaacaagtagacaaaattggtatatttgcaataagagaatggatagatgcagtagtatttctcaaaaacaaatagtattataatgtctttaggaaattgcattcatgtattaccatacatgtgcctagaaattcccccaaaattattttttgaaaactttatatatgaattacatactgttaagtggttataattagaaatagttacattagaaattttgctccttagtgtcaaaatatataaaatctaattcataacattaaaggttcattttatcccagccagaagaggcatacattgtattatttattgtagtatgccaagtagtacttttgaaaatatgtaccttttgtataattatgaaacttttaattagagtaacctgtgtattttgattaactagactggaggatctactgtgttcccaaagtgtctttcataactgtagtgattactgatttgaacagtttctagatttctacaatgccagcctgggttataggagagatttgggcaggaactgtgccaggaaatctaaccttcagaaagaacagagagtgaatgaataggtgatagattataataagtatttggttccaagtaacaaaacatttaaatatggcagctcctaagggatccctgagaggaggagatagcaggagaaacccaggggagggagaaactgtgtggagaagttgacagatatccagtactgcagggaagaatagacaatgccagaaagggatctgaagctggtggtgaagacttgaccttcacctatgattacagagctaaatgttcactacaggtggaatcattgtatatcccaaatattcattattttaaaaacatgtatgtatgtatttatttatttagagagggagtctcgccctgtcacccaggctggagtgcaatggcatgatctcgactcactgcaacatctgcctcccaggttcaagcaattctgctgcytcagctcccaagtagctgggattacagggacgtgccaccacacccggctaattttttgtatttttaatagagatgggttttcaccatgttggacaggctggtctcaaattcctgacttcatgatctgcccgccttggcctcccagagtgctgggattacgggtgtgagccaccgtgcccgg

SEQ ID NO: 545979 - DNA, 575 bp, Homo sapiens
atgcagtcagggcagctgcccccaggccacaagcagagacaaaagtagagagatgggcccacaagtgtagagtctctgatggaccccccagactgggctgtggttctagaggccagaaaagaacgttatatatcaaaactatgatatacaactatgatatataaaatatatttataggccgagtatagtggctcatgcctgtaatcccagtgctttgggaggccaaggcaggaagattgcctaagctcaggagttcaagatcagcctgggcaacatagtgaggccctatatctacaaaaaaatttttaaaaattatataggtgtggtgggtgcttgcctgtagtcctggctactcaggaggctgaggcaggaagattgcttgagcccaggaattcgaggctgcattgagctacgaccacaccactgcactccagcctgggcgacaaactaagaccctgtctgtctatatataattatattaaatayatatttatctattactatattaaatatactatatattctaccatatattgtaagatgttaaatatacattaagggtattaaattattaa

SEQ ID NO: 545980 - DNA, 575 bp, Homo sapiens
atgcagtcagggcagctgcccccaggccacaagcagagacaaaagtagagagatgggcccacaagtgtagagtctctgatggaccccccagactgggctgtggttctagaggccagaaaagaacgttatatatcaaaactatgatatacaactatgatatataaaatatatttataggccgagtatagtggctcatgcctgtaatcccagtgctttgggaggccaaggcaggaagattgcctaagctcaggagttcaagatcagcctgggcaacatagtgaggccctatatctacaaaaaaatttttaaaaattatataggtgtggtgggtgcttgcctgtagtcctggctactcaggaggctgaggcaggaagattgcttgagcccaggaattcgaggctgcattgagctacgaccacaccactgcactccagcctgggcgacaaactaagaccctgtctgtctatatataattatattaaatacatatttatctattactatattaaatatactatatattctaycatatattgtaagatgttaaatatacattaagggtattaaattattaa

SEQ ID NO: 545981 - DNA, 575 bp, Homo sapiens
atgcagtcagggcagctgcccccaggccacaagcagagacaaaagtagagagatgggcccacaagtgtagagtctctgatggaccccccagactgggctgtggttctagaggccagaaaagaacgttatatatcaaaactatgatatacaactatgatatataaaatatatttataggccgagtatagtggctcatgcctgtaatcccagtgctttgggaggccaaggcaggaagattgcctaagctcaggagttcaagatcagcctgggcaacatagtgaggccctatatctacaaaaaaatttttaaaaattatataggtgtggtgggtgcttgcctgtagtcctggctactcaggaggctgaggcaggaagattgcttgagcccaggaattcgaggctgcattgagctacgaccacaccactgcactccagcctgggcgacaaactaagaccctgtctgtctatatataattatattaaatacatatttatctattactatattaaatatactatatattctaccatatattrtaagatgttaaatatacattaagggtattaaattattaa

SEQ ID NO: 545982 - DNA, 1800 bp, Homo sapiens
gttttctggttcttctttggttcctgcaggtctgactttctcctttttctgttgatggtctttcttggcctgtgtttgcaatgggtcaaccatgtgctttctggccatacttcacacttacttcccaactgggacagatagcatttcttaagtctaattccaaacttytgggataatctgattgcccttcattgagtcagaagccagtggatagggacatggaagatgctatagctgggctccacccttgcaggtgagaggagcagtttcaggaaagtctgccaggcatgagctgagaccttaagagatgtcagctagaattagccactgtcagtatatctgcttctgggtcccactcttcatcctgcttttcaaggttttcaaatatacactcctactcagtctcatgaaaattattatttttaaaataccctttagcacatttacctctaatgatactagattcttgcctcctgcctctgtaaatcactcggtcacttcccgatcttatatttggctgtcaagaatgtggaaatctcacagaacccttgaatttcaaagttggaagggaaaattgcttgtctatgcttataaaaaatacacacctacacccacgtacacatgtatttactaaaatagtattaggctaaatattcagttgtacagctttctgatttcattaacaatgtctgtctttccgtgtcagaagagatagacatttgaaaaaacggcagcgtaggattttgttctatggatgagctaaaagttctttcacctgtccacaaacttccacctagtccgtgtgccttataaaacacaaattctgaaatcccatgtaacgtgtcagctagattctgcctatcactgagtagagatgaaccatcacatctcatgttctagatttggggttacaaattcaaattcctacaggggccaggcaactgtcttagatgtgtgaaacgtcctagatataagaaatgcctgtaaatgaaaccttaagagtttttataagcatacaaataagtatgtaatattttgaaacatacttattttttggtgtacccacacaggcctagcatcaccagattcttctctctttttttttttttttgttttgccccaagagaggcaggaaatgagtatatttatgggagctttcctaattgtgaagtgttggtaagttcattatttttaaaaaactaaaaaccaacttgcaggccaaacaaaatgtgggccaccaatgtgtaatcactgatgtagataatgcacttcaattaatctaaaatcatcaactattttggcagccctctcagactgctgactcactgagcttttcatctgatgaaatccttaagtgattcacaaatacttaatctgaaaacctcttaatctaacttgtgttcctggacttgtaaattgggtttctggaccttaatacttgctcatgttaaatccattctgttacttatgtttaaggtcctacatctgtcttccagcctgatcacccatcttttcagccatgtgttgtttttgaattcaactcatttgatcctttctctatgtcctttttttttttttttttgagacggggtcttgctctgttgcccaggctggagtgtggtagcacgatcaggactcaatgcaacctcgacttcctgggcttaagcgatcctcctgcctcagcccccacaagtggttgggactacaagcacgtgccaccacacctggctaatttttttgaattttagtagagatgaggtctcactatgttgcccaggctggtcttgaactcctgagctc

SEQ ID NO: 545983 - DNA, 1800 bp, Homo sapiens
gttttctggttcttctttggttcctgcaggtctgactttctcctttttctgttgatggtctttcttggcctgtgtttgcaatgggtcaaccatgtgctttctggccatacttcacacttacttcccaactgggacagatagcatttcttaagtctaattccaaacttctgggataatctgattgcccttcattgagtcagaagccagtggatagggacatggaagatgctatagctgggctccacccttgcaggtgagaggagcagtttcaggaaagtctgccaggcatgagctgagaccttaagagatgtcagctagaattagccactgtcagtatatctgcttctgggtcccactcttcatcctgcttttcaaggwtttcaaatatacactcctactcagtctcatgaaaattattatttttaaaataccctttagcacatttacctctaatgatactagattcttgcctcctgcctctgtaaatcactcggtcacttcccgatcttatatttggctgtcaagaatgtggaaatctcacagaacccttgaatttcaaagttggaagggaaaattgcttgtctatgcttataaaaaatacacacctacacccacgtacacatgtatttactaaaatagtattaggctaaatattcagttgtacagctttctgatttcattaacaatgtctgtctttccgtgtcagaagagatagacatttgaaaaaacggcagcgtaggattttgttctatggatgagctaaaagttctttcacctgtccacaaacttccacctagtccgtgtgccttataaaacacaaattctgaaatcccatgtaacgtgtcagctagattctgcctatcactgagtagagatgaaccatcacatctcatgttctagatttggggttacaaattcaaattcctacaggggccaggcaactgtcttagatgtgtgaaacgtcctagatataagaaatgcctgtaaatgaaaccttaagagtttttataagcatacaaataagtatgtaatattttgaaacatacttattttttggtgtacccacacaggcctagcatcaccagattcttctctctttttttttttttttgttttgccccaagagaggcaggaaatgagtatatttatgggagctttcctaattgtgaagtgttggtaagttcattatttttaaaaaactaaaaaccaacttgcaggccaaacaaaatgtgggccaccaatgtgtaatcactgatgtagataatgcacttcaattaatctaaaatcatcaactattttggcagccctctcagactgctgactcactgagcttttcatctgatgaaatccttaagtgattcacaaatacttaatctgaaaacctcttaatctaacttgtgttcctggacttgtaaattgggtttctggaccttaatacttgctcatgttaaatccattctgttacttatgtttaaggtcctacatctgtcttccagcctgatcacccatcttttcagccatgtgttgtttttgaattcaactcatttgatcctttctctatgtcctttttttttttttttttgagacggggtcttgctctgttgcccaggctggagtgtggtagcacgatcaggactcaatgcaacctcgacttcctgggcttaagcgatcctcctgcctcagcccccacaagtggttgggactacaagcacgtgccaccacacctggctaatttttttgaattttagtagagatgaggtctcactatgttgcccaggctggtcttgaactcctgagctc

SEQ ID NO: 545984 - DNA, 1800 bp, Homo sapiens
gttttctggttcttctttggttcctgcaggtctgactttctcctttttctgttgatggtctttcttggcctgtgtttgcaatgggtcaaccatgtgctttctggccatacttcacacttacttcccaactgggacagatagcatttcttaagtctaattccaaacttctgggataatctgattgcccttcattgagtcagaagccagtggatagggacatggaagatgctatagctgggctccacccttgcaggtgagaggagcagtttcaggaaagtctgccaggcatgagctgagaccttaagagatgtcagctagaattagccactgtcagtatatctgcttctgggtcccactcttcatcctgcttttcaaggttttcaaayatacactcctactcagtctcatgaaaattattatttttaaaataccctttagcacatttacctctaatgatactagattcttgcctcctgcctctgtaaatcactcggtcacttcccgatcttatatttggctgtcaagaatgtggaaatctcacagaacccttgaatttcaaagttggaagggaaaattgcttgtctatgcttataaaaaatacacacctacacccacgtacacatgtatttactaaaatagtattaggctaaatattcagttgtacagctttctgatttcattaacaatgtctgtctttccgtgtcagaagagatagacatttgaaaaaacggcagcgtaggattttgttctatggatgagctaaaagttctttcacctgtccacaaacttccacctagtccgtgtgccttataaaacacaaattctgaaatcccatgtaacgtgtcagctagattctgcctatcactgagtagagatgaaccatcacatctcatgttctagatttggggttacaaattcaaattcctacaggggccaggcaactgtcttagatgtgtgaaacgtcctagatataagaaatgcctgtaaatgaaaccttaagagtttttataagcatacaaataagtatgtaatattttgaaacatacttattttttggtgtacccacacaggcctagcatcaccagattcttctctctttttttttttttttgttttgccccaagagaggcaggaaatgagtatatttatgggagctttcctaattgtgaagtgttggtaagttcattatttttaaaaaactaaaaaccaacttgcaggccaaacaaaatgtgggccaccaatgtgtaatcactgatgtagataatgcacttcaattaatctaaaatcatcaactattttggcagccctctcagactgctgactcactgagcttttcatctgatgaaatccttaagtgattcacaaatacttaatctgaaaacctcttaatctaacttgtgttcctggacttgtaaattgggtttctggaccttaatacttgctcatgttaaatccattctgttacttatgtttaaggtcctacatctgtcttccagcctgatcacccatcttttcagccatgtgttgtttttgaattcaactcatttgatcctttctctatgtcctttttttttttttttttgagacggggtcttgctctgttgcccaggctggagtgtggtagcacgatcaggactcaatgcaacctcgacttcctgggcttaagcgatcctcctgcctcagcccccacaagtggttgggactacaagcacgtgccaccacacctggctaatttttttgaattttagtagagatgaggtctcactatgttgcccaggctggtcttgaactcctgagctc

SEQ ID NO: 545985 - DNA, 1800 bp, Homo sapiens
gttttctggttcttctttggttcctgcaggtctgactttctcctttttctgttgatggtctttcttggcctgtgtttgcaatgggtcaaccatgtgctttctggccatacttcacacttacttcccaactgggacagatagcatttcttaagtctaattccaaacttctgggataatctgattgcccttcattgagtcagaagccagtggatagggacatggaagatgctatagctgggctccacccttgcaggtgagaggagcagtttcaggaaagtctgccaggcatgagctgagaccttaagagatgtcagctagaattagccactgtcagtatatctgcttctgggtcccactcttcatcctgcttttcaaggttttcaaatatacactcctactcagtctcatgaaaattattatttttaaaataccctttagcacatttacctctaatgatactagattcttgcctcctgcctctgtaaatcactcggtcacttcccgatcttatatttggctgtcaagaatgtggaaatctcacagaacccttgaatttcaaagttggaagggaaaattgcttgtctatgcttataaaaaatacacacctacacccacgtacacatgtatttactaaaatagtattaggctaaatattcagttgtacagctttctgatttcattaacaatgtctgtctttccgtgtcagaagagatagacatttgaaaaaacggcagcgtaggattttgttctatggatgagctaaaagttctttcacctgtccacaaacttccacctagtccgtgtgccttataaaacacaaattctgaaatcccatgtaacgtgtcagctagattctgcctatcactgagtagagatgaaccatcacatctcatgttctagatttggggttacaaattcaaattcctacaggggccaggcaactgtcttagatgtgtgaaacgtcctagatataagaaatgcctgtaaatgaaaccttaagagtttttataagcatacaaataagtatgtaatattttgaaacatacttattttttggtgtacccacacaggcctagcatcaccagattcttctctctttttttttttttttkttttgccccaagagaggcaggaaatgagtatatttatgggagctttcctaattgtgaagtgttggtaagttcattatttttaaaaaactaaaaaccaacttgcaggccaaacaaaatgtgggccaccaatgtgtaatcactgatgtagataatgcacttcaattaatctaaaatcatcaactattttggcagccctctcagactgctgactcactgagcttttcatctgatgaaatccttaagtgattcacaaatacttaatctgaaaacctcttaatctaacttgtgttcctggacttgtaaattgggtttctggaccttaatacttgctcatgttaaatccattctgttacttatgtttaaggtcctacatctgtcttccagcctgatcacccatcttttcagccatgtgttgtttttgaattcaactcatttgatcctttctctatgtcctttttttttttttttttgagacggggtcttgctctgttgcccaggctggagtgtggtagcacgatcaggactcaatgcaacctcgacttcctgggcttaagcgatcctcctgcctcagcccccacaagtggttgggactacaagcacgtgccaccacacctggctaatttttttgaattttagtagagatgaggtctcactatgttgcccaggctggtcttgaactcctgagctc

SEQ ID NO: 545986 - DNA, 1800 bp, Homo sapiens
gttttctggttcttctttggttcctgcaggtctgactttctcctttttctgttgatggtctttcttggcctgtgtttgcaatgggtcaaccatgtgctttctggccatacttcacacttacttcccaactgggacagatagcatttcttaagtctaattccaaacttctgggataatctgattgcccttcattgagtcagaagccagtggatagggacatggaagatgctatagctgggctccacccttgcaggtgagaggagcagtttcaggaaagtctgccaggcatgagctgagaccttaagagatgtcagctagaattagccactgtcagtatatctgcttctgggtcccactcttcatcctgcttttcaaggttttcaaatatacactcctactcagtctcatgaaaattattatttttaaaataccctttagcacatttacctctaatgatactagattcttgcctcctgcctctgtaaatcactcggtcacttcccgatcttatatttggctgtcaagaatgtggaaatctcacagaacccttgaatttcaaagttggaagggaaaattgcttgtctatgcttataaaaaatacacacctacacccacgtacacatgtatttactaaaatagtattaggctaaatattcagttgtacagctttctgatttcattaacaatgtctgtctttccgtgtcagaagagatagacatttgaaaaaacggcagcgtaggattttgttctatggatgagctaaaagttctttcacctgtccacaaacttccacctagtccgtgtgccttataaaacacaaattctgaaatcccatgtaacgtgtcagctagattctgcctatcactgagtagagatgaaccatcacatctcatgttctagatttggggttacaaattcaaattcctacaggggccaggcaactgtcttagatgtgtgaaacgtcctagatataagaaatgcctgtaaatgaaaccttaagagtttttataagcatacaaataagtatgtaatattttgaaacatacttattttttggtgtacccacacaggcctagcatcaccagattcttctctctttttttttttttttgttttgccccaagagaggcaggaaatgagtatatttatgggagcyttcctaattgtgaagtgttggtaagttcattatttttaaaaaactaaaaaccaacttgcaggccaaacaaaatgtgggccaccaatgtgtaatcactgatgtagataatgcacttcaattaatctaaaatcatcaactattttggcagccctctcagactgctgactcactgagcttttcatctgatgaaatccttaagtgattcacaaatacttaatctgaaaacctcttaatctaacttgtgttcctggacttgtaaattgggtttctggaccttaatacttgctcatgttaaatccattctgttacttatgtttaaggtcctacatctgtcttccagcctgatcacccatcttttcagccatgtgttgtttttgaattcaactcatttgatcctttctctatgtcctttttttttttttttttgagacggggtcttgctctgttgcccaggctggagtgtggtagcacgatcaggactcaatgcaacctcgacttcctgggcttaagcgatcctcctgcctcagcccccacaagtggttgggactacaagcacgtgccaccacacctggctaatttttttgaattttagtagagatgaggtctcactatgttgcccaggctggtcttgaactcctgagctc

SEQ ID NO: 545987 - DNA, 1296 bp, Homo sapiens
acatggtgaaaccccatctctactaaaaatacaaaaattagctgggcatggtggcacatgcctgtaatcccagctactcgggaggctgaggcaggagaatcccttgaacctgggaggtggaggttgcagtgagccgagatcgtgccactgcactctagcctgggccataagagcgagactctgtctcaaaagaaaaaagaaatattggcactggaccctgcatacagtctttccccagtgaggatttgctattgcctctctgtcgttctaaaagtttgatcgccacgtgaccagacagagaaagccttcagaataactgggagctgcgaatctctgctgctctccctcctccctctcagctccagatcctggccccacctgtcttctctggtagataaacacccggcctcctctctgctccccatagaacagtggggcaccaatcagcagcagctctgtctccccatcttggtccacgtcgacgccacacagctccccaccgaaataagagccaatctgtggggagaggcaggtgtttggggaagcgcctgtgggaacagcaggggttggcagggagatacctgtaccgtgttcatcttgtgccactccctcaaatgcaggttccaatcttggatccacccctagtctatgtgcgttaagacaaggtgggctctttgaggttcagtttcttaaactagagagggagatgacagggcttacctctgtgtgttatgagggataaatgtgatcatgtttagcacaggggctgccacatggtaagtggatgagcattcaaaggacagaagggagtgtgatgtgtgtcccgccagtccctggtctgcagatgccctcggactgggcgcacctgggtcccatggattgtctggacctggctccagtgtcctccgccctgtggctcttggaacagcagcactcggcccatgtgctggtatcgaggggctcccgaggccagcaacgaagtcttttgccgggagggcagccaggtcacggtgtaacctgaggaaagtgtgtggggcrtggagttaggaacacaggatgctggaagaacacccagcaggagaggggcaggggccccagggaattgggttagtagcagagatgcatggaaacagctgaagaccttctcctgagaaaagcatccatgtgctcccagccaaacaaatcctgccatcttggggatggcatgtcttcaactgtgggtgacatgcacacccagggaaaagcagctatgcacaacaagtggagcgtggagcctcttctgagcctcagtttacc

SEQ ID NO: 545988 - DNA, 527 bp, Homo sapiens
ctttcagaattgtctctgaaggggtmcagaatatgccactgtggcataaaaattattttgagcagaaggcatctgaaatctcttatctgccaaaaagcagggcctcccaaaagaactcagttgtcataaattgcctccctgggaaaaaccagggaaggctgacccttttaaacagagataagacttcacaccacacttaaacagacattgtcataaaaactttgtatctcccatctggtctcctaacagtccatctgtctttcctaacagtcatttgtttttccataagtgcccccctccttctccccttcctctattaagatggtatataagccccacattctaactgcccctttgaaccacatttttctgtgaactcctatccacacatgactaaatctgtcttttcccttgctaatctgttttttgttggtttaatttgcaggccccatcactgaacctaagagggttgaggaaaagtttttcctctttgacatgtctttaactcttagtattctcaaatctcg

SEQ ID NO: 545989 - DNA, 989 bp, Homo sapiens
agggtgatattctttcctgcatttattagctgaaactatacttcaaaaataatatttatgtatttccaatgtgattatcctaaaatacgtacagttggtacgaaaaaaggcaggccaaatgtatgcttccttccctttatttgtctctttgcagaataatgagtcgggatyctagtatgctgcaatgctgtaaactaacaatgtttccttgattagtatgtttataaaatcatcagtttttaaatatttgatgtgtctcaattcactgtagttgttattcttattaaatctcaaattttcccaacttatgggaatgatgtcttccatttttaatggaagacagatagtattgcattcagagctccttcccttcaagaactaatgaggtgctaatgaatctctgtgttgctttaaaaaccaaaaaactccacgttattggataaggacaacgtatattattattattttttttttttgagatggagtttcactcttgctgcccaggctggagtgcaatggcgtgatctcacctcactgcaacttccgcctcccgggatcaagcgattctcctgcctcagcttcctgagtagctgggattacaggtgcccaccaccacacccagctaatttttggtatttttagtagaaatagggttttgccatattggccaggctggtcttgaacgcctgaccttaggtgatctgccctcctcggcctcccaaagtgctgggattacaggcgtgagccgctgcacccagccaggacaatgtatactattttatggagtgtgaaaggcatcttttaaatcaaacttttgtatttcatagaaagaggtcaggttacagaaaaagggaatttggaaatctaagactgaaggagatatataaaaggacatttttggtgggtgcctccaaaatgggaagctatcatgggaattttcactgatagtaaaaggaagatacaatttttttaaattgtaacaaatcacc

SEQ ID NO: 545990 - DNA, 520 bp, Homo sapiens
tggccagttgacctaagaagatgctattgagtgaggcacaagtgcgacacctggaagtgcagctgggtgagggatatggccctcttccaagctgtggtctctcagaagattgtgaaagcattttggcctggttggatccctcatagcaatgcaaagtagactatggggtggaaatgggcaggcacttttttgcctgttcacaacagatcccattatcattggtggtgggtccagaggcatctcattcattggggaggttgcaggtttatggaagaaagagcctgaggggggccattggggtagtggtggaaagtctcctcagccatttaactgttacaatccaggccaactctgggtcatcctgatcatccagatctggtttgacytttgtgaaaggaggaaggatgaaccacctagtggcagagaagcatggcctctttggagcagcagttcccaggaggtgaagtgattaggcaaaagttctggaggctgaggcctctgctctcctttcacccacaga

SEQ ID NO: 545991 - DNA, 520 bp, Homo sapiens
atctgtagtacctaccaatagtgcgaaatcttttgcaatgttaaactactagcggccgttggttatgaatgctgtgtatttttacaaggatttcccctgttgatgtgatattttaggcaatttccttctttaaaaaagggtcatatgcttagccaacagcttcattatgccaatcatgcctcctttagttgcaaatccaagatartcagaacttaaatacattttattttacagcaattccggataaatccttgaagcgcaaattatgctgtatcagtattaatctataaggcgttttggataccacggttttatcagctctgtagaaatacattgttacattaaaaaatgctgttatttgaaagtaaaaattactataaaattattgctcaattagatattatgcttctgcacacagcctttactctgcttcactaatttattttgcagacaactgataaccatagcactctatttgcatacaatttgcctaatatgtggtgtgggttacatcgttaat

SEQ ID NO: 545992 - DNA, 1643 bp, Homo sapiens
aagcagggcccattagaactgcaagtggttaagtgtgggggaagatggagctgcagaaataggccaaggccataaagcacctagactttattctgaggtccatgggaagttattaatggatgactgatgaagcagaagagcgatgtgtcagatctgcatatgagactacttgtgctccagagtggacaatggattggagaggcagtcatagtggcagtagggaccagtgattgggagagatgatgtttgcctgcactaaagaagtaatgggaatagaggacaatggatggatttgagagctattaaggaggtaggatcaaaaggaattagtgattaattagatgctagcatgagaatgatggagtagtcatggatgattctctgatttttaacttggacaccttgggtgagtgagaacgaagattgggaacaggcttagagaagcagatgatgaattccaatttgggcagactgcacttgagttttctttggaatacccatgtggagacttttagtcggcagttggatacacacatggatctgaagttcagaaggaagatctaggctgtaaacataaatgtgggggtctttgcttatgaatggtaattgattcctagaagtggatgagatcactcagggagggtgtggagaataaggagaaagacagccaaagacagaactttaggagaacattcaagtaacaagcatttttaaagggagcgaataaaggaataagtgattaaaaagagtcatttagaagaagggatcccttctaaagcttcccaaatactgctaccaaatcagctggctatcctatttgtgcttaaggcaaagcctactttttggctccccaaatggagaatgtgttactaaaccaaagatggaaagtagggcaacatcatatacagaaagcatatcttcagggcttttttcagatacatatgtggatactctactcctgaggctctattggtaaacagatcatagtagcgtcttgttagtctgcatcaagaaacacttaataattaaaaagaaacactttaaaaagctgtatgtttaaaatataatatgaaaagtattagaagtcatttgatgatcatctgatgttcagatcaaccagataatctttctagcctgcctgatgagtggccttttgcttggcttgttggctttggcgtcaagtgtacaaactcagccagttggaatacacctgaaaaatgtttctcaaatgttcctttgtgtggataaatttgttggtttatatagtgtgtatatgttatttgtctatgttaagaagtgtcccctggctgataacatacttgtttttsagcccacaaattttctatgaaccattgagagttcccaggcctcactattaccttgagatattgaagatattttgacttactgcaataaaattacagttctgcaacttgtaattaaactttggatttatttgaacaatgaaagaaaaaagagaacaaaactattaaaccatcaggtcaactggtcagttgagaattcgtacactcatcttctcttctttcatgtgtacccagatttgatagaagtgaggatagtttggtttgaatggaaagcatggccaagcaacaagctaacttttaccagatacttttttccta

SEQ ID NO: 545993 - DNA, 649 bp, Homo sapiens
ttctgatatttgtgagaatctctgaatcagttcttgttggagctggcagagccctttaggggttgtattagtttcctgtggttgccataataaattaccacaaactgggtggcttgaaataacagacatttattcactcacagttctggaggccagaagtctgaaatcaaggtgccagcagggccacacccatttcaaggctgtagggaagaatccttgcctgcttcttctaggtggtttctggagggtggctccaggtgccccggagcttatggctgcctcaccccagcctctgtctctgtcctcacctggccttctcccctgcgtgcctcgagcctctctccctttctcttgtaaggacacttgtcattgtcttataaggacacttctgtgggttgaggacctacatagatattccaggatgatctcatctagagatccttaacttagttacatctacaaagaccctttttccaaawaaggtcacattcacgggttccaggaggtaggtgtatcttggaggctggggaggggacatcattgaacctacccggggatcagccgttcaacaaccttattctgccgttgaggatgctgaggctcaggtggacaaaggctcttgcccaaagccagccagtcagtgacacag

SEQ ID NO: 545994 - DNA, 687 bp, Homo sapiens
ccactgctacttaactcacattatagttttttaaacccatagtatcataagaaaaatgaagaagagattcttttgtattttttcttccccaacataaaccataacaccaatgcaaaccactatcaaggagaggaaaggagagctgctggttaggacagcagctgtgttgaagctcagaaaagacatgggtyggcagatttgtgaggtgatgcctgcaacacaatgtgcctagatctagtctgattcctaaaattaaaaagaaaaaaaaaatctgtacttaatattttgccttttagagagtatttccttccccatcgcagaagatttttgcttgagatgttctaatatgtcttaatatgttgtcattggaggaaaaaaagctgttaatttatgaaataaagaaaatgttgccaagattgactcagaaatgagtatgtaaaacaccttatacctaagtactttattacagtttaaagaccattattttttccatttgcaatttaaactcaactaaaagtacataataagataagctgtcgtggtggatggcatgaatacaaaatttaaagcagcaggaataaagtgagaagagagcatgttaacagagtatagctggaagagtcagggaagataatacataggagtgcaaactagaacaacgtgtgaatgaatgtggaaggggaatcc

SEQ ID NO: 545995 - DNA, 923 bp, Homo sapiens
catatttccactgatgctatgctttctctggtcttagttttaagcttaaatgaatgtgtgtgctgtggtgtgtgtgtgtgtgtgtgtgtttcggtgtgtgtaagttttctttataaatggctggcattctagcaagatccttttccccaactttcaaaacgcatgaatagcagcacaacattttcatttttagaattaccaaagccttgccacccaaagctgtgcagaagattttagaaattcacaacaaaattttccaccatattactctcaacttctatagaaatgcaactcacaactcatattggtcagctattcccctataaagattcaacactaccagtggaagattataaaaatgcatacggcttttcaaataataagagaatagttccaattgcaaataaaaaccagtatacattttgaaaaatgaaggtcactaaatattcctaaaataatggaaacaggtgataattaacattctaacagtttagccacatgtmatgtcctctattttgtcaacagagtccagctgttttatctacttaagtctaaaagaaatttatcctcatcattaaaaacaggaacttatttataggtaactaaaattaacagaaatttaattttaaatattttaattttatttttaatattaaatttaatttaaatttaatttaatttaaaatttttaatttaaatatttaaatatttaattttaaatattcagtacttgtaccattattttcattttgaaaatgtatctatcttataatgatttggctttataacttataaagacatgtaacttactttatcctttaaaataatattttactaacaatattagcgtgtagctacatatcatatttaagaaacagcaatctactaagaaatgtgcccaggtcaaaaatagaataagccaa

SEQ ID NO: 545996 - DNA, 1056 bp, Homo sapiens
cttcttttactcctggagttggttgttctctcaaattcatttaggcaacaaatttgttgagcaactactatgtgccaggtactattctgggttcttggtccaaaagatcagtgaactgtgttgtttacccaycatgggagaacccagcttctactggatccatggttatgaatggacaagaaaggtagtgatgagttgcatattgatagtcaagaaaaatgctatgtgacatatgagcatggctctaaaactagcaccctatataactaactatgggatatctaaagaacaagaaacccaaaggctatgagggtggagcaagccttttttgtcttactgccaatgagaggagccacagatattaccactgctacagctcatcatccatccagagcctctgtctcctggcaccctgagttgtgtgaggttgggccctgatcccatctgctgatttgcttaaccatctcttccttctagcaccaccactttctagcttcaatactcctacaataaatatgttctgaaattcacctgggtattaaatcctgtcactgaaatagctaaatagtacaatcagtgaacaaaacggcaaagatctccgctcttgtgggacttacgttcaaatgggggaggtaggcaataaataacactaaacatgatgtaaaaagtaaacgatacagtatgctgaaaggtgattaagggctattgagaataaaggtagagcaggtaatggagattaagagtgctaaggtggagaaggggaagcgtgcaattataaatagagtgtcagggtagggctcactgaaagggtggtatttgagcaaaaacttgaaggaggcaaggaacttacatgtgaggtatctggagcagagcattctaggcaaagagaaaagctcagaggaaagcccaaaggtgagaacacacctgctgagtgaaggaaggaggccgaggccagtgggattgcaagaaggagagtggtgagacataaggggagagacataatgagatcatggtgggactcctcgatcttgtaaggactggctctggctctaaatg

SEQ ID NO: 545997 - DNA, 1056 bp, Homo sapiens
cttcttttactcctggagttggttgttctctcaaattcatttaggcaacaaatttgttgagcaactactatgtgccaggtactattctgggttcttggtccaaaagatcagtgaactgtgttgtttacccaccatgggagaacccagcttctrctggatccatggttatgaatggacaagaaaggtagtgatgagttgcatattgatagtcaagaaaaatgctatgtgacatatgagcatggctctaaaactagcaccctatataactaactatgggatatctaaagaacaagaaacccaaaggctatgagggtggagcaagccttttttgtcttactgccaatgagaggagccacagatattaccactgctacagctcatcatccatccagagcctctgtctcctggcaccctgagttgtgtgaggttgggccctgatcccatctgctgatttgcttaaccatctcttccttctagcaccaccactttctagcttcaatactcctacaataaatatgttctgaaattcacctgggtattaaatcctgtcactgaaatagctaaatagtacaatcagtgaacaaaacggcaaagatctccgctcttgtgggacttacgttcaaatgggggaggtaggcaataaataacactaaacatgatgtaaaaagtaaacgatacagtatgctgaaaggtgattaagggctattgagaataaaggtagagcaggtaatggagattaagagtgctaaggtggagaaggggaagcgtgcaattataaatagagtgtcagggtagggctcactgaaagggtggtatttgagcaaaaacttgaaggaggcaaggaacttacatgtgaggtatctggagcagagcattctaggcaaagagaaaagctcagaggaaagcccaaaggtgagaacacacctgctgagtgaaggaaggaggccgaggccagtgggattgcaagaaggagagtggtgagacataaggggagagacataatgagatcatggtgggactcctcgatcttgtaaggactggctctggctctaaatg

SEQ ID NO: 545998 - DNA, 2457 bp, Homo sapiens
tcccagctattggggagcctgaagcaggagaatctgttgaacctgggaggcggaggttgtggtgaggtgagatccgccactgcactccagactgattgatacagcaagacactgtctccaaacaaacaagcaaagaacaacaacaacaaaaaaatgtgcgtgacacatccccctctctctctttygcctgctctggccatgtaagacatgtctgctttctctttgccttccgctatgattgaaaatttcctgaggcctctccagccatgtttcctgtacagtctgtggaactgtgagccaattaaacatcttttctttataaattacccagtatcaggcatttctttatagcaatgagagaatggactaatataatgcttctcttaaaccttttgaagagcaaaggtcaatatttattcaatgaattaaggtttctttattaaacatatttaaacacatgccaccaaatgatatattttttaaaaattacaaggagcagcagcatcttctttgtgagagtctcatttgctttcttaggataaaaattcaaatgacattaaacatttcttttttttacccagaagtgctatatctatcacatagtttctttcctttcatttctgaagattttagtaatctagaactgcataggatgggacatttttctcagcacaccttccagattctatatttatattggtgaaaatgagttgttcctgccttctccaaccatggcagacatactcttactagctcatatgctcagtcttccagttgcttctccaatcctatacagagtgtcatcctttcctaaatattgcagggcatattatgtaagtctaagaatcaatcctggatattgttcctctcctgagacaccaatctggaacacaacatacagttcaccaaatgcactgatctcaggctccccttctggtccttccatcattactgccactgcaatgggactggaaatctgctgtacaggatgttagaatgtattttgagtagcccataagtaccttgtgaaagtgaaagaaaaacaattccattttgacatgatcggctaagggtctcacaggaaatttgagagtggtatgttaaagtggttgagaaacagccctctcatctcccttgacatacaaatcaatgtttcagtttctggtttcaaaaattctacctagtctcttttatcacagtcactttcattaagaggtaaagtgaacaactttaaatctctttttatttttatttttttttacagttggaattatttaaattgaaatttaaggtcatcctaaagcttatgtaaacttcctggtagttttgaatgtgaaaactgatttgaaacttcccttgattttctgtgtaatatctgggacattctttctgagttctagtgtgaactgctgaaagggaggcttctctaattatatcttgctgcctctttttcaatctcacctataccaaggagaataatatattattataaaacaaagttaaaatgcactaaaatgaaaaatatatactttaggagttctctaaaaccttaactctatttagaagtggagaaatgactactgacacagaataacatttttctcttttgtctgaaagtaagtggacaatgttatggttaatactattaaaactaagaaacaaaatttacattatttcccctctccctcgtgcaatccagggacgcctcttgtagcttctatttttttgtataaaatatagtctcaaaacccagtctctcctttccatctccactgataaaaaattagtccaattcttcagtaacctgcagagggattattgcaatttcttctaaaatttaaagaaatatattttaaagataacactaatttatacaaaaagttttagaaaacataacaaaacgaatagacacattgagcaaccacaacctatcaagtaatagaatattattagcttcttagaaggcccccaaaagtactttttccttgctactgctgacagccatttgggctgtctttagtttgggactatagcaaataatgctgctttaaacattctgtacaagtattttgtgcatatacatttatcttctgtgcatatatacccagaagcagatttgcagggtgaaaaggtaggatgggctgtgggtgggatgtgttaacttcagcagatatagccagttttccaaagtgactgcaccagtttacacttgtatcaccaatgtctgagaattccagttgctccactgccttgccaacactcaatgttgtagatgttttgaattttagtcattttgtatgtagcagcatttttttaatccaatcccatcatcaagaattgggtaaaaagtttattggccatttgtatatatcacatcatttttgaaatacctactcgtgttacttacctatttttgagagatgaaattgtctataattttgtaaatgtggcattctt

SEQ ID NO: 545999 - DNA, 2457 bp, Homo sapiens
tcccagctattggggagcctgaagcaggagaatctgttgaacctgggaggcggaggttgtggtgaggtgagatccgccactgcactccagactgattgatacagcaagacactgtctccaaacaaacaagcaaagaacaacaacaacaaaaaaatgtgcgtgacacatccccctctctctcttttgcctgctctggccatgtaagacatgtctgctttctctttgccttccgctatgattgaaaatttcctgaggcctctccagccatgtttcctgtacagyctgtggaactgtgagccaattaaacatcttttctttataaattacccagtatcaggcatttctttatagcaatgagagaatggactaatataatgcttctcttaaaccttttgaagagcaaaggtcaatatttattcaatgaattaaggtttctttattaaacatatttaaacacatgccaccaaatgatatattttttaaaaattacaaggagcagcagcatcttctttgtgagagtctcatttgctttcttaggataaaaattcaaatgacattaaacatttcttttttttacccagaagtgctatatctatcacatagtttctttcctttcatttctgaagattttagtaatctagaactgcataggatgggacatttttctcagcacaccttccagattctatatttatattggtgaaaatgagttgttcctgccttctccaaccatggcagacatactcttactagctcatatgctcagtcttccagttgcttctccaatcctatacagagtgtcatcctttcctaaatattgcagggcatattatgtaagtctaagaatcaatcctggatattgttcctctcctgagacaccaatctggaacacaacatacagttcaccaaatgcactgatctcaggctccccttctggtccttccatcattactgccactgcaatgggactggaaatctgctgtacaggatgttagaatgtattttgagtagcccataagtaccttgtgaaagtgaaagaaaaacaattccattttgacatgatcggctaagggtctcacaggaaatttgagagtggtatgttaaagtggttgagaaacagccctctcatctcccttgacatacaaatcaatgtttcagtttctggtttcaaaaattctacctagtctcttttatcacagtcactttcattaagaggtaaagtgaacaactttaaatctctttttatttttatttttttttacagttggaattatttaaattgaaatttaaggtcatcctaaagcttatgtaaacttcctggtagttttgaatgtgaaaactgatttgaaacttcccttgattttctgtgtaatatctgggacattctttctgagttctagtgtgaactgctgaaagggaggcttctctaattatatcttgctgcctctttttcaatctcacctataccaaggagaataatatattattataaaacaaagttaaaatgcactaaaatgaaaaatatatactttaggagttctctaaaaccttaactctatttagaagtggagaaatgactactgacacagaataacatttttctcttttgtctgaaagtaagtggacaatgttatggttaatactattaaaactaagaaacaaaatttacattatttcccctctccctcgtgcaatccagggacgcctcttgtagcttctatttttttgtataaaatatagtctcaaaacccagtctctcctttccatctccactgataaaaaattagtccaattcttcagtaacctgcagagggattattgcaatttcttctaaaatttaaagaaatatattttaaagataacactaatttatacaaaaagttttagaaaacataacaaaacgaatagacacattgagcaaccacaacctatcaagtaatagaatattattagcttcttagaaggcccccaaaagtactttttccttgctactgctgacagccatttgggctgtctttagtttgggactatagcaaataatgctgctttaaacattctgtacaagtattttgtgcatatacatttatcttctgtgcatatatacccagaagcagatttgcagggtgaaaaggtaggatgggctgtgggtgggatgtgttaacttcagcagatatagccagttttccaaagtgactgcaccagtttacacttgtatcaccaatgtctgagaattccagttgctccactgccttgccaacactcaatgttgtagatgttttgaattttagtcattttgtatgtagcagcatttttttaatccaatcccatcatcaagaattgggtaaaaagtttattggccatttgtatatatcacatcatttttgaaatacctactcgtgttacttacctatttttgagagatgaaattgtctataattttgtaaatgtggcattctt

SEQ ID NO: 546000 - DNA, 1505 bp, Homo sapiens
gttctgattcatggttcagaaccaactgactaggccacaatttctagtcgaatatatcataggacccttagctgaacaacaggaccaatgatcccaagttcatgaaagctgtcaaattccattataactacgtggaccagtaggatgctatttaaaagatggtatgactaactggctacaagaatctttccaattgcaatttttacaccgttagacctccttcaagtagatatgccacagaatacttcaggagctttattctattgtgtacatatttgctgtcatcatcttgttcccaaagaggaaccccgtcccagcattcagacaccatgtgaaaggctgaaagcaaaaatctctcagaagtctttctctgtacaataacatgatcaaccttccagctgaaacaggtatttgatctaaaccatatcccatgaaactgaaagcccaaatctaacctgaacttggctaccctcttggtttcaattcctatcactgagacaatttctctttgattttacatgccgaagagcctattaagaaagtgtttaagtttcaaagactgacaggaaatgctcatgtttgcacatctttatttgaatacgttctctgcaggttgaaacttgaggccccaaggtttaggctttgatttttttttttaagttacttattttcacaaatgctcatgtagcatgaggccccagagtacattaacatgtgcaaagataagcaggtaattaaaaatggagctctatacctgttggaaggcactgtggtactgcaagctttgcaaagtaagacatctgatgattcgttcctgcccacttcccacccacatgacctgccaaaattgctgccacctaatggccaccacaatgctgtctattaaaaccctgccctagcagctatgccctattttaagaaacaacataaaaaatttataaaataaagcagcagcaccataagttctttcagtcatcaataagtctgaagactcaaagacaactatggccccagaataaactgcgtgcgctcatgcacacacacacacacacacacacacacacacacacacacacacacaaatgttgcatccaacaatagggggtccatgaaattacatgcaacttttctgaattgcgttcagtgtcttgactgttctgcaaccaacattcaattctctcactcaaaaaccagttgcacagatattgcagctccttcagctgctccagtatagtcatgtgccttccaggagggaaagtacatgcattggatrcaaaatgactaggtttgtacagcccagctctaccaactctctagctcacacttaaccatattccatctcagtcttctcagttgaaaacgggaactaaaacaaatcactgtgaactaaatgactatatgcagaagaataaaactagatcccctctctcacactatatacaaaaatcaaatcaaagtggattgaagatttaaatataagacatgaaactatgaaactactagaa

SEQ ID NO: 546001 - DNA, 1505 bp, Homo sapiens
gttctgattcatggttcagaaccaactgactaggccacaatttctagtcgaatatatcataggacccttagctgaacaacaggaccaatgatcccaagttcatgaaagctgtcaaattccattataactacgtggaccagtaggatgctatttaaaagatggtatgactaactggctacaagaatctttccaattgcaatttttacaccgttagacctccttcaagtagatatgccacagaatacttcaggagctttattctattgtgtacatatttgctgtcatcatcttgttcccaaagaggaaccccgtcccagcattcagacaccatgtgaaaggctgaaagcaaaaatctctcagaagtctttctctgtacaataacatgatcaaccttccagctgaaacaggtatttgatctaaaccatatcccatgaaactgaaagcccaaatctaacctgaacttggctaccctcttggtttcaattcctatcactgagacaatttctctttgattttacatgccgaagagcctattaagaaagtgtttaagtttcaaagactgacaggaaatgctcatgtttgcacatctttatttgaatacgttctctgcaggttgaaacttgaggccccaaggtttaggctttgatttttttttttaagttacttattttcacaaatgctcatgtagcatgaggccccagagtacattaacatgtgcaaagataagcaggtaattaaaaatggagctctatacctgttggaaggcactgtggtactgcaagctttgcaaagtaagacatctgatgattcgttcctgcccacttcccacccacatgacctgccaaaattgctgccacctaatggccaccacaatgctgtctattaaaaccctgccctagcagctatgccctattttaagaaacaacataaaaaatttataaaataaagcagcagcaccataagttctttcagtcatcaataagtctgaagactcaaagacaactatggccccagaataaactgcgtgcgctcatgcacacacacacacacacacacacacacacacacacacacacacacaaatgttgcatccaacaatagggggtccatgaaattacatgcaacttttctgaattgcgttcagtgtcttgactgttctgcaaccaacattcaattctctcactcaaaaaccagttgcacagatattgcagctccttcagctgctccagtatagtcatgtgccttccaggagggaaagtacatgcattggatgcaaaatgactaggtttgtacagcccagctctaccaactctctagctcacacttaaccatattccatctcagtcttctcagttgaaaacgggaactaaaacaaatcactgtgaactaaatgactatatgcagaagaataaaactagatcccctctctcacactatmtacaaaaatcaaatcaaagtggattgaagatttaaatataagacatgaaactatgaaactactagaa

SEQ ID NO: 546002 - DNA, 873 bp, Homo sapiens
gtgtatattaacagaattgaaaaattgaagaaaaaggaaagaataatcagtgtcaaaggcagagcctgaacaaatataaaaaggggagaggatgaggagcctgcaaaggggcatgaacagagacaagcagaaaagtagtaggaaagtctgtgtcctgtgggaatcagggaggagaacgttcaacctatcgagtggtgccaaaagggtaacagataaggatggatcacacagaggaacgtctgttaggaaccttgaccagagccaaggctatggagcactggagtaggtgaagtatgtctaagcagaagcactcgttttcatctctgtttaatagataatagcaatttttctcaagtytattatgagctagatactgtattaagtatttgacctagtttatctcatttaatcctcaaaataacatcatctctacgaagtagatattattaacatcccaatttttcagatgaagaacctgaggttgcaagaggttaagcagttactcaaaggaacagagctagtcagcagacaggctacagtacaaactcaaggagtctcacttcagagtgcaagctcctaaatgttgcactgtaccctccaaatgacctgcccaaaatgactcatccattcaacaagcctactgtgtgccaggtgctgtaatctaacagtatacaaaccaaaccaaagcccctgacctcataaaacttactttccagtggaggagatgatagtaaacaacaacaacaacaaaattcaggctgggtgccatggcttatgcctgtaatcacagcactttgggcggccaaggcaggaagatgactggagcccaagagttcaagacccacctgggcaatatagcaagactttgtctct

SEQ ID NO: 546003 - DNA, 873 bp, Homo sapiens
gtgtatattaacagaattgaaaaattgaagaaaaaggaaagaataatcagtgtcaaaggcagagcctgaacaaatataaaaaggggagaggatgaggagcctgcaaaggggcatgaacagagacaagcagaaaagtagtaggaaagtctgtgtcctgtgggaatcagggaggagaacgttcaacctatcgagtggtgccaaaagggtaacagataaggatggatcacacagaggaacgtctgttaggaaccttgaccagagccaaggctatggagcactggagtaggtgaagtatgtctaagcagaagcactcgttttcatctctgtttaatagataatagcaatttttctcaagtctattatgagctagatactgtattaagtatttgacctagtttatctcatttaatcctcaaaataacatcatctctacgaagtagatattattaacatcccaatttttcagatgaagaamctgaggttgcaagaggttaagcagttactcaaaggaacagagctagtcagcagacaggctacagtacaaactcaaggagtctcacttcagagtgcaagctcctaaatgttgcactgtaccctccaaatgacctgcccaaaatgactcatccattcaacaagcctactgtgtgccaggtgctgtaatctaacagtatacaaaccaaaccaaagcccctgacctcataaaacttactttccagtggaggagatgatagtaaacaacaacaacaacaaaattcaggctgggtgccatggcttatgcctgtaatcacagcactttgggcggccaaggcaggaagatgactggagcccaagagttcaagacccacctgggcaatatagcaagactttgtctct

SEQ ID NO: 546004 - DNA, 1186 bp, Homo sapiens
ttttttaaatttattattttaaagacagggtcttactctgtggcccaagatggagtacagtgggtaatcatggcttacctcggccttgaactcctgggctcaagggatactcaaagggcttagcctcctaagtagctgggactacaggcatgcaccaccacagctgcctagtgttttttatttttaaaaatgttttactgagacaaggtctcactatgttgcccagattgctcatgaactcccggtctcatgcgatcctcccttcttggcccctcaagtgtggggattacaggcatgcaccaccatgactggcccataatttattgttttttctaacatgtttcactgcctttttgagaaagtaactccagataaggcttaaacacaaaactcccatactgtacacatagttcttaagaatcaagaaggattttacacactgaccaactgtatcactcatgcaatatagtctctagataattctggagctcaggctttcattttttattcagaaagtgtattctgaatcaaaagatatgcataattttaaccacaaattaaattttttcctagagatgttttaccaatttacatcctactaacagtacataagttttcttgcactcttgctcactctagggactattgttctttttatttttctgcataacaagcaaagagcaatatctttttgatattttaacttgtttttcattagtaatgaaaatgcacatttatyttgtgcacttattgttcatttatgttttgcccgttcatgccctttacccatattttccaaaaaatattagtcttcattatagtggctcatgatcatatttgtttattgtatgtatggcaaatacttttcccagttcgttgtttgccttacctatggtgtgagttatttataaagagatgtttaaaaaattttatataaatgaaattcatcaatattttcctttattggtttttcctttgatcattttagaatagcctttgccacctccaagattatatactttatggttacttttttatatcaaaaatagttaacctatttgcactatgtgaaggtatgaaattagaatataacttcattgttccaatgattaaccactgtcccaattctatttattaaatgatccatctttgccttactgccaatattaaatttatcatgaaataa

SEQ ID NO: 546005 - DNA, 1534 bp, Homo sapiens
gataataaatatttttgctttgtaaagcataatctctttgtcgcaactattcaagtttgacctgtggcctatgcaaaagcagccatagataatagataaacagatgactatagctgtgttttgatgaaactttatatatggatactgaaatctgaattttatatacttttcatgtgaagaagaaatattcttcttttaatagttttcaacaagttaaaaatgtaacagccattcttaactcatgggctgtctaaaaccaggtggtgggcctgatttggcattttgttctcaataggtgacctccgatttagataatccatcttacttgcttgtgtgttttatgaaataagctcttattttaaaaaaatatactttctattctgggaattctgtatatgattttgtttaaaatgaggatttccttctttaaaaaaaagtttgagaactcttgatcatgattttagaccatcatcaagtggttatttttctcttgagttactattagagctttgaactgtataccagagctgtcaatcataaatgtcttgaatacatgggttgagaggatacatatgtagaacatcattattcaagcacttccatattagatggctatatctcaaagactgggtctttttccaatcactagaacagctagagattctgtttcaattaacgtctccttttttttttttgacacagagtcttgcactgttgcccaggctggagtgtagtggcgcgatctgggctcactgcaacctctgcctcctgagttcagcaattctcctgcctcagcctcccaagtagctgggattcaggcacccaccaccatgcccagctaatttttggtatttttagtagagatggggtttcactttgttggccaggctggtctcaatctcctgacctcatgatctacccaccttggtctcccaaagtgctggggttacagatgtgagccactgtgcccagccttcaattaacttcttaaatgtatgtctatttgtttgcctttgctttgtcgatgttaaaaaaaaaagaaaaggaaaaacggatataaagaaatgyatgtgcatctgcatctttgccagtgttggaggacttaaaatatatctacattaaatgtgtgcaacatccctgagcttggtatctgatgactttatgaatattatataagcttgaaagccaatattcagaagaatatcttggcttcagactgaaaataatgcaaagctgcaattttcttgcagaaattcctaaagttagagctttatttgcctagggaagaaattcataattcagtattccctgttagcttttctgaatcccaaagatgctggagtctaattcatatgctacccctcaaactttcattttgcatttactcccactaagggtcatttagctttaaaattttatcaaccattttcataaagatatcacaatataatgaagggataatcaaaaatattttttaaaaattatcctgataactcattttatgttgattatatgcctgactcaccatggttac

SEQ ID NO: 546006 - DNA, 871 bp, Homo sapiens
acatttaggttgattccatgtctttgctattgtgaatagtgctgcaaagaacacacgcatccatgtgtctttatggtagaatgatttatattcctctgggcatatacccaataaaggkattgctgggtcaaatggtagttctgtttttagttctttgaggaatcaccacactgctttccacaatggttgaacaaatgcagattttaatgtggggatcacagaagcaaatttgaagttttttaatactgtttcactgactgagaagggcaagaatgaggaaccaagatggtgtgacttttagacaatgcagcaatatgtaaaaatttcttaattgactgtgatacttcatagcctaatttctttttttttttttttttttgacagagtctcgctctgtcgcccaggctggagtgtactggcacgatctcggctcactgcaagctccgcctcctgaggtcatgccattctcctgcctcagcctcctgagtagctgggactacaggcgcccatcaccatgcccggctaattttttgtatttttagtagagatagagtttcactgtgttagccaggatggtctcgatctcctgacttcgtgatccgcctgcctcggcctcccaaagtgctgggattacaggcatgagccaccgtgctcggctcatagcctaatttcttggactaggggcaggaaacatctgagaaaacaaatttcttttgtggcagtctccagaaacatgcttgtcagcatgcctggaaacctgagtgtgaaaaggagtcctgccatagcctgttggctttcttgtggggcactagagcattgattgcagaagcactcacttttttttttggttcaggtaatttttatgtattca

SEQ ID NO: 546007 - DNA, 871 bp, Homo sapiens
acatttaggttgattccatgtctttgctattgtgaatagtgctgcaaagaacacacgcatccatgtgtctttatggtagaatgatttatattcctctgggcatatacccaataaaggtattgctgggtcaaatggtagttctgtttttagttctttgaggaatcaccacactgctttccacaatggttgaacaaatgcagattttaatgtggggatcacagaagcaaatttgaagttttttaatactgtttcactgactgagaagggcaagaatgaggaaccaagatggtgtgacttttagacaatgcagcaatatgtaaaaatttcttaattgactgtgatacttcatagcctaatttctttttttttttttttttttgacagagtctcgctctgtcgcccaggctggagtgtactggcacgatctcggctcactgcaagctccgcctcctgaggtcatgccattctcctgcctcagcctcctgagtagctgggactacaggcgcccatcaccatgcccggctaattttttgtatttttagtagagatagagtttcactgtgttagccaggatggtctcgatctcctgacttcgtgatccgcctgcctcggcctcccaaagtgctgggattacaggcatgagccaccgtgctcggctcatagcctaatttcttggactaggggcaggaaacatctgagaaaacaaatttcttttgtggcagtctccagaaacatgcttgtcagcatgcctggaaacctgagtgtgaaaaggagtcctgccatarcctgttggctttcttgtggggcactagagcattgattgcagaagcactcacttttttttttggttcaggtaatttttatgtattca

SEQ ID NO: 546008 - DNA, 1051 bp, Homo sapiens
ccacccacccactttctagtattttttttaggtggtctttccctagctcaccttgctccagccatgcaggacactgggcagttcctctaacatctcaagcacgtgtctgcgtcagggactttgctcttgcttttcccactgccagggacattcttctcccagataatggaggcctctgtacaaatttcaccttattggagagctctccttcatctattctatataatataataaccacctttgtcattccttattccatttactctgctttatttttctcaatctgatataacatcaccagctaacatatattgtttattgtctcttcttcctgaagtgcaatcttttgaaggcagggmgtttacttcaacatgatgtcttattccaacattatatctctgactaattttatgtgtgtttaaaaagtattttgatgatatgaactaaaattagcagtttttttaaaacattgtattttcgtagcaaaacaaaataattgaaaatcctgtttattcttaaaactgtttctggaattgttactggtctaagacatctgaaagtttgattttaaatttctgcatactataaggctctagggagattcagggggaaatatagactgaatatccgaatgaggcaacattttaatggccaccattattaatttaaatattactagtacaaaatagcaacataaatattatatcttctaaaatcttataaatctggtaacttctctaaaaaatttcaggtagaaaaacctctaataaatcttatcttctgaagggtattatttttcactctgtgtgtaacacaaaaatgaactgggaaatgatttaggtcttttttctaagataaagatttagttgaaggatgtgtttttgatatttacctaatttttccccactgaatatgtaggtatgctgttatatatatatatatacacacacaccttattttaattcatattactagataagtgacaatctaagtaaaaagtacacaatattagaaaagaaagtccttcaaggtctgattgcattgtccttcg

SEQ ID NO: 546009 - DNA, 1089 bp, Homo sapiens
ttctttctctcttaaggtatccaagcccaccaatgggatctgtctcagcacccaacctgcctacagcagaagataacctggaatatgtacggactctgtatgattttcctgggaatgatgccgaagacctgccctttaaaaagggtgagatcctagtgataatagagaagcctgaagaacagtggtggagtgcccggaacaaggatggccgggttgggatgattcctgtcccttatgtcgaaaagcttgtgagatcctcaccacacggaaagcatggaaataggaattccaacagttatgggatcccagaacctgctcatgcatacgctcaacctcagaccacaactcctctacctgcagtttccggttctcctggggcagcaatcacccctttgccatccacacagaatggacctgtctttgcgaaagcaatccagaaaagagtaccctgtgcttatgacaagactgccttggcattagaggtaaaatctgttcagattagctttttgggtcctttgacatttggttttaatttttagttttagtttagtttctgctcatttaagcttatattcatggaattagagcactggatgattttggaagatacgcactgttagcgtttcattttaaaatttttttatagagacgaggtctctaattttaaaagagttgtttgcccaggctgatttcgaggtcctggcctcaagcaatcctcctacctcgacctcccaaagtactgggattacagatgtgagccaccatgcctggcccattattagtgtttcacagcttgttttgttctgtcctattccttgttygccccaaattctcagccttcttgctctttcttgttcccaaagcctaacagatttagttttgcagttgttggtttttcttccagtaaggaaagataatgattaaggaagacccatgacctagaggcaaaatcaacatatatggttctgtatttctaacattggaatcagttgagaaatatgaaaatgtcttagaatttctcttgagcttggtagaggaatgaattttttttttttttttttttttttttgagatggagtctcactctgt

SEQ ID NO: 546010 - DNA, 1089 bp, Homo sapiens
ttctttctctcttaaggtatccaagcccaccaatgggatctgtctcagcacccaacctgcctacagcagaagataacctggaatatgtacggactctgtatgattttcctgggaatgatgccgaagacctgccctttaaaaagggtgagatcctagtgataatagagaagcctgaagaacagtggtggagtgcccggaacaaggatggccgggttgggatgattcctgtcccttatgtcgaaaagcttgtgagatcctcaccacacggaaagcatggaaataggaattccaacagttatgggatcccagaacctgctcatgcatacgctcaacctcagaccacaactcctctacctgcagtttccggttctcctggggcagcaatcacccctttgccatccacacagaatggacctgtctttgcgaaagcaatccagaaaagagtaccctgtgcttatgacaagactgccttggcattagaggtaaaatctgttcagattagctttttgggtcctttgacatttggttttaatttttagttttagtttagtttctgctcatttaagcttatattcatggaattagagcactggatgattttggaagatacgcactgttagcgtttcattttaaaatttttttatagagacgaggtctctaattttaaaagagttgtttgcccaggctgatttcgaggtcctggcctcaagcaatcctcctacctcgacctcccaaagtactgggattacagatgtgagccaccatgcctggcccattattagtgtttcacagcttgttttgttctgtcctattccttgtttgccccaaattctcagccttcttgctctttyttgttcccaaagcctaacagatttagttttgcagttgttggtttttcttccagtaaggaaagataatgattaaggaagacccatgacctagaggcaaaatcaacatatatggttctgtatttctaacattggaatcagttgagaaatatgaaaatgtcttagaatttctcttgagcttggtagaggaatgaattttttttttttttttttttttttttgagatggagtctcactctgt

SEQ ID NO: 546011 - DNA, 1630 bp, Homo sapiens
tgcatatttttccacaattttaaaaacaaaacacaactagccttttttggaaaaccacactcacactgtcttcttgggaaagaaattcaaaccatactccaaatcgaagctctcatgtgggttaaaaccacttttgttcctgtaagttgtttatttttatactattgtataaataactagtagaattctcttttataaatttaggtcactgttacttagcaggacattccaaggttttaaagaatatactaaaaggtcttctaagacataataaaatatttttccatgatatggataagcatcttggtgatttttgtaaattaaaattattcctaagcctttccttcctcccaaaataaggaaaatgcctatagaagatactgattttcctaagtgctatcaaataagtgatctcaatgtattatttaccaagaataaaaataggtaagctattatgcccttatggaaaaaaataaactaattattgcagcattttctcttcttacccaccatttactcttcttacccaccatttacttcatcatttattttttattgtaaatttctccacaaatacttaaatgattagcttgttaataaagttaagtaaagctgggagtggtggctcacactgtaatcccagctacttgggaggctacagtgggagaatcacgtgagaccaggagctcaataccagctgggcaacatagcaagaccttgtctgtaaataaaataataaaatgattttttaaaagttcaatgaagagaaaaggtattaaatgatgataaataattttatgttatctctaattcttaaccttcatgttaacttatttagaagtgacaatgaagagattccaggccataaaaagaaaacattttaccattattatgttattatttcacgttcctaattaggtagtacacgtgggttcattttagcagagtttacattttgaaagtgtttcttttctaaagggtcttaacccaagcattcatgcattcacatgagtagatttctgcaagctggaaagaagggtcaacgagcaggtgagtcacccattaaaagtgacttctaagttcctgatattttgctatttgtcatcccccttgacaaaaaagaaagcattctcggaccagtgacgtggtctgacagtaaccccacattgttgagccctggaacccatgtcgacccagaagaacattaagccaattggctttcaacatcacagtcaggtagttaagaaacaaaaggcctatgtttcccgttcaactaccatggtgaccttattataaaagatgaccagctaaaatttgatagcctaaaagaaatgacactgaagagtagtgagaagttctcagactgtattcttggagtactagggtactagggtctccaaggagcctctcaaggactgagagaggtggggaagtgaggtggacaagcaggtagggccgtacccccaactcccctgccaattcaagcaatgcagtgatccatttatctggatgagatagagatggaaagatagatagatagatagatagatagatagatagatagakagagatacatacatacatacatacatacatacatacatacatacagatatagatatacaagctt

SEQ ID NO: 546012 - DNA, 1630 bp, Homo sapiens
tgcatatttttccacaattttaaaaacaaaacacaactagccttttttggaaaaccacactcacactgtcttcttgggaaagaaattcaaaccatactccaaatcgaagctctcatgtgggttaaaaccacttttgttcctgtaagttgtttatttttatactattgtataaataactagtagaattctcttttataaatttaggtcactgttacttagcaggacattccaaggttttaaagaatatactaaaaggtcttctaagacataataaaatatttttccatgatatggataagcatcttggtgatttttgtaaattaaaattattcctaagcctttccttcctcccaaaataaggaaaatgcctatagaagatactgattttcctaagtgctatcaaataagtgatctcaatgtattatttaccaagaataaaaataggtaagctattatgcccttatggaaaaaaataaactaattattgcagcattttctcttcttacccaccatttactcttcttacccaccatttacttcatcatttattttttattgtaaatttctccacaaatacttaaatgattagcttgttaataaagttaagtaaagctgggagtggtggctcacactgtaatcccagctacttgggaggctacagtgggagaatcacgtgagaccaggagctcaataccagctgggcaacatagcaagaccttgtctgtaaataaaataataaaatgattttttaaaagttcaatgaagagaaaaggtattaaatgatgataaataattttatgttatctctaattcttaaccttcatgttaacttatttagaagtgacaatgaagagattccaggccataaaaagaaaacattttaccattattatgttattatttcacgttcctaattaggtagtacacgtgggttcattttagcagagtttacattttgaaagtgtttcttttctaaagggtcttaacccaagcattcatgcattcacatgagtagatttctgcaagctggaaagaagggtcaacgagcaggtgagtcacccattaaaagtgacttctaagttcctgatattttgctatttgtcatcccccttgacaaaaaagaaagcattctcggaccagtgacgtggtctgacagtaaccccacattgttgagccctggaacccatgtcgacccagaagaacattaagccaattggctttcaacatcacagtcaggtagttaagaaacaaaaggcctatgtttcccgttcaactaccatggtgaccttattataaaagatgaccagctaaaatttgatagcctaaaagaaatgacactgaagagtagtgagaagttctcagactgtattcttggagtactagggtactagggtctccaaggagcctctcaaggactgagagaggtggggaagtgaggtggacaagcaggtagggccgtacccccaactcccctgccaattcaagcaatgcagtgatccatttatctggatgagatagagatggaaagatagatagatagatagatagatagatagatagatagatakagatacatacatacatacatacatacatacatacatacatacagatatagatatacaagctt

SEQ ID NO: 546013 - DNA, 1630 bp, Homo sapiens
tgcatatttttccacaattttaaaaacaaaacacaactagccttttttggaaaaccacactcacactgtcttcttgggaaagaaattcaaaccatactccaaatcgaagctctcatgtgggttaaaaccacttttgttcctgtaagttgtttatttttatactattgtataaataactagtagaattctcttttataaatttaggtcactgttacttagcaggacattccaaggttttaaagaatatactaaaaggtcttctaagacataataaaatatttttccatgatatggataagcatcttggtgatttttgtaaattaaaattattcctaagcctttccttcctcccaaaataaggaaaatgcctatagaagatactgattttcctaagtgctatcaaataagtgatctcaatgtattatttaccaagaataaaaataggtaagctattatgcccttatggaaaaaaataaactaattattgcagcattttctcttcttacccaccatttactcttcttacccaccatttacttcatcatttattttttattgtaaatttctccacaaatacttaaatgattagcttgttaataaagttaagtaaagctgggagtggtggctcacactgtaatcccagctacttgggaggctacagtgggagaatcacgtgagaccaggagctcaataccagctgggcaacatagcaagaccttgtctgtaaataaaataataaaatgattttttaaaagttcaatgaagagaaaaggtattaaatgatgataaataattttatgttatctctaattcttaaccttcatgttaacttatttagaagtgacaatgaagagattccaggccataaaaagaaaacattttaccattattatgttattatttcacgttcctaattaggtagtacacgtgggttcattttagcagagtttacattttgaaagtgtttcttttctaaagggtcttaacccaagcattcatgcattcacatgagtagatttctgcaagctggaaagaagggtcaacgagcaggtgagtcacccattaaaagtgacttctaagttcctgatattttgctatttgtcatcccccttgacaaaaaagaaagcattctcggaccagtgacgtggtctgacagtaaccccacattgttgagccctggaacccatgtcgacccagaagaacattaagccaattggctttcaacatcacagtcaggtagttaagaaacaaaaggcctatgtttcccgttcaactaccatggtgaccttattataaaagatgaccagctaaaatttgatagcctaaaagaaatgacactgaagagtagtgagaagttctcagactgtattcttggagtactagggtactagggtctccaaggagcctctcaaggactgagagaggtggggaagtgaggtggacaagcaggtagggccgtacccccaactcccctgccaattcaagcaatgcagtgatccatttatctggatgagatagagatggaaagatagatagatagatagatagatagatagatagatagatagasatacatacatacatacatacatacatacatacatacatacagatatagatatacaagctt

SEQ ID NO: 546014 - DNA, 521 bp, Homo sapiens
catatacagaatgtaattgttgagatgatatacagagaaaattgccttcagaaagtctgtacacacacatctgagcttgctgaactctaacatatacactagagctcattattttatgaaacaatacataatagatattattaatgattcaaaataatatttaacttgaagaataagattgccacatacattgtaccataaagaaaagaaaatatatgcaaaaagccaccacctctcctaaagcattagagtatttgtgagcttttctcaactctgccatatatagggagtataaattctggttgaattcattacttggcaaagtgattgtttgctcaaggcagcactagagtcaaaagtttccctcagtttcacatctaaaagcatcacccagaagtaacaactccaaaagctgccttctctgcaccaggcttttcatttgtgcytcacaataaccatggtaggtgctattatccttgttttacagatggagaaatggacagaagaagtgatttcttgca

SEQ ID NO: 546015 - DNA, 652 bp, Homo sapiens
attctaagaaaataaaaacaatttcctttattggaaataacaatgacatgtaattagtttttatcaacgcaccacaaaatcctccttcacttttggaaatacgttaaccatgtgctggtttatcttgtctattatgcagtttgaaaaaatgtgacagatcctactgcaaaaaatgaagtcaataaacatgactttcaaggatgagtattataatatttccttaataaacgtgggaattcgcatgagtgataattttagagtgaatgtttccrtgtcagaggagctctggcacaattggcctgggccagatatatttttctaaataggagtggaaatggttgcagcaccctgtcacatacacctgaagagtttaatccaccttacattaactacagtttggagttaatggtgtgataatgattgatattcactggaaattttgttctgcaatctgtgtcctaattcattctgcctatgtccactataatccattagcgagcaggcagtttttgagacataatagcattctcacctacatttaggcaccacaggagaccagatatttaaaaatgtattcactatcctcatagagctctgatcctattgtgcaaaaaatacctgaagtaggaaacatttagggatcacaatagta

SEQ ID NO: 546016 - DNA, 667 bp, Homo sapiens
tcctggtaattctttcttactggtttttgttttgttttgtttgtttttgagatggagtcttgctctgttgcccaggctggagtgcagtggcacgatctyagccactgcaagctccgcctcccgggttcatgccattctcctgcctcagcctcccaagtagctgggattacaggcgcctgccaccacgtctgcctaattttttgtatttttagtagagatggggtttcaccgtgttggccaggatagtctcgatctcctgaccttgtgatctgcccgcctcggcctcccaaagtgctgggattacaggcgtgaaccacagcgcccagctcttactgtacttttttaaagtatcagtctacaaatgaccgaaactaaaaaaaattaaaactggtccttcctcacaaatagtttgagaagcacagctctaaagtatttaatttatgttgtatagatttctggtaatgaaccacagagaaagcaagaaaaacatttggagaaatgcatcttaacttgtccctgaaactttttcaaagagcttaagatttcttaaaagtcttagatggacttctgaaagaagctgaaagacttcaattgattcctgagctctctatagagtgctagagaagtacaaggcatctcttgcagacttgacagcaatccgtgtcct

SEQ ID NO: 546017 - DNA, 1130 bp, Homo sapiens
tgagctgcaaaagggctttcccaaaacagattcagctgctcttagtccatcacctgccttcccttatacaacaaaaggtaagcattcattaggggaattgatcaattatttttttggaacagttgtcagcattactcagcatttctctttccttccttcatactttcttaactaacctcaggccaagtgagggaatttagatcttgatatgtgagggatttggaaaacaaagaggccagctcttgcctgcaaaatttaaagacaggagattggctggaaatagtcttgatggctgaacacggagaaaaagtggagccagtgtggaccctacagagggtagcgaggcataaattacctagaaaggatcccaacatgtggcttacctgcgagggctaacagacaacagcactaagaggctatagaaagattacccaagaagcagaggttcaggtggatggcattcatagccagctagttggggcactgcccaagacagtgaataatatagcagattgttttcactggcttttttgaagaacctacaaaatatcttcagtaggaagacagcatttaggtatctgtctggctccagattacaactgtgttgattgataaataacttttccaccctggtttctcttatctacccaacatcaccaagacggggtcaagaaataacatcttgagtaagggaagatgaaagaataaagtgggaaaataatgaagtatctactttccttactgtaattttccaagtcccacatcaggggtccaggggagaagcttaaaagaggatgagacaataaaagattttgtggtttkgttttgttttgtttcttaattttgactaggcttttgtacatcagctctactggtaatcagctctactgattaatttatcagaagtttttgtcggggggcaaggatggaaaattcaacacagaatttaacaggctgttgcagaagaaaaatacaatcatttcacaatttcatccactaaattcagcttattcaatcaacaaatacacacgttttcaagttgcatcctaaaacagttttaccaatttataacatcatcatcagtgaaggataatcaggccgatgatactcttgctagctttaaacattct

SEQ ID NO: 546018 - DNA, 1130 bp, Homo sapiens
tgagctgcaaaagggctttcccaaaacagattcagctgctcttagtccatcacctgccttcccttatacaacaaaaggtaagcattcattaggggaattgatcaattatttttttggaacagttgtcagcattactcagcatttctctttccttccttcatactttcttaactaacctcaggccaagtgagggaatttagatcttgatatgtgagggatttggaaaacaaagaggccagctcttgcctgcaaaatttaaagacaggagattggctggaaatagtcttgatggctgaacacggagaaaaagtggagccagtgtggaccctacagagggtagcgaggcataaattacctagaaaggatcccaacatgtggcttacctgcgagggctaacagacaacagcactaagaggctatagaaagattacccaagaagcagaggttcaggtggatggcattcatagccagctagttggggcactgcccaagacagtgaataatatagcagattgttttcactggcttttttgaagaacctacaaaatatcttcagtaggaagacagcatttaggtatctgtctggctccagattacaactgtgttgattgataaataacttttccaccctggtttctcttatctacccaacatcaccaagacggggtcaagaaataacatcttgagtaagggaagatgaaagaataaagtgggaaaataatgaagtatctactttccttactgtaattttccaagtcccacatcaggggtccaggggagaagcttaaaagaggatgagacaataaaagattttgtggtttggttttgttttgtttcttaattttgactaggcttttgtayatcagctctactggtaatcagctctactgattaatttatcagaagtttttgtcggggggcaaggatggaaaattcaacacagaatttaacaggctgttgcagaagaaaaatacaatcatttcacaatttcatccactaaattcagcttattcaatcaacaaatacacacgttttcaagttgcatcctaaaacagttttaccaatttataacatcatcatcagtgaaggataatcaggccgatgatactcttgctagctttaaacattct

SEQ ID NO: 546019 - DNA, 964 bp, Homo sapiens
gcacggtggctcatgcctgtaatcccagcactttgggaggctgaggcaggtggatcacctgaggtcaggaatttgagaccagcctgaccagcgtggtgaaacctcatctctactaaaaaaatacaaaattagccaggcgtggtggtgcacacctgtaatcccagctacttgggaggctgaaacaattgcttgagcctgggaggcagaggttgcagtgagccaagatcacgccattgcactccaaagagtgaaactccatctctgaatgaatgaatgaatgaatgaatgaacgaatgaatgaatgaatagtatagatttgggggcttgaaactgaggacttcttaaaggcagatgctgtgtagacatatccaaatttgacattctgagtattatgcaaaagctttattgtaagtttgaccagtagtgctagctattgcagaataygcaaaatattcacaggttaagattaaaatagccgattaaatttttaaggtctagttagcattagaaattaatgtcaggtcattcacatttaagcagatgtattgagagagctgttctaggcgttgtggagtttggaaaatagaaaaccgtttcttaaagcaatctacaaactactcatggaacaacagtgttttcctacccttgtcacatcacaacatatgtagaaaatgatatttgtggctgggcacagtagctcacacttctaatcccagcacttcgggaggctgaggcaggtggatcctttcagtctaggagttcaagaccagcctaggcaacatggcaaaactctgtctctactaaaaatacaaaaattagccaggtgtggcgtacgcctgtagtcccagctactcaggagctgagctgggaggatcacctgagcctggacaggttgaggctgcagtcagctgtgatcgtgccactgcactctaacctgggtgatagagtgagaacctgtctgaaa

SEQ ID NO: 546020 - DNA, 2359 bp, Homo sapiens
tttggacaggttttgagcttagatgcatattgaatgtgtgtgtctccatttttctttctaggtctgatgtggctgtgtttcagcctgtgcttatacagtattcaattcactgaaaaataatgtggttgtgtaaacactcagaaggaagtgtggtgtgaccggtgatcacagcttctgccagaatatctagaacaggatgcattctgcgatgaaagagatgactacaatagctgtagctatttattttataaaaaaaaattcttagccctagttcatggcctacttcttccaagcagtacaggtcaagcatccctaatctgaaaagctccaaaatgtgaaactttttgagcaccaacatcatgccacaagtgaaaaatgccacactcgggtacttaacacaaagtttgcttcaggtgcaaaattatttaaaatattgtataaaattaccttcaagctatgtgtaaaggggtgtctgtgaaacataaataaactttatgtttagacttgggtttcatccccaaaatatctcagtgtgcatgtacaaatattccaaaattaaaaaaaaaattcaaaacacttctggtcccaagcatttcagataaagtatattcaatctgtattaaatgtaacaaaatttcagtaacatgacagaatctgagcaatgacttggaggcttatgtcactgattttgccttactgtgagaatatttggggagctgagcccaggaaatgtacttttccttttgttcttttttttttttttttgagatggagtctcactctgttgctcaggctggagtgcaatggtgygatctcagctcactgcaacctctcctgggttcaagcgattctcctgcctccaagcaattctcctgcctcagcctcccgaatagttgggattgcaggcgcacaccaccgtgcctggctaatttttgtatctttagtactagagatgggatttcaccatgttggccaagctggtctcgaactcctgacctcaagtgatccacccggcttggcctcccaactctagctgcagagttacttaactcttggctctttcacagtataaagggatttggagaattaatctgatattcccaggttgaattttttttatttgttcataaaatttaagcaaaaagtattttttaaaatcttccagcaattcagggccttatgttctggagagccgagcattctaaagaacgtagcatcatttcctagaattttgcatcggtaccctgagctccttcatgttctttaactttcgttccccagcacatgaaacaccatggcagcaacccttattgcttgtggctacttctacgtccctcctttttttcacaggacattccgttcttctcaccagccctaacctgtttgccacttggcaagcacggggaacaggactctccacagtcttaccccggggactagtttcagcttttcagagagcaaagcttctggtccaacagtatttggaaattgagacaattgaggagaagtagtaatatgttcaactgcagagaatgtagcctttggcatacaaggaggaagctgtcttggcatctgtcattagagccactgggtattttggaaaaagtccatttcattcttcctctttttggatcctgaaacaagaagctatagtgccatcaggaatatagagattgggaagcatgggaatgattcaagtaaacttctgaagaaagcgtacacctccagggtagctaaacaagcagaatgcttgttggggaagcaaaatcatctgaaaacaacctgaatttggaggtaatagaaaaaaaaagttttttaaaaaattttatttaaaatggaaaaatttaatggtaggatgggaaagtagtacttctagcttggttttggattcagacctggatgggaatactaactgttagaacttgagaaaacaatgttagcatctaaaccttagtttagatgaaatgtgaaatgagagaataatagttcatttgtgcccttttgaaagatgtttaaattgtggtaaaacacaacaacatagaattatcgtcttaatcattatagtataattcagtggcattaagtacatccacattggtatgcatctgtccccagaactcttttttcattttataaaactgaaaatccacactcattaaagagtaactccccagttttttccccctcctccagcccctagtagccatcactttactttctgtctgtatgaatttgactactccaggtaccttgtttaagtggaatcatacagtatttgtcattttatgactggcttattttacttagcatagtgtctccaaggttcatccatgttgtagcatgtgtcagaattcccttt

SEQ ID NO: 546021 - DNA, 1176 bp, Homo sapiens
ggtcaagaaacagaattttctcagacaacctaaaagtcacaaaatgaggctatttgccaattaaggttgtagaccaaatgctgtagaatgaacttcttttaattctatgttgatgactctctgtcacaatattcacatctcagtgcaaagagaacacaagaatgtctagcaagaaaagatggacaagtttctcaaacattggcagtgttacttacattggctaggcaaaattcagaaggcctggtggaaatctggttaagccctaaaagtaagcttgtaattctatcctagcagcccacacacatttgagtctgtcttagtcagctcagactgctataacaaatcatcaactgggtggcttaaacaacagagatttacttctcccaggtccgaaagctggaagtctaatatcagtgatataatttggatacttttccccctaaatcttacactgaaatrtaatcccatgttggaggtgaggcctccaacatggtgggaggtgactgcatcatggaggtggacttctcatgaatagtgtagcaccatcgtcttggtgctgccctcacaagatctggttgtttaaaagcgtgcggcacctcctcccactttttttcttactcccactcttgccatgtgatacatcaatacatcggctcccccttggcttcctgaggcctcaccagaagcaagcagatacccagagccatgcttgctgtacagcctacagaaccataagccaagtaaacctcttttctttataacttactcaacctcaaatatttctttatagcaatacaagaatggcctaatacaatcagggtgccaggatggttgatgtgtggtgagggctctttccctgagttgcagatggccgccttcttgctttgtcatcacatggcctttccattgagcatgggcgtgaatagacagcatgcgagcaagctctccagcgtctcttcttcccataagtaccctgatctcatcatgggggccccactctcatgagctcatctaaccctaattaccccttgaaggccccacctccaaacattataaaattgggagtgggagtgcaaatgtatgaattttggggggatacaatttagtctacagcatagtccaaatgtgaaatttcttcctccagctaccgatgtttagtgagaacactgcctgttc

SEQ ID NO: 546022 - DNA, 1176 bp, Homo sapiens
ggtcaagaaacagaattttctcagacaacctaaaagtcacaaaatgaggctatttgccaattaaggttgtagaccaaatgctgtagaatgaacttcttttaattctatgttgatgactctctgtcacaatattcacatctcagtgcaaagagaacacaagaatgtctagcaagaaaagatggacaagtttctcaaacattggcagtgttacttacattggctaggcaaaattcagaaggcctggtggaaatctggttaagccctaaaagtaagcttgtaattctatcctagcagcccacacacatttgagtctgtcttagtcagctcagactgctataacaaatcatcaactgggtggcttaaacaacagagatttacttctcccaggtccgaaagctggaagtctaatatcagtgatataatttggatacttttccccctaaatcttacactgaaatgtaatcccatgttggaggtgaggcctccaacatggtgggaggtgactgcatcatggaggtggacttctcatgaatagtgtagcaccatcgtcttggtgctgccctcacaagatctggttgtttaaaagcgtgcggcacctcctcccactttttttcttactcccactcttgccatgtgatacatcaatacatcggctcccccttggcttcctgaggcctcaccagaagcaagcagatacccagagccatgcttgctgtacagcctacagaaccataagccaagtaaacctcttttctttataacttactcaacctcaaatatttctttatagcaatacaagaatggcctaatacaatcagggtgccaggatggttgatgtgtggtgagggctctttccctgagttgcagatggccgccttcttgctttgtcatcacatggcctttccattgagcatgggcgtgaatagacagcatgcgagcaagctctccagcgtctcttcttcccataagtaccctgatctcatcatgggggccccacyctcatgagctcatctaaccctaattaccccttgaaggccccacctccaaacattataaaattgggagtgggagtgcaaatgtatgaattttggggggatacaatttagtctacagcatagtccaaatgtgaaatttcttcctccagctaccgatgtttagtgagaacactgcctgttc

SEQ ID NO: 546023 - DNA, 1176 bp, Homo sapiens
ggtcaagaaacagaattttctcagacaacctaaaagtcacaaaatgaggctatttgccaattaaggttgtagaccaaatgctgtagaatgaacttcttttaattctatgttgatgactctctgtcacaatattcacatctcagtgcaaagagaacacaagaatgtctagcaagaaaagatggacaagtttctcaaacattggcagtgttacttacattggctaggcaaaattcagaaggcctggtggaaatctggttaagccctaaaagtaagcttgtaattctatcctagcagcccacacacatttgagtctgtcttagtcagctcagactgctataacaaatcatcaactgggtggcttaaacaacagagatttacttctcccaggtccgaaagctggaagtctaatatcagtgatataatttggatacttttccccctaaatcttacactgaaatgtaatcccatgttggaggtgaggcctccaacatggtgggaggtgactgcatcatggaggtggacttctcatgaatagtgtagcaccatcgtcttggtgctgccctcacaagatctggttgtttaaaagcgtgcggcacctcctcccactttttttcttactcccactcttgccatgtgatacatcaatacatcggctcccccttggcttcctgaggcctcaccagaagcaagcagatacccagagccatgcttgctgtacagcctacagaaccataagccaagtaaacctcttttctttataacttactcaacctcaaatatttctttatagcaatacaagaatggcctaatacaatcagggtgccaggatggttgatgtgtggtgagggctctttccctgagttgcagatggccgccttcttgctttgtcatcacatggcctttccattgagcatgggcgtgaatagacagcatgcgagcaagctctccagcgtctcttcttcccataagtaccctgatctcatcatgggggccccactctcatgagctcatctaaccctaattaccccttgaaggccccacctccaaacattataaaattgggagtgggagtgcaaatgtatgaattttggggggatacaatttagtctacagcatagtccaaatgtgaaatttcttcctccagctaccgatgtttagtgagaacactgcmtgttc

SEQ ID NO: 546024 - DNA, 657 bp, Homo sapiens
caaaaattaatttaggtaaccgcaatatcaagagaaactggaatcctctatgagcaagcactgtagatatttaaagccacatctatttatatatccrttacatagacttatcttttttcactgcaaagtgttggacacctcctcactgaaatctacagattatcatttaaaagccctgcagtagtatgtgaagggcttcagtgcagcagatgggcttggttcatgggagtggttgggtcctgtgtgtctctttaaagtgtttggatacatttatctatcagcacacgttagtacttttctgggaagaagtttcctaactttcacatagttatcaattgtgttcttaattccaaggataaaaatccttgctagtagcccttttcatttatggcaagtggtgtatctcttccattttctcattgctctcaactgttaataattgacaagagaacccagtttaaagggatattcatttggtcatttcttagaatcatttcacttacaagaaatgaagtgagccttctcggtatcagatgttgctgttgtaaaatatgaaagccattgccgtttttcataggttccactgaagtgatagttgcttggttttctttctgtggtggtacatttgtgagtaattatttgccctgtgactttgtg

SEQ ID NO: 546025 - DNA, 892 bp, Homo sapiens
cagtagttttccaacatccttggttttcagccttgccaacatattgatcagccatcttcttcttcaagaccctttcttttactatttttttggatcactcctggagggtcttctgggaaagtctgtacccctcactccatacagcacagaatttgacrttttcataatccccacttcacttcatgctcactcttacctttccccaatttcattaagatcctgccctgcactgagatccaggatttgcccttccgcaatccagaactttcagaggcagtgacatgtcagcctcttccttcctgcaatggagtagaaaaagcacttaattttcccgtaaataaaatatggtggaagtagcaacaattttactctcaaggaacttttactccatccaatgttgggtcttgagctcagaaaagagatccagtttggggatcagttttgagttatcaggatgcagatcacaaaagagggagtagctggaatgggtgataatgctgcacacacaaggtagaaaaaggaaggggaatggtcagtgttttctgctcaacttgcaagaggggaaaaattaagcttttttggtcccaaaccacacttcccaagagaatcctgaagcgtatagggtggagggtgataggagaagggttgaagggcagttccatagtcagcatttcagggaagaaatgttggcaatttaaaggtagtgaattatcaactgctttattgctgtttctttagagtggaaaaatattttatgaagcattgtgtttctgaatatgaattcaattcaattctgttatcgggccttccttaaaatgattcaaacattcaacaaatacaacattattctacttctgtttgtttttaagtactttatatgtttcaaaaaaca

SEQ ID NO: 546026 - DNA, 532 bp, Homo sapiens
gggaaaaactcatgaaatagaaataaagaactttaaaccatctccttccaaaaataaaggcatgtttcctggttttaagtaataatacttaactctcaagctaagtaaaaatatgtcatcatgcttatgttaaactctgttgtaagtaataatttgtaaattgaataagtggcatactttttaaaaaactattttatgttcagaaatgtaaatgttattattcttgagtttttgggtttytttttttgagacagagtcttggtctgttgcccaggctggaatgcagtggtgtgctctgggctcactgcaaccttcacctccaggttcaagtgattctcctgcctcagccttctgagtagctgggactacaggtgtgcaccaccatgcccagctagtttttgtatttttagtagagatggggtttcaccatgttggccaggctggtctcgaactcctggcctcgtgatctgcccttctctgcctccctaagttgctgggattacaggtgtgagccacagtgcctggcccattc

SEQ ID NO: 546027 - DNA, 612 bp, Homo sapiens
ggaaaagagaaggctcccacctgaccccatagtccaccaccacagcctccttggccgtgccagtgatggcatcgtgatgctggaagagccccaatgtgcgccgagcttccgtcaggagggtgaaatcagacagtgggtaccggccagccagaccagagcggcgagcgtgagctgcagccaggctgtacagaacctctgcccccctgcccagagagagaagttagctgccagcctgcaccactagccagggcccacccacactctgccagtgcagcctccttcctgtcscaccctcctctacctgccctggcctctgggcctatctattcccttctgagccaatccagcccctccttaaaccccaaaggctgactctccccatccagcctggaagcggggacagggtctcaccgcaggtgggcttccaggactcggtctaagctcttgtagaagggccgggaagtgtaatagcctgtccagtaatgatcctcccggtccgcataggagaagaaatccccgctcagcacaggaaaccctggaggccgggcccctggctccacccctgtcctcttgtacagggcatcaaaatagtcagaaagagtgccaaactgg

SEQ ID NO: 546028 - DNA, 612 bp, Homo sapiens
ggaaaagagaaggctcccacctgaccccatagtccaccaccacagcctccttggccgtgccagtgatggcatcgtgatgctggaagagccccaatgtgcgccgagcttccgtcaggagggtgaaatcagacagtgggtaccggccagccagaccagagcggcgagcgtgagctgcagccaggctgtacagaacctctgcccccctgcccagagagagaagttagctgccagcctgcaccactagccagggcccacccacactctgccagtgcagcctccttcctgtcgcaccctcctctacctgccctggcctctgggcctatctattcccttctgagccaatccagcccctccttaaaccccaaaggctgactctccccmtccagcctggaagcggggacagggtctcaccgcaggtgggcttccaggactcggtctaagctcttgtagaagggccgggaagtgtaatagcctgtccagtaatgatcctcccggtccgcataggagaagaaatccccgctcagcacaggaaaccctggaggccgggcccctggctccacccctgtcctcttgtacagggcatcaaaatagtcagaaagagtgccaaactgg

SEQ ID NO: 546029 - DNA, 651 bp, Homo sapiens
aaaaaaaaaaagggggggcaccctgcccgagttgggaacccagggcacggtctcacgggaagggatgggctgcagcactgtgaggcccctccccagtcaagtgcccctcacacctgcacatggaggttaggcctgctgttgaagaagtcaaagagccgttggtagttgaagaactgggcatcccactcctggggcttgtcatatcggaagtcatctccaagaggcaccaggaggacgttgcttcggaacagctgggacttcttccggtattggtccagaagcagggctgccctggggcaggaaaaaaaacatgggcccaccacgaagtctcatcagtaaaagagcaccacgcacagccatcccgccagcaagcccctagagacatcccatccaccaaggagtggttcagcgcagacagacacctcctgcacatgaatcccagccccaggggagtccggtgctctctgggcagttctgacagctgacatgttattttttatgctaggctgttgagatcttttgggatcctggttctgacactcccgcctcattttgcccaccagttagcgatgcagcaccaaagtgaagggtctggaccccggagccatatcacaccagctccacaagtactagctcagtgacygtgggcaa

SEQ ID NO: 546030 - DNA, 530 bp, Homo sapiens
gagggggcttggatgatcctttggtaacatcactgtctggttctcatggtcttgattttccataggttcttgtgacttcagagttagttatagaccatgagaaggtaagtggaggatgtctcaggccctcaccctcctcaactcctacctacatggtcttcagaattatggtgtcttgggactccttgctggctattctccctccccttccatttgagttccctgcaaaatggtcatacagtcagggtcctgagtccagactacatattattatttatttatttatttttgagacggaatttagctcttgttgcccaggctggagtgcaatggtacaatctcggctcaccgcaacctccacctcccaggttcaagcgattctcctgtctgagcttcccaagtagctgggattacaggcacgtgccgtcacgcccggctaattttgtatctttagtagagacggggtttctccatgttggtcargcaggtctcaaactcccaatctcaggtgatccgcccacctctgcctc

SEQ ID NO: 546031 - DNA, 754 bp, Homo sapiens
atctaaagtgtaacttagactctattcagtgtcatatccagttacttgccatgccattcactatgataaccatttgctaagcccctttcttagtatcttatttcattcctataaaaatcctgtgaaataagctgtcagtatctgttttatgggcgaaagcactgaagcacagagtttaagtagttcaaagtcagctagtaaggtagcagagtaaatttgagttttcatctgcccgatttctaagtccacaggtgaggcaggtctcaaagataagaggaggctattactttatctgagctcctagagccaaaagcatctccccaggctcatctgggccagtctcaataaaaggattcacctaaactattccaggcagatagatcagagatctgagtttaagactcttgggttcccctggcttctggttgttgttttcagtctccactagagcaagagggtctttcatttgaccaattcagcaatctcatgatgccattgaagccatctcctgctgtgtgcmtcattcttccaatctgcttctttctccagatcatagatgataagggcaacgtcctgccccccggcacagaaggagacattggcatcagggtcaaacccatcaggcctataggcatcttctctggctatgtggtgagaaactgtgctcctcctcctctgttccccagtgaggatgggagcactaaacgggatgagggaggccaaatgttctgaaacttccaagaggcactagatg

SEQ ID NO: 546032 - DNA, 754 bp, Homo sapiens
atctaaagtgtaacttagactctattcagtgtcatatccagttacttgccatgccattcactatgataaccatttgctaagcccctttcttagtatcttatttcattcctataaaaatcctgtgaaataagctgtcagtatctgttttatgggcgaaagcactgaagcacagagtttaagtagttcaaagtcagctagtaaggtagcagagtaaatttgagttttcatctgcccgatttctaagtccacaggtgaggcaggtctcaaagataagaggaggctattactttatctgagctcctagagccaaaagcatctccccaggctcatctgggccagtctcaataaaaggattcacctaaactattccaggcagatagatcagagatctgagtttaagactcttgggttcccctggcttctggttgttgttttcagtctccactagagcaagagggtctttcatttgaccaattcagcaatctcatgatgccattgaagccatctcctgctgtgtgcctcattcttccaatctgcttctttctccagatcatagatgataagggcaacgtcctgccccccggcacagaaggagacattggcatcagggtcaaacccatcaggcctataggcatcttctctggctatgtggtgagaaactgtgctcctcctcctctgttccccagtgaggatgggagcactaaacgggatgagggaggmcaaatgttctgaaacttccaagaggcactagatg

SEQ ID NO: 546033 - DNA, 944 bp, Homo sapiens
ggttgcagtgagctgccgagattgtgtgccactgcactctaacctgggtgacagagcaagactccacctcaaaaaaaaaaaaaaaaaaaagccaggcacaatggctcaggcctgtaatcccagcacttttggaggctgaggcaggtggatcacctgaggtcaggagtttgagaccagcctggccaagatggtgaaaccctgtctactaaaaatacaaaaattagccaggcgcggtggtgcgtgcctgaagtcccaggtactggggaggctgaggcaggaaaattgcttcaatctgggaggcagaggttgcagtgagccaagatcacaccactgcactctagcctgggcaacagagcaaaactccatcccccaccaaaaaaaaaaaaaaaaaaagmagcagatttcagaaaatccagtcacctctcatcctatctggctcttcctcacaaaggcctccgatctcttaactatgataattcaacctttcccccaactcccactcacaatgctccaaaaaaactttgttatctatccagttggtttaatgcagttcttaaagaatctcaatctggggtagcaatataaaatttgtcattcccaagaatccaaaatacttctcatataatatacccaatcccaaacactcccgtaatcccagcactttgggaggctgaggtgggcagatcacttgagcccaggagttcgagaccagcctaaaaaacatgacgaaaccctatgtctaccaaaaatacaaaaattagccaggcacggtggcatgcgcctgtgatcccagctactggggaggctgaggtgggagaatcatttgagcctgggaggcagaggttacagtgaaccgagatcaccctactgtactctagtctgggcaacacagtgagaccttatctcaaaaaaaaaaaaaaaagaaaaaaaaaaaatcaagtttc

SEQ ID NO: 546034 - DNA, 944 bp, Homo sapiens
ggttgcagtgagctgccgagattgtgtgccactgcactctaacctgggtgacagagcaagactccacctcaaaaaaaaaaaaaaaaaaaagccaggcacaatggctcaggcctgtaatcccagcacttttggaggctgaggcaggtggatcacctgaggtcaggagtttgagaccagcctggccaagatggtgaaaccctgtctactaaaaatacaaaaattagccaggcgcggtggtgcgtgcctgaagtcccaggtactggggaggctgaggcaggaaaattgcttcaatctgggaggcagaggttgcagtgagccaagatcacaccactgcactctagcctgggcaacagagcaaaactccatcccccaccaaaaaaaaaaaaaaaaaaagcagcagatttcagaaaatccagtcacctctcatcctatctggctcttcctcacaaaggcctccgatctcttaactatgataattcaacctttcccccaactcccactcacaatgctccaaaaaaactttgttatctatccagttggtttaatgcagttcttaaagaatctcaatctggggtagcaatataaaatttgtcattmccaagaatccaaaatacttctcatataatatacccaatcccaaacactcccgtaatcccagcactttgggaggctgaggtgggcagatcacttgagcccaggagttcgagaccagcctaaaaaacatgacgaaaccctatgtctaccaaaaatacaaaaattagccaggcacggtggcatgcgcctgtgatcccagctactggggaggctgaggtgggagaatcatttgagcctgggaggcagaggttacagtgaaccgagatcaccctactgtactctagtctgggcaacacagtgagaccttatctcaaaaaaaaaaaaaaaagaaaaaaaaaaaatcaagtttc

SEQ ID NO: 546035 - DNA, 1179 bp, Homo sapiens
tgtgggttttttttgaagaaaacatatgcccgaattactgacagatgacatgctgatagatacgcttttctttatttataactgtggttgtcgttctcatattagttgcaatttcaataaatatttgtagrttgacaatgttcaataacttctctttccccaaatttttttttggctgcttttctttgtctcttcttcttcttcttcttcttttttccccttgtctctacttttcttggctagggaggaccttaatctaatgtattctggagtgtcagtttttcaagaaaaattcagtatttaaaataatttatttcaagtaattttaaatatatgattcttcatgtgacttagtaatgttgatgacatgattctcagcctttggatactattttgcctgtatccttagaagtgaagaattctatcctagaaaagatgggtcttgaaaatagcaataaaatctttcctagttcttgtttatccccttcataatgaaatgtattacaatggggaaaactgctttcatgataactgaatttacagtttcaactgtaatctactttaataatcttttggatgagaaaagatactcaagaaattggacttctatgacagaatatggattttcaaggtgaaatacaatacaaatttcaccatgtgtgttcctgttggtggtggcacataagcagtttcaaggatgaataatgtataaaacatgtcttcttgagaattatttccttccctttcttaaactgattttcccatgcctagagagagcaaccctatgttgcttgtatatggaggattagataagagatctaacaaaactctcattggaaaacgactgtgttaaaatagagaaagtgcttaaaaacaaatagcctagtttatttcctctgggtgaagtgtatgcttcacaatctacagacatgaattaagttttgtcattgtagttattttgttttagtctatgctgtttatatgtatttgaggagggacatgtgtttccaaattttctcttatggaagaaacagacatttgaaaatatgcaagaggcacagtgtgttctcacatatgatattgccccattgatcattgtaagtggcttgttattggtggcttgttttcattttgtctaacttcagagggaaatgggcccttttaggcatatagagaaaa

SEQ ID NO: 546036 - DNA, 1177 bp, Homo sapiens
gtatttcaaaatatacttggataaagtcaaggaaccatcatggtaattcatatcatttggcatataaactttattattcacaagcaaaagggcctgtactgtattcagcaggtctaggcacagctgcagatatagctaatatggaagttttctgcaacaatgcttgtgagtggccacaacacaagaaaagggtcggttctaaaagtggcatataattggttaaaatcacagtgatttcttaggaagtgaatggccaagttgacattaatatgaaagttttgagatcttgtgatcacagaaattctgaggtcasgtagtttcaacaaaaatcctaaatcacagaggaactggcaatttaaataggaaattagttcacagcattcagaaatggcttctatgaaatccttgactaggaattcctttcactatcctagaattggttttgttaagaccataaagacatgtgtcacttaccaggccagttagcatactctttcaaattgggtcctttcctgtgaaaaagcataaattttccagtggtaatttgacccatatgggctaccatccctgaaagtaaatttgcacttgcttacaagaattttaactaggctatccttgagaatgcctcattacctttatagcagtaatcaactgaaaggatgatcaaggctgaccaaaaagatctggctgatttgctcctgggactttatcttccacagagaggccaatgtcaagtgctcaattataatttcaaaattagataaagtcttaaaagacagcaggcatatactctgaacactgcatggccacacggatcattttacccaattttaacataaaatgtctttttttaaaattcatgacattaaactacaggtggtttcttccagaaagtaggagtagaggcttaaaaaagtcaaactagtcaaactacctttatgtgcttctcaactccattatataatttctatttccatttcagtattacctcacttctctaagtgtttttcacctataaaattggatgacgaacaatatctactttgtgtcattgtaaacagtaaatgaaataacctaaataatgtatttattataatttttctaacagagcaactgctctataaatgcatgttatgataataaaagtaataattactctgtcatctcagatcaaata

SEQ ID NO: 546037 - DNA, 1177 bp, Homo sapiens
gtatttcaaaatatacttggataaagtcaaggaaccatcatggtaattcatatcatttggcatataaactttattattcacaagcaaaagggcctgtactgtattcagcaggtctaggcacagctgcagatatagctaatatggaagttttctgcaacaatgcttgtgagtggccacaacacaagaaaagggtcggttctaaaagtggcatataattggttaaaatcacagtgatttcttaggaagtgaatggccaagttgacattaatatgaaagttttgagatcttgtgatcacagaaattctgaggtcacgtagtttcaacaaaaatcctaaatcacagaggaactggcaatttaaataggaaattagttcacagcattcagaaatggcttctrtgaaatccttgactaggaattcctttcactatcctagaattggttttgttaagaccataaagacatgtgtcacttaccaggccagttagcatactctttcaaattgggtcctttcctgtgaaaaagcataaattttccagtggtaatttgacccatatgggctaccatccctgaaagtaaatttgcacttgcttacaagaattttaactaggctatccttgagaatgcctcattacctttatagcagtaatcaactgaaaggatgatcaaggctgaccaaaaagatctggctgatttgctcctgggactttatcttccacagagaggccaatgtcaagtgctcaattataatttcaaaattagataaagtcttaaaagacagcaggcatatactctgaacactgcatggccacacggatcattttacccaattttaacataaaatgtctttttttaaaattcatgacattaaactacaggtggtttcttccagaaagtaggagtagaggcttaaaaaagtcaaactagtcaaactacctttatgtgcttctcaactccattatataatttctatttccatttcagtattacctcacttctctaagtgtttttcacctataaaattggatgacgaacaatatctactttgtgtcattgtaaacagtaaatgaaataacctaaataatgtatttattataatttttctaacagagcaactgctctataaatgcatgttatgataataaaagtaataattactctgtcatctcagatcaaata

SEQ ID NO: 546038 - DNA, 1177 bp, Homo sapiens
gtatttcaaaatatacttggataaagtcaaggaaccatcatggtaattcatatcatttggcatataaactttattattcacaagcaaaagggcctgtactgtattcagcaggtctaggcacagctgcagatatagctaatatggaagttttctgcaacaatgcttgtgagtggccacaacacaagaaaagggtcggttctaaaagtggcatataattggttaaaatcacagtgatttcttaggaagtgaatggccaagttgacattaatatgaaagttttgagatcttgtgatcacagaaattctgaggtcacgtagtttcaacaaaaatcctaaatcacagaggaactggcaatttaaataggaaattagttcacagcattcagaaatggcttctatgaaatccttgactaggaattcctttcactatcctagaattggttttgttaagaccataaagacatgtgtcacttaccaggccagttagcatactctttcaaattgggtcctttcctgtgaaaaagcataaattttccagtggtaatttgacccatatgggctaccatccctgaaagtaaatttgcacttgcttacaagaattttaactaggctatccttgagaatgcctcattacctttatagcagtaatcaactgaaaggatgatcaaggctgaccaaaaagatctggctgatttgctcctgggactttatcttccacagagaggccaatgtcaagtgctcaattataatttcaaaattagataaagtcttaaaagacagcaggcatatactctgaacactgcatggccacacggatcattttacccaattttaacataaaatgtctttttttaaaattcatgacattaaactacaggtggtttcttccagaaagtaggagtagaggcttaaaaaagtcaaactagtcaaactacctttatgtgyttctcaactccattatataatttctatttccatttcagtattacctcacttctctaagtgtttttcacctataaaattggatgacgaacaatatctactttgtgtcattgtaaacagtaaatgaaataacctaaataatgtatttattataatttttctaacagagcaactgctctataaatgcatgttatgataataaaagtaataattactctgtcatctcagatcaaata

SEQ ID NO: 546039 - DNA, 1177 bp, Homo sapiens
gtatttcaaaatatacttggataaagtcaaggaaccatcatggtaattcatatcatttggcatataaactttattattcacaagcaaaagggcctgtactgtattcagcaggtctaggcacagctgcagatatagctaatatggaagttttctgcaacaatgcttgtgagtggccacaacacaagaaaagggtcggttctaaaagtggcatataattggttaaaatcacagtgatttcttaggaagtgaatggccaagttgacattaatatgaaagttttgagatcttgtgatcacagaaattctgaggtcacgtagtttcaacaaaaatcctaaatcacagaggaactggcaatttaaataggaaattagttcacagcattcagaaatggcttctatgaaatccttgactaggaattcctttcactatcctagaattggttttgttaagaccataaagacatgtgtcacttaccaggccagttagcatactctttcaaattgggtcctttcctgtgaaaaagcataaattttccagtggtaatttgacccatatgggctaccatccctgaaagtaaatttgcacttgcttacaagaattttaactaggctatccttgagaatgcctcattacctttatagcagtaatcaactgaaaggatgatcaaggctgaccaaaaagatctggctgatttgctcctgggactttatcttccacagagaggccaatgtcaagtgctcaattataatttcaaaattagataaagtcttaaaagacagcaggcatatactctgaacactgcatggccacacggatcattttacccaattttaacataaaatgtctttttttaaaattcatgacattaaactacaggtggtttcttccagaaagtaggagtagaggcttaaaaaagtcaaactagtcaaactacctttatgtgcttctcaactccattatataatttctatttccatttcartattacctcacttctctaagtgtttttcacctataaaattggatgacgaacaatatctactttgtgtcattgtaaacagtaaatgaaataacctaaataatgtatttattataatttttctaacagagcaactgctctataaatgcatgttatgataataaaagtaataattactctgtcatctcagatcaaata

SEQ ID NO: 546040 - DNA, 594 bp, Homo sapiens
catttgggccttaattctgttctatgatttagacatctcaagttatatatatcatcatttgaaacacattgagaaacattacttcatagcttaggataaagcactattattatttttacattttagtgcaaatcataaatccaaatatttgtagccttccttttagtatggtttatgactaattcattttaattatattcctatttgatggcaattcatattcttccatctaccaatttgatatcagttcttatttttgtatgttttatggagactctcagcttcagatatattatgcagatctaacgaatttttaaggctaattaagagtcacagwcatgttgtaacttgtcagtatagctccctctctcccccacctttctaagagcctgtgtcttctaaaatagtgatggcatggcctcttaggttttgtcaagtaagggagcttaaatatatctatgaacacatcccctgaaagaattctctctagaatctggtgctttccttctgccttagtgttaactccatttgtctgctatggaaagttcttgacccctccttcctgaggttaccagaaagctcaaatgctgcaac

SEQ ID NO: 546041 - DNA, 528 bp, Homo sapiens
ccccaggggacatcatgacagagcaggagcttttgttgagtctgctgtggagaaattataaaactagaagggacccaaggggattatctagctctgggcagaaactcaggttcatctttattttcaccttgattaatccatcagctattactgcctggctgtaggaaaaggattctaaggctgagtgtgggctggaagacagtaaggaggaagaaagctgtgattaagtggcagtgtctgcttggacatgggagggggatggccctgatcacctagatctaacccagtgtctctgctcattagtgaagaatgtgccccagagaggtgacaggcccacctgaaccacatggcctgttagtggcagtgccaaaatcaggaactgcatcttctgactctgagaccagtgtgcttttccactacactcttctaaagaacaacaaaaagtgaaaggtacaaatgcagactgaggaaatggtgcartactgccagagctggtttcaacatctccccagaaacagagatggggac

SEQ ID NO: 546042 - DNA, 1421 bp, Homo sapiens
gtccttgattttgttttttggcgaggaattgcttgatcctgaaagtcttgtaagaaaacatgatgagaaatggtcaaccacacataccacaatggcagagaaagggagagaactttggaaacctgttttaaccaagcttttttttccatatctctatctgatggacytctccacacttctacatcagcagctttatgacactatactgatcaagtttggatgccttctattattttgaggtatattctcacagcttgacataaggatcaccacttaaggatactgttttgggatctgtgagagaagaaattcctaaatccttgcacttgttaaagcatctggctttcccagagcattctgatatttgtcagaactggtttaatcatagtttttttgttgtttgtttttgtttttgttttggagggctctgcctggattctgtgaccttttggagtcccttggaggtctgtgacaaagaggaaaggaattcccaagtccagcctcacccaagccctgattagcttaattactagttctttcactaagcctccagttgcatttttcagttaatatatcatttgtagagaatctttagatattcctattgatattgtaggctaaaggaaattattaactcaataacttatggcatttccatgaaatgctttgaaatcctgactgtgatgagaattatggtggtaactttataaagaatattctcttgtttccaagcatctggattgagaccagtgaattattttgtaacaattttctgaatgaaccccagggtcaattaagtttagttatctgggactccaaaatcagggatatggaggcaaacatccaatctcacaactcagagcattttttttgatttcccttttcagtttcacgggcagtaatctaatctttaagaggcaacaaatagcccaatagagccatgagaactcaccatgttttggacattctcttcagtaatattggtgttataattccaagaagcaagtgaactttgatagaacaggtcttcggcttcgtggttaaacttgtccaaaaatgtcttggcctgttcctcaatggtggactgagcagcagttacagcaacaaggctgagaaggagccaggaagagcttgacatcgtcccctgtgagccaagatcacatccactgaatgactttccctagactaaaacctcctcatgagattttctctcttatcagcctttgaacttgggttgggcgctgagcaggaaagaccaaaaaaagaaaaagaagaagaacacagtaaacaatctgctgagccaatataaagttcatcctggagaggacagatatgtaacagattttagaataattttttaaagtgaatcaaataagaatacgttattctttaatcctagagaaccttacctctcctgtcac

SEQ ID NO: 546043 - DNA, 555 bp, Homo sapiens
tcatcccacctcctcctcccctactgatcacccattcagctcctggccccattgcccaaaccctgccagcctttgggtgatctgctcagccgccacctcacatccactctcagctcggggccagctctgggctccagcccgtgatgggccatggtgggcttcagagggtgagccccccacaccattgtaccagtctggcaagacggatgagtgccctggtcagtagtggcccaccttggcctggaaggatgtagggacaggctgcccacccccatttgccctccttctctgartggctaggacagccaccaccactctccagggaggggaggggctggcctgtcacacgtcccggacaggcctgcctgggcccaggaaagggctatgtgtgtaggtggcaggctgctgccctgggcaggggccccgccagggctggggaggcctcagacctttagattgtggggctggtccccagcactcccactgggggtgggaagcttggcggccagtgacgggagggtcagcagaggggcccgtgctcctggctgaagccaa

SEQ ID NO: 546044 - DNA, 596 bp, Homo sapiens
tcaaactcctgacctcatgatccccccgtctcagcctcccaaagtgctgggattacaggtgtgagccaccgcagccagccaagaagaacatatcttgtcatggtattcatcttcatttcttttagtattagtgaggttgagcagcttttattgcacttttggctatgtggyttttctcttatatgaatcatctgtaaaaatactgtgtctatttatttgatgggctatttgtcttttacttattgatttatatgtaattttatatgatatagatactaatttgttgtcagttacatggtttgcaaatatgtacacattctgtcgatttgtagtctgtcttagcactcagacggcaagaagtttaaactttttaatgtgtcacttctatcagtattttttatggtttatattttttaaattgttaaagtcatatatttatttcatatatttccttctaactattttaaagtgatcttctaaatttaagtctttgacttgtcctgaaatgattgttatgaatggtgtgagggagtgctatgggttgaaatatgtctcccctaaattcatatgtttaagttctaacctctagttggtca

SEQ ID NO: 546045 - DNA, 596 bp, Homo sapiens
tcaaactcctgacctcatgatccccccgtctcagcctcccaaagtgctgggattacaggtgtgagccaccgcagccagccaagaagaacatatcttgtcatggtattcatcttcatttcttttagtattagtgaggttgagcagcttttattgcacttttggctatgtggtttttctcttatatgaatcatctgtaaaaatactgtgtctatttatttgatgggctatttgtcttttacttattgatttatatgtaattttatatgatatagatactaatttgttgtcagttacatggtttgcaaatrtgtacacattctgtcgatttgtagtctgtcttagcactcagacggcaagaagtttaaactttttaatgtgtcacttctatcagtattttttatggtttatattttttaaattgttaaagtcatatatttatttcatatatttccttctaactattttaaagtgatcttctaaatttaagtctttgacttgtcctgaaatgattgttatgaatggtgtgagggagtgctatgggttgaaatatgtctcccctaaattcatatgtttaagttctaacctctagttggtca

SEQ ID NO: 546046 - DNA, 596 bp, Homo sapiens
tcaaactcctgacctcatgatccccccgtctcagcctcccaaagtgctgggattacaggtgtgagccaccgcagccagccaagaagaacatatcttgtcatggtattcatcttcatttcttttagtattagtgaggttgagcagcttttattgcacttttggctatgtggtttttctcttatatgaatcatctgtaaaaatactgtgtctatttatttgatgggctatttgtcttttacttattgatttatatgtaattttatatgatatagatactaatttgttgtcagttacatggtttgcaaatatgtacacattctgtcgatttgtagtctgtcttagcactcagacggcaagaagtttaaactttttaatgtgtcacttctatcagtattttttatggtttatattttttaaattgttaaagtcatatatttatttcatatatttccttctaactattttaaagtgatcttctaaatttaagtctttgacttgtcctgaaatgattgttakgaatggtgtgagggagtgctatgggttgaaatatgtctcccctaaattcatatgtttaagttctaacctctagttggtca

SEQ ID NO: 546047 - DNA, 663 bp, Homo sapiens
tgggccctgtggtgcagcgtgggactgatctggcgggctctgcacagcttagacccccaagctccccacgtatatgaaggagcctcactccatctcccagccgatggaaaccattcactccagggcgtgtctgaggctgaaggaggctgggaaccggccctggtactctggctgcccggcctgggcccttgccctgcccgctctcagccaccttcccacatggaacttatatctcccatccttcgtgggacagcagagaagctgggtgggctctgcactgacactaggagttgactgtgatttctcccaaatctttttggtgtcctctgcccctgagccttgcccatttccatggaggccatcaccgtcctccggggctcccctttgccacactccccgcctctgacccaccggccactgctatggattccgtctccaaaacacacacccactccccaaaacctctgctgcccccaccctgggcccgatccccttgcaagcccctcactggtccytcctgcatttggcttgtgcaaggaagatctggggctctgcatttcctctttttttttttttttaaaaaaacctctgcctcctgggttcaagcgattttcctgcctcagccttccgagtagctgggattacaggtgtgtgtcaccacgc

SEQ ID NO: 546048 - DNA, 660 bp, Homo sapiens
tgcaaccacatttatcttgattctgcttaagtcttatactggcttaagcatatcttcagatggctgaggaaagacacaagtagttgtaaacatccttccccattcttcaagcctcgacctcataagtagggtccagactttgtagctgcccaggaatctggacatgaatattcagttgaaggtgtaattgacttaaatggagctatccctataagtttgtagttttgtggcttttctctaggtgctgaccttaccagaagcagccacaccattcacaccatctcctgttctgtcctcttgctataaaagaggtagctggattgcttttttattctttgkttttttttttctttttttgagagggagtctcactctgtcacccaggctggagtgcagtggcatgatctcggctcactgcaacttccgcctctcgggttcaagtgattctcctgcctcagcctcctgagtagctgggaccacaggtgcacaccaccacgccctgctaatttttgtacttttagtagagacagggtttcaccatgttgcccaggctggtctcaaactcttgacctcgggttatctgcctgcctctgcctcccaaagtgctggattacaggcatgagccactgcatccggcctggatttcatttttcctccact

SEQ ID NO: 546049 - DNA, 543 bp, Homo sapiens
tacctgtagtcccagctacttgagaggctgaggcaggaggatcacttgagcccaggagattgaggctacattgaatcataaacatgccactgcactccagcctggacaacagagtgagaccaccatctctatttttttttgatgtastttttgtttgtctgaatacttggagaaaattatttttggtagggagatattttgtggaaagtaagaccaaaataaaatgatagctcaccattttaagtgactaaatgtaaaggtttaaaaaaataaaagtttgatcaagtttaaagcatttaatacatgaaactttacttaaaaaagagccatcaaatgaatttaaatgtatgatagttggataacttacacttatttcaactacagttgctattacaagcaactaatctatacatagatttattagttcaaactattaaatttcacttcgaaaatatgactaaaatgtatcttaaaatctcatctttaatttctgtgtaatctagtggaagggaactactactttataaaatagttttctctaag

SEQ ID NO: 546050 - DNA, 681 bp, Homo sapiens
taagcacttttcaccaagttctacttactgaagatttccttttttgttatcttctgtaagttttatagttttatgttacatatgtaatctgtgatccaccttgaattcattttttaataagatgcaggacttaagtgctgaagacactggctattgtgatttcacagctatactatatctaactgagygtaaataaaaagtagtttttgagtaattaatactaaatgtaactcaccatatttttatgtatcattttgctatacttcttttaataacatgtaatcagaaaattattataaatataaaaaatgttcaaagaaatcagtaatagagaagttgaaacaacagggaaattaaaacaagaaatgtgagagaaaataagtgggaaaaatttttattgaagacactcctctccttagaataaagtggtaggggaaaggagagagaagcaagctgctgcctcagtattgctaagaaaaaaagagactaatctattccatcaattatagaaccatcaagtagaagtaccttaatggtcaactagttctctgatacttcactgcaacaatccctgtctcccaaagcagttatcctgtaacagggagtcttaacatccttaattgaataattgtgacattttcttaaatgatcaaccaaaattccttcctggttgcttccaca

SEQ ID NO: 546051 - DNA, 1275 bp, Homo sapiens
gtgctgggattacaggtgtgagccactgcgcctggcctgtcttcatgatttttaagtatacaagacattgatatcaactgttgtcaccatgtcgtacaatggctctctttaacttaactcctcccagttgaaattttatatcctttgaccaacatcttcctgatcaccaccctcccagcccctggtgaccatcatcctactctctgcctccctgagtttggcttttttatatttcacatatgcgtgagatcatgtggtatttgtctgtctgtgcctggattttttcacttagcataatgtcctccaggttcatccatgttgtggtgaatgacagcgtttccttcttttttaaggctgtatagtattccactgtstatatatagttttggatcttatcgcagtgcctcaagttctgtgaaggagagaatctggataattgtatcaggaggtccttagaccatatttaggatccttccattgggactgggcagcaaggttaccaaactaaatgcagtggcttcagatgccaaaccacctgagatgagccacacctcacaggtgaggggtatggtcccccacaacactgcccttgcttcagacgccagctgcacattcaggggttcccagcccaccctcactgctgactggctgcaaatctgggagtttccactacccctcaggttccagaatgcactaggatgactgacagaactcaggagagtgctatacgtaaggccacagttttatcataacaaaagcattcaaatcagaaccagccaaaagaggagacacaggggcgagatggaggaggggcccaaacacaaagctctcattgtcttccccgtgtggcgtcagaggcatcaccttctcagcactttgacgtgtgacaaaatgctgactatttctaagcagggaggctcacttgagctttggggtccagagtttttatttgagtcttatcatataggtgtggttgatggactcattggccactgggttgaactcatcttcctggtctccttccgggaggccaggctgatatcacagaacctcagtggcgtggccagcccctccatggtcgtattgtcagcaaaaactacctagggcccaccatgagtcacttcactcgcataaactctcagagaccaccatgaataataagatactcctatcacttgggaaatccctaggaatttggggctacctcctgggaactggtgacaaggactagccacgttgtttactccaagggtttgtagctggtaggacctccca

SEQ ID NO: 546052 - DNA, 614 bp, Homo sapiens
tatttctcccctttaatttccagtttctaattgcctaaatgcttggacattagattataaaacctgttaaaatgcatgaaagcgatgtgttctgatgaagggcctgagagtctttgtggaataaagtgcatgagcctcagtgaatatatttgttggcaaatattttagttatgtaaagtttttttttgcttactgacttcctagtaagtaggaatttgaagcataaactatattgytattttttaaaagagaagcctcacatattttttataagtatcttctagctaaagttagaaaatactcggtcatcacttattaagctcttttaatatatatatttagacagaggttctccctcttgtcacccaggctggagtgcagtgacaagatcccatagctcactgcatcctcaaactccttgtctcaagcaatcctctcacctcagcctcctgaatagatgggactacagaaatgagctgccacgcctggcccctgaaaatattttttatttttgacattaaaaaacacataatagactgaaaatctacattcacagatctccgatgtttagtcccattaacttattggcacgtttgcttctaatctcctttacc

SEQ ID NO: 546053 - DNA, 1005 bp, Homo sapiens
gccatgtgacactgcctgctctcccttcaccttccactatgattggaagcttccygaatccctcaccagaagcagatgccagcactatgcttcttgtacagtctacaaaactatgagccaaaataaaccttttttctttataaattatccggcctcagatattcctttacagcaatgcaaaacagactaacccagcatgcttgaaagagcctgacattttaaaacagagaactttattaaaaaccagaaaaagaattcttgaaatatttactgaaaatacagccactgtttgaaaaagtcagctttccaaatacaggtttcccatcccaagacttccagttgacagtacagaagagtttttcttcaaccaacagttccatgtcctacccacatgtaaggccaaatttggcctgcatggctacttacataactatgtggtttcctttcctcctaggtcccagattttacaatgaaagatactatctcattttttctaaacaaaagtgtaatccctcatttattttattctattttaaaaccaaataccatgaccttattaatgaagctctttcaaactctgacatacttaaccaattaaaaaggcaagagaaaatgacatgtttgatgtgcatgaataacttaacactcctcagttggttcattaacttttgggatattctgttatgccacagttgctgagtgttctcaaatacatagtttatactctcacatgaacataaacagaaatggtttttcatattgtattcattaaagtgctacaatatatcaaccttttaaatatagcacaatgataatgttacacatttagtattgatttagtactgattcagtaagatgtaccacattttcttaaccgtagatataactgtctctctagttagaaaagatattcagaaaactaactaaaatccaacaattaccttatgattacttccttagctgtaaaacatacatacttcttgttgcatatactctttgttgtga

SEQ ID NO: 546054 - DNA, 1005 bp, Homo sapiens
gccatgtgacactgcctgctctcccttcaccttccactatgattggaagcttcctgaatccctcaccagaagcagatgccagcactatgcttcttgtacagtctacaaaactatgagccaaaataaaccttttttctttataaattatccggcctcagrtattcctttacagcaatgcaaaacagactaacccagcatgcttgaaagagcctgacattttaaaacagagaactttattaaaaaccagaaaaagaattcttgaaatatttactgaaaatacagccactgtttgaaaaagtcagctttccaaatacaggtttcccatcccaagacttccagttgacagtacagaagagtttttcttcaaccaacagttccatgtcctacccacatgtaaggccaaatttggcctgcatggctacttacataactatgtggtttcctttcctcctaggtcccagattttacaatgaaagatactatctcattttttctaaacaaaagtgtaatccctcatttattttattctattttaaaaccaaataccatgaccttattaatgaagctctttcaaactctgacatacttaaccaattaaaaaggcaagagaaaatgacatgtttgatgtgcatgaataacttaacactcctcagttggttcattaacttttgggatattctgttatgccacagttgctgagtgttctcaaatacatagtttatactctcacatgaacataaacagaaatggtttttcatattgtattcattaaagtgctacaatatatcaaccttttaaatatagcacaatgataatgttacacatttagtattgatttagtactgattcagtaagatgtaccacattttcttaaccgtagatataactgtctctctagttagaaaagatattcagaaaactaactaaaatccaacaattaccttatgattacttccttagctgtaaaacatacatacttcttgttgcatatactctttgttgtga

SEQ ID NO: 546055 - DNA, 945 bp, Homo sapiens
tgctggagccagagggctgctgcgtccggcctgctctgccggctcgcctcggcctgaattccacgcagacccacgtcttcggccaaagaaccccttcttaacacggatattattcagaataaaaactttatttctttttgtttctcagaatgtgagcagcaaggaatgaagaactctcaaaacaaatctagtatttttcgcgtttacagattttttttttcagttttgccggatgttacaaacctaaatcactgttttcaaaagctggatcttctctggttttattgyatcgttaccgtttaaaggaattatatttctctttcaaataaaaaaaattctaagtacgccaatacacaattgaacaaaaggcccaagaacccttctgaaccatcagggtacagaattctttaatataaatacgaacggatggggataaataatatttaaaacttagattattcaatgcttgcaaaaaaatataaataaatctgactgttcaccagcatacacacacggaaagacgtacacttagtcatccttgcacagagagcccctgtttcaaagcgcctttgattttttttctcactctttacaagaagtgcaattaaaaaaaaaatttaaaattaaaaaaagtaatcgcttcccctcgggagccataatgtaagaacaaattcacattgaaaactcgactagaaaatttgttcatataccctgtttctgatcaaagagtggagaaggtaaagggtgcagggccagtggcctatcgaggagcaggaagagataaatatcgctatgatacagccattccagcaaccaagattgctacgtcacataaactataaaaacgccttaccaacgaggggggaaaccgggaaacggagtgcggggcggagaagagagaaaaggaaggaaggaaagggcaggaagaacctaaaaaaaaaaaaa

SEQ ID NO: 546056 - DNA, 620 bp, Homo sapiens
aggttaggacaggcagtctcgggttgaattatagcccctaaattacttaacttttttgagttttagttttttcatctgcaagcaggaaaaataatagcaccactttcataggattactatgaaggttaaatgaaatataaggcatgtaagacacagcaagcactgggcatagagcaagctctcagtaagtagtaattattttattatccccctgtattttctgtgaatataagtctgtagagataaaatcagcagaaatgcatgttcttaattctaagaatttttctcgtagtttttytggaggggttaaatttttcctctatgctttcactttttggaatattttttgaatggccactcatcttttctcttttattttccattaaaaaattctaatttctgtgagctttttatgactttatcttttacttcttttattctgccataatctttcttgttctcaaatggttcttaaaaatagcattttattttagtttcattgctgtaatatcttctcctatctgtgagcatattaattacagtttttaaagaagttttcttttactccctgcattgccttttttcttacagccttctttgtcccatgtaatggttttggt

SEQ ID NO: 546057 - DNA, 2190 bp, Homo sapiens
tatgcaccactcagcccagacacagcttagacctggaactgtgggctctgcagagatgaggaagttcaggcaagtgcaaggtcagaaaaggcaaaggagaagaaaggccatctagtctggatggttccacccccaagcccatatctgtacaccgatattgacttgacatttactatcattctcttactgattaatttaatggtaacttttaggggaaggcatggtgtagaaagagagatactattaaatatgagcaattttattttactcatcaaaaatagctttagtttgtctttaaaactgaattgttttcttttctttctttttttcttttctttttttttttttttttgagacagggtcttgctctgtagccctggctggagtgcagtggtgccatcatagctcactgcagcctggaactctggagctcaagtaatcctcctgcttcagccttctgagtagctaggagtacaggtgcatgccacaacactcggctattttgaaaatttttgtagaggcagggtcttgctctgttgcccaggctggtctcaaattcctggccttggccgggtgtggtggctcacacctgtaatcccagcacttgggaggccaaggcgggtggatcacctgaggtcaggagttcaagaccagcctgaccagcctggtgaaacctcatctctactaaatacaaaaaaaattagccacgtgtggtggtgcatgcctgtaatcccagctacttgggaggctgaggcaggagaattgcttgaacctgggaggcggaggttgcagtgagccaagattgcaccactgcactctagcctgggtgaaagagtgagactctgtctcaaaaaaaaaaaaaaaaattcctggcctcaagcagttctcctgcctcagcctcctaaagtgctgagattacaggcatgaaccacacacctggccttgactctgttgttttttctctctctctgtctctcttaaagtcacaattctgagtcaaggctcttctgaatggcgttggcctgcagaggttcctgcagagtcatttcgatgagctgctctttatcatgactcatgctccttgacctctctcatgttcttagtatggataatataattttgagtcaaatgaaagaatattgggttttcatctgcagtttctactcagtgaaactctcaatcctttaattgaattagatgccacagaagttaaagggcttctctgaaaagtcaccggaagcctcatgatgaatagatgtgcagccccgaactagtccttcatggyccgtgaatcaattaacaccaatctctcctggcttaaaaaatttcatgatttattaggctgtgatatttggtgatgttagcacatgctctgcaagtgacaaggtaaaacttaccttctttgcatttctctgtggcttcccttgtggtcttctgactttttttttttgttacttagggtgtaaacattctttttacatataggagatgcatcctttgtgtatctagtaggaagtactttcttgattgacagaagccaaagagagcaaatattccttttttgctacctcctggcacctggagggtagttacataatgtaggcttggtcaatcggaagctcatgcctaggactttgcatcttgaggatttagtcatgaaagcatcaagcatctggtggcactggtggtgttgagagcccagcaggctctgagcgtcccaaagtggctttgtcagtgatcgcacccttgacagaatatcctgcaaagtggccttggccgggcattgcacggctagacctctctgggttttgcttattttctaagtctaggttcactgaaaaatcattgctatgaagcagattgataaataggagaaaaggcatacaaatatacttaatgtgtgtatataggagccctaagaatgaagacccaaagagtcaagggaaattgtctattttcatgcttatgtccaacaatgtatggacagccatgtagaaataggatgggacaaaaagggtctgatcaaatgctgacagatggagtggggaaacccagcaaggcctgtctgtctagattcttcatagtctctctgagcatgtattccttcctctgcatgcggggcagggtcctctctggaagtggggcggggtgggggatcctgtgacccacaatcaaacaaggtaggtgagg

SEQ ID NO: 546058 - DNA, 553 bp, Homo sapiens
taaaatcaaaagtaagaaaacatagatctcttatacttattcaacatcctaacaaagtgctttcgtaccactatttgattctttctggaaccttaggagacacagatattattacttttgttatacagatgaataaatrtatcataaataacaatgatcacatgcttaaactgtaatacctaaagtaaaaaactagtttggtgctctgtcaaatcaaaccagctggcttggaaagctgattgaaagtaaagaatacagataaaaaggtagaagaaagacatacattttggagtccaattcagacaaagccaacaattcaatattttaattaaattaatctgagtttatttctgttgtttgaaagcaaggtaatttctaataagaaaataaggtaaattatatcaaatagatctaatggattttttttagtgaacttccatgtgatatttatgaactcatttattaattatagatgttatccaaaatgatgcccatacaataatttagtcattctaagcatctcacacattgtcatgttggaaccaaatagccc

SEQ ID NO: 546059 - DNA, 1595 bp, Homo sapiens
ggatcagtggtggtttgtcagccaaaatgctgctccaacatttttcatcttgtaatgaggctgagctttcacacagtcagtgctttggaacaaattgttgccagtgagtgaatgaatgaatgagtggatggatggagggatggatggatggatgaaagagtggatgaatcaatcaagaatgagaaccaagtatctgacctactaatccatctctattcccttagtgctaagcaaaatatattcacataaccaggagccaaaccattttagggcaagatgttcttcaaatttaatgtagacttccagctaccagaaggaaaaaactcactctctcgctctctcgctctctctctctctctctgtgtgtgtatgtgtgtgtgtgtgtgtgtgtgtgtgttcagaaaattctaattattttagaattcatgctgatgattccaaacattttgtaaattaatttttctctctttacctttcagcttggaaggaagacagaagccttaacctccagggtaacatgttgcaatttgttcacttattaatctaacaagaatgcactgaggtgctcattaaatgtcagaccttgtgtgaggttgaggaaatccaaaagcaaaggaggcatgaacctccatgcccattcagaagggcaccaggccttttaagaagggtggatatgcacaatttgaaaataactgatagtcctgacttatctttgcaattaataaggcaatttcatacacattttctactctgatccccagatcaccaatccaattttacaggtgagggaattgaggcaggctgagggaggttgcggctaacccaaaggtgcacagctgaaagtggtagagctaaggacccacccaagtgttccgagaacagatcctgtgcattttccaccacagccctgctccaggatgctagtccctggcactggtaacatttggattcactagagggagatgagctaagaggattaaagaggagtcacacgtcaccagtttgcttgctgccatgagcttgtttgagaaagggattagttgtgatgttgctagtatcaagcaaaatcactcttttttctctgctgttctctggaatttggcatttctggacaaaccaacctacacccaagagttgcaggaaagcaattgcacaataaagaatcttaagtctggaagtgtttctttctccagatcagcagcagagagagcaggtttgattcatggaaataaacacctatctgcaagcctcaatcacaacccatttcatctgaagtggtcatgcaggcattcaggcatctgcaggctgtcctttcctggaaatagtgaggagctgggtactagagctgaaaccctggccatccacatcttggcctcatccttccaaagtgctccttttgtcttcctctgagtgctcacaacattttgaatttctcatttatcatcttttgctctgcattaaagtggttgtgtgattgtgaacacaacttacacatgctcctatgtggtctataagctgcttgaggttcgggtgatgkattcagagttgcttcttcctttcatcaagcacagagtagatgttcaatgaaggtcttt

SEQ ID NO: 546060 - DNA, 650 bp, Homo sapiens
tattataaagacacatgcacatttatatttattgcagcactgttcacaatagcgaagacttggaaccaacccaaatgctcatcaatgatagactggatgaagaaaatgtggcacgtatacaccatggaatagtatgcagccataaaaaaggatgagttcatgtcctttgcagggacatggatgaacctggaaactatcattctcagcaaactaacacagaaacagaaaaccaaacactgcacgttctcattcataattgggagttgaacaatgagaatacatggacacagggaggggaacatcacacactggggcctgtcgaggggtaggggctaggggagggatagcattaggagaaatacgtaaagtagatgaagtagatgatggattgatgggtgcagcaaatcaccatggcatgtgtatacctgtgtaacaaacctgcacgttctgcacatgtaccccagaacttaaagtataattaaaaaaagaaactaaatgtaattcatattaagaaaagaatatgttcttataaaaaaaaagatttcacgtaagtaggagttgargtattgctcctcacaagagggcattagctacgggggtctgtctgcagaccctgaccccagcgatggatgaataaaacgtacactgac

SEQ ID NO: 546061 - DNA, 848 bp, Homo sapiens
gagaattgaaatgtagcagaaaaaacacaccttgtaccatagcagacctacaagtgaaatatgatagcgagccaccattctcgttgtgttttaagcaagcacattactggggttcataaatagaaaattagtttagaaactctgaggtaagtttcttattttactcatcactgcttgactcatgctggctatccatgcccagttatgatctccacatctgaaagggaatgcagagaaataaaaaggaaggaagcccacacagatgatgaaagggttggaaaaagaagaaagatcaaaaggatacaaggagtcaggctgtgaagaaaaacctgagggaatgctttataatgttctagaaatatatgggttattatattgggaatggtaaccagctgttctccatctctatttaggacaaaccagaagaaaatggcttaaatcaaggcaatgacatatttgggttactaaggaaaattgtggaatcttttctagaattatttaaactagacagatatttaatgtacctaggctggctcaagtacaggagtgagaactataatctgatttacaagatcctttttaactccaatttctgcatatactttatcaagacaaatatactaaaatgcataaaggaactattaartattattgaacacagtcaattactccaaatgatagggggcaatagaacgaaaattgctgtaaatcaaaccataatgtgaggcaataggtaagatttttaacctcagaatgcttcagctctctagtggcattgtctgtagaaggagactgtaacagtatctacctgtctaagtgctgtgataataaaaatgagataatctgca

SEQ ID NO: 546062 - DNA, 848 bp, Homo sapiens
gagaattgaaatgtagcagaaaaaacacaccttgtaccatagcagacctacaagtgaaatatgatagcgagccaccattctcgttgtgttttaagcaagcacattactggggttcataaatagaaaattagtttagaaactctgaggtaagtttcttattttactcatcactgcttgactcatgctggctatccatgcccagttatgatctccacatctgaaagggaatgcagagaaataaaaaggaaggaagcccacacagatgatgaaagggttggaaaaagaagaaagatcaaaaggatacaaggagtcaggctgtgaagaaaaacctgagggaatgctttataatgttctagaaatatatgggttattatattgggaatggtaaccagctgttctccatctctatttaggacaaaccagaagaaaatggcttaaatcaaggcaatgacatatttgggttactaaggaaaattgtggaatcttttctagaattatttaaactagacagatatttaatgtacctaggctggctcaagtacaggagtgagaactataatctgatttacaagatcctttttaactccaatttctgcatatactttatcaagacaaatatactaaaatgcataaaggaactattaaatattattgaacacagtcaattactccaaatgatagggggcaatagaacgaaaattgctgtaaatcaaaccataatgtgaggcaataggtaagatttttaacctcagaatgcttcagctctctagtggcattgtctgtagaaggagaytgtaacagtatctacctgtctaagtgctgtgataataaaaatgagataatctgca

SEQ ID NO: 546063 - DNA, 589 bp, Homo sapiens
attcatttatgaagtttctgtggctgtttttgtgctacaatgacaaagaggtagcactrccagcacagcccaaaatatttactattgggtgctttacagaaaagtttgtcaatccttgttccaggacagagctcccaagtgacagtgagagataaccaacctttctctttctttcctgactactgtagtttgataacttcatttgaaaagcagctttttgcttggaagggtagagtagtcaaataaagggctaccctagaataaggtttatccaaccttatctgaaaggctaggtaatccagcaaggagaaaaaaaaaaatccatgacatttattgatagtgctgttctgctttctggagtatcatcaaaatgctcccgaggaaggtaaggaagcagctagcagttttaggtgtctgccacataaaagagaccatgagcccctcacactcctgacaaagatgattcaaatgctgcagggtgtatgagaaacacatcaaagatcaccaaaagggtctgggccaagattccagccagcagaataggaatttcagaatacgataaggagatgttaaggaaggtcaggcagta

SEQ ID NO: 546064 - DNA, 589 bp, Homo sapiens
attcatttatgaagtttctgtggctgtttttgtgctacaatgacaaagaggtagcactgccagcacagcccaaaatatttactattgggtgctttacagaaaagtttgtcaatccttgttccaggacagagctcccaagtgacagtgagagataaccaacctttctctttctttcctgactactgtagtttgataayttcatttgaaaagcagctttttgcttggaagggtagagtagtcaaataaagggctaccctagaataaggtttatccaaccttatctgaaaggctaggtaatccagcaaggagaaaaaaaaaaatccatgacatttattgatagtgctgttctgctttctggagtatcatcaaaatgctcccgaggaaggtaaggaagcagctagcagttttaggtgtctgccacataaaagagaccatgagcccctcacactcctgacaaagatgattcaaatgctgcagggtgtatgagaaacacatcaaagatcaccaaaagggtctgggccaagattccagccagcagaataggaatttcagaatacgataaggagatgttaaggaaggtcaggcagta

SEQ ID NO: 546065 - DNA, 510 bp, Homo sapiens
caccagataccgaaagtggtttctaaccaacactggtgaatggctggatctagaactattttaccaaataaaacgagttgatctgaaaccttctcttgtgtggaccgagggcacgccttcattccagcctgcccaaggtcttaagactgcctaacctcttccctgccaagacccaggaattttgctaaggcatttttcatggctcctcakccaacagaggcacattatgagttaatgagagctttgcccctcaaataaaagctctctgccaaatgggaatcagggcaaggccaaggtggagagatctgtcagcattcatggttcctaaaagagattttctcaactaggcggacgagggccccattcaccccccatggcatgggagttcatgcacaattctgagaaacatgttgggaggcaagcagactgatgccagggcttgggcaggcagcatcacccatccatcctgagtagggatatgtaaggcctggcattctcagcaggacgcct

SEQ ID NO: 546066 - DNA, 1205 bp, Homo sapiens
gtcaatttgaacctttgttgcaagaatcaaaatgcaacaactgaggtagattcacatctgtatttgaaattcgactgtaggacttagattccatttggtatgtacacacacttacccccacttggacaaaataagaaaccgtgtttgtgggagactgagggatagtggctgcgggagaactgagaaagagatggaaaacagccccaaggaaggaggcctaatagtattgagaggtttgcttccaggtgatgcatgttttcgcagcctcggagtttccacttgagagtattgctcccaaacaagttccaataaatatttgctaatcagttaacattacagatatgagcaagtgttgtggtttctttgttgttgttgttgttgttactgtgtttttttttttttttttatctgttggaagtctttttacaacaggaccatttaatatacaattttatcattctaatatgatgtttaccaaatcctccagaattaagcctataaagatgggggttggatggtaaagtaatagcaaaaatgtataaccatgcataatggataacaaaactgaagaatctcagcattgacaccaacctatgaatacaatatatactgattgaatttgatcgaaataaaatcccgcagggagtgaaatcccaaatatggcttagaccttggcagcttttgagatcagaaaggaagagggaaatggacaacagggtgtcaaattgaagtcgacaatagaatatcctggcactttgtgccagtgccaggtagtttgttgcttgatgcagatgctgactgtatcaccacctgggagcatgagtcattgccggttcctcacatcattcccaccatctgtctcggcaagcttggcagcacagccagcatgtgaaggaggctgtggggcagacagaggcagaaccacactggcatatctggaggctccaacctggcaccactattgccgctggttgaaaacaaatgtctaggaggctcctggcctcagcacaggcaggataatatgaatatcctgcacaggcacagctaataagaatatggatggggaaggyaggcaagtcaacagtactaagaactgatagcatattcttttattgtccctaaggacaccgtttttctcattcactctgtaatatccacaatcgcaggctacttcctgaagagattgtgccatcaataattaagca

SEQ ID NO: 546067 - DNA, 1232 bp, Homo sapiens
taaaagaggctgtcaacatgtaaggaatacatcaccaaggcaaatgatatgtggcctcatggcattcagttaaaaataatggcaacaatttacaacaatcactttcaaatcaattttgatgcaaattatttttccattaagtagaaacagaacatcaaagtgcacaacaatatgtataatatrctgcattttgtgtatagagggttaaaaaagtaaaatgtgtgcttcagaaactctagaaagacatgcacaaaacactcacacagcccaaacaatggtcatgtgtagtcaggtgacagatatgggtggatggggagtgaggccaacagctttaggcatttaaaaattttgtttgattttggaaccatgcaaatgtattacctatttacaaaataagattttataatatgccttaatgacactccattggatggatgttcattttctcttacacttctttaatccaattatgcttttctagaaactggacaccactgatccaggtcaaagaaagaatgatatgtaaaactaaatgagatatttcctgacgtatttttaataattataaaattgatgtcatattaataatttctccagtgacttttgagatacctaccaacccatattaaaggcaatttttgaactgttcttgggtcagcttgatcccaaagctgaagagattgaggaaggatgtttctcccagatggtaaattattgagtaaagaaattgctcagtttaatcacttatgaaggctaggttttccagtataataaaacaaacagcataccataatcccttgttaacttttcaagctgctcagcaagcatgttttggtgaatatgaacagaaacatatcaagtgtgaataaaaggaaacaacaaaaccttgtcagtgtttttgaaaaagaatactgctatacctgtgttttattttaaataaacaggttctgtcatattttatcttcttgccagcaaatgaaggacattgtttcataaagcttctaaaatgtacatgaatatttaattaaatcatatttccttgagaaaataaagttcattcgcatttatagcagacagttgtgaggagctcataattgtcataagaccagggtagccagtaccggttgcttgtggaacaaaactcctcaatttttaaaactttttttaaaaaataaacatacaatcataggtattcatttactttaaaaattctaaagatgaagaaaattatt

SEQ ID NO: 546068 - DNA, 634 bp, Homo sapiens
tagtaagaatttatttcaatttagaaatatgggtgttctaaactttttttaaattaaaaaaatttattttttcctgagacaaagtcttgctctatcacccatgctggagtgcagtggcacaatcatagttcacttcagccttgacctcstggggacaagtgatcttcctgcctcagcctccaaagtagctggaaccacaggcgtgcaccaccacccctggctaattatttttattttttgtggagatgggggtctcgccatgttgctcaggctggtctcaacccctggcctcaagtgatcctccctccttggcctcccaaggtgctgggattacaggcatgagccactgcgcccagccagaaacttgggtttaaaatggactttgcattataatgagatgggtaattcacccaggatgaatccagccttcagcttttgctttctttttttatttttatatatttattgatttttgagacacagtctcactctgtcgcccaggccggagtgcaatggagcaatctgggctcacttcaacctctgcctcccgggttcaagtgattctcatgcctcagcctcccaagtagctgggattacaggcacgccaccacacttggctaattttttgtatttt

SEQ ID NO: 546069 - DNA, 545 bp, Homo sapiens
acaagcaaaagccccctctacctagggtactgccctgaaccgctctcccagaagcgacctcgacctccatgagctcccgtctaccccacaatgtggcctgacactcaggcttcaccaggtccttggagcactgagggggaaggtggtgtcagacccattcccagagtgaccccagatgcctgggagaatacaggcctcaaccaccggtgccacacagtgccactccagcacctccaggaaccccgattccgcattggggcacggtatgtccacaggcctccccagaatctcccacccgctccgtccacctacctttctgagaggctgcctgcracttctgtgcttcctttcttatctcagccaccttcttcctgtagtagaggaattccctgctattcttatcgtgcaaaaatctggagaggaggaagtttgcagaagagaggggaaaataagtatctgtgacaggcatatccctgcagcttctatcgtgcaaaaaaaggcaggctggcgagcagggacccgaaagcaagtctccgtgccacatg

SEQ ID NO: 546070 - DNA, 575 bp, Homo sapiens
ctgaaagtaggaagatgtttccaaaatactaatgaaaataaaagcaggtcacacaatggtatgtacagtataagcatgttgggattttaaaaaagaaaaaactgtttgggtgtttgtaaatggaagcttatttatcaagatgttctctctaggtggtaaaatggaaaggattttagctttattcaagttgcttatacataatatctaaattccctagaataaattgatgatcatgaactctcaagacaagaactgggcctcattcttctttgtaattgcagcacccagacaggtgccaggtacaaatgggcactcactcagaagtggttgttgacccagagaatggtctgcaatattcaatgaccacaggctcaaatggcacattgcttagttccgtgtgattgcagccaagttttagacaatatcaactasgtttattttactgactgattcgagtgtgctgggtgggttaattgtcacacccaagtagaaacataagagcaaattcctatcagtacatgaggcccctgactgggttgaatcttgatatgactcaggttggtagctagagtttg

SEQ ID NO: 546071 - DNA, 520 bp, Homo sapiens
ctgcttaaatgccctgaataatttagatacctgcgggtgatgggagagacggtgaatactgaatcttcttcccaagcaaaaatacccaagttktaagttttagctgagagcagaagtataatttcttcttttagtgactatggggttggttgtgctatttgccttcccttatgttaacctaaattttgactctttgagagcatcctcaagtcaaatgagttttatcttctagcaaaaaagaaaaaaaaaaaaagaggttatttctctttctttaatatttagggagggcagactgctctcccttctcttgttacccattttttctctaggaagggttgatgatatcagtggtctatgtactccagttcccttctctgcttaatgtaaacctccctctcctgcttccattcattggatggaaacctctatgtcttggcatatacccggtcatcacttcacactacactttctattgaacctaccaaatgagacttaccattctaggttaaaaaaaaaaact

SEQ ID NO: 546072 - DNA, 678 bp, Homo sapiens
tgttatacctgctgagtactgcatcaaattaaaaacccrtatcacagtgctcctttaaatctgaccaggtagagaaagtgtttctcagcaatctccaaaactggtaggaaaaaggttattatgtcagttaatcaccacatcaagagtcctcctaaggaagtccttttcagactttccacagcttcttaggcccctgtgtggcatctgccccctgcctcctcccctgggtacttgccccacctcctaggcctctaagccatcccaagatggggtcatttgaggggacttcacagtctctttagtatacactgggaggttgtgttgacaggccatcagcctaagcagtagaaatcttcatttaacgtgttctcttgtagtaagcatgtcctttttattttctgtatttttgatgttttgacatctggggccttgctgaccctagactagccaactctagaccacaaccacctcctatctggggctcttgcgctggactgcaaaccgtaaatagtacattcctgcccttcccaaagcagaaggggttaaaatcatctcactaccatgactctgcaagtcctctgatgttccctttctcccatccaagtactagccaggccctgccctgcttagcttctgagattagaggagatggggcatgttcggggcagcatagctgtg

SEQ ID NO: 546073 - DNA, 1874 bp, Homo sapiens
tgtaacatcccaatatacaatttgatgtggtcatctacagccttgaccaagcaggagagggacagggtggcacatgcaacttttgaagtaatacctggtgacagggacctcttgcctagcactctctaggccactgcctgctttggccacactgcaggaacagtcctgctctttgagctctgatagaatcccaggctggggacatttatgcttgcctcgctacagagctataggatgtgtcaggggctatggtcacagcagatattcttttctctcttatcaacttcctaataggtcagctgattttggttccatgcggctgcataggatgtcctgattgtgttatgggtgatttcatttttgaaaaggcattctgaggcatgatggattctggacctgggcacatgctgctccctttccctggaatatccctatcaacctctctcccacaccaccctctactcattcctctgtcagctttgaacactttctctgagtgttctttcctgcctgcacaggactggggtaggcaattcttctctgggtcctcaaagcccctggtagcatcacaccatgttataaatgtaattatgtttacttgaatatctctccctctctgctgtagttccctgagtttctgggcttatgcttttatcatttcacctgtcattccaatcagacaaaaaataaaaccataggtgtcagacataatttcatatttcagcagagtgatattggtcaatcaactcattaaatctttctaggtgttggagggccagatccaatctagatacctgacctgtcttggttgtcctacatagggttaataaatgacaacagttaaatcttgtgagactgcatggctgaatttctagcttctctcaaaagatctgattggccacccctggtctgtgtttctgtgtggcaacaaccagtagagcaacagccattcagccattcagaatcagggtcaggattagggtcagggttagaataagggtcaagctcagggtcaggataaaggtcagggttaggctgagagtcagggttagggtcaagattagggtgaaggtcagggttaaagttagggtgagggtcagggtcagaatttgggttagccccagtgagccctgtgtagaaactgtgtaagctcctaagtcacctgagttccctggctcacctctgagactgcagtggattggatctaagctccttaatgcttttttactttcacagtcaagaaagtgaaaaaaaaatgttgccaatcaaactattgtacaatgaagaatggaggatgcatcctaacttcagggatgttgtaatgtgaaaaatgtatatcttaggattttagtacatggtacctgcrtggctctggcagaaatcagagtttgtcaaccttggaccagatgatgcttcccattttacagcaaccttgccctcgagttcagttctaaacagaagagaatctttgtatttacttccaaccgtcttgtattgcttagtattttataaaggcattaattataatgaaatatattcatacatattattttgtatgtatcttgatatatatcatgcttcatctcacattatgctaaagaataatcaccaatggtatccatatgtatcaattatgaccaatataaaatttaaaaataacttgaaggctgtagttattagaaaggccatgaggtgatagtaacatttaccctagttcacaatcccttatctttgattcccaaaatcctaaaagctctgaataccaaaagtttttttaaacttattttctgtgattcatgtagcagaaaaatctattgaactttttaaagcttaaaaaaatctcatttagtaatcctaatgcttcattgcagaaa

SEQ ID NO: 546074 - DNA, 686 bp, Homo sapiens
agtagctgggactacaggtgcatgccaccctgcccagcattatttttaatatttttaaattataagtgttttctaatttccaatgttatctcttctgtgacctacatattttttaatttgctttttttttatttccaaaagtgggaggtatgttttgttttctgttgttttgtttgttcttgttttctagtgtagttgtgatcagaggggatgaactgtatggtaatggttttttagacatttttgagattattttaggttccactacgtagtcggattttgtgaagttccaggtgtgtttgaaaaacatattatgtgttctccagttgttttgtgtaatgtgtgtgtatayacacacacataaaactcttagtaatatatttctatattactcttagtgatatattttgccttaaagtctgttttgtctaatagtaccacaaatataccaactttcttttgattaatatttatctggtatgacttttccagtcattttactttcaacattcctgtgctcctttatttcagttatgtttcttgtaaatgatataatttacaagaagtttttgttaaaaaaacattcaggctatgatcatcgcttttgaactagagagttttgttgcaattgttgtgattacaaaactgcttggtttcattttttccaccttattttatgttttgcc

SEQ ID NO: 546075 - DNA, 1125 bp, Homo sapiens
caataatagctaatatgtaaytttttctctgtgccagacccaggccaagtgcttctcataacttaaaacaatgttattaagtgagtactattatttacttcattctacagactaccaaagagtatcacagacattagttaattcattcgggatggaatcaagatgctaattcaggctactgtctgatagtgaattcacttctttttagatttaataaagatgcttgatgtattccaaaaaaaaaatgaaatagtttttaacaagtgacatctaagaaaactttaaacagtctatatttttggtccttacaatgtttttcaaatgtttttgtcccatgaccatctgtatgagaatcactcaagtggatttgttaaaaatatagattattgggtccttcccctaacttattaaatcaaaattctgagattgggtaagaaaatctgaatttttaacaatcattttggtttattccgatgtacatcaaagtggagcataaattctaaagggaaagattagatttcattagatgactaagttggacaacaattgtagatggacagaatatagacaaaggtatggcagctgaaaatatggcatgctggggatttgaaagcaaaagtttcctggggtgtggggtgcatataaggaagtagcaagatataagccttgaaaaagtacaggtcaaacttcattgagccttgagtaaagttgttaggactttgaactttctaggctttatttgaattgaactatttggtgtttgggggtaggaaaatagcctattaaagcagaattttggcaaacttgtcttgtagccattaagttggttggaatgtggatggattgccaagtgctgacataattaagcctcttatttaatgcctggattaattaatatacatcacctgatgatactgagtacccagctatgaaaagattaaagtaaaatacattgtgggaaaacaaaatacaacaaaattctgtgtagacatttcctgagtatagatgttgagagaggagtccaaaagacaagagcttgggtatctgagtgtctggaccaatgcagcatcatttagtaggaagagatgaatctgaaggagacgctggtttaatgccaggtggtgg

SEQ ID NO: 546076 - DNA, 1296 bp, Homo sapiens
cacctgccttggcatcccaaagtattaatttttttttttttttttgagacgaagtcttgctgtgtcgcccaggctggagtgcagtggcccgatgtcggctcactgcaagctccgcctcccaggttcacgccagtctcctgactcagcctcccgagtagctgggactacaggcgcccgccacgatgcccagctaattttttgtattttttttagtagagatggggtttcaccgtgttagccagggtggtctcaatctcctgacttcctgatctgtccgccttggcctcccaaagtgctgggattacaggggtaagccaccacgcccctccaagtattaaattttttatttaaaaaatctcccctctccaaagatctcccagcatttctgcagaggtctctacctaggtaaggagaagaaactattcttggccgggtacagtggctcacgcctgtaataccagcactttggaaagccaaggttggaggattccttgatcccagaagttcgagaccagcctggccaacatggtgaaaccccatctttaccaaaaatacaaaaattaggtgggtgtggtggagtgtgcctgtagtcccagctactcaggaggctgaggtagaaggatcgcttgggcctgggaggtcaaggctgcagtgaaccaaggtggtgccactgcactccagcctgggtaacagagtgagatcctgtctcaaaaaaaaaaaattatttgtgagggtgaaatttaaatacctttgtgcatagctatcagttattctttgttttaatatttagtttattgtgaaatataacacatatagaaacatacataaaacaacacacagggccaggcccggtgggtcacgccttgtaatcccagcactttgggaggccgaggcgggcggattacttgaggtgaggagtttgagaccagcctggccaacatggtgaaaccccatctctactaaaaatacaaaaattagtcggatgtggtggtgcatgcctgtaatcccagctacttgggaggctgaggcaggagaatcgcttgaacctgggaggcagaagttacagtgaaccaagatcgcgctactgcactccagcctgggcaacggagtcagactgtgtctaaaaaaaaagaaaaaaaatawaggctgggtgtggtggctcacgcctgtaatcccagcactttgggaggccgaggcgggcagatcccttgaggtcaggagttcgagaccagcctgaccaacatggagaaaccccatccctactaaaagtacaaaattagccgggcatggtgttgc

SEQ ID NO: 546077 - DNA, 631 bp, Homo sapiens
atgtcctctgtttctctctttccatggaagactctctggggtcaggcatgggtgatggaagggatgaaaarcaggcccacctaaccctgcttgcagatctgactcctgtgagcttttgatgtgttttcattgttccttgtgcacttcctgactttctgacacaagatgtttcatgttcaacctgtagtttcccctccccagggccagaatgaactgtttctccaagcatgcctggtttctttgaatgaagaatggtatttagaaaccaagatctagaactaggtgtgttcactgccagatttgtcatggcctccaggccttctaagcagacagacctagattctcatttttttttaatgctgcatattattccattatgcagatagatataacagttgacttcagcagttctccattgatggacatttaagttgtttccagttgtttgttattattttttaaattctgcagcaaataacctcttgtacatatgtcattttgcaaatgtgggcatatttctgaagttagcacttcttgccttgattatcctaatagcctcctaacctgtttctttttccttattttcattcatctgtaattgctgtgctggcttaaacgcttttaaaaagta

SEQ ID NO: 546078 - DNA, 631 bp, Homo sapiens
atgtcctctgtttctctctttccatggaagactctctggggtcaggcatgggtgatggaagggatgaaaaacaggcccacctaaccctgcttgcagatctgactcctgtgagcttttgatgtgttttcattgttcyttgtgcacttcctgactttctgacacaagatgtttcatgttcaacctgtagtttcccctccccagggccagaatgaactgtttctccaagcatgcctggtttctttgaatgaagaatggtatttagaaaccaagatctagaactaggtgtgttcactgccagatttgtcatggcctccaggccttctaagcagacagacctagattctcatttttttttaatgctgcatattattccattatgcagatagatataacagttgacttcagcagttctccattgatggacatttaagttgtttccagttgtttgttattattttttaaattctgcagcaaataacctcttgtacatatgtcattttgcaaatgtgggcatatttctgaagttagcacttcttgccttgattatcctaatagcctcctaacctgtttctttttccttattttcattcatctgtaattgctgtgctggcttaaacgcttttaaaaagta

SEQ ID NO: 546079 - DNA, 631 bp, Homo sapiens
atgtcctctgtttctctctttccatggaagactctctggggtcaggcatgggtgatggaagggatgaaaaacaggcccacctaaccctgcttgcagatctgactcctgtgagcttttgatgtgttttcattgttccttgtgcacttcctgactttctgacacaagatgtttcatgttcaacctgtagtttcccctccccagggccagaatgaactgtttctccaagcatgcctggtttctttgaatgaagaatggtatttagaaaccaagatctagaactaggtgtgttcactgccagatttgtcatggcctccaggccttctaagcagacagacctagattctcatttttttttaatgctgcatattattccattatgcagatagatataacarttgacttcagcagttctccattgatggacatttaagttgtttccagttgtttgttattattttttaaattctgcagcaaataacctcttgtacatatgtcattttgcaaatgtgggcatatttctgaagttagcacttcttgccttgattatcctaatagcctcctaacctgtttctttttccttattttcattcatctgtaattgctgtgctggcttaaacgcttttaaaaagta

SEQ ID NO: 546080 - DNA, 534 bp, Homo sapiens
gtttatgatctaccagcaacatcatggtgtactttttttttggcgcgatctcggctcactgcaacctccgcctcctgggttcaagtgattctcccacctcagcctcccaagtagctgggattgcaggcgtgtgccaccacaactgactaatttttgtatttttagtagagacaggatttcaccatgttagccaggctggtctcgatctcctgacttcaggtgatccacctgcctcagcctcccagattcctgggattacaggcatgagccactgtgcctggcctgtggtgcacttttgaaaccaccactcaagtgagttctattatatccccatacctggatgaatgagagtgagcagtcttttcagtgtagtgcctgaggaaaaaaatcagtgaaatttccgagccagctgcagactgccttcctcatgcctgttcwcttgccttgtgtgtgtgtgtgtgtgtgtgtgtgtgtgtgtgtgtgagtgtccacttgggattgagtcccaccactctggaggttaggaatggttca

SEQ ID NO: 546081 - DNA, 600 bp, Homo sapiens
tgtttgctcagcccggagcttccggttgtcaccagctgttggaggagcctggggctgggcatggttagcagtatcctggctttcatggcttggagcctccasgaagacctatgggcccccagtctgcctgctgcaccccctctcagtccctccatgccactccaccccctccctgttcagctgcccggtggctgtaccaacagccatccttgatcttatctaccttccctcttggcgtcctccctggagccagcactggggaggcggggagagggccagactggggggatagctgggttttagagtccttgtggtagcagtctggccaccccttcagatgccctctggcagctgaggacagagtcgcttgtgcaattcttatgctgtctgttcccctcccagctctgagagccaagaaaacagctccttcctcctcctcactcctagccagcccagcctagcccttggcttcctggagcccctgtccccattcctaacccactgctccttcctccctggaccagacacaaggcttcagcagcacctgggaaaaatgcctccggcgaggacgaggtgctgctgggtgcccggcccaggccc

SEQ ID NO: 546082 - DNA, 553 bp, Homo sapiens
gcaaaatagtgatattagttcctaccttctttacctcatagagtctcaaagattaggtaagttaatatgtatgaaaaggctttgaataatgtaaagaaaactgtatgcaggaggtggtaacttggtgacatctctacgtagtgacacccactagaagaatgtgaagtagtaaagtgggggaatgagatatwttaggtatggatattagcttgagttatatgtcagaggtaaacgagaaatttgtataagaggaatttcagaaagctttggtaaagtgcaagcaagggtgaggtgaggtgtatggagagaggtgtattaacaggtggaaaagaagtggtgtggccaggcgtggtggttcacacctgtaatcccagcactttgggaggccgaggcaggcagatcacttgagctcaggagtttgagaccagcttgggaaacatggtgaaacctgtctctactaaaaatacaaaaattagctgggcatagtggtgcatgcctgtagtcccatctactctgggaggccgaggtgggagaattgcatgagcctgaaagt

SEQ ID NO: 546083 - DNA, 553 bp, Homo sapiens
gcaaaatagtgatattagttcctaccttctttacctcatagagtctcaaagattaggtaagttaatatgtatgaaaaggctttgaataatgtaaagaaaactgtatgcaggaggtggtaacttggtgacatctctacgtagtgacacccactagaagaatgtgaagtagtaaagtgggggaatgagatattttaggtatggatattagcttgagttatatgtcagaggtaaacgagaaatttgtataagaggaatttcagaaagctttggtaaagtgcaagcaagggtgaggtgaggtgtatggagagaggtgtattaacaggtggaaaagaagtggtgtggccaggcgtggtggttcacacctgtaatcccagcactttgggaggccgaggcaggcagatcacttgagctcaggagtttgagaccagcttgggaaacwtggtgaaacctgtctctactaaaaatacaaaaattagctgggcatagtggtgcatgcctgtagtcccatctactctgggaggccgaggtgggagaattgcatgagcctgaaagt

SEQ ID NO: 546084 - DNA, 619 bp, Homo sapiens
attcctgtgatttgtacggttttcatataataaagccaagaacatcaattttttttcaaaatgataccagatcttatatgtgcaattttgagaatttgcttccgtaagtcagcagataaaatcctcatccctggcttttcctgctgctctagtgaacttggatttaagaccatctcctcagttcccctctgtattagtccattctcatgctgctatgaagaaatacccaagactgagcagtttataaagaagagaggtttaatggactcacggttctgcatggctggggaggcctcaggaaacttataatcatggcagaaggtacctcttcaggtaccttctacaaaagagagattgagtacaagcaggggaaatgccagacacttataaaaccatcagatcttgtgagaactcactcactatcatgagaacagcagtagggggaaccgcccacatgatccaattacctccacctggtcctacccttgacatctggggattattacaattcaaaatgagatttgggtggggacacagagccaaacgatatcattccaygcctggtccctcccaagtctcatgtcctgacattttaaaacgcaatcatgctttcccaaca

SEQ ID NO: 546085 - DNA, 549 bp, Homo sapiens
gaggatcagaccattctgaaaacatgaatgttgatgtggcaacggagtataagaagttaattttaaattttctaaccaggtaataaagacatataggtatctttctctacctaattaatgttagacttacttcacatgatttcttaggtctaaggtgaaaaacaaacatttttattccaacccaaaataagtcattttctttggccgaaaacaatagttcttggtaatttcacattatatcatgcatatagcacaaccaggcaggctgactggttgggcagagttcataacagatacatagggatctggttaactgtcacaagtagccattttttaaaaattctcattttaaaaattctctgtttgactgtaagattctataattcttagaaatagctctttaataaggcctgttgtattaaatggttttttaaataatraaagtagcaaatgtcttgtgattctctcctgatgcgtttttcacaaaaatcatcaggaatctattgagatttcttagaatcaactttatgtcttgtttaatttttgctc

SEQ ID NO: 546086 - DNA, 1080 bp, Homo sapiens
aaaattagcctggcatggtggtgtgcagctgtaatcccagctactcaggaggctgaagcatgggaatcacttgaatcccggaggcagaggttgcattgagccaagatcgtgccattttactccagcctcagaaaagaaaaaaaaaaaaaagtttccttttactctgtgactcctctgaagacagggaaagaawactcagtgccagcttcttggggagatgattccaatgctttagttctgcatggacatgcaggaaggaacctcctcatgactaatcaatgcagcagtaccacttcattcactccccactggagatatgtatggagcagagctctcatgacctaaattataagccaagacaccaaccttggtcctgttgtgtagctcctagcaaagctaacttttctagaaaaaataattaatcagtaactacaaatagaacagaatctggaccacccattaaatctgtgtgatgtaacaaggtttagaatattgagccgaactcacaccaatcacagacccgacaaggtatcaagcttttctaataatatcagagacacaggtaaccacagggcacaggttgggcagggagaggatggcaccaccagtgccactaccaggtccttcctgctgtgtcaggacacgcactgacccagtttaacacgtgtcctcgcagaatggtgtgcatttacaacacttacaaatagggagcctgggattgacagaatagtggcccccaaagatgtctacatcctaatcccagcaacctgagactgttacctggcaaaagacactttgcagacgtgaatagggttaagaaccatgagaaggggagattgttgtgattttcccagtgggcccagtctaatcacatgagcccttaaaagcagagaatgttctctggctggagtcagggagatgcagcagaatgagagatcacggctggctttgaggatggagaaaggaggccacacgccaagaaatacacacagttgctagaagctgggaaagatcctcagctgacaaccagtcaggaaacaggacttcagtcctacaaccataacaaactaaattctgcaa

SEQ ID NO: 546087 - DNA, 555 bp, Homo sapiens
gtcacccatattttaaaacatttataagcctcaatttttagatattggtattttgagtctggatttgggaatgaaaaaaatgcacattttgttcctatattttcgcattgtatactttgaagagcagacacaaatgtcttaacatggtattcctgaaagttatcctcaaatactggggtagatactaatttctttttaatatactatttaaaactgcaaaatcaattattttactctaaaaattaacatttttgtgaggctggaaatgaatgaagtcattttgattatttagattaccaaactttggcaaaacrtttctcaatggatgaataagcagctttgtgttttatttaaaacaagatagatgcatatgttaatattcctagtatttcaaatcagtccaaatcagaatatattctgagcaccttctgtgtaccattgagcactttttgtgtactcaatttaggatactaatggcaatacaagcacaaatgaaagtgtatataaaatggtcaaattcactaaagcacagttggacaaaatttttctgtaagg

SEQ ID NO: 546088 - DNA, 671 bp, Homo sapiens
ggtgaaaccccatctctactaaaaatacaaaaaattagcagggcttggtggcgggcgcctgtaatcccagctacttgggaggctgaggcaggagaattgtttgaacccrggaggtagaggttgcagtaagctgagatcgcgccattgcactctagcctgggtgacagagcaagactccatctcaaaaaaaaataataaaatgataggttaagcaattataaaatgtataaactttacataaaagtgcaaacacacatatcggtatttattgatttaattttgaagttcctatctttaaaaagtatcagttccccaacttaaaaattctcatctactttgtttacattcattttattatcagggaggcctgaatgaaattctttctgggatatttcattatcttgtttatattttatatgttacgtgctgttgtgttatattactatataattttatatatttaacttaatatttaattaatattaatttaatggtaagatagtctttcctatttcaaaattccaatctcatatttgattcaaagtcttcatccaagccaggtgtaatagtggtaccagaggcctggagcagaggtgagaccaaagtgaggggagcttctatctcacacacttaccttcttttcttctcagactcctctgaattgaaggtgg

SEQ ID NO: 546089 - DNA, 647 bp, Homo sapiens
taaaggcagatcattgtgttaaaagaggtatgggaaaagggctgtaagggggaaagggtacacacctggcaaggctgctgtgaggattagctctgttattttatgttcagaacactgccyggcatatagtagctgccatacaagagttaatgtgacatgtagtttagggaagttgaaagaaatggcaattgggttgggtcttgaagatgtgtgactttggacaggcagaaagaatatatctcgtaaagaaagaaagagcaaccaattgggagaattttctccatgtcagtcaatgataatggcaacaaagattaggtggactgtgtacttcaaaatgggaaattttccaaaatggcatgggagtaatagtggtggcagtaggaaggctgaaatgttcctctctccctgaccctggctgtttctactccatacagcaaatagagaaggagaaagtgaacacaaagaactgacatctcaagagaaaaccaaggcaagtcgagaaagggaaggggcatttgagaaacatatctgtggaatcgctgaagagctggtccaccatgaaacaggggttccaaaatgtagagtataagcaactagtggaggtgctagaaacggtgagtgaactgtagagagagatctctgagagt

SEQ ID NO: 546090 - DNA, 562 bp, Homo sapiens
tctagttactggtacataacgtacctctgaaaatattactaagcaattaggacagagttgttttatgagattgacagtgttcttttaaatgccacctatccagtgcacatagttgaatttttctactttgcaggaatttgtgcaatttctccaaataagaaatatttggaggactctagcatggcagaaaacctcagtgggtctgaattgtctaggaccatacatcggaaggatgatgcttcttttctatgttagtgcttagtctctgctattccacatttaatgctttctctgtctccttaaaaacatttccaaataaaaaattaaagaaaatctgataggtatgcacttgcagacattgcttcaacattttgtattaatatagaaccattggtcagtaattatgctgaatatgatttagaatagaaactgaatttgaatcttacctgttacctgtacatttcttcttcaaaggaaaatatattttgtgtacatacacacacaygcgcgtgcgcacgcgcacgcacatatataatgtctattatttctgtaattgattctg

SEQ ID NO: 546091 - DNA, 522 bp, Homo sapiens
tggacacgtatcttttctacatatatgtttattgttaaatgcatattttatatgtttacaattacagtcttacatacactgtttatattaactctttatcagatcaagtaattactttctctctgtcaactgaaaattgggtttttattaaagcagctaatgtttctctaatttcctttatccaggttagaaagtgtctatctcttggttttacagatcaaataacctataacctcatcaaaataaagcatatttgctactaattacatttagtatatagtgatattaaattaattttccatgaagactctattactgaggcttcatttagttaataataataaagattctgggagtcttagtcactctcttgttgttatagcagtgcatagcttttaaaagtgaatgacttgatgttcaattgcgttttataaaacatcaaggtgcatttactttgccttgtataagaaaytgatgagtatgtgagatgaggttaatgcaatgggtaaaatacatcaattc

SEQ ID NO: 546092 - DNA, 763 bp, Homo sapiens
gtaaatatgtatatacctatgtgtatatatgaacatgtgtgtatatttaattaactatattgaaatgatctgtttcaatattcatttatttaattaagtgtccatacacccttgtggaaatggcctgggcttgggaacaatataaattgagttgaaatcctaggatttaaagtgctaatactagcaaaaagaagtcacttgatctttcaaatctgtttattcatctctataaagatgctaataatagaattcttaagtgtttgtgatgattactaagattacttaagtaatgtacrtcagaagcacctagcactgtgtggaacatggtagatgctcaaaaatgttaattccatctgtttcacatttattttcctgatctgtacaagacctgccataggtgtcctggatacatagaccagtcctttcaggaagctaagaaaaatgacatgggaaaggcaccgagtatttcattgctcatcccacgaggagatgaacttaaaactgttctaaacaccatctatcaaagggcttcagattgctacattgatttttccttgtattaaactattagatggagaaaaccatatattaatgtttagttaaaaaattttgtaacctttgaggcaaggaaattcaatgataatcagataggtttataggataatatcatggggtgggtagtgatagagatttttgctggctggtgagttctgttagctgcacatgtatagctgcacttgttctaaaatggggtgtgttgcaa

SEQ ID NO: 546093 - DNA, 763 bp, Homo sapiens
gtaaatatgtatatacctatgtgtatatatgaacatgtgtgtatatttaattaactatattgaaatgatctgtttcaatattcatttatttaattaagtgtccatacacccttgtggaaatggcctgggcttgggaacaatataaattgagttgaaatcctaggatttaaagtgctaatactagcaaaaagaagtcacttgatctttcaaatctgtttattcatctctataaagatgctaataatagaattcttaagtgtttgtgatgattactaagattacttaagtaatgtacgtcagaagcacctagcactgtgtggaacatggtagatgctcaaaaatgttaattccatctgtttcacatttattttcctgatctgtacaagacctgccataggtgtcctggatacatagaccagtcctttcaggaagctaagaaaaatgacatgggaaaggcaccgagtatttcattgctcatcccacgaggagatgaacttaaaactgttctaaacaccatctatcaaagggcttcagattgctacattgatttttccttgtattaaactattagatggagaaaaccatatattaatgtttagttaaaaaatttkgtaacctttgaggcaaggaaattcaatgataatcagataggtttataggataatatcatggggtgggtagtgatagagatttttgctggctggtgagttctgttagctgcacatgtatagctgcacttgttctaaaatggggtgtgttgcaa

SEQ ID NO: 546094 - DNA, 544 bp, Homo sapiens
catccaaaatccaagaggaaccgcaaaaccacactgggttgtagacaaccagtcctgaatgaggctgaggccggggatgccacttgccccctccttctaggctgggcttcggctgggctcaatcagggtcaccgctgccctgtgtggagcagtggtgggaacccgctttctgtccaccagcctctcctgacccccacaactcctcaatcagctctgcgggctgggaatacctgctttctccccaggtggacttgagaatgggggatagggagaggcrgtgtggggcatgacatagctcagagggtcagtaacgaatggagactcttcactgcccatgactaacttctgagaaaggggaaggcatcagaggtgtggggaactctagtagctaaagatggcatgagggaggggagagggaggaagggagaaatgtatcactcactgagcattatgttggggaggttcctgtgtcaggagatggagttgtactgcattccttttaacgatggtggctaatatttccgggtgcctttttcagctgtga

SEQ ID NO: 546095 - DNA, 520 bp, Homo sapiens
gataagggatactgaacttgtaagacatgtacttacatactttaaatacatatgattcagttaaccatgctgtgagtaaactaaayccacaaataggatattctttttttcttacctcaagatgcaaatgatttgatacattttatttaaacaacttcctaagtacaggctagagtcaaagtatatatactcagcccaattgcttcagcactttctctgtttctatgactttacagtggtaagtaagaattctgaagttgtaggagttttgaaacatcagataaatactgaagcttaagtacttaggtttgtgcgttttagaatgattgtcagcattggaagcaaaaagttttctacgtaactttcaactaactgaaatattcactctctttgcattccagttaattaaggttttgtcgtgataggtttgtttccttaatttcccccttctttaggtatgtattatgtatcaatttatggtatgtacttaggtatgcaacttaaaacaagttataggtta

SEQ ID NO: 546096 - DNA, 543 bp, Homo sapiens
gaggcagtattcttttcaaattattatactctggcaaggcatactcaaggtacttggttcctttgtactctttccctctgtatttcaggttttatatgaatgaaacacaatgagtaattccttctctttggatccttcaggayattatttaaacactggcatctggtctaagggaaacttaatgctaagtcagaggagtatttgaaaaatagtttacatctggttttgtactacccatccctggaagtatgcagggagggtggaggaaatgagcacattgctggctctctgggctgtggtgctggtggggctgggtcttttggtgtaatgcataccacagcattcccttttataaagtgagggattagtgccaccttctttgtagcaatgtcgtgacctctataatgcttcttaaattgaggacaatgatggacccaccaagccttaacacatgatttaaatctgatctgacagtacttaaacccagaactccagagggctaatggttgaacaagcttgggagaatgtccagggaacaaaatg

SEQ ID NO: 546097 - DNA, 543 bp, Homo sapiens
gaggcagtattcttttcaaattattatactctggcaaggcatactcaaggtacttggttcctttgtactctttccctctgtatttcaggttttatatgaatgaaacacaatgagtaattccttctctttggatccttcaggatattatttaaacactggcatctggtctaagggaaacttaatgctaagtcagaggagtatttgaaaaatagtttacatctggttttgtactacccatccctggaagtatgcagggagggtggaggaaatgagcacattgctggctctctgggctgtggtgctggtggggctgggtcttttggtgtaatgcataccacagcattcccttttataaagtgagggattagtgccaccttctttgtagcaatgtcgtgacctctataatgcttcttaaattgaggacaatgatggacccaccaagccttaacacatgatttaaatctgatctgacagtacttaaacccagaactccagagggctaatggttgaacaagcttgggagaatgtccagggaacmaaatg

SEQ ID NO: 546098 - DNA, 667 bp, Homo sapiens
ttcagggtttcagggagaggtatggcagagacatgagaactgaaaatgaaattcttcaggaagaataaatgcatgagaacagacaagaaaaacaccgtgagcccagagagtccatcgacaattctgcagcccaagtaggcagccactctggccaccctaggaatgagatgcctttggttctcgcttctgccaggtgccctccaactcaaagaacagcttctagctcacgcttgtaatcccagcactttgggaggctgaggagagtggatgacctgaggtcaggagttcgagaccagcctggccaacatggtgaaacctcatctctactaaaaatacaaaattagccgggcatggtggctcactcttgtaatcccagctactcaggaggctgaggtgggagaatcayttgaaccccggtggcagaggttgcagtgaaccaagatcacgccactgcaccctagcctgcgtgacagagtgagaccctgtctcaaaaaaacaaaaacaaaaacagaaaaaaaaaaagtaaaaaaaacatacatccctaagttgtttttcaaaaacccagacccctaccaaatggcatccaggggcgcacagacctcagatgaggggagactgatgaccgacctctgaccaccattctttgttctaaatttgttcctgaagg

SEQ ID NO: 546099 - DNA, 559 bp, Homo sapiens
tgaagaaagctgaaccttctggacatgctgcagaacattacattcatccatgacattgatgacattatgtcgatcagactggatgagcaagaattgggaagtctggtggagataaacgctatcaagactcaggagcctgctgggacattgtcttcaaaataaaggactcaaaaggaatcacatgtcctatacaatcaacctgggttctgaggtcagcatagtccattcatgggaacattattctggcccatttgccaagacacatggaaagctaccagcattgagtgggacccaggggagaaaatagctccacagccagtccagggtgtgatataagcagtcttgtcacttggtccatacaatctggtattcaaattatctgtgattgagaaaaaatgctatatagagtttatggtaaacctaactggagaatcacaatgtagacccatagggttctgaagtaaggcaacagagaactatatgctayggtttatatatttgcaacagagaactacatactatttggaaacagctcctggtttgcccctggggtttggta

SEQ ID NO: 546100 - DNA, 641 bp, Homo sapiens
caagtacaaacagacctctgctatagcactgtcacattgcattatagttatttgtttacttttctgtctttcccaggagcctgggatttttttttaagagaggaagctctttgtcttctttgaaccctgtagcttaatacactcacccctgtgtgttggaatgtgctcattgcatgctctttctctatgtgggcagtctgcttacacatcccactctttagtactcactgtcgagcagccaccatgtgtcagccactgaatgaaggcacttcacatcattgccttttaaaaattctcacaatagttctctaaggtaggtacttctattttccccattgtaatagtgagggaactaaggggcaacagataggtcaagtaacttgcccatggtcatggggataacaggtgatggaaccaagactcaaaccccaagtggtctaactccagtgyccactgctcacaacagctacactacattgtttctccccagtgtcttgggaagaaaataaattatatgtaaaacaagtacttacattttgccttctagaagagtggcataatttatctcctgggatataagttgtttttctgattgctgttgtttgttagaaaaatgctttgatgttcctatttcagtaatc

SEQ ID NO: 546101 - DNA, 641 bp, Homo sapiens
caagtacaaacagacctctgctatagcactgtcacattgcattatagttatttgtttacttttctgtctttcccaggagcctgggatttttttttaagagaggaagctctttgtcttctttgaaccctgtagcttaatacactcacccctgtgtgttggaatgtgctcattgcatgctctttctctatgtgggcagtctgcttacacatcccactctttagtactcactgtcgagcagccaccatgtgtcagccactgaatgaaggcacttcacatcattgccttttaaaaattctcacaatagttctctaaggtaggtacttctattttccccattgtaatagtgagggaactaaggggcaacagataggtcaagtaacttgcccatggtcatggggataacaggtgatggaaccaagactcaaaccccaagtggtctaactccagtgcccactgctcacaacagctacactacattgtttctccccagtgtcttsggaagaaaataaattatatgtaaaacaagtacttacattttgccttctagaagagtggcataatttatctcctgggatataagttgtttttctgattgctgttgtttgttagaaaaatgctttgatgttcctatttcagtaatc

SEQ ID NO: 546102 - DNA, 1311 bp, Homo sapiens
cttcctttttttccatccatctatcagtatcttggtcaaagctattgtgatctctctcctctcctggaacaatctaagagcctccaaaagtctcatatattagctttattcacccttaattcctttctctacatacactaaagatgtcatctcagtctccaatgagaaagttcaatggtcttaactgcttattatgataaagataaaaaaaaatatcacctatgatatcccatgggatctgatgctacagcaattatagtctgatcatatgtcattctcctaactctcaaactctgccagttttcctaggggctctccttttccaaaatcttcagactttcaaatcctgtaattattttgagtcaatgcaatacataatttttaaagaaatacaatatttgtagcctacttgtgcattttcccaatttcatataattttgtcataaattggatatgggttaaaactattcccaaaattctgagtttaagaaacttgctgttagtatctttatataacaacaacaacaaaaggcacatgccctcagagcactggctgtgtgccagtcgctttttgtgtttattgctaggggcagtagcagtgttgacatgagcagtagttgtaatagcagcagcgacggcagcacgtttcccacggggggcaggcgcaatgctagtgctcctgtctgtgcttccactgcagccacaaaacacaactgagggattgaggttccctgcccactttagaggccggcaaacaggaccagagccacagttggggaggtgcagggctctgtaccgctgaggccacagcactccccagccgaatgctggtcgccgcccgacacggggarcaagccgatctcagaaatggccacagcggtgagtttctgtgtagctcaacgcctgtctaagtccagggaaactctgggagtgggagagtaagagaaatgactggcagctagctcctcatgccactcctccagccccttccggagaggtgtgggcttagagaaaccagggcctgggggacaggaccaaaatgccctagggacgcggagctgagcttacttgatacttgatggagaggccctaagaaatataaatgaactagaaatataaatgagcagttagcagccctgaggaccgacctgcgtggctggcacccaggaaccgccctctccatctgcaagaggttttttaaactatattctccggtggttagtccgggcagcctcaggcaaggagattctatgaaaaagcaattcatatcaaacctgtatttctactctaacaagtttttaatttggcatt

SEQ ID NO: 546103 - DNA, 1311 bp, Homo sapiens
cttcctttttttccatccatctatcagtatcttggtcaaagctattgtgatctctctcctctcctggaacaatctaagagcctccaaaagtctcatatattagctttattcacccttaattcctttctctacatacactaaagatgtcatctcagtctccaatgagaaagttcaatggtcttaactgcttattatgataaagataaaaaaaaatatcacctatgatatcccatgggatctgatgctacagcaattatagtctgatcatatgtcattctcctaactctcaaactctgccagttttcctaggggctctccttttccaaaatcttcagactttcaaatcctgtaattattttgagtcaatgcaatacataatttttaaagaaatacaatatttgtagcctacttgtgcattttcccaatttcatataattttgtcataaattggatatgggttaaaactattcccaaaattctgagtttaagaaacttgctgttagtatctttatataacaacaacaacaaaaggcacatgccctcagagcactggctgtgtgccagtcgctttttgtgtttattgctaggggcagtagcagtgttgacatgagcagtagttgtaatagcagcagcgacggcagcacgtttcccacggggggcaggcgcaatgctagtgctcctgtctgtgcttccactgcagccacaaaacacaactgagggattgaggttccctgcccactttagaggccggcaaacaggaccagagccacagttggggaggtgcagggctctgtaccgctgaggccacagcactccccagccgaatgctggtcgccgcccgacacggggagcaagccgatctcagaaatggccacagcggtgagtttctgtgtagctcaacgcctgtctaagtccagggaaactctgggagtgggwgagtaagagaaatgactggcagctagctcctcatgccactcctccagccccttccggagaggtgtgggcttagagaaaccagggcctgggggacaggaccaaaatgccctagggacgcggagctgagcttacttgatacttgatggagaggccctaagaaatataaatgaactagaaatataaatgagcagttagcagccctgaggaccgacctgcgtggctggcacccaggaaccgccctctccatctgcaagaggttttttaaactatattctccggtggttagtccgggcagcctcaggcaaggagattctatgaaaaagcaattcatatcaaacctgtatttctactctaacaagtttttaatttggcatt

SEQ ID NO: 546104 - DNA, 1311 bp, Homo sapiens
cttcctttttttccatccatctatcagtatcttggtcaaagctattgtgatctctctcctctcctggaacaatctaagagcctccaaaagtctcatatattagctttattcacccttaattcctttctctacatacactaaagatgtcatctcagtctccaatgagaaagttcaatggtcttaactgcttattatgataaagataaaaaaaaatatcacctatgatatcccatgggatctgatgctacagcaattatagtctgatcatatgtcattctcctaactctcaaactctgccagttttcctaggggctctccttttccaaaatcttcagactttcaaatcctgtaattattttgagtcaatgcaatacataatttttaaagaaatacaatatttgtagcctacttgtgcattttcccaatttcatataattttgtcataaattggatatgggttaaaactattcccaaaattctgagtttaagaaacttgctgttagtatctttatataacaacaacaacaaaaggcacatgccctcagagcactggctgtgtgccagtcgctttttgtgtttattgctaggggcagtagcagtgttgacatgagcagtagttgtaatagcagcagcgacggcagcacgtttcccacggggggcaggcgcaatgctagtgctcctgtctgtgcttccactgcagccacaaaacacaactgagggattgaggttccctgcccactttagaggccggcaaacaggaccagagccacagttggggaggtgcagggctctgtaccgctgaggccacagcactccccagccgaatgctggtcgccgcccgacacggggagcaagccgatctcagaaatggccacagcggtgagtttctgtgtagctcaacgcctgtctaagtccagggaaactctgggagtgggagagtaagagaaatgactggcagctagctcctcatgccactcctccagccccttccggagaggtgtgggcttagagaaaccagggcctgggggacaggaccaaaatgccctagggacgcggagctgagcttacttgatacttgatggagaggccctaagaaatataaatgaactagaaatataaatgagcagttagcagccctgaggaccgacctgcgtggctggcacccaggaaccgccctctccatctgcaagaggttttttaaactatattctccggtggttagtccggscagcctcaggcaaggagattctatgaaaaagcaattcatatcaaacctgtatttctactctaacaagtttttaatttggcatt

SEQ ID NO: 546105 - DNA, 1311 bp, Homo sapiens
cttcctttttttccatccatctatcagtatcttggtcaaagctattgtgatctctctcctctcctggaacaatctaagagcctccaaaagtctcatatattagctttattcacccttaattcctttctctacatacactaaagatgtcatctcagtctccaatgagaaagttcaatggtcttaactgcttattatgataaagataaaaaaaaatatcacctatgatatcccatgggatctgatgctacagcaattatagtctgatcatatgtcattctcctaactctcaaactctgccagttttcctaggggctctccttttccaaaatcttcagactttcaaatcctgtaattattttgagtcaatgcaatacataatttttaaagaaatacaatatttgtagcctacttgtgcattttcccaatttcatataattttgtcataaattggatatgggttaaaactattcccaaaattctgagtttaagaaacttgctgttagtatctttatataacaacaacaacaaaaggcacatgccctcagagcactggctgtgtgccagtcgctttttgtgtttattgctaggggcagtagcagtgttgacatgagcagtagttgtaatagcagcagcgacggcagcacgtttcccacggggggcaggcgcaatgctagtgctcctgtctgtgcttccactgcagccacaaaacacaactgagggattgaggttccctgcccactttagaggccggcaaacaggaccagagccacagttggggaggtgcagggctctgtaccgctgaggccacagcactccccagccgaatgctggtcgccgcccgacacggggagcaagccgatctcagaaatggccacagcggtgagtttctgtgtagctcaacgcctgtctaagtccagggaaactctgggagtgggagagtaagagaaatgactggcagctagctcctcatgccactcctccagccccttccggagaggtgtgggcttagagaaaccagggcctgggggacaggaccaaaatgccctagggacgcggagctgagcttacttgatacttgatggagaggccctaagaaatataaatgaactagaaatataaatgagcagttagcagccctgaggaccgacctgcgtggctggcacccaggaaccgccctctccatctgcaagaggttttttaaactatattctccggtggttagtccgggcagcctcaggcaaggagattctatgaaaaagsaattcatatcaaacctgtatttctactctaacaagtttttaatttggcatt

SEQ ID NO: 546106 - DNA, 1315 bp, Homo sapiens
catgaacctcttgaagtcatctcccatcccatctatcatctatgtatctatctatccatccatccatctatcaatctgtcgatccagccatctatccatctatgtatctatctatctatccatcaatctgtcgatctagccagctattgatctatgtatctatctatccatctatcaacctgtcgatctagccagctatcgatctatgtatatctatctatccatctatccatctatcaacctgtcgatctagccatctatcgatctatccatccatccatccatcctattggttctgtttccctggagaatgctgaccaatgcagagggcaagacagagaaacccagaggagcctgggtccctgacgaccttggggaggacattacgcagctccacccccagacttgttgctgcatgagagaaaaataagccctatcttatttaagccactgtcgtggggattttctgttattggcaaccaaactcagcccctaaggggaggccacgtgtcccgcagtccaggccccccaaatcacacctacaatggttactttatcccaggactgtctggactattatggagttaatttttttctttacagaaactcattttttggccaggtatggtggctcatacctgtaatctcagcactttgggcggccgaggcaggtggatcacttggggtcaggagttcaagacccacctggacaacatggtgaaactccgtctctaccaaaaatacaaaaaattagccaggcgtggtggtgagtgcctgtaatcccagctactctggaggctgaggcaggagaatcgcttgaacctgagaggtagaggctgcagtgagccaagattgcactccagcctgggcaacagaaggagactcttgtcttaaaaaaaaaaaaaaaaaaaaatcaaaaaagggtagcggactgctgaaggctggtttgcgtcgacatggcggttaccgtgagtctcttgctgggygggtgtgtttgcgctgctgtccctcgctgcaggttggcgccctgtgggatagcgggcccaggccctatcggctgggagcaggaccccgattcctgccggaggaatgggagctgcagaaggtggagaggtaccggcttctccccaggcctcagcttgaagcagagccttgagtcccggtgccccagaccgcacccccttggcgcccggcatcctgccactgttactccttcttacccattgttaggggcacagtgtcaggtgttcagatcccctgagaccactgctcccttcactagtgacgtacttcatcatcggtttagagagttcgg

SEQ ID NO: 546107 - DNA, 1315 bp, Homo sapiens
catgaacctcttgaagtcatctcccatcccatctatcatctatgtatctatctatccatccatccatctatcaatctgtcgatccagccatctatccatctatgtatctatctatctatccatcaatctgtcgatctagccagctattgatctatgtatctatctatccatctatcaacctgtcgatctagccagctatcgatctatgtatatctatctatccatctatccatctatcaacctgtcgatctagccatctatcgatctatccatccatccatccatcctattggttctgtttccctggagaatgctgaccaatgcagagggcaagacagagaaacccagaggagcctgggtccctgacgaccttggggaggacattacgcagctccacccccagacttgttgctgcatgagagaaaaataagccctatcttatttaagccactgtcgtggggattttctgttattggcaaccaaactcagcccctaaggggaggccacgtgtcccgcagtccaggccccccaaatcacacctacaatggttactttatcccaggactgtctggactattatggagttaatttttttctttacagaaactcattttttggccaggtatggtggctcatacctgtaatctcagcactttgggcggccgaggcaggtggatcacttggggtcaggagttcaagacccacctggacaacatggtgaaactccgtctctaccaaaaatacaaaaaattagccaggcgtggtggtgagtgcctgtaatcccagctactctggaggctgaggcaggagaatcgcttgaacctgagaggtagaggctgcagtgagccaagattgcactccagcctgggcaacagaaggagactcttgtcttaaaaaaaaaaaaaaaaaaaaatcaaaaaagggtagcggactgctgaaggctggtttgcgtcgacatggcggttaccgtgagtctcttgctgggcgggtgtgtttgcgctgctgtccctcgctgcaggttggcgccctgtgggatagcgggcccaggccctatcggctgggagcaggaccccgattcctgccggaggaatgggagctgcagaaggtggagaggtaccggcttctccccaggcctcagcttgaagcagagccttgagtcccggtgccccagaccgcacccccttggcgcccggcatcctgccactgttactccttcttacccattgttaggggcacagtgtcaggtgttcagatcccctgagaccactgctcccttcactagtgacgtacttcatcatcggtttaragagttcgg

SEQ ID NO: 546108 - DNA, 663 bp, Homo sapiens
agaggctcacgccggtaatcccagtgctttgggaggctgaggtgggcagatcacctgaggtcaggagttcgaaaccagcctggccaacatggtgaaactccgtctctactaaaaatacaaaaaattagctgggcatggtggcatgtgcctgtaatcccacctactcaggaggctgaggcaggagaatcacttgaacccgggaggcagaggttgcagtgagtcgagattgcgccactgcactccagcctgggtgacaaagcaaaagtccatctcaaaaaaaaaaaaaaactttctaacatttggagatgtccatctacagatgggtgtgccccctggagcyctgctctgagccaaggctggtgaccatgtgtcaggttgctgcagacagaactctgagctgccaagttgttctctaaggcctctttccactgtaagcatatctaaatccccctagaaacagcaggtttatcagttactctcacactctgttatttttatacgcagatcctatgcccatctgttgtgtgtctgaatacccacatctttggctagcttattaattcagtgtcactacagggtcctttcttctatcctccccgcaaggcaggatccacttgtgtctcccatctattttgcagctttcttctctattttgcttgataa

SEQ ID NO: 546109 - DNA, 522 bp, Homo sapiens
caacattaattaaaattaaaaatatagatagcctcattccagtaattcaacttgtaactatgtatcctagagaagttctcacacttgtacacaaaaagcatgacagccgggcacagtggctcacacctgtaatcccagcaccttgagaggctgaggcaggtggatcacttgaacccaggagttcaagaccagcctggacaacacagaccctatctctacaaacattaaaaaaaaaaaatagccargaatggtgacatgcaactgtagtcccagctactcaggaggctgagatgggaggatcacttgagcccaggaggttgaggcagcagtgagacgtgatcgtgtcactgcactccagcctgggtgacggagctagacgccatctcaaaaaacaaaaacaaaaaaccatgaccaatgatattgtaaatatcagtcagtaaggcccacataaactatgattcatgctatgaaattctagcaagtactaaaatggaccaagacattgtaaagtgtaaggaagca

SEQ ID NO: 546110 - DNA, 522 bp, Homo sapiens
caacattaattaaaattaaaaatatagatagcctcattccagtaattcaacttgtaactatgtatcctagagaagttctcacacttgtacacaaaaagcatgacagccgggcacagtggctcacacctgtaatcccagcaccttgagaggctgaggcaggtggatcacttgaacccaggagttcaagaccagcctggacaacacagaccctatctctacaaacattaaaaaaaaaaaatagccaggaatggtgacatgcaactgtagtcccagctactcaggaggctgagatgggaggatcacttgagcccaggaggttgaggcagcagtgagacgtgatcgtgtcactgcactccagcctgggtgacggagctagacgccatctcaaaaaacaaaaacaaaaaaccatgaccaatgatawtgtaaatatcagtcagtaaggcccacataaactatgattcatgctatgaaattctagcaagtactaaaatggaccaagacattgtaaagtgtaaggaagca

SEQ ID NO: 546111 - DNA, 593 bp, Homo sapiens
tcaaagaattaataaatggtaaaggcaatatttgaagcagacagtgtatttctggagactattctctcacccactacatgctattaacattyaaccatgctatgagataaacaaagaagttctctcctggtttgacttctgtggcatctgtttcttttcttttttttttttaacctttccccttctcttctctactttttactttcctctcctgattcactttcatctgcctgcctgttgaatatcaatgttccacagtttatttcctcggccttagtttcttcaaattctggaattccatccagaaagaaacatcatttattgccagtttcagtcaccatatgtctttctttctggggaacacatctacctgcatttccagaggcaatttcaacttatctggtctgtcatttaactctatatctttcttccaaagcttgtttctcctaccacgaaagttggacctttcactcaacttgaagtcttgtcagcacctttgaccagctttacaccctaatcctccacaacaaatgcacagtgacctcctgtctctcatacccttcccctccactcccctaacattaccttggctc

SEQ ID NO: 546112 - DNA, 3020 bp, Homo sapiens
tgcccggctaattttttgtatttttagtggagacggagtttcactatgttagccaggatggtctygatctcctgacctcgtgatccacccgcctcggcctcccaaagtgctgggattacaggtgtgagccaccacgcccggcctctatcatttttaaataatattcttcttatgatcttatacctacatcacgaccgatctatatactttacttgaaacataaaattagacatggaacttattaaaaattttaatggaaagaaaatcaaaatcttacattttgcatattttatgctttcttataattcaactcaaagtatactgaagaaaatacagatagtgttactctaaatcatttggataaaatgcaatcagctaatttggttcctaataacaatatatatcagaaaactttatccttaatttactgcaatagccaaacaggatgggacaaaatgtatgactgtcttcagggaatagaatatgggcagtttggagcttctgaagtttaaccagagaactttgctttgaagaagagaagcttggtagggtcttttaaaagctttcacatgtatttaaggctcaggcctatttcatgtggctacagaatacataactataggtagaagttgtaaaaatacatatttcagttcattatttggaataatattctcacagagtagtttgaaatcaggacagtttgcctcagatgctctactgaggacttaggcatttaatagtgaattgagaatcatttgctgcaagtaacctcaaatgaaacagcatcctctgccaatttttctgcagttaaaagtcaaagtgcagtacattttgaaccactttaatggtacatagagctgacaatttctcaaaaagtattacatccttttagaagacaaaaaccataaaagaatctgaggcacttctctaacatacagtctgacatcaatataacattaaactatagacaacagtaaaattctataaattgttatgcaatataactaccatatatcaatacagatcaattaaatatatatatacctcaataataattgctaatatttatcaaacacttaatctttcaggttctgttctaagaatattgcctaaattaactcatttaatcctcctcacagctactctattatttcccattttttaggtaaggaatctgagagatgggggaaggggatttatattacacgctcaagttcataacgtcggtgtgtaattgaacctaggcaatcgactccacagctcaccctcttaacaactatgcaatgttacctccacgcaggaagcaagggacttacctggatattacacaacaggaataatgacaagtcagcatttataaaagcattattcaacataagcaatgacaatattcatttgagcaaaattactattccttccttaataaatggcagtcctctcccccctccttaaaaggaatgcaaactataaatgatctcagattagaaggaactaaaattccttcttacatttattcttgtcagaagcacaatcaccaatagttttataagctacagcatctttaaaattgagaaaataatgtacatacatactatatatgagatatagtatatactatatactataccaccacattctctcttctctgatgtcagtaggaaacttacccaatcctctaagttaaattttcttagcacttgtggaacatacggtgcaccgagggtcaattctttcaattctactcaagcagtcacttctcttaggtgtataaaatcaaatatatatatatattatatttatatattatatataatatatattttatatatacacctttaaaatatatatatatatatatatataaaaatgaaaaataaggtgagatcaactaataaaggaaaggtttggctaaaacacatttatcactatggaattcctggctttaaaagataaaaatacgtagatcacaaaaataaaaatcatgaaaactttcatcctaatatagacaagagtgactataaattatttttgacaaaaaataagagaaagcctaaaatacagtcatgacagaaatttatttaaccaatctccatgcattattgacaaagaacttgacagaagccataaatctaagtaccaaatcatgggatccattcagcttggtggttaagaggtgaagagctatgccatctgaaagaagtaccaagatggaaatcttgcagggaggtcaggtagaaatcagtgaaggagagagcaaccaaggtttcccaattagatggaaagtagaaaagagcagaatggaaagacatacagaaaaccatgtaataacatgaaaggaattaaggaacatttaagtcctttagaagtgtgctgagtctgaagtagtttgtagtgcaaggttaagatgactgtagcattttttgagtggaatacactgaggagaaacaaaaacagtctaatgatttccgtggcttctagagagttgcaacattcattttctgcagtttaaattatgtttcctatggcaagaaaatagctgcatagataaacttccctggcaaagttatttttgatctagcagaacccagtaattccagactgcagagacagcaggtaacaaatgtccccttcaaaatccaaacccaaattagataagtctgtgagccctcattggtgaaatggtcagacctgagcttccttttaaataacactcccaacacactctctattaggtgtcctacatgcttcctggaatcaaatcaggatgttactcctgcttggctctgccttggtgctgaggctgctgtttttcaactgccatgtagctccaagtaattgccagctgctctgccaaaaatgccacctgaccttgctgctcattattgattactgtctgctgcagctgccaccagacaagggctagagacctgccccagactgctgctcatagggctgtccctctgcttccagctgctgctcagcacttctctcagtttgatgacctcaccactgtaccttcc

SEQ ID NO: 546113 - DNA, 3020 bp, Homo sapiens
tgcccggctaattttttgtatttttagtggagacggagtttcactatgttagccaggatggtctcgatctcctgacctcgtgatccacccrcctcggcctcccaaagtgctgggattacaggtgtgagccaccacgcccggcctctatcatttttaaataatattcttcttatgatcttatacctacatcacgaccgatctatatactttacttgaaacataaaattagacatggaacttattaaaaattttaatggaaagaaaatcaaaatcttacattttgcatattttatgctttcttataattcaactcaaagtatactgaagaaaatacagatagtgttactctaaatcatttggataaaatgcaatcagctaatttggttcctaataacaatatatatcagaaaactttatccttaatttactgcaatagccaaacaggatgggacaaaatgtatgactgtcttcagggaatagaatatgggcagtttggagcttctgaagtttaaccagagaactttgctttgaagaagagaagcttggtagggtcttttaaaagctttcacatgtatttaaggctcaggcctatttcatgtggctacagaatacataactataggtagaagttgtaaaaatacatatttcagttcattatttggaataatattctcacagagtagtttgaaatcaggacagtttgcctcagatgctctactgaggacttaggcatttaatagtgaattgagaatcatttgctgcaagtaacctcaaatgaaacagcatcctctgccaatttttctgcagttaaaagtcaaagtgcagtacattttgaaccactttaatggtacatagagctgacaatttctcaaaaagtattacatccttttagaagacaaaaaccataaaagaatctgaggcacttctctaacatacagtctgacatcaatataacattaaactatagacaacagtaaaattctataaattgttatgcaatataactaccatatatcaatacagatcaattaaatatatatatacctcaataataattgctaatatttatcaaacacttaatctttcaggttctgttctaagaatattgcctaaattaactcatttaatcctcctcacagctactctattatttcccattttttaggtaaggaatctgagagatgggggaaggggatttatattacacgctcaagttcataacgtcggtgtgtaattgaacctaggcaatcgactccacagctcaccctcttaacaactatgcaatgttacctccacgcaggaagcaagggacttacctggatattacacaacaggaataatgacaagtcagcatttataaaagcattattcaacataagcaatgacaatattcatttgagcaaaattactattccttccttaataaatggcagtcctctcccccctccttaaaaggaatgcaaactataaatgatctcagattagaaggaactaaaattccttcttacatttattcttgtcagaagcacaatcaccaatagttttataagctacagcatctttaaaattgagaaaataatgtacatacatactatatatgagatatagtatatactatatactataccaccacattctctcttctctgatgtcagtaggaaacttacccaatcctctaagttaaattttcttagcacttgtggaacatacggtgcaccgagggtcaattctttcaattctactcaagcagtcacttctcttaggtgtataaaatcaaatatatatatatattatatttatatattatatataatatatattttatatatacacctttaaaatatatatatatatatatatataaaaatgaaaaataaggtgagatcaactaataaaggaaaggtttggctaaaacacatttatcactatggaattcctggctttaaaagataaaaatacgtagatcacaaaaataaaaatcatgaaaactttcatcctaatatagacaagagtgactataaattatttttgacaaaaaataagagaaagcctaaaatacagtcatgacagaaatttatttaaccaatctccatgcattattgacaaagaacttgacagaagccataaatctaagtaccaaatcatgggatccattcagcttggtggttaagaggtgaagagctatgccatctgaaagaagtaccaagatggaaatcttgcagggaggtcaggtagaaatcagtgaaggagagagcaaccaaggtttcccaattagatggaaagtagaaaagagcagaatggaaagacatacagaaaaccatgtaataacatgaaaggaattaaggaacatttaagtcctttagaagtgtgctgagtctgaagtagtttgtagtgcaaggttaagatgactgtagcattttttgagtggaatacactgaggagaaacaaaaacagtctaatgatttccgtggcttctagagagttgcaacattcattttctgcagtttaaattatgtttcctatggcaagaaaatagctgcatagataaacttccctggcaaagttatttttgatctagcagaacccagtaattccagactgcagagacagcaggtaacaaatgtccccttcaaaatccaaacccaaattagataagtctgtgagccctcattggtgaaatggtcagacctgagcttccttttaaataacactcccaacacactctctattaggtgtcctacatgcttcctggaatcaaatcaggatgttactcctgcttggctctgccttggtgctgaggctgctgtttttcaactgccatgtagctccaagtaattgccagctgctctgccaaaaatgccacctgaccttgctgctcattattgattactgtctgctgcagctgccaccagacaagggctagagacctgccccagactgctgctcatagggctgtccctctgcttccagctgctgctcagcacttctctcagtttgatgacctcaccactgtaccttcc

SEQ ID NO: 546114 - DNA, 3020 bp, Homo sapiens
tgcccggctaattttttgtatttttagtggagacggagtttcactatgttagccaggatggtctcgatctcctgacctcgtgatccacccgcctcggcctcccaaagtgctgggattacaggtgtgagccaccacgcccggcctctatcatttttaaataatattcttcttatgatcttatacctacatcacgaccgatctatatactttacttgaaacataaaattagacatggaacttattaaaaattttaatggaaagaaaatcaaaatcttacattttgcatattttatgctttcttataattcaactcaaagtatactgaaraaaatacagatagtgttactctaaatcatttggataaaatgcaatcagctaatttggttcctaataacaatatatatcagaaaactttatccttaatttactgcaatagccaaacaggatgggacaaaatgtatgactgtcttcagggaatagaatatgggcagtttggagcttctgaagtttaaccagagaactttgctttgaagaagagaagcttggtagggtcttttaaaagctttcacatgtatttaaggctcaggcctatttcatgtggctacagaatacataactataggtagaagttgtaaaaatacatatttcagttcattatttggaataatattctcacagagtagtttgaaatcaggacagtttgcctcagatgctctactgaggacttaggcatttaatagtgaattgagaatcatttgctgcaagtaacctcaaatgaaacagcatcctctgccaatttttctgcagttaaaagtcaaagtgcagtacattttgaaccactttaatggtacatagagctgacaatttctcaaaaagtattacatccttttagaagacaaaaaccataaaagaatctgaggcacttctctaacatacagtctgacatcaatataacattaaactatagacaacagtaaaattctataaattgttatgcaatataactaccatatatcaatacagatcaattaaatatatatatacctcaataataattgctaatatttatcaaacacttaatctttcaggttctgttctaagaatattgcctaaattaactcatttaatcctcctcacagctactctattatttcccattttttaggtaaggaatctgagagatgggggaaggggatttatattacacgctcaagttcataacgtcggtgtgtaattgaacctaggcaatcgactccacagctcaccctcttaacaactatgcaatgttacctccacgcaggaagcaagggacttacctggatattacacaacaggaataatgacaagtcagcatttataaaagcattattcaacataagcaatgacaatattcatttgagcaaaattactattccttccttaataaatggcagtcctctcccccctccttaaaaggaatgcaaactataaatgatctcagattagaaggaactaaaattccttcttacatttattcttgtcagaagcacaatcaccaatagttttataagctacagcatctttaaaattgagaaaataatgtacatacatactatatatgagatatagtatatactatatactataccaccacattctctcttctctgatgtcagtaggaaacttacccaatcctctaagttaaattttcttagcacttgtggaacatacggtgcaccgagggtcaattctttcaattctactcaagcagtcacttctcttaggtgtataaaatcaaatatatatatatattatatttatatattatatataatatatattttatatatacacctttaaaatatatatatatatatatatataaaaatgaaaaataaggtgagatcaactaataaaggaaaggtttggctaaaacacatttatcactatggaattcctggctttaaaagataaaaatacgtagatcacaaaaataaaaatcatgaaaactttcatcctaatatagacaagagtgactataaattatttttgacaaaaaataagagaaagcctaaaatacagtcatgacagaaatttatttaaccaatctccatgcattattgacaaagaacttgacagaagccataaatctaagtaccaaatcatgggatccattcagcttggtggttaagaggtgaagagctatgccatctgaaagaagtaccaagatggaaatcttgcagggaggtcaggtagaaatcagtgaaggagagagcaaccaaggtttcccaattagatggaaagtagaaaagagcagaatggaaagacatacagaaaaccatgtaataacatgaaaggaattaaggaacatttaagtcctttagaagtgtgctgagtctgaagtagtttgtagtgcaaggttaagatgactgtagcattttttgagtggaatacactgaggagaaacaaaaacagtctaatgatttccgtggcttctagagagttgcaacattcattttctgcagtttaaattatgtttcctatggcaagaaaatagctgcatagataaacttccctggcaaagttatttttgatctagcagaacccagtaattccagactgcagagacagcaggtaacaaatgtccccttcaaaatccaaacccaaattagataagtctgtgagccctcattggtgaaatggtcagacctgagcttccttttaaataacactcccaacacactctctattaggtgtcctacatgcttcctggaatcaaatcaggatgttactcctgcttggctctgccttggtgctgaggctgctgtttttcaactgccatgtagctccaagtaattgccagctgctctgccaaaaatgccacctgaccttgctgctcattattgattactgtctgctgcagctgccaccagacaagggctagagacctgccccagactgctgctcatagggctgtccctctgcttccagctgctgctcagcacttctctcagtttgatgacctcaccactgtaccttcc

SEQ ID NO: 546115 - DNA, 3020 bp, Homo sapiens
tgcccggctaattttttgtatttttagtggagacggagtttcactatgttagccaggatggtctcgatctcctgacctcgtgatccacccgcctcggcctcccaaagtgctgggattacaggtgtgagccaccacgcccggcctctatcatttttaaataatattcttcttatgatcttatacctacatcacgaccgatctatatactttacttgaaacataaaattagacatggaacttattaaaaattttaatggaaagaaaatcaaaatcttacattttgcatattttatgctttcttataattcaactcaaagtatactgaagaaaatacagatagtgttactctaaatcatttggataaaatgcaatcagctaatttggttcctaataacaatatatatcagaaaactttatccttaatttactgcaatagccaaacaggatgggacaaaatgtatgactgtcttcaggraatagaatatgggcagtttggagcttctgaagtttaaccagagaactttgctttgaagaagagaagcttggtagggtcttttaaaagctttcacatgtatttaaggctcaggcctatttcatgtggctacagaatacataactataggtagaagttgtaaaaatacatatttcagttcattatttggaataatattctcacagagtagtttgaaatcaggacagtttgcctcagatgctctactgaggacttaggcatttaatagtgaattgagaatcatttgctgcaagtaacctcaaatgaaacagcatcctctgccaatttttctgcagttaaaagtcaaagtgcagtacattttgaaccactttaatggtacatagagctgacaatttctcaaaaagtattacatccttttagaagacaaaaaccataaaagaatctgaggcacttctctaacatacagtctgacatcaatataacattaaactatagacaacagtaaaattctataaattgttatgcaatataactaccatatatcaatacagatcaattaaatatatatatacctcaataataattgctaatatttatcaaacacttaatctttcaggttctgttctaagaatattgcctaaattaactcatttaatcctcctcacagctactctattatttcccattttttaggtaaggaatctgagagatgggggaaggggatttatattacacgctcaagttcataacgtcggtgtgtaattgaacctaggcaatcgactccacagctcaccctcttaacaactatgcaatgttacctccacgcaggaagcaagggacttacctggatattacacaacaggaataatgacaagtcagcatttataaaagcattattcaacataagcaatgacaatattcatttgagcaaaattactattccttccttaataaatggcagtcctctcccccctccttaaaaggaatgcaaactataaatgatctcagattagaaggaactaaaattccttcttacatttattcttgtcagaagcacaatcaccaatagttttataagctacagcatctttaaaattgagaaaataatgtacatacatactatatatgagatatagtatatactatatactataccaccacattctctcttctctgatgtcagtaggaaacttacccaatcctctaagttaaattttcttagcacttgtggaacatacggtgcaccgagggtcaattctttcaattctactcaagcagtcacttctcttaggtgtataaaatcaaatatatatatatattatatttatatattatatataatatatattttatatatacacctttaaaatatatatatatatatatatataaaaatgaaaaataaggtgagatcaactaataaaggaaaggtttggctaaaacacatttatcactatggaattcctggctttaaaagataaaaatacgtagatcacaaaaataaaaatcatgaaaactttcatcctaatatagacaagagtgactataaattatttttgacaaaaaataagagaaagcctaaaatacagtcatgacagaaatttatttaaccaatctccatgcattattgacaaagaacttgacagaagccataaatctaagtaccaaatcatgggatccattcagcttggtggttaagaggtgaagagctatgccatctgaaagaagtaccaagatggaaatcttgcagggaggtcaggtagaaatcagtgaaggagagagcaaccaaggtttcccaattagatggaaagtagaaaagagcagaatggaaagacatacagaaaaccatgtaataacatgaaaggaattaaggaacatttaagtcctttagaagtgtgctgagtctgaagtagtttgtagtgcaaggttaagatgactgtagcattttttgagtggaatacactgaggagaaacaaaaacagtctaatgatttccgtggcttctagagagttgcaacattcattttctgcagtttaaattatgtttcctatggcaagaaaatagctgcatagataaacttccctggcaaagttatttttgatctagcagaacccagtaattccagactgcagagacagcaggtaacaaatgtccccttcaaaatccaaacccaaattagataagtctgtgagccctcattggtgaaatggtcagacctgagcttccttttaaataacactcccaacacactctctattaggtgtcctacatgcttcctggaatcaaatcaggatgttactcctgcttggctctgccttggtgctgaggctgctgtttttcaactgccatgtagctccaagtaattgccagctgctctgccaaaaatgccacctgaccttgctgctcattattgattactgtctgctgcagctgccaccagacaagggctagagacctgccccagactgctgctcatagggctgtccctctgcttccagctgctgctcagcacttctctcagtttgatgacctcaccactgtaccttcc

SEQ ID NO: 546116 - DNA, 3020 bp, Homo sapiens
tgcccggctaattttttgtatttttagtggagacggagtttcactatgttagccaggatggtctcgatctcctgacctcgtgatccacccgcctcggcctcccaaagtgctgggattacaggtgtgagccaccacgcccggcctctatcatttttaaataatattcttcttatgatcttatacctacatcacgaccgatctatatactttacttgaaacataaaattagacatggaacttattaaaaattttaatggaaagaaaatcaaaatcttacattttgcatattttatgctttcttataattcaactcaaagtatactgaagaaaatacagatagtgttactctaaatcatttggataaaatgcaatcagctaatttggttcctaataacaatatatatcagaaaactttatccttaatttactgcaatagccaaacaggatgggacaaaatgtatgactgtcttcagggaatagaatatgggcagtttggagcttctgaagtttaaccagagaactttgctttgaagaagagaagcttggtagggtcttttaaaagctttcacatgtatttaaggctcaggcctatttcatgtggctacagaatacataactataggtagaagttgtaaaaatacatatttcagttcattatttggaataatattctcacagagtagtttgaaatcaggacagtttgcctcagatgctctactgaggacttaggcatttaatagtgaattgagaatcatttgctgcaagtaacctcaaatgaaacagcatcctctgccaatttttctgcagttaaaagtcaaagtgcagtacattttgaaccactttaatggtacatagagctgacaatttctcaaaaagtattacatccttttagaagacaaaaaccataaaagaatctgaggcacttctctaacatacagtctgacatcaatataacattaaactatagacaacagtaaaattctataaattgttatgcaatataactaccatatatcaatacagatcaattaaatatatatatacctcaataataattgctaatatttatcaaacacttaatctttcaggttctgttctaagaatattgcctaaattaactcatttaatcctcctcacagctactctattatttcccattttttaggtaaggaatctgagagatgggggaaggggatttatattacacgctcaagttcataacgtcggtgtgtaattgaacctaggcaatcgactccacagctcaccctcttaacaactatgcaatgttacctccacgcaggaagcaagggacttacctggatattacacaacaggaataatgacaagtcagcatttataaaagcattattcaacataagcaatgacaatattcatttgagcaaaattactattccttccttaataaatggcagtcctctcccccctccttaaaaggaatgcaaactataaatgatctcagattagaaggaactaaaattccttcttacatttattcttgtcagaagcacaatcaccaatagttttataagctacagcatctttaaaattgagaaaataatgtacatacatactatatatgagatatagtatatactatatactataccaccacattctctcttctctgatgtcagtaggaaacttacccaatcctctaagttaaattttcttagcacttgtggaacatacggtgcaccgagggtcaattctttcaattctactcaarcagtcacttctcttaggtgtataaaatcaaatatatatatatattatatttatatattatatataatatatattttatatatacacctttaaaatatatatatatatatatatataaaaatgaaaaataaggtgagatcaactaataaaggaaaggtttggctaaaacacatttatcactatggaattcctggctttaaaagataaaaatacgtagatcacaaaaataaaaatcatgaaaactttcatcctaatatagacaagagtgactataaattatttttgacaaaaaataagagaaagcctaaaatacagtcatgacagaaatttatttaaccaatctccatgcattattgacaaagaacttgacagaagccataaatctaagtaccaaatcatgggatccattcagcttggtggttaagaggtgaagagctatgccatctgaaagaagtaccaagatggaaatcttgcagggaggtcaggtagaaatcagtgaaggagagagcaaccaaggtttcccaattagatggaaagtagaaaagagcagaatggaaagacatacagaaaaccatgtaataacatgaaaggaattaaggaacatttaagtcctttagaagtgtgctgagtctgaagtagtttgtagtgcaaggttaagatgactgtagcattttttgagtggaatacactgaggagaaacaaaaacagtctaatgatttccgtggcttctagagagttgcaacattcattttctgcagtttaaattatgtttcctatggcaagaaaatagctgcatagataaacttccctggcaaagttatttttgatctagcagaacccagtaattccagactgcagagacagcaggtaacaaatgtccccttcaaaatccaaacccaaattagataagtctgtgagccctcattggtgaaatggtcagacctgagcttccttttaaataacactcccaacacactctctattaggtgtcctacatgcttcctggaatcaaatcaggatgttactcctgcttggctctgccttggtgctgaggctgctgtttttcaactgccatgtagctccaagtaattgccagctgctctgccaaaaatgccacctgaccttgctgctcattattgattactgtctgctgcagctgccaccagacaagggctagagacctgccccagactgctgctcatagggctgtccctctgcttccagctgctgctcagcacttctctcagtttgatgacctcaccactgtaccttcc

SEQ ID NO: 546117 - DNA, 3020 bp, Homo sapiens
tgcccggctaattttttgtatttttagtggagacggagtttcactatgttagccaggatggtctcgatctcctgacctcgtgatccacccgcctcggcctcccaaagtgctgggattacaggtgtgagccaccacgcccggcctctatcatttttaaataatattcttcttatgatcttatacctacatcacgaccgatctatatactttacttgaaacataaaattagacatggaacttattaaaaattttaatggaaagaaaatcaaaatcttacattttgcatattttatgctttcttataattcaactcaaagtatactgaagaaaatacagatagtgttactctaaatcatttggataaaatgcaatcagctaatttggttcctaataacaatatatatcagaaaactttatccttaatttactgcaatagccaaacaggatgggacaaaatgtatgactgtcttcagggaatagaatatgggcagtttggagcttctgaagtttaaccagagaactttgctttgaagaagagaagcttggtagggtcttttaaaagctttcacatgtatttaaggctcaggcctatttcatgtggctacagaatacataactataggtagaagttgtaaaaatacatatttcagttcattatttggaataatattctcacagagtagtttgaaatcaggacagtttgcctcagatgctctactgaggacttaggcatttaatagtgaattgagaatcatttgctgcaagtaacctcaaatgaaacagcatcctctgccaatttttctgcagttaaaagtcaaagtgcagtacattttgaaccactttaatggtacatagagctgacaatttctcaaaaagtattacatccttttagaagacaaaaaccataaaagaatctgaggcacttctctaacatacagtctgacatcaatataacattaaactatagacaacagtaaaattctataaattgttatgcaatataactaccatatatcaatacagatcaattaaatatatatatacctcaataataattgctaatatttatcaaacacttaatctttcaggttctgttctaagaatattgcctaaattaactcatttaatcctcctcacagctactctattatttcccattttttaggtaaggaatctgagagatgggggaaggggatttatattacacgctcaagttcataacgtcggtgtgtaattgaacctaggcaatcgactccacagctcaccctcttaacaactatgcaatgttacctccacgcaggaagcaagggacttacctggatattacacaacaggaataatgacaagtcagcatttataaaagcattattcaacataagcaatgacaatattcatttgagcaaaattactattccttccttaataaatggcagtcctctcccccctccttaaaaggaatgcaaactataaatgatctcagattagaaggaactaaaattccttcttacatttattcttgtcagaagcacaatcaccaatagttttataagctacagcatctttaaaattgagaaaataatgtacatacatactatatatgagatatagtatatactatatactataccaccacattctctcttctctgatgtcagtaggaaacttacccaatcctctaagttaaattttcttagcacttgtggaacatacggtgcaccgagggtcaattctttcaattctactcaagcagtcacttctcttaggtgtataaaatcaaatatatatatatattatatttatatattatatataatatatattttatatatacacctttaaaatatatatatatatatatatataaaaatgaaaaataaggtgagatcaactaataaaggaaaggtttggctaaaacacatttatcactatggaattcctggctttaaaagataaaaataygtagatcacaaaaataaaaatcatgaaaactttcatcctaatatagacaagagtgactataaattatttttgacaaaaaataagagaaagcctaaaatacagtcatgacagaaatttatttaaccaatctccatgcattattgacaaagaacttgacagaagccataaatctaagtaccaaatcatgggatccattcagcttggtggttaagaggtgaagagctatgccatctgaaagaagtaccaagatggaaatcttgcagggaggtcaggtagaaatcagtgaaggagagagcaaccaaggtttcccaattagatggaaagtagaaaagagcagaatggaaagacatacagaaaaccatgtaataacatgaaaggaattaaggaacatttaagtcctttagaagtgtgctgagtctgaagtagtttgtagtgcaaggttaagatgactgtagcattttttgagtggaatacactgaggagaaacaaaaacagtctaatgatttccgtggcttctagagagttgcaacattcattttctgcagtttaaattatgtttcctatggcaagaaaatagctgcatagataaacttccctggcaaagttatttttgatctagcagaacccagtaattccagactgcagagacagcaggtaacaaatgtccccttcaaaatccaaacccaaattagataagtctgtgagccctcattggtgaaatggtcagacctgagcttccttttaaataacactcccaacacactctctattaggtgtcctacatgcttcctggaatcaaatcaggatgttactcctgcttggctctgccttggtgctgaggctgctgtttttcaactgccatgtagctccaagtaattgccagctgctctgccaaaaatgccacctgaccttgctgctcattattgattactgtctgctgcagctgccaccagacaagggctagagacctgccccagactgctgctcatagggctgtccctctgcttccagctgctgctcagcacttctctcagtttgatgacctcaccactgtaccttcc

SEQ ID NO: 546118 - DNA, 1456 bp, Homo sapiens
cccacatatgtgatatgcctcccttttataagaagtttcctgactccagacctgtatctacctattcccatatctaaagttttctcttgtataccttattggaaaccatttcagcaggtaacatcagtggaagtgatttgttagtattcatgataaggtttaaaagaaaaaaacaaaaaacagcatgccttaataaatcaattaccaattaccttacatggaaagctgctcattcataattttgcccactgaagaaaccaagaatatatggtgtgaacgtacagttaccagcctgggaggtcagtggtctactagctttgctgggtaagcctttgcctcaggccaatgggtgtggaatttgaggataatggaacttctctcatagccctccaactcagttttcatgaggagtttactctgtgatgctcacagccttcactcatttagtaattcagttgctcaaaaatgtttcttgagaatttgctatgtgataggcactgcactgagtacagaagatataacattgttcaatacttatttaactgacctcaaaaagcttaatattcagccccactgttttacatatgaaaggcaagaccattcaacagcttgatatttatgcaatattttgcataaatatattttttaatttatctgatttttccaggtgataaaaggctcttggcacacaacggtgaaaaaaaattgttccttctctcagaatatcacagaaccaaatgcaggtagggaattaaggaaggaacgattaatcctatgcaagtttataaagtaaagaaatatttatctgaattatttgattaatagagtaaatgtagccagcaaagagaagaaaacaacataccaggaagaataaaccaggcacaggatgggaaaaatcattgcgttgtgctcagaaaataaaaaaaaaatttgctatgaaaaaggcatagggtgtcagttgggaaactggaaatgaaaactggaaaggcaaattagttaaatacttttaaagatccaatatgccaagctgaggagtttggaatattaattcttactaatcagtcagcagaaaatttaggyatatgtgtgacataatcagattccatattgtgaaaaatgacagctcagaaaatgcacatgaggagagagaggagcagaaacaattagggaattgctggaataacagagctgaaaaatactcaagaagaaggttaaagcagtggcagtgaggatgggtgaagagaggcaatttaaaggatgtgttttatgtagaattaagaggattttctgactgtaaaggttttaatagatggtaaaagagagaaaaaggcaaatacttggacatttcaaacttaagaggcagaatggtgatattatttatcaaacaaggctacagaagaatgaaattgaataattttgggcaggtcatgtgttaggagactccagaactcaaagt

SEQ ID NO: 546119 - DNA, 1305 bp, Homo sapiens
aaaagtctaaagtgaattaataaacagatgcttgtgaggaaagattaaacctgcttgggaagaactgaatatctggtcgccacacctatatataaaggagctcaacaggtactttttaaaattttatttttatttttgtgatggagtcttgctcttttgtccaggctgtactgcagtggtgctatctcagctcactgcaacctccccctcccgggttcaagcgattcttctgcctcagcctcctgagtagctgggattacaggcgcccatcaccatgcccagctaagttttgtatttttagtagagacagcgtttcaccttgttggctgggctggtcttgaactcctgacctcaagtgatccgcccacctcggcctcccaaagtgctgggattacaggcatgaacctctgtgcccagccctcaacagatacttaatgacattaatgaaaatatggatgaaaggctcagtcagtcagtcagctggtggcgtgaactctaactggagatagtgcgtaaacacatgtcatattatacttacaaaagtactgggggcacgaaagcaaatcaagacccagtcacagtttccaagggtctgactatctgacaggagagacaattaggcaattaatatacagcgtgatgttctggcaggcatgagtgaccctggaggcacactcaactcaatgcttggagaaaagagactgaaggcttcccagaggtggtgcttcccaagctgagttctggaagatgagcaaaagttagtccaggaataaggggtgacaaaggaggtgagggtctgctggctggaggaatcagctagagcagttgagccagggacaagcctgcttgggggaaccgtgagtgccggactaccaactgtgcaaagcaagccagagtgatgacaagcggcccactgtgtaatgacatgttttcggtgtatgaaattatactttcagggatgtaatttgatcgctggtgtatccagctcagagcagtaaggaacagattttaaaggggaaagtcacactgaaaagcagccaattttactctagcacttatttaccaagaacttttcataaacccaaatgatattaattgttttaaattcttctccttctcattaactatggaaaacaataaaaatatttgtctggcacatattaggcacttggaaaacatttacctgagtcatcgtattttccaaaattgtcaggaaaatctttgagaaacaggaattcaacagatgtggtacaaaraaagaaaagaatactaactactttttgtgtttgtttgtttgcttttact

SEQ ID NO: 546120 - DNA, 516 bp, Homo sapiens
ggggaggaacaaggaaatctctgggtaagaagaaattggattcagccctgttttcttcccccccaatgtgaatacatctgtgtgaatgatgatcatcaaaaaaatttatggtattatggaaagctggtaatattgattgatggactaataatattgctggtgtaaagattctcaactatcaaggtaacaacaacaacaaaactcctgaaaaaacctaaggcagtgtaaaayagccctaattccagtcatttcagtgatctccttactgctgtatcttcttaccatgtaacacaacaactaagtataacatcagatgtgtttgattaagctgtaagttttattttattagaactgtaactctccctttaaatacctatttatatctttacataatcagtctttgtaggtagttgtatatgtattatgttaccttatccacctcaaaatattagaaggaactgtatagataagacccttcctttatttttattgtttgaattttaagggtaatacttt

SEQ ID NO: 546121 - DNA, 642 bp, Homo sapiens
gatgacaatataagacattcatcttttgtgaatctattgtgagaaatagggaatctatttctctatggttttttagtagtgtgggccraactgtgtctcttctccccaaagttaacgtgctgaaacactaaccttcagtacttcagaatgtgatattactgggaacagggcctttaaagaggcaattaagtgaaaatgaggcaatgaaggtgggccctaatttaattttaatggtgttctcatatacaggggaaaatctgggtgctcggaaagacaccagaagcacacagaagaagatcatatgaagacacaacaagaaggtgactagctgcaagccaagaagagaagcctcagaagaaatcaaacgtactagcaccttgatcttggaattccagtctccaaagctgcgagaaaataaaattctgttgcttaagctgccaagactatggtattttcttatggcaatcttagcaaaataaccctattagcaaacaaatgcatacaaaatctctgtaaatacagcaggtttcctttttaaaaaaactctttattttgaaaaattatagttctacaacaaataataaaaaagatatacaggatggtcctatttactcttgactcagtttcccttatagtaacatc

SEQ ID NO: 546122 - DNA, 592 bp, Homo sapiens
acattcatgacttttaacactagcgattcttaaagtgtgaccaagctccctgaaatccctgagaaattttagtgagttgtatgaagtcaaaactatttttatagtaatactaagacattattcacctttctctctcttctctcacgcaattccagagactccaaagaataagatattgcagcagattgaatacaaaagcagatataaggatacagctgtcttttataaagacagatattaaaggaatttgtaaaaacataaaacagtgccattcttgcactagtattttgtcttagaaaattatctttataaacatatygttttattaacatattttggtttattactattttaaattaataatgtttttaaattttctcagttataatttctaatatggcaaatataggtgtataggtaatacataaaaacaaagttctttgggcttctcagtaattttaaaaatatgaaggggctctaagaccaaaacactccagggttgctgtttcagctgatgaaatatattctctatcacacttctagaatgagtacttgtttggtaattcctgctccaagaacttaattttcaatg

SEQ ID NO: 546123 - DNA, 592 bp, Homo sapiens
acattcatgacttttaacactagcgattcttaaagtgtgaccaagctccctgaaatccctgagaaattttagtgagttgtatgaagtcaaaactatttttatagtaatactaagacattattcacctttctctctcttctctcacgcaattccagagactccaaagaataagatattgcagcagattgaatacaaaagcagatataaggatacagctgtcttttataaagacagatattaaaggaatttgtaaaaacataaaacagtgccattcttgcactagtattttgtcttagaaaattatctttataaacatatcgttttattaacatattttggtttattactattttaaattaataatgtttttaaattttctcagttataatttctaatatggcaaatataggtgtataggtaatacataaaaacaaagttctttgggcttctcagtaattttaaaaatatgaaggggctctaagaccaaaacactccagggttgctgtttcagctgatgaaatatattctctatcacacttctagaatgagtacttgttyggtaattcctgctccaagaacttaattttcaatg

SEQ ID NO: 546124 - DNA, 1587 bp, Homo sapiens
agcactttgggaggctgaggcgggtggatcacgaggtcaggagattgagaccatcctggctaacatggtgaaaccccatctctactaaaaaacaaaaaattagccaggcatggtggcgagtgcctgtagtcccagctactggggaggctgaggcaggagaatggcgtgaacctgggaggtggagcttgcagtgagccgagatcgtgccactgcactccagcctgggccacagagcaagactccgtctcaaaaaaaaaaaaaaaaaaaaaaaagcaaatgaataataaaggcagaacttacactcttgttcttgaactttttactgatggtctttctcctattatacactgattccctttctggaaataaaagtaccttttagcctcaagtttttccaatattattaacttaggaataaaaggctttatttaatctccaaagtctatggcattttagcaaaacatcctaacaatatttcagcttgactacttgaaaatataattcattattttgaagatggtaaagcatagttattataaatgattcctcatgaatatttgtgacttcaacagcaatttcttgcatatatatacatatacacacacacccctacacacacacacacacacacacacacacccctacaaacacatctttcaggaatgccatcccttacataaagatgcatataaatgtgggtatgcatacacatacacacatatatctacacactcacagacacacatctttcaggatkgccatgacttatgtgaagatggagtcctaacatttaatattttttaaaactattaggaattgtgctcattgagagaaatccaatacttacaatgctaaatcttcaagctattgaggaaatagctggaaaaattggaaaagagatttgtttctttctgttccttttcaagggcagaatgaaaactgaggtgtgaagtttacagctgtgtttcggttccataatgaaaggtcttggaatcacaggttgatgtaattttaatagtgcatatcattcccatcactttgggtactttgggaggtgtttcctaccgtctgggtctgttcgcatgttcacgcagcctgccatctgagaaggaattttccctggcggccatgacctaatttcaaggttctggcagctgaatgcaggcgactgacagccaaggttttcctacttagcatattaatcacctccatttttagcatgcagccatgataagaggaagccagtgatggattcaccagcttttctgaaaatcaggctgatagaacaccctatgcacctctgtagacctcagactttccacacatacgttttttgcgggcatatctgagtttccagtttctggctcttgttcagacttgaacatatgctatatacagtgaaaagtggttggattctagaaggtgtcgaagtttactagctcagataaagatcggcctgttgcttttttgttgattaccttttcttcccctttaattcccttttatacttgttcctgtaatctaaggaagaacatttcatttttctatagaaggagatgcttatgcagagccaaatgaaccattgcc

SEQ ID NO: 546125 - DNA, 647 bp, Homo sapiens
caggcacccgccaccatgcctggctaacttttgtatttttattagagacggggtttcgccatgttggccaggctgctctcaractcctggcctcaggtgatccgcctgcctcggccttccaaagtgctgggattataggcatgagccaccagacacagccaggcattgttctgtgtgctctaaaccctcaccaagaaaacctctgaggtggtacgattattgtcttccatttgacagatgcagaaactgaggcccagcagagattgagtaacttatgcgagttgtcactcacctcacacgccccagcaagcatccaggagagcctgcctcttggaatagaaatcagacatcccacaggaactctgaggttttcccactgctgccagatgtatgcaaggaacacgtgatcttcgtaattccagagcggggcaaactgcttggcacctcttcaataggtgacattcaatgagtaagtgactgtgactactgtgactctcctgacagcctcagcctcctcaagtattcccctccaggttgtacttgtccttgttagcacagcctcatgagactgaagtccctacccctcaaaccttagcttgccaattctaagaattcagaaatgcagctctgcactctgtggctggctc

SEQ ID NO: 546126 - DNA, 671 bp, Homo sapiens
ttgattacctctagtttagatcaacgccttatgctatgtaattacggcaaagtaaacacatacgattyatcttctttttcaccgaaatcccactgaaattaaagaaaagctatggctaaagaaggcaccatagcatactgaaaaacagaaaagggtagcatcagtggaccagattatttgaggaatttccaggacataaaaaacatctcggagagaggagacaacagtgagatcagattaaaagaaacaagtatagagactgcaccacaagattcaaatagaggctattgcaaaaagcagcaatagtttctaagaaaaccgcagatgagtattattttccaagtaagcaagctaaatcaaccaccgagaaaacattgggtgaatcattaaaggactaccatcagaagatctggccagtgacccttctacccaaagacttgcacagctggctacagatctcatttataaacaaagctaaaaggctttgggaaaggctcatggcttcagtattggagtctgagaagcagagtacagcaagactgccacagtgacagcagaggcacaggaagaaaagggaagtctgactagagcatttgccaccaagaaaaagtgtcatgtacaggtctctaaagtaagagtactgaaataggagactcccagaatagcttcag

SEQ ID NO: 546127 - DNA, 893 bp, Homo sapiens
tgacccaataaatatcacaatcaatcaatatacagttttcttctcttgaagatgtaatgttcaggtgccacactatcagctgctgtactatgacacttacttagatccgagcaatggttagcacattagcacaaagtttaactctgtaatcagatggtcatcagatatgttttggaagttagtaaccccttaggaatttccacacagagagtaatgtaagggaagtcttaaatatgtgaaactaagttaactaccatcctcaaattactcttagttttgttattggtctaaactttattattttaaacagccttaataagatataacttacataaacttcatttgtgggagaaaggtttaaaatcacaaattctcttccctggatcttctgtaaatatatacatattccaaagtacagaactgtacaatgacatcatcttcagaataatttcaattataagcaatatgtcaataaacagaggagaaatgagtttatcctcaccagacttacataactattagcttctacattaatcaagactggatgatttatacattcaggaagaaaaagtaatatataatcttaagatttaattcatgcaggtaaaattattgctctatcttctgtgactgtactgtgtaaaaaccaccaagtttagagtatttcaggttagtctagcagaacactcacctttattttcacatatatattaagttagaaggttcttgggctcactttaacagaaagaactaagggatttcattgtaaagattttcttttcttttcttttttttaatttgagacagagttttgctcttgttgccaggctggagtgcaatggtaaggccttggctcaccacaacctccgcctccaggttcaagcsattatcct

SEQ ID NO: 546128 - DNA, 1079 bp, Homo sapiens
gtacaggaatggacagctgatctgaaattacccaatcatagccctcctctgggatttttatttttattttttgagaccgggtcttatgctgtcacctaggctggagtacagtggcatgatcatggctcactatagcctctaccttccaggatcaagtgatcttcacacctcagcctcctgagtagctggaactacaggcatgggccaccatgcccagctaatttttaaaatggtttttgtagacacagagtctcattatgttacctaggctggtctcgaactcctgggctcaagcgatcctcccatcttggcctcccaaagtgctgggattacaggtatgagccatcttgctcagctggaatttttaaactttgttccaaagagagagcctattcctttctcatgaagaaccagagatgccaagtgtagcggcttcattgagagccaagccaagagcatgggcagagaagagaggaggaaagaagggcctggtagcctttaaggcctcaactccagttggacctgaggctagccttgcccctgcctccagtaagggagctttctaataaaccttcctttatgtttaaagtttgtttctgttgctcactacccctggaattctgaccaacacagaagtgttcaggaattgaacaggagtagactttagagtaaaaagtgaccaggaaaatgtaagacaccccacccacctgcctgggagccagcactgttgcagggagcctagaccttctgtaaatctgataggatggggtggctcggtcattgtatgtagttgtgaaaggaaacggtgactttgaagggctggaggacttagggacacatgtgtccccaagcaggggaggggtaggggagggtctgcattttagaaggtttgctcaggcagcagggtagtcttgggttggaggtggcaagtctggagtgaagaagtcagtgtgggcgaatgcagcagcccaggcaggaagggatgagctggtcctctcagtccaaggaggagtctaaggaaagccggcacctgtcgagaaasggacctctgccctgcatttggggccaccacacagacc

SEQ ID NO: 546129 - DNA, 1719 bp, Homo sapiens
aatctcttctacagacctgtatagcaagttcacagtgttattagtaggtataattccttccttttaagatggcagaaagttgtataaaaaatattggcctgctttaatccatcatgaaaataatatttttcatgcttaaagagtaaactctacagttccggctactcaggaggttgagataggaggatcgcttgggcccgggagtttgaaaccagtctgggttacatagagaccctgtctctctttttctttaaaacaaacaaacaaaaaggtaaaatctaatctagagaactgagaatttgtctatgcaaaatgacttcaaggggcaaaatagctaggatttcttataaactggataattgtattgcttagttactacatagatattaaaatgaaacaaattagtagctacaaagagcatagtatctgattgctgatttgaaagaaatgtttaaatcctaatttttttttttttggagacagagtctctctctctgtcacccaggctggagtgcagtgacacaatcttggctcactgcaacttccacctcctgggttcaagtgattttcgtgcctcagcctcctgagtagctgggattacaggcgcatgccattacacctggctaatttttgtattttttgtagagacagggttttgccacattggccaggctggtctcaaactcctaacctcaagtgatctgcctgcctcgggctcccaaagtgctgggattacaggcatgagccatcgtgcctggcctaaaccctgatttttaatgtttaaataaacttgttttcctcgcagccatcagtaaaacgttttctgttatttatgtataggacagtctcaaatttaggagataaaattttgttactttagtggtacataacatgcataaatatattttacttcgttttcagagatatattaaaaatttatatgtaaaactcataagttaaaacccatgctgacatcatattgcttatttgataattctgataatcaactgtagcatagttatcaataaaaagatctctaagcagaaaaaatatgtgatacaataaccatgttcttaacatgcaggacatattaatatttctacctcctagcagtgacctctttgaattcattttcagtcatctactgcacaatgacgtttctgttaacaatcgactgcatatataatggtggccccataagatttaatactgtattttaactttaccttttctgtgtttaggtactcaaatacttaccattgtgttagagttgcctgcagtattcagtacagtaacttgctataaagcagaggtgtccaatcttgtcttccctgggccacaatggaagaattgtcttgggccacacataaaatacactaagaatagctgatgagctaaaaaataaaaaagttcttaaaaaatccccccaaaatctcataatgttttaagaaagtttacaaatttgtgttgggccgcattcagagctgtcctgggctgtgggttagacaagcttgctttatagcctaggagcaacaggcccatgtagcccaggtgtgtagtgggctatgccatctaggtttgtgtaagtacactgtgatgttcatacaacaacgaaattgcgtaatgacacatttctcagaakgtatccctactgttaatcaactcatgactggattgttctctattctgttccatgacatgatttctataaaataaaaa

SEQ ID NO: 546130 - DNA, 506 bp, Homo sapiens
aacgacccttctgtttccatagaaccccatctctcttttctaccctagctttggaaactttgtctccaccaggggttcaaagctgcatatgcaatgaatcaaaagagtatgagagcaaaaataatagatttgcttaaaagcaacactcttcttccagtgatggctaaaagaactaatggacagaaacgggacttaaagccaagaagcaccccctctgaatagccccgtgaaactatttttctgggtggattaacaacgaaaaatctaattctgtattaaaatcctcaatcttcatcagtcaatatgcctagctacacaccaactgactcttaaactsacagatttccctgggaggagaagactcatgtgttgctgcctcagtatacccaagagaatgggaacgagaaagcttatttcgaatcaatacttagtatggcttaaaaatgcttgcctgctgaaactttattgacttcaggagttctggaaaaggaatcacattttccttc

SEQ ID NO: 546131 - DNA, 506 bp, Homo sapiens
aacgacccttctgtttccatagaaccccatctctcttttctaccctagctttggaaactttgtctccaccaggggttcaaagctgcatatgcaatgaatcaaaagagtatgagagcaaaaataatagatttgcttaaaagcaacactcttcttccagtgatggctaaaagaactaatggacagaaacgggacttaaagccaagaagcaccccctctgaatagccccgtgaaactatttttctgggtggattaacaacgaaaaatctaattctgtattaaaatcctcaatcttcatcagtcaatatgcctagctacacaccaactgactcttaaactgacagatttccctgggaggagaagactcatgtgttgytgcctcagtatacccaagagaatgggaacgagaaagcttatttcgaatcaatacttagtatggcttaaaaatgcttgcctgctgaaactttattgacttcaggagttctggaaaaggaatcacattttccttc

SEQ ID NO: 546132 - DNA, 1404 bp, Homo sapiens
gaggaaagcctctagttaaaaaaagaaacaacaaaaatgattctggcaacctccatcctcactctgccattcagcagcagaggcactggcatcaagataagcaggagtgaaagcttttgaaatactcactgacacctatctcatgatgatttgtattaatttgtaactcttctatggctaaaaagtctcactaccaatttactcatttattaacatgtcaattacatttgggcctgaaatgtttatgaagacttcaccacacatttaatatagtagggaccaaaggagtcacacattgttgccctattttcatttgaaattaaatttttctcatccattggactaccttctgtagttatatccaaaaagtattactgaagaatgcacatccagggaagtctaattataaaaactgtagccattttcctccctctctaaaccccctggtcattaagttaccatgttattctttaggaaaatgcagtcaggctcaagtagagagagaaattcgggtagcatgtggcagtctcatgtattgtgaggctctccagcaggacttcaaagcagaatctgattgttgcagatgggaggaatgctttccacagaaatacctttttaagactcatggtgctgtaattcatatggtaggcacttgtgattcattcctgatgatgttgggatcatttaactcacagaaccattgtcgctaccataaagtcctttcatctgtagccaaaaaggtttatttcatgcaaatgaaaaattttcattaaagtatcaccttaataacgggtaaagatatatattatctggttatgtttaaaatgtaaatttatgaacatattctgaagattcatttcatgttaagattttacttatttgatgtcccaggactctttccaagttcactgaatccggaaatcaattttataagaaatatggagattattaccattaaatctttcaattggcttattccaagcagccctataaatactgcatatgttttaaagaaagcattttcaatcacagtaaaaatccttttactcttctagtcagtgatgctccaggaggtaagtttatattctcagcaccttttgaaagcaaatgaataaattgtatcctaaaaaaagtctgaaacaacagaatacttcaatgccattattttttgtaagacaaaattgatcctcagaaattcctgagaaaataaatggcaagaatgattgactggaactttagttatccatcaatccatccatccatccattcacccatccctccatccatctaygatccaactacaaatcaactattatttacaaaatacctactctgtgccacagttttatacataattctgatacttctattagatatgagttattataaactctatttgaacct

SEQ ID NO: 546133 - DNA, 546 bp, Homo sapiens
cactacgttgcccaggccggtctcaaactcctaagctcaagcaatctgcccatctyggccttccgaagtgctaaaattacatgcctgagctgctgcacctgacctggcttaatatttagatatttgctatatttacagttgggtgtttaattacctgtagccaaatgcagccctaaatgacaggggacagtcccctctttaccactaaccaggactcggggagctgtgtacactggggagtaaagctccaggctagtagtcaggattcagcagaacgtcaagtaatcaggcctcgtcaccgccggtggcctcaggaatgtcacatacatgtgcatatacacacccatgcatgcacacaagcatgtgtgtctaaatagcccagaggcggatcacctgaggacaggagttcaagaccagtctggtccaacatggtgaaaccccgtctctactaaaaatacaaaaattagccgggagcagtggcgggcgcctgtaatcccagctactcaggagactgaggcaggagaatcgcttgaaaccaggagtcag

SEQ ID NO: 546134 - DNA, 546 bp, Homo sapiens
cactacgttgcccaggccggtctcaaactcctaagctcaagcaatctgcccatctcggccttccgaagtgctaaaattacatgcctgagctgctgcacctgacctggcttaatatttagatatttgctatatttacagttgggtgtttaattacctgtagccaaatgcagccctaaatgacaggggacagtcccctctttaccactaaccaggactcrgggagctgtgtacactggggagtaaagctccaggctagtagtcaggattcagcagaacgtcaagtaatcaggcctcgtcaccgccggtggcctcaggaatgtcacatacatgtgcatatacacacccatgcatgcacacaagcatgtgtgtctaaatagcccagaggcggatcacctgaggacaggagttcaagaccagtctggtccaacatggtgaaaccccgtctctactaaaaatacaaaaattagccgggagcagtggcgggcgcctgtaatcccagctactcaggagactgaggcaggagaatcgcttgaaaccaggagtcag

SEQ ID NO: 546135 - DNA, 550 bp, Homo sapiens
ctacgcttctgtccaaatcaccgtcctccagggccatgcagaaagccacttctgcaggctgccatcaaacacacctgggagtggcattgtctcccgtcccctaagcagccacaggtakcccccgccccagaacagggcctggcctctaacaagcgggatggctgactgtgaccttgaggggctaaggggtcggcaggccaaggggaccaaccagttctacctttgaggttttcccagtttgcagaagcagaaaccgaggcatgctgtccgggtgcagtggctcatgcctataatcccaacacattgggaggccaaggcgggtggatcacttgaggccaggagttcaagaccagcctgggcaacatggtgaaaccctgtctctactaaaaatacaaaaaattagccaggcatggtggcgggcgcccgtgatcccagctactcgggaggctgaggcaggagactcacttgaacccaggaggtagaggttgcagtgagccgagatcctgccactgcactccagcctgggcaacagaggaagactctgtctcaa

SEQ ID NO: 546136 - DNA, 651 bp, Homo sapiens
ggatatcaaattatagctcctcaatctaatgaatggtgaacagtttcttaacctctctgagccttcattttctaatttgtaaagagagataatatcagaaagtagcccagatactagaggggagtgagccttcgaaatctcagcagcaggatcaagatgttaaaagaggctcttcctaccacagttttgacctgggtgtgaacacaagagatattagatgtcaaagtgaatgtcagtagatccccacttgaaaaatttatagagagatattttgtaaagtggttgytgatttttaactcctctcattggcttcaaataaaacaaaaattgagaacagagaagggaggatttgaaaaaagatttatttgggaagagctaatgcagtgccataagcgtctcctgccagaaggcatgaggggtagggatgggtgttaccccattcattatgagccccgtgagaggcttctgtggggtggctggagagcttgaaacatgtcccctacatttgaaagacatgaaggagttgtgcttaatgatgagagcgttgatgatggtgacaagttgtagactgctgtgatggatcctgcctgtgatcccaacacttgttgggtcaaggggtgcttgttcatttcccatggagcatggttcatt

SEQ ID NO: 546137 - DNA, 651 bp, Homo sapiens
ggatatcaaattatagctcctcaatctaatgaatggtgaacagtttcttaacctctctgagccttcattttctaatttgtaaagagagataatatcagaaagtagcccagatactagaggggagtgagccttcgaaatctcagcagcaggatcaagatgttaaaagaggctcttcctaccacagttttgacctgggtgtgaacacaagagatattagatgtcaaagtgaatgtcagtagatccccacttgaaaaatttatagagagatattttgtaaagtggttgttgatttttaactcctctcattgkcttcaaataaaacaaaaattgagaacagagaagggaggatttgaaaaaagatttatttgggaagagctaatgcagtgccataagcgtctcctgccagaaggcatgaggggtagggatgggtgttaccccattcattatgagccccgtgagaggcttctgtggggtggctggagagcttgaaacatgtcccctacatttgaaagacatgaaggagttgtgcttaatgatgagagcgttgatgatggtgacaagttgtagactgctgtgatggatcctgcctgtgatcccaacacttgttgggtcaaggggtgcttgttcatttcccatggagcatggttcatt

SEQ ID NO: 546138 - DNA, 609 bp, Homo sapiens
cctgacattgaataaagtttggtgtgtagattaaatcttggtatagatattttgacttcagaataaagacttttaaagttattacttaatatctattgcctgtctattacgtagtgttgagcagaaaattattggggctgctgaagtttgtatatagcaacaatggagggtaacctccttaaataattgcaattggagtgagagataaataataatgataagttggcttctgagtatataacagttgtccctgttcaaaaaacaggtaaatctcagtgccaaaactaaagatccattcatgacaacagcagggtctgccacaaacataaggtgcctatggaaggtggtgggaagctgctaaagaggggcttgagccacctcaggtgtcccagggaagcagggatcttgagatactggggagtctctggattgatggagaaagagctcaggaaccaacagcaaattgttttcaccccaagagagagcctgagggagaacctgtggtattytcattaccattggaaacattagcgaagccttgaccttcttcctgctccccttccccaaccccaggttggggagaactgatgaaggagtctttccaaaacc

SEQ ID NO: 546139 - DNA, 2120 bp, Homo sapiens
ctgtggtgccaaacaggaatggcctgcttggggacgcagcgagctcccagggcctttctgctggttcctctacccctgtatttcgctcagctctctaaatgcactcagcttcgggtaaagtcagaaacttctcctgcaaagagaaacctacagtttctccagtaggggtgtgtgttcggaagagaagggtatccctttcccacttctgcagttggggcactcacagtatttggggtatcttccaagtcctgcaggagcagtctgcttccttcagagggtctatgggtcttctcgagattgctggtttgttcttgcagtcgatctggagctaaaattcacaacgtaagtcttggcatgttgctctgttggagctgcaatctagttctgcctcccacctgccatgatgatcccccaatcttttctgcatagttagtgttttattctttgaagaatgcttctaaaacatcacattaagtcaagttgaaaggtaaagttcaaaatcgacagtttttaaaggttaagttataagatatgtaatgactgttcactcttcaaaatcttaaaatggttaaaatgattgaatacccatcaatccattgggcaaattggaacatgtggtaaatacaattctttatccacacatcaggtttactattatttgcaggtgaaggtagttggaaacatcttatatataattatttcacttgaaggatgtcaatttatgcaatgatgtgggggtgccagtgtgaagtgattgcataaattaggaaatagggactcaaaagttctggttcagcctacacaacatagcaaaaccctgtctcttcaaaattaaaaaaaaaatttactggacattatggcatgcaccagtagtccaagctactcaggaagctggggcgagaggattgcttgagctcaggaggttggggttgcagtgagctacgatcgctgatcgcaccagcctgggtgacagagcaagaccctgtctcttaaaaagaaaaacaacaacaaaacaagttatggctttaaatttttatcagtttcatcttcaattatcagggccctgagtaaaaaatgccaacacgtgataacatgtaaataatgtacccgcccacagtgctcttactgtatgattttatatcccttttataaatgccataagcatctggaaataagggaaaagtgattttaaggatgttactatgtgctccagctttttgaagttgttaatatatgtttacattttaacacatttttcctataaactcatcttgctttctcaactgtagcaattcccacaagaacatgttgactccagggcacaaggcttcaaataattactgtattagaagaattggcactgccctagaggaccagcatattctgtgcagaatctttatttataaatacttctttataaagagaagtaggaggatcagtttttgataaactctattcttgcaaacaaacccaagccacaggttatatggagaacacaatagaacaactccatgatgaggatctrccaccatcaaaaacaaaaatacttctcctgagttcccatctcaaacaatattgaaacaaatataaggggtgagcactttgaattaagcattattgagcaggcacatactatacaagggaaggatcacagttaactatttaaacttggggcccagatatgttagctgagtgatgacggagcatagctattagtgttcatgattagtctttaaaaattgttaatcagagacctcagtgccttcaaagagacaaatgtcttctttgagcatgtttagttttcaacgtcatttttaggcctataaacaggataatcttctttccagttttctccaaaagagctttaaaaaacctttaaagtcttgcggaaaccataaaacttctctaagcctgtttcctatacctgtagaatgggtagaataacactcccatgtgtaggaaaagtctgctggtatagttgggtgtcattcacaatgaaggccagattactcacaacaaagagggtcaggcaagtggaacggaaagcaatgaagcaggcaccagccccattcactagcaaggtctggtaattggccaggaagagaggtttgcatgcaatt

SEQ ID NO: 546140 - DNA, 545 bp, Homo sapiens
aagagtatgaaggggaaaaggcctccctccttctcccttccagcagtaggctggggtggggacaggcctagaagagggcactgagcgctaagaacactcagtgaagattccgagagttttcatggctcagggaatccatatgaagggaggcaggtgtagggtgctgcaagccagacttccaggatgccctcaggcctaggggcttggggcctgggctgttagaagagaggaggatgggtgctcaggggccagccctctgaggctccgtcagaaagaggaaggcttggggactaacctagggacagggacgtggggtgaagagaaaattttccttggagtgtttagggagattggggatgttggccagagggctttattrgactaacactggcatagctcaaagtctatttgtatacatagaaacagattcatggatatgtgtgttttacccaccttgaaccagaaagagcttcaggaaaccacacagctgtgtcctgaggagacacttgtgagaaagattctggtttgaaaagtcatcttcctga

SEQ ID NO: 546141 - DNA, 623 bp, Homo sapiens
ctgggtgatgaaataacctgtacaccaaatccttgtgacatacaatttacccttataacaaacttgtacaggtattgcttgaacttaaaagttagaagaaaaaaattaaattaaaaagaaaaagattctgaaacctgttggacagatttttaaaaactccttgaagttgctgcctaccccatggaaaagcaaaatgaatgcaagaacctttgtctttttcctcataataaacgaaatgtaaaagaggacaggtgtcatttcttcttgcaaggtaggaacttagaaaataagttggactagaatgtatttatttatgctgataatgttatcwttacaatttccctgctttcagaaaaaccaaaagtccttatccgtccactcaatttaacttgtcaaatattcatgagtacctctagagaaaatatattctgctaaacactgtgggagatttaaaaaatagtgacacatacttgtgtcctaattgtagaaataagacatgtttacaattttatttcaaggctgaatgtgtaaagagaggcatataaaaagtcacatggatggttcaaagggaaaaatagcttccctccatttgaagagaaccattctgccagtctagttctgtg

SEQ ID NO: 546142 - DNA, 668 bp, Homo sapiens
ggaagagtaactactccatgctttctgtatctttaactgtttttctcatctgttatgttcctcggtgactaaattgatgcttccttctttttatcaagcatattctaaaagtttatattgtcttcgacagtctggcttaggaatatttgtatacttactggtacattttttaaataaaatatactggaatgtttatagttggggtatcattaatgcttctcatatcataggccccaagctggaatattaggcctcatcaatacaaacatagatgacttccacccatcaccttctcattaagtatcctttccttaggcttacataggccatagggttttctaaggggagatgtccataaatgagatgaaagccaagtaattcttaggcaatgacagagattgctcctgctaagtgatcaccaaagaaggtactagctactgataaagtgaaagcttcactatttgctaactaaaggagctgtggtagtccatgcattaggcaatggtgggctgcctctgaggaaagctggaaaatctgtgacccagttcccacatagataccgaatgtgcaaacscaccccctccttgccattacggcctgaattgcacctccccaaaattcacatgttgaacttctgaggtatccttcgtacctcagactgtgagggt

SEQ ID NO: 546143 - DNA, 552 bp, Homo sapiens
agaagaaaataaatcaaaatactaaaataatcttaagagttgtgagctatggttttggggtttttttctctctcaggtttttctaactactcgtataatygggaaacttaactatttaaaaatgttgtactcataaattccgaatgaatttaaatacgtatatatctgccaagttgccacagctgtctgtgtctaccactgtaggttctcttataacaaagaagtcaaagacagggttttttattttttctctcaatccctcatacattactgctttccgcacaaacctcccatctgggctgctttcccatattcccctaaaccaagttttctcaacagcagaaccgctgacattctgggttggataatctttgttttgcggggctgtcctgtgcactgtatgatgtttagtcacaactgtcctcttcaaactagatgcaagtggcagtgctctagttgtgacaactaaaaatgtctccagacactgccaaatgtcctttagggagcaaaatcacctccagtggagaattactaacctaaacctaacttcat

SEQ ID NO: 546144 - DNA, 532 bp, Homo sapiens
gaatgtggaggaagttgttggatttgttgctaggaagaacgctaagcaagttttggaacgttttctggcatttccagaacagtgagacttttcttctcttggaaatcttgtgaggagacattggcatcagagatgagaaaaagatggcaattccaagaaaagaaggaaatgtgattttttcctcrtcccctccgctatgactatggatgtgtgagtgacttagcagcacagagagctagcggcatatgaataccatctgctgctttaatacttgctatgtatattttctgtcatttcaaattctttggacagatcacactggttgagtaaagcagagagaagagactgttggcattcatgaccttacatttgtggtttgtgatttgacagtggacacccaggaagtttattaagtgtagtgatttagcaatatgctggaataccagtttgcatcgtacaaactcactggctactgggcattcacgcctcagtgcggcttctttgttctgaacatgttttcgggtatgaaaaa

SEQ ID NO: 546145 - DNA, 538 bp, Homo sapiens
gtacacatatatcaaaacattgtaccccataaatgtgtacaattatgatttgtcaatcaaaaacaataaaaagatatgttttaaaagatcaattacaactttgtgcaatggcagtatcatagccagtgggatttatccaaagcacaattattgctagwtgaaaagatcattgtatttctacatactagcaatgaacaaatgttttttaaaactcttcttaaacattagtttatattaagtgtgagccaaggtaataggacaagtgattaataattaaaatgacaaaccaggcatggtggctcacatctatatcccagcactttttaggaggctgaggcaggaggatagcttgagcccaagaatttgagaccaacctgggcaacactgcaaaaccttgtctttactaaaactacaaaaaattagcctggcatggtggcagcatgcgcctgtagtcccagctactcaggaggctgaggtgggagaatcacctgagcctgggaagcaaggctgcagtgagccgatcttgtgccactgcatt

SEQ ID NO: 546146 - DNA, 538 bp, Homo sapiens
gtacacatatatcaaaacattgtaccccataaatgtgtacaattatgatttgtcaatcaaaaacaataaaaagatatgttttaaaagatcaattacaactttgtgcaatggcagtatcatagccagtgggatttatccaaagcacaattattgctagatgaaaagatcattgtatttctacatactagcaatgaacaaatgttttttaaaactcttcttaaacattagtttatattaagtgtgagccaaggtaataggacaagtgattaataattaaaatgacaaaccaggcatggtggctcacatctatatcccagcactttttaggaggctgaggcaggaggatagcttgagcccaagaatttgagaccaacctgggcaacactgcaaaaccttgtctttactaaaactacaaaaaattagcctggcatggtggcarcatgcgcctgtagtcccagctactcaggaggctgaggtgggagaatcacctgagcctgggaagcaaggctgcagtgagccgatcttgtgccactgcatt

SEQ ID NO: 546147 - DNA, 1137 bp, Homo sapiens
tccctagatgttaagaaagtgaaaattggctcaagatagtcttgctgagattcgacactgtaaaatcagttttctaaatctataccctgacttgagcaagtttttaaagtcatatctttcagtgaatgagtgaataggtttccacatcttgacaaagtaaatctccatttcattgtatttcattttttatcagaaaacaagcaggggaaagaacttaaaagaaagttttttgttggttggaaatctttgtgagctaaggctatttgtgtccataacactagtgggtgtaggacagcctagacaactaagtgtatgtgtgagagggttaagaggctagcaacattgaggcagaaaatggtaaagaacagcaaaaatgacatttaaaattgaaaaattaccccagtatggtcctttaaccaaatgagtgaaataagggagagaataattcttccatattatgcaattgcacattccatgtgaatcccatgtaaattataagaaagccttaactctcaggtcctgttgagtttttcttattgttaacacatatttgatctggaattaaaatgttcatgtgtttgcatgctcttccatctgtattttgtctacatgcgaggattctagagagtagatactacattcatctaagttaattttatttcatttcatgctgcaatgcattgttatcacatattgataatattaatgagaatgctgttaatccaatgagaaatccaaaatgaaagacrtaatcaagtaaagtatttgtggtttcagtttttcctaatatgtttacagtctttcattttctcagtctattgtgataggcaacagcatatttttacagtgtaattttaaatccttttgcaaagcaattcttccctcgttgctttttctgcctctgttccactctccacttgcttttccaatatgtgtgtattttttaatagacgattttattttttagagcatttaggttcacagcaaatttgagtagaaggtatagagatttcccatatatcacctgccaccactcatgcatagctcccctcattatcagcgtccttcaccagagtggtatttttgtcacaattgagaaatctgtattgatacatcattatcacccagagttcatag

SEQ ID NO: 546148 - DNA, 1596 bp, Homo sapiens
tttttaaaaagaaatacatgtgatgtcttttgttgttaatttttttttaattgtattttgaggaaactgagaagtaattgagggcagagactctccaggaatgaagtcaataaaagcaagagaaagaggtgaagtatcagaagaaaaatgatacctcagattacataacacacactaccagcctgggaaagctctctccccttcccatcctggaccattaaatcccaagccatgaggcagggccaatcaacaaaggatgtcagagcatgagttaggtgagaagggaagggagagacatagtgatggtgactggtgattcataccatacagggaaatcaatcaactaagtcaacgcaatgaggatgggaagagcccagactcttactatcagagaaagaaaccacaaagatggaaagggagaacaccaggctgaatcttctggtattagaggtatcagattaataaactcatggatttcaaaacatatgtaaatatataaataaatataaacataaaggaagcaggtgcatatgtttgtgttcctagctctgtactgagatctgaaagtgacaagccaaaagtaataagcacacctaatgcccaggtctagctttctaaatattattgtttaatttaaaaaaaaaaaaaaaaaaagcaggattctctgtgaaaagagtagactccagggctgggataggaaaaacacaagatgaacctggcatatcctactgtacttgaaggtaaagaaatgatcaaaggaccgggcayggtggttcacaccggtaatcccaatactttgggaggctgaggcaggagaattacttgaggtcaggagttcaagaccagcctggccaacatggtgaaaccccatctctactaaaaatacaaaggttaaccaggcgtggtggcatgagcctgtagtctcagctactcaggaggctggcacgagaattgcttgaacccaggaggtggaggttgcagtgaaacagagatcacaccactgcactacagcctgggtgacagagcgagactccatctcaaaacaaaacaaaaaaataaacgatcaaagaacgattgaggcatttcaaaaggacacagaaccaatctgaaggggctcctaagaacaaaatttgggataatctaagcatcaaaacatataaggagagtaagtgatcataacccactgaataaaacagagatccatgaatttatcagtccacccgagacagaaagtcagcccggggtggcggcgggggtagggataaatatttgaatgggttatatatgtagtctcaaagtaactctcaacaaaatacttattactaggggaaaagaacagctgtcagggatatctggcagacacaatcttgatcaagtgaaggcatcaactccaatggaataaatcaaacctgtgtaccatctgaaaggatttaatgcaaaaagacaacatcactactgtggcatcccaaattgagaaacattatataaaataaccggtttacaatcttcaaaaatgtcaaggacatgaaagccaggaaaacactgagaactgttccaaattaaaagaaattacaaaaacaagaaaacagaatatgc

SEQ ID NO: 546149 - DNA, 623 bp, Homo sapiens
ttttagtagagagggggtttctgccatcttggccagcctggtctcaaactgctgacctcaggcaattctaccgcctcggcttcccaaagtgctgggattacaggcatgagccactgctcccagcctacattttccccatccttggttcatatgacttatgtgggttgacccgattcccactcctagaggggatgcataatgcaggcctggccatcagagaagatcaggtgaggcgtctcagggcctgggctgtggctgaaacctttaggaagaattctccctgctctggggctgcctgggtgtaggatggaagccagaagcttgcaggggccatcctggttaccgcatgggagagcctgccagggaacggtgccaacacagagacagcacagctgagtcccsaggagggcctagatccagctgagcctgaagctggccacttgggctcttcatttttttttttttttgagatggagtctcactctgtcgcccaggctggagtgcagtggcgcaatctcggctcactgcaagctctgccttccgggttcatgccattctcctgcctcagcctcccgagtaactgggattacaggcacctgccaccatacctggctaatttttta

SEQ ID NO: 546150 - DNA, 538 bp, Homo sapiens
tatcaccaggtaccattgtaacccgaggctaggaggggaaagagcaaacatgagtccttgagcayagtgggtgagaaaaggaaggagagagacacacaaaacagcagttctcaacccttcctgggcttcagagtcagctgtgaagcttaaaaaatgcagattactccgggcgtggtggctcatgcctgtaatcccagcactttgggaggcagaggcaggaggatcacctgagaccaggagttcgagaccagcccaaccaacatggcgaaaccccatctctactaaaaatacaaaaattagctgggcatggtggcgggcgcctgtaatcccagttacttgggaggctgaggcaggagaatcgcttgaacccgggaggcagagtttgcagtgagccgagatcgcaccattgcactccagcctgagcaacaagagagaaactccgtttcaaaaaaaaaaaaaaaaagttacccaggtgattgcgatgtccaagcagggttgacagacttttctacaccgggagacaacgaactgtgaacaa

SEQ ID NO: 546151 - DNA, 1151 bp, Homo sapiens
ctgcaattgacagcctgtcagtacagtatgaaagagtctgtttcactccctcatcatcagcaataggttaaagcaagctttcttctaaagagagcaaaaactttttaacattaaaaaattaaaagttttctcttccaaaattgtacacatcagtagagataagtatccagcagtgttacattgaaagggtcatggatctacttcatgagggattttttttttcagggtgattttttttttcagtttgttctccaagcaagaaataaytctccaaacaaaagggaacttaattctgaggcattaccgtagcacatcaaacatcaaaaacagagataatataagatagaatgctccagatacacagaagaaaaaaattagatctacaactttatgcactttcccagataatgagtcaaaaagcgagctagcaagaaagtctgccttgggaaactgttaataaatgcagagtacttaaagaacagactttgagaatgtgtacaagcaaactttaagaatattttgtgctgggcacagtggctgaagcccttaatcccagcactttgcgaggccaaggctgttggatcacctgaggtcaggagttcgagaccagcctggccaacatgacggagccccatctctactaaaaatacaaaaattagccgggcatggcaacatgcacctctagtcccagctactcgggaggctgaggcaggagaatcgcttgaacccaggaggcagaggttgcagtgagccaagttcgcgccattgtaccccagcctggatggcagagcgagactccatctcaaaataaataaataaataaataaataaatataaaatttgcaattataacagaggccttgaatcaaaaagaagatggtccaggagtaatagtaaggggtaagagaagggtaggggatgaggaaagggaacctggaagaagaatctagatgagaccagaagagagatgattatttaccctcccatgcagattaaatagcatctccagcttcaaagaactgatgtgagaatcccaataaacaacgtatatggttaatgtctaaataactatatagtaaaacttacattgttgccattccagaatattctttggtcaagcttcaacttaatacatcctctgtaaatatttg

SEQ ID NO: 546152 - DNA, 1151 bp, Homo sapiens
ctgcaattgacagcctgtcagtacagtatgaaagagtctgtttcactccctcatcatcagcaataggttaaagcaagctttcttctaaagagagcaaaaactttttaacattaaaaaattaaaagttttctcttccaaaattgtacacatcagtagagataagtatccagcagtgttacattgaaagggtcatggatctacttcatgagggattttttttttcagggtgattttttttttcagtttgttctccaagcaagaaataattctccaaacaaaagggaacttaattctgaggcattaccgtagcacatcaaacatcaaaaacagagataatataagatagaatgctccagatacacagaagaaaaaaattagatctacaactttatgcactttcccagataatgagtcaaaaagcgagctagcaagaaagtctgccttgggaaactgttaataaatgcagagtacttaaagaacagactttgagaatgtgtacaagcaaactttaagaatattttgtgctgggcacagtggctgaarcccttaatcccagcactttgcgaggccaaggctgttggatcacctgaggtcaggagttcgagaccagcctggccaacatgacggagccccatctctactaaaaatacaaaaattagccgggcatggcaacatgcacctctagtcccagctactcgggaggctgaggcaggagaatcgcttgaacccaggaggcagaggttgcagtgagccaagttcgcgccattgtaccccagcctggatggcagagcgagactccatctcaaaataaataaataaataaataaataaatataaaatttgcaattataacagaggccttgaatcaaaaagaagatggtccaggagtaatagtaaggggtaagagaagggtaggggatgaggaaagggaacctggaagaagaatctagatgagaccagaagagagatgattatttaccctcccatgcagattaaatagcatctccagcttcaaagaactgatgtgagaatcccaataaacaacgtatatggttaatgtctaaataactatatagtaaaacttacattgttgccattccagaatattctttggtcaagcttcaacttaatacatcctctgtaaatatttg

SEQ ID NO: 546153 - DNA, 1240 bp, Homo sapiens
gacactaatctcatcatgacaactctaccctgggggcctcctctaaacctaatcacctcccaagatccaacctcctaataccatcacattgaggttaggatctcaacatatgaagtttaggggaaacaaagatgtagtccatggcaactggatgaagagtgacaaagtagtcagccaatccagattactggccagatcagtctcaagtttcagtctatgacggaaaacacttggatgtcctgggtgttcctagcgaacttccagctgtctttgtctctgcatctgccccaatgtgtcacctctcacaggcctggttcttaggagccagactatcctgcctattgtcatggaaagatattgatggrcctcctcctctgtaccttttgttcttagacgggttcattctgtctctctctctctctctctcactctccttctcgctctcactctggttagaggacagtgaccagaaatgtatgttcagctttttcttgaaaacccagttttttccttatgatactaactttcaaatcctttatttattaattaaacatctaccatgtgcagggtatagctgctagctgagaaggggagctaacagctatattaaacatttaccatgtgcaggtatagctgctagctgagaaggagaggcagcgtggtagctttgaggaaagaagacaaaagctactgcagtgaacaggagaggaaaattcttgccctcaggtagggcaccctagtggagggagatcatctgtaaacaaggccatagtgtaaaatgatttcaataccaatggctgctcatagtaaaataacatgggatgatagtgtagagagtgactggaatagggactttgatctaggagaccaggggaagcctcactgtgggacgtgaactgcaaggaggtgaagagtgtcagccatatgaagagtgtcagcttggaggggcatgggcttggggtgtttcagggacagaggagggaagaattgcaggaggattgatctctatcttggagagaatattttgatgacaatattaactggattcacggacatacttaaccaagtaatatggtttctctctgtgccctcacccaatttcatgttgacctgtaatcttccagtgttggaggtggggcttggtgggaggtaattggatcatggatgcagtttctaatggtgtagcaccatccccctacagctgtctcatggtagagttctcaagagatctggttcttta

SEQ ID NO: 546154 - DNA, 1240 bp, Homo sapiens
gacactaatctcatcatgacaactctaccctgggggcctcctctaaacctaatcacctcccaagatccaacctcctaataccatcacattgaggttaggatctcaacatatgaagtttaggggaaacaaagatgtagtccatggcaactggatgaagagtgacaaagtagtcagccaatccagattactggccagatcagtctcaagtttcagtctatgacggaaaacacttggatgtcctgggtgttcctagcgaacttccagctgtctttgtctctgcatctgccccaatgtgtcacctctcacaggcctggttcttaggagccagactatcctgcctattgtcatggaaagatattgatgggcctcctcctctgtaccttttgttcttagacgggttcattctgtctctctctctctctctctcwctctccttctcgctctcactctggttagaggacagtgaccagaaatgtatgttcagctttttcttgaaaacccagttttttccttatgatactaactttcaaatcctttatttattaattaaacatctaccatgtgcagggtatagctgctagctgagaaggggagctaacagctatattaaacatttaccatgtgcaggtatagctgctagctgagaaggagaggcagcgtggtagctttgaggaaagaagacaaaagctactgcagtgaacaggagaggaaaattcttgccctcaggtagggcaccctagtggagggagatcatctgtaaacaaggccatagtgtaaaatgatttcaataccaatggctgctcatagtaaaataacatgggatgatagtgtagagagtgactggaatagggactttgatctaggagaccaggggaagcctcactgtgggacgtgaactgcaaggaggtgaagagtgtcagccatatgaagagtgtcagcttggaggggcatgggcttggggtgtttcagggacagaggagggaagaattgcaggaggattgatctctatcttggagagaatattttgatgacaatattaactggattcacggacatacttaaccaagtaatatggtttctctctgtgccctcacccaatttcatgttgacctgtaatcttccagtgttggaggtggggcttggtgggaggtaattggatcatggatgcagtttctaatggtgtagcaccatccccctacagctgtctcatggtagagttctcaagagatctggttcttta

SEQ ID NO: 546155 - DNA, 1240 bp, Homo sapiens
gacactaatctcatcatgacaactctaccctgggggcctcctctaaacctaatcacctcccaagatccaacctcctaataccatcacattgaggttaggatctcaacatatgaagtttaggggaaacaaagatgtagtccatggcaactggatgaagagtgacaaagtagtcagccaatccagattactggccagatcagtctcaagtttcagtctatgacggaaaacacttggatgtcctgggtgttcctagcgaacttccagctgtctttgtctctgcatctgccccaatgtgtcacctctcacaggcctggttcttaggagccagactatcctgcctattgtcatggaaagatattgatgggcctcctcctctgtaccttttgttcttagacgggttcattctgtctctctctctctctctctcactctccttctcgctctcactctggttagaggacagtgaccagaaatgtatgttcagctttttcttgaaaacccagttttttccttatgatactaactttcaaatcctttatttattaattaaacatctaccatgtgcagggtatagctgctagctgagaaggggagctaacagctatattaaacatttaccatgtgcaggtatagctgctagctgagaaggagaggcagcgtggtagctttgaggaaagaagacaaaagctactgcagtgaacaggagaggaaaattcttgccctcaggtagggcaccctagtggagggagatcatctgtaaacaaggccatagtgtaaaatgatttcaataccaatggctgctcatagtaaaataacatgggatgatagtgtagagagtgactggaatagggactttgatctaggagaccaggggaagcctcactgtgggacgtgaactgcaaggaggtgaagagtgtcagccatatgaagagtgtcagcttggaggggcatgggcttggggtgtttcagggacagaggagggaagaattgcaggaggattgatctctatcttggagagaatattttgatgacaatattaactggattcacggacatacttaaccaagtaatatggtttctctctgtgccctcacccaatttcatgttgacctgtaatctyccagtgttggaggtggggcttggtgggaggtaattggatcatggatgcagtttctaatggtgtagcaccatccccctacagctgtctcatggtagagttctcaagagatctggttcttta

SEQ ID NO: 546156 - DNA, 587 bp, Homo sapiens
ggcctcctccctttgctgggcgcccagggccctttggactccctggagtgacagaggagtctctgcctggggggatcagaactgggcctgctgcatgttgagcagtctggagtggggtcaagcaaagcatggccatggccttgtggttgcgtctcgtaggtcccttcaggagctggtaccagcacagggtgaaccgatctgtgtatctgaccatcgctcctcaatgggtccagagaccccaagaacctcatttcagagaatgaggccttggctaagtggtgctaaaaarcaatttccatctaaacacctggttgataatatggacacaggagaagatacgctgtcttcagatctactgataatgaacgaggttcctaacttagggagaaagtgtttaggtaaagaaatgttttgtagcttcagtggtggataaggaggggcctgttgtcatatctgtagattacctgtatctgtgtacattttaagtttgtattacttgtgtttccacacatggttcaaatttcatatttatgtatatatacatatatatgtgactgtgacgcatgcgcatgcacacacacacacac

SEQ ID NO: 546157 - DNA, 1418 bp, Homo sapiens
tcactttggaaggtgttttgaaagaggcttgtgtatagcagttgctggtacccctggaattcaaaatgatgccaactgaatgccatttcaaataaaacctttcatttatttatttatttatttatttatttatttatttatttatttattttttggcagaagaaaagagcagagtcacacagtagctctcgatttatgaacagtgttttctaactctcagactcccaccgtgtgtgtagttcccttgaaggaactaggttggacacatttaacaagaaaataattgtatctcyatatctgctttttaatttgaaatcatatggacctttgattatacttcatcccattctcatgcctcctatgaccagttgagagggtggacactgagaatcctacagcagcttcttctgtttgtaaaatattgttcaatgacaagtcagacagatagaaacctccaaagcatggtggctattgtggacaaaatttgtgaaaatattttacattggaccttccagtaagcattttcgcagccctaggtcacatcttgaaattatacaattggatccccccaaattgggttgaagtgctgacaaacgagaggatgtaacagatcaaaactgatctggatgatgggtgagtgaagtgcaggcagatagaggacagagataaacccatacatgccttacgggagtttgtggctttaagtggagtccatccttgtaagtggtgcattaaacaaagagtttattgtaaagtgggcctgatccctggaggaaaagaaaattgattctttttcactggagggaagttaactctttctgtccttttgcagcagagaaggtgctgaacacatatttagtgatgaatttccctggttagttccaaggggtctttatgtcaggaatagtatttattcatactgcattttctatgtaatagagaggcaggattccctaaagtcccccgttataatcccttcatcccatctagcacaggtagactgtgaaaaacacatattctaatagttactaagctgttaaaattggctacaatacttttatttttgtttgttttgcacaggagtaactcaagatgattttgatgttgcagttttaaatttcactttgacttgagctgggaaatcctttggcctattataccatggatgctaaaaatggtaagagctgcatgttctgccttgatgttttcaagactgaatttggagggagaaaaattattttgcctaaggatgtccgtgaaagtatcaggaaaacactgaaaagccggagagaagggttcaattgtagcgtgctccctttaagagggaaacgagattagcaactttggcaaatttttgggactctattcagagggaaagagaagagctgccagtgtcaaaaaaaaaaaaaaagaaagaa

SEQ ID NO: 546158 - DNA, 999 bp, Homo sapiens
ataaatggtatatgtaagtcagagtaagtatgcttatgagctcaattacagtaagaacccaaccttgcagaaaaaaaaaaaagtcttggaggactgctgtgtcctctcccaaagcattctgtttcctcctctttacagagggcatgctgggctgacagatcactggcccgagaagaccaatctttccagtgtcctcctaacaagtaaacttgtctgctgaagccaagaagacggtccccacaaaaataaaaataagataggactgtcgtcttcggtaatgcaggaagcttggaagacagatcatgtacacatgatttactagtgacagctagggtattatttcagccttatgaaagtttgtaattataaggatgggtgcaatctcttttgatatgtgacctattttggttcaggaggcagcttggaacaggccttcaggggtccattggtacacagcctgctggcgggccacaccatgaaaagtcaggaatctaggtcagggtcaccatgggttaatttaattttcatcactgcctgaagggttgtaacgagtatggggaaggtaacagttacctgctcaaaagaatggagtccactttcttttcctaacctcaccatatcttccaaaatggctttcttcagatcctgaatcaaaccatatgagaaaaattacaagacaagaacacatttcaaaatggaggtagaggaaacaacacttttgggtaaagwacaactgatgattgtgccaacatgtgctaacccacagcccgcaactgaggctgatactccctggcaacactccaattaccacctctcatctggcaagtaagtacctgaaatggccaaaggagtgaccatgaatgggctaagggaccactcaatttttttttaaagcaggcttttggtcagcctggtgagtcttgctacccctagatgagcccagggcccagggtcccgtaggagagggagggtctatggctactactaagaaatggacca

SEQ ID NO: 546159 - DNA, 596 bp, Homo sapiens
aagcactctgagatatcacaagtgtgggctccacccagtagggcaggggctgggtggccacagccttaggcaatgtctggaagagtatgagagatagcttagtgtatgtgatgctagctacagtgactgtaactggagttaatctgtaagtgaatgaatgaatgactggaagaaaatggtccaccaacctatgtccatcctgagatctggttttcagtgagtgagaaacaacagccagcagaccagcaggtgcattggctgcaggaatgcgagtcagggaggaaacagactagcacctatgggagaaggttgtctggtagggagcaaaaagtgggggaggaagaaaagaggctcagccactgcccttgaaggaccaatggcacatggctagactggttgaacaaggaaaagcctaagaacacattttcgtattctctcgacatgtagttgtggatgttaagataacagcatgaagtaaactgggcttttctcagtaawttccatgcgattttctcctattactagaattggtcatttacaactaagccattattgatgcaattatgagaagatgaaagctcaaaggccatttagga

SEQ ID NO: 546160 - DNA, 799 bp, Homo sapiens
tgttgtttagaaatatgaagatatgtaaacccaggaaaaaagcagttgaaagtggaagactctagagaggggaacaggtaggggtggggaaggatgggacagggaatcatgttttgttacaagtatattagctcaatttgatgtttggaactgtgtgcactgaaaaaaaaaaactaatttgaaaaatcaattaatttctcttagcaagaggtgtctcatggctgccctgactcaaacgtaaggcttrgaaaataatgacaatcttgcccctccccaaaaaacccagcctcttatttttgtgtagctgtgtatttcttaaagtatgttattatttcaaagaattatacccatatcaaatatcttggagacgaagaaagttattcacagggaagaaaattataacgaagcaggaaattcttaaatgcaagtttaaacaccttcctaaacttcaaccattgtaatttatcatgtagctaatttcctttttgacttattgggaaatctttaggtcccccccattcctgtgttgtctggttcagcccttggcctgttgatggccttttagctccttgggacctgctctgggggagctccagggactcaggctcctcctggcttcagcctgtgtccagttcttttttttttttttcctataatagtgagctttaagatttttattttattttattttaaaaatgttaagagacagggtcttgctgtgttgcccaggctagagtgtagtggctattcacaggcatgatcatcataactactgtagccttgaactcctggcctccaa

SEQ ID NO: 546161 - DNA, 673 bp, Homo sapiens
ggaaactctgatattgtaattcagtggaactctagtaacatttgggaatgtgcagttttatatgcattctcgtcattctaattcaggaggctgtgaaccaccatattctttgttaagtggtattagcaagaaggtgggttgagagacattagttaccactaatgagaagcagtattttcacttgttatggactggcactttgattcctctttaaacatcttccataaaatcaccagttttattatcttaataacaccaccatctctgagtagtgttactaaaaatgttgtttcatcctagattcctctgcaactcctattattactaaatctataaaacttatgtccaattaatctgcttctctccatttccattgcaatcgctctaatcaaaccatcattaatatttgcctatatctgtactgtccagtattaaagctagccatgtgtagctgctgagcacttgaaaaatggctagtttgtattgtgttataggggcaaatacataccacatgtcaaaaatttggtacccaagaaagaatgtaacacrtatccttagtactttcacatattgattgcatgttgaagtgataatattttgggtgttttgagctaaataaaatatattaataaaattaatttcacccttgttttttactttttaaattttgcta

SEQ ID NO: 546162 - DNA, 1459 bp, Homo sapiens
aacaccttaaaatatatgcgtgtgtgtgtgtgtgtgcgtgtgtgtgtgcacatatatatatatatattmtatatatatatatatatatatatataacacagccccaattggactttttaaaacctctgcttcctgcgtcttatgactaagagtgggtaattaagccaagatcactttttccactccacccatacttagtaaaaacctgttgtaatttttccttgatttatttgctcttttgtatttttcttttgcaatttgctaaaactaatgatttcaaatgaaagaccttcatatcagtaggtgacccaatgatttactgatccttttaacactgtgaaaagagaagtccattacatgctggggggtgaaaaagagagggaaggggaactcctaacagtggtgttctatatttatagctttgggctttggctccataagaggctatggaggtgtcggggggatgaggggaaggaggtaaatgatactcatttgtaagtatcagcaatattaaccaagaaaaacaaaaaaattgatttgtggaatccattaagatataattatgaataataacctgagagttggcagggtgggactttaaaaggtatatgagttttaaaatgcattatattttgcgatttcaaaagcatgtgttccaaatggtaaatgtatgcccagatctggtccatgaaataaaacattcaaactagaaaccttatttactttggcttagtcttggtctttcccttttatctagaaatgagtcaatcaattagcattttcagggagtctactatgggcccaagagggtgatgaagaatatggaagaagcaaggattatatacatgttaaaacaaacaaaaaactttgggacttagtccaattgactgagtcccaattcagtcaatgcttctctttccaattgcttccccaaatatctcctaactccaaaatgacttcttaccttgggttgccagattcagcaaacacaaatacaggacacctgtatttatctggcaactaaaccatccgtgtatttttttgtgatcaacactttccatagccttctgctttagaaaagactgccataaaaatatgagaaaataccctgataccttttaagagtaaagataatgtctgcttgttattataaacacgatacagactcagagctaaagcaggagcttattcaatacttttaatggtacaggtcaaaagcatggagaacacttgctctcttaccctccattttattcttccctttggccttgtttctttatattaacagagatctttgctttaatactaatgagaataaagagagattgtaggcacagtcctggcatagccttttggggagcagtgaagcttctccaaaccaaatccattccctggcacataccaccatgttgcctacacagaagtcagcattttggaagattaattgttatccaatagt

SEQ ID NO: 546163 - DNA, 1459 bp, Homo sapiens
aacaccttaaaatatatgcgtgtgtgtgtgtgtgtgcgtgtgtgtgtgcacatatatatatatatattctatmtatatatatatatatatatataacacagccccaattggactttttaaaacctctgcttcctgcgtcttatgactaagagtgggtaattaagccaagatcactttttccactccacccatacttagtaaaaacctgttgtaatttttccttgatttatttgctcttttgtatttttcttttgcaatttgctaaaactaatgatttcaaatgaaagaccttcatatcagtaggtgacccaatgatttactgatccttttaacactgtgaaaagagaagtccattacatgctggggggtgaaaaagagagggaaggggaactcctaacagtggtgttctatatttatagctttgggctttggctccataagaggctatggaggtgtcggggggatgaggggaaggaggtaaatgatactcatttgtaagtatcagcaatattaaccaagaaaaacaaaaaaattgatttgtggaatccattaagatataattatgaataataacctgagagttggcagggtgggactttaaaaggtatatgagttttaaaatgcattatattttgcgatttcaaaagcatgtgttccaaatggtaaatgtatgcccagatctggtccatgaaataaaacattcaaactagaaaccttatttactttggcttagtcttggtctttcccttttatctagaaatgagtcaatcaattagcattttcagggagtctactatgggcccaagagggtgatgaagaatatggaagaagcaaggattatatacatgttaaaacaaacaaaaaactttgggacttagtccaattgactgagtcccaattcagtcaatgcttctctttccaattgcttccccaaatatctcctaactccaaaatgacttcttaccttgggttgccagattcagcaaacacaaatacaggacacctgtatttatctggcaactaaaccatccgtgtatttttttgtgatcaacactttccatagccttctgctttagaaaagactgccataaaaatatgagaaaataccctgataccttttaagagtaaagataatgtctgcttgttattataaacacgatacagactcagagctaaagcaggagcttattcaatacttttaatggtacaggtcaaaagcatggagaacacttgctctcttaccctccattttattcttccctttggccttgtttctttatattaacagagatctttgctttaatactaatgagaataaagagagattgtaggcacagtcctggcatagccttttggggagcagtgaagcttctccaaaccaaatccattccctggcacataccaccatgttgcctacacagaagtcagcattttggaagattaattgttatccaatagt

SEQ ID NO: 546164 - DNA, 1459 bp, Homo sapiens
aacaccttaaaatatatgcgtgtgtgtgtgtgtgtgcgtgtgtgtgtgcacatatatatatatatattctatatatatatatatatatatatataacacagccccaattggactttttaaaacctctgcttcctgcgtcttatgactaagagtgggtaattaagccaagatcactttttccactccacccatacttagtaaaaacctgttgtaatttttccttgatttatttgctcttttgtatttttcttttgcaatttgctaaaactaatgatttcaaatgaaagaccttcatatcagtaggtgacccaatgatttactgatccttttaacactgtgaaaagagaagtccattacatgctggggggtgaaaaagagagggaaggggaactcctaacagtggtgttctatatttatagctttgggctttggctccataagaggctatggaggtgtcggggggatgaggggaaggaggtaaatgatactcatttgtaagtatcagcaatattaaccaagaaaaacaaaaaaattgatttgtggaatccattaagatataattatgaataataacctgagagttggcagggtgggactttaaaaggtatatgagttttaaaatgcattatattttgcgatttcaaaagcatgtgttccaaatggtaaatgtatgcccagatctggtccatgaaataaaacattcaaactagaaaccttatttactttggcttagtcttggtctttcccttttatctagaaatgagtcaatcaattagcattttcagggagtctactatgggcccaagagggtgatgaagaatatggaagaagcaaggattatatacatgttaaaacaaacaaaaaactttgggacttagtccaattgactgagtcccaattcagtcaatgcttctctttccaattgcttccccaaatatctcctaactcmaaaatgacttcttaccttgggttgccagattcagcaaacacaaatacaggacacctgtatttatctggcaactaaaccatccgtgtatttttttgtgatcaacactttccatagccttctgctttagaaaagactgccataaaaatatgagaaaataccctgataccttttaagagtaaagataatgtctgcttgttattataaacacgatacagactcagagctaaagcaggagcttattcaatacttttaatggtacaggtcaaaagcatggagaacacttgctctcttaccctccattttattcttccctttggccttgtttctttatattaacagagatctttgctttaatactaatgagaataaagagagattgtaggcacagtcctggcatagccttttggggagcagtgaagcttctccaaaccaaatccattccctggcacataccaccatgttgcctacacagaagtcagcattttggaagattaattgttatccaatagt

SEQ ID NO: 546165 - DNA, 1459 bp, Homo sapiens
aacaccttaaaatatatgcgtgtgtgtgtgtgtgtgcgtgtgtgtgtgcacatatatatatatatattctatatatatatatatatatatatataacacagccccaattggactttttaaaacctctgcttcctgcgtcttatgactaagagtgggtaattaagccaagatcactttttccactccacccatacttagtaaaaacctgttgtaatttttccttgatttatttgctcttttgtatttttcttttgcaatttgctaaaactaatgatttcaaatgaaagaccttcatatcagtaggtgacccaatgatttactgatccttttaacactgtgaaaagagaagtccattacatgctggggggtgaaaaagagagggaaggggaactcctaacagtggtgttctatatttatagctttgggctttggctccataagaggctatggaggtgtcggggggatgaggggaaggaggtaaatgatactcatttgtaagtatcagcaatattaaccaagaaaaacaaaaaaattgatttgtggaatccattaagatataattatgaataataacctgagagttggcagggtgggactttaaaaggtatatgagttttaaaatgcattatattttgcgatttcaaaagcatgtgttccaaatggtaaatgtatgcccagatctggtccatgaaataaaacattcaaactagaaaccttatttactttggcttagtcttggtctttcccttttatctagaaatgagtcaatcaattagcattttcagggagtctactatgggcccaagagggtgatgaagaatatggaagaagcaaggattatatacatgttaaaacaaacaaaaaactttgggacttagtccaattgactgagtcccaattcagtcaatgcttctctttccaattgcttccccaaatatctcctaactccaaaatgacttcttaccttgggttgccagattcagcaaacacaaatacaggacacctgtatttatctggcaactaaaccatccgtgtatttttttgtgatcaacactttccatagccttctgctttagaaaagactgcyataaaaatatgagaaaataccctgataccttttaagagtaaagataatgtctgcttgttattataaacacgatacagactcagagctaaagcaggagcttattcaatacttttaatggtacaggtcaaaagcatggagaacacttgctctcttaccctccattttattcttccctttggccttgtttctttatattaacagagatctttgctttaatactaatgagaataaagagagattgtaggcacagtcctggcatagccttttggggagcagtgaagcttctccaaaccaaatccattccctggcacataccaccatgttgcctacacagaagtcagcattttggaagattaattgttatccaatagt

SEQ ID NO: 546166 - DNA, 1459 bp, Homo sapiens
aacaccttaaaatatatgcgtgtgtgtgtgtgtgtgcgtgtgtgtgtgcacatatatatatatatattctatatatatatatatatatatatataacacagccccaattggactttttaaaacctctgcttcctgcgtcttatgactaagagtgggtaattaagccaagatcactttttccactccacccatacttagtaaaaacctgttgtaatttttccttgatttatttgctcttttgtatttttcttttgcaatttgctaaaactaatgatttcaaatgaaagaccttcatatcagtaggtgacccaatgatttactgatccttttaacactgtgaaaagagaagtccattacatgctggggggtgaaaaagagagggaaggggaactcctaacagtggtgttctatatttatagctttgggctttggctccataagaggctatggaggtgtcggggggatgaggggaaggaggtaaatgatactcatttgtaagtatcagcaatattaaccaagaaaaacaaaaaaattgatttgtggaatccattaagatataattatgaataataacctgagagttggcagggtgggactttaaaaggtatatgagttttaaaatgcattatattttgcgatttcaaaagcatgtgttccaaatggtaaatgtatgcccagatctggtccatgaaataaaacattcaaactagaaaccttatttactttggcttagtcttggtctttcccttttatctagaaatgagtcaatcaattagcattttcagggagtctactatgggcccaagagggtgatgaagaatatggaagaagcaaggattatatacatgttaaaacaaacaaaaaactttgggacttagtccaattgactgagtcccaattcagtcaatgcttctctttccaattgcttccccaaatatctcctaactccaaaatgacttcttaccttgggttgccagattcagcaaacacaaatacaggacacctgtatttatctggcaactaaaccatccgtgtatttttttgtgatcaacactttccatagccttctgctttagaaaagactgccataaaaatatgagaaaataccctgataccttttaagagtaaagataatgtctgcttgttattataaacacgatacagactcagagctaaagcaggagcttattcaatacttttaatggtacaggtcaaaagcatggagaacacttgctctcttaccctccattttattcttccctttggccttgtttctttatattaacagagatctttgctttaatactaatgagaataaagagagattgtaggcacagtcctgscatagccttttggggagcagtgaagcttctccaaaccaaatccattccctggcacataccaccatgttgcctacacagaagtcagcattttggaagattaattgttatccaatagt

SEQ ID NO: 546167 - DNA, 550 bp, Homo sapiens
gggcatggtggctcatgcctataatcccagcactttgggaggctgaggcaggtggatcacctgaagtcaggagttcaagaccagcctgaccaacatggtgaaactccatctctactgaaaatacaaaattaactgggcatggtggggaatgcctgtaatcccagctacttgggaggatgaggcaggagaatcgcttgaacctgggaggcagaagttgcagtgagccgagattgtgccattgcactccagcctgggcaacaagtgcaaaactccatcaaaaataaaaaaaaagaaagaaagaaaaaaaaattctgctctcaaaaaaagaaagagagagaaaaagggagagagataattataagatagcaaatagaagtagaaaaggattggggacagggattttgaaaacatggaaaaactctgattctagcttataaggataaagattaatgaaaacagacatgtttgtatgtttctgttttggttactatttgatgctgtttggatgtcccaccatagtctcatgttggattgtaatccccartgttga

SEQ ID NO: 546168 - DNA, 1023 bp, Homo sapiens
aaaactttactccaaatacttttaaaagcggatactatttaataaccatgtaggttatttaaaaagttgaagtgaagcactcataaaatgtcyaattttgagaattgtaaattctcgtgtcctttgccaaagaaagcatttgtaaaatgtaattgccaaagaggttgctacattattttttggaagacttaacaacttagcaaaatacatgaaaaggcaacttagccatcccttgaaagactcggcaggactttaccaggtaatgaagtgtgtcctgtgtgtagggattggggttgaagagatatttgggggaaggacagagagttaaaaggtggaaaagtcactacaagcagatggagaagcagggacggaagtgtggaggtggagggaacacatcacatgtagaaagacagctacagtttgatgggaagtaggatgggtagattgtcaacaccattagattgggagctttgtttatctaattcagggggttggctaactattgcctactcgccaaaagtttttgtaaataaaggtgtatcagagcaaggtcatgcccttttgattacatattgtctgtgactgcttttgccctacaatggcagagtggtgcagaaaccaccactgctgctgcggaaacagtgtggctaacgaagcccaaaatatttactatctggccctttctagatgaagttgttgacttctgatctaactctgccatgtcccctggtatggagattccagtgtattgcctggcgtgtggtaggtgctcaatatactggtgattcatattgaattgaagcattcgctggtattcagataatgaaggggcctattgtggttctttttgttaagaaggtggagctttatcttaatggtaaagcattttgagccatgtattcatgcacgcattcatttattcattctcattctttgagactcacctctagcctgaactggcctccctctactctgtctctctagcaaactgggcaaaacattgatcagactgtttttctgtgg

SEQ ID NO: 546169 - DNA, 1125 bp, Homo sapiens
ccccagctttcccaacctcagttgcagacccttgtttcatctctggcatttcagatctcacttgacctctagcatgattggtgtcctgaggtttggtcccaactgtcagctctatcacaagctctctcaagggcagggcattgctggagcaaacatggtayattcatactcctgatgtccttccaaggaaggacatgcatggcagactgttcactaataacaagtccctcttaggaaatgtgagccaatggcttccacaaatgtggaagcattaaattgccagtggtcaactttccactcctttcttcccctatcagagaaaactctgaagcactgatttaagacagaggcataatgatggtgcaaagtgtttacttggagaagagctccctcacgcaacaatggggcttgtaacatcagtgatacgtagatttttgttgggttaagccaccgagattttggtggtggttatgactacagcataacctaacttatgctgacttcaatactttgcaagcaggaaaaaagcatggttgtgaagagattttaatggcacgtgtattagtttcccaggccttctgtaacaaagtaccacaggctgggtggcttgaccaacgggaatttattgtctcatcattctagaggctggaagtctgagaccaaggtgtcagcagggttggtttcttctgaggctgagagggagaatctgtttcagggctctcacctcacttctggaggtttgctggcaatctttggtgtctcttggcttgtagaagcatcaccccaatctctgtcttcatcatcacatgctcttctttctacttgcatgtctgtatccaaaattccgtcttttattacgacatctttcatactgagttaggtgatcaccctatccacagatgacctcattttaactaattacttctgcaacagtcctatttctgaatgaagtcacattctgaggtactgggggttacaacttaaacaaatggataacatatgagttttctgaaaggacacaattcaagtcataacagtataagaacatgggaatatactatgatgttaggttcaaataacaggaaaaaagttgcacaatgaaaggaccctaaatatgagacacga

SEQ ID NO: 546170 - DNA, 1561 bp, Homo sapiens
ttgaaaaaaaaattgagttggaaagtcaagacgtgagtgaatttaaccaagtttattggatggtgccagcagtctctggatggcaaaggtccaaattgtatggttctatctatgcgaataccataaatacactcacccatccatccccatcttctctctcccattcatctctatccatgctcccttacctctgcccctaatcttgccttggtccttcaaatccttggttcccatcatatgtctgcaattcactgcagggctgacactttctcaaactctcaacctgatagagccttaaattaataagctacctggtcttcccagcttcactttggatgtactgcagagtggagtcaagggtgtttagatcacaaacccctggttctggctcctggatcttgacaacagtcatcacataaattttctaacaagagacacatccgcataattaaaccaaagatatcacagacgcagacacatgcaaagagggcagggctgggagaagggaaycattcatcaaaacctcatcataaattcaagttgaaggactgaaaaggaacaaagcatggatacttcccaaacccagcagctggacctctcactgaaatcctgaaatcactgcagcccaactcaacatctgggagagaataaaatataataaagacttaaaaagaacagacgctgggcaattaccagttgaagtgcggatggggaatataaattctctgagcgcctaaagacagaaatatacattggcacatgggtcttagggctgtgaatttcatccagctgtagccaccattctttctcactatgactaatatttcgttagcaaatgcactttctaagcaatgaacataattatgttcaggttgacatgacctaaattagagtggctgaatttttatttattcgacatcagcagtgaagtaaaatgtccaaaaggattttgatgctgaatcaaagtaccaaagaatgttgggaataacattctatttagaattggaagatctgggtagaagtcctatctagtccatgtatacattgtgtgagactgggcaatattgaatctcctaaatgtggacacaaatttgaaatggagataaaacctacctccagagttttaatgaggattaaattaggtaatatatcttcaaaactcctgccacattgctttcggcttcttcacctgtaaaattggagcaatacttgcataagagggttaggttgtaaggattccttagcttatgatactaattaagatactcttggttgtaacagacagtgggatttatagttgctttaaaatataatgtattggctgagcacggtagctcatgcctgtaataccagcactttgggaggccaaggtgggcggatcacctgaggtcaggagttggagaccagcctggccaacatggtgaaatccagtccctaacacacacacacacacacacacacacacacacacacacacacacacacaaaattagctggggcatggtgtcacatgcctgtagtctcagctactcgggaggccgagtatgagaatctcttgaac

SEQ ID NO: 546171 - DNA, 1181 bp, Homo sapiens
tagatttatatattttttctgttttgttgttaggagggaatatttgtcaaaataggagaataggatgtatttcatgtaacagtttattagcttgattcataactttttaaatgttcagacatakggtatgcgggccttcattcagggacctgaaatgtaaagggtgggccagaagaaaacacaccaggacttagagctaagtcatggtgaaggaaaacaaggccggcagacaggctgtccattccaaaaaagcctggggctgtcaggagctaaactttccagatgaggcacttcacgcggactaggtggctccaccgcagcagaaatgctgcagacgcctcacatctgtgtgacggaacagaaatccctcttctttcagcacaggaaaacgaaacatgctaggctctggggggagcagcccatttggaaaatagcagctttccaaatgggcttttaaaaaaattaaacttcaacaacattcaaaaaattctacatgcaaaaaaggttcattacagaaaacttagaaaattcccagagaagcacaaaattctagaaagtaaaattactcaaccaccgctccgatatagcatttaaaaatacatccatgcagatctcattctatgcagagctttatgttaataacttatttataaaattcaattatattgtgcacacactattctaaactgccttttgcactctggaataaatagaaacaccattcttgtcattaattacacatctacttcgttttaaattgctgcgcagtatcctattttatgaaatgccataaagtgtttagtgaatcccttattattggatacgtgggttgtttctaaagtcaaacattttcattcacatgtttaattgtttcctcgaagtagaaatgaaggcatgagtattttaaaagctttggagccatactgtaaaacttctatgaaggtatttatattttgtctttgaatcttaatatattatttaaaatattttggttccatttcagtatattaaagtatatattttctcatacactccttaacactttgtattatatttaaattgcttctagtaagcatagggaaatgattttttaatattttaatacttatgttttcaattagaccatttcccagatgtttatcaagattatgattttcaaagacattttttggttatgtatg

SEQ ID NO: 546172 - DNA, 545 bp, Homo sapiens
gaaaaaaaagaaagaaataaagaaagaaagaaaagaaacattgttttaattcaggcagttaacattcaaagtccccgaattgtctcaaaaaaatatcctctattactttttattttcactttggaagagatcctttctaatacttagctcatgttctctgcggcacctggccagagccgcacacaattatttgcccgcaattaagaacagcactgcttcttgcttgagcctgtttggttggaattttgtggtcctagctctttatagtgaaaggtaagttaatttgacagagcataggtcagcctytggctcccaatgagctccctttgccacatatcagttagactttgtgacttctttgtgtatgtatattaagatttaccttttgccgagtacctcagcccttccctggacttgtatttcacgaatgagcgagccatcaggttgttttggtaaaaacatcaaggtgagttttttaaaggatgataacacaaaagggcatcctcagaggtaggggatcagcctggctggcttgacggtggcct

SEQ ID NO: 546173 - DNA, 659 bp, Homo sapiens
ccaattcttcaccccctacttttcttcttcctttctcaatatttagtctccttaaggagcagtaggaggcctaggtgaataaaaccagacatagtgaatgcagtagaaggagacagtctttagtcccaaactagaaagagctgatagacaaggtagcgatctccctttccctggaggaaagcaagcagataacagacaataaacagttgataaagctatagaacaaatttaagcaagagaaggactttaagggagagaaaaaaaaataacattgccaaggcatcaactatcaggaactcagcttggcctttgtatattaccttatttaatacccacaacaatgctaaggartgtattaccatctgcattcgcctaagaaggagatatagctcagaataagtaacatattccaaagtcacaaactggatgtggttctgactccaaagcccattctcttttcattatggtcactggctccctggaggggcaggaacagtgcacaggagtcatttgtgcattcagcagatgtttgctgagagtgaagctactatgctggtgtgaagatacaaaaatgattaaacccctggattatcacatggaattccaaaattttggaaggcagccttgatgcctagggaactaattgcatagattggaat

SEQ ID NO: 546174 - DNA, 659 bp, Homo sapiens
ccaattcttcaccccctacttttcttcttcctttctcaatatttagtctccttaaggagcagtaggaggcctaggtgaataaaaccagacatagtgaatgcagtagaaggagacagtctttagtcccaaactagaaagagctgatagacaaggtagcgatctccctttccctggaggaaagcaagcagataacagacaataaacagttgataaagctatagaacaaatttaagcaagagaaggactttaagggagagaaaaaaaaataacattgccaaggcatcaactatcaggaactcagcttggcctttgtatattaccttatttaatacccacaacaatgctaaggaatgtatyaccatctgcattcgcctaagaaggagatatagctcagaataagtaacatattccaaagtcacaaactggatgtggttctgactccaaagcccattctcttttcattatggtcactggctccctggaggggcaggaacagtgcacaggagtcatttgtgcattcagcagatgtttgctgagagtgaagctactatgctggtgtgaagatacaaaaatgattaaacccctggattatcacatggaattccaaaattttggaaggcagccttgatgcctagggaactaattgcatagattggaat

SEQ ID NO: 546175 - DNA, 619 bp, Homo sapiens
gcccagcaggtggctcatgcctgtgatcctagcactttgggaggcccaggtgggaggattgcttgaggccaggagtttaagaccagcctgagtaacatagtaagaccccatctctacaaaaattttttgttaaaattagcarggcatggttgcacacgcctttagtcccagctacccatgagggctgaggtggggggatcacttgagcccagaaggttgaggatgcagttgtctgtgattgaaccactgcactcctgcctggatgacccttgccccagcctggagcaagaccctttctctaaaaagaaaagcaaaagaacaaaggctttcagaatcttttggactgtggcccagagtaaggtatagattttacactgcaactctatacagataccacacacacacatacatacagatgaagccaaagttcagtgaaacaatacttgcctttactatgtgggttgcattctaaccgtttctatttggttttcttgtaatactgagtcatgaccctctaaatcaatttcatggctccacagtttggaaaacactcatctagaatacaagaagtcacttgagctgattgctaaactagccccactctgaatgagagggtcga

SEQ ID NO: 546176 - DNA, 619 bp, Homo sapiens
gcccagcaggtggctcatgcctgtgatcctagcactttgggaggcccaggtgggaggattgcttgaggccaggagtttaagaccagcctgagtaacatagtaagaccccatctctacaaaaattttttgttaaaattagcaaggcatggttgcacacgcctttagtcccagctacccatgagggctgaggtggggggatcacttgagcccagaaggttgaggatgcagttgtctgtgattgaaccactgcactcctgcctggatgacccttgccccagcctggagcaagaccctttctctaaaaagaaaagcaaaagaacaaaggctttcagaatcttttggactgtggcccagagtaaggtatagattttacactgcaactctatacagataccacacacacacatacatacagatgaagccaaagttcagtgaaacaatacttgcctttactatgtgggttgcattctaaccgtttctatttggttttcttgtaatactgagtcatgaccctctaaatcaatttcatggctccacagtttggaaaacactcayctagaatacaagaagtcacttgagctgattgctaaactagccccactctgaatgagagggtcga

SEQ ID NO: 546177 - DNA, 1331 bp, Homo sapiens
gggagagtggaggaacagtgggagggttgaggggccaccaagcaggagcactggggctgcacaaagacctcttccagcactcctcatgatgggatccccctgtctctccaaagccctcagagaaagcgtattttggggtgagccactgtccatgggaagcaggcgaaagcccacagagcrcgtgtctgagctgtggctggagtcagaggtggggctgagaggatgcagggcaggcacaggaggtgctggacaagaatgtgtaagttatgagtcaaaatgactggaacactctcctggctcactgcaccacctcctccactgctcatgggttgaatgagatgggatcccccaggagaggccagagcccctggggcccaggtgcagctgaggggaagggggcatccagcaggcttccctgaccagctgtccatctaggcccctggccctgctggcagagctggctgcagcctgatgccagactgggtgaggacattatgctaagtgaggtaagtcaggcacaggaaatactgcatgatctcattgagatgtggagtcgactgaggtgtggagtctgaaaaagaagaagaagaagaggaggaggaggaagaagaggaggaagaaaaaaagaagaggaagaagtagtagaagaagaagaacaagaaggagaaggagagaagaaggaagaaggaagaaacaagaatgaaggaagaaggaagaaacagaatagaagaaaagtggctcccaggggtagggaaggcaaggaaatggtggggagatgtaggttaaagagtgcaaacttgcagttatgtaggatgaataagtctggggatctaatgtacagcaagaggactacacttactaatattgtagagtatattgaaaatttactgaaagagttgattttaggtgctgttagtgtgtacacactcaaggaaactatagaaggagatggatatgttaaattggtcatctgtaaataatcacttcactataaatatgtatatcaaaacatcttgttgtgcatcttaaatttacacaattgaaaaaaaaaaaaggctgccagaccaagactcagggccactgcattccaccagggggtgctgtttgacatctgccaacacctttcacagcctcctccgccaaatatttcagaaaccaatttccaataaagcaaacaccctactcacctggctgcagagttggaaaatatcttgtttcgttgcaaatgagttttaccatctcctcagagctctgaacttagccatcatgcacagtctcttagttgggtcagtgtcccgggatggaatttcctgaccttgtcaccggttctt

SEQ ID NO: 546178 - DNA, 943 bp, Homo sapiens
taagtcattgtgaggctcactgctgagagagtgtcagccacgagcaatagatcactagtgttactaataggctcctcaccaacacagctgcctggaattggcaagtcgagctcttctgggatcagccaaagaggacacctgggctcctccccatgtaggtggttttgtggccctacttgcatccaaacagcccttaatacacacaaaattgtcggagtgttttttgctttttccagataaagggaattggagggtaacctgtggttctaaacatgcagttaagaaagaatggtagaatggttttacttgccggaattaaggtggtgaagttctgttagaagtaaggttactgcccagtygcacagggtgagaactgcagatggctcacccagagaaccaaccattaacgttctggtattgccctggtctacgcgctgcagtctgattttcctaggaaagttcttgcattttggctatagtttcaagtaacctaaaactggcttcatttaaggtgttagctagctgccaagccttagccattttttccatgcttgcttgcttcccttatcaccctgaggggatgccatttttaacaccttgtggtgttaaccttttgatgaagaggcccctatctcctgtgatgagaaccttccaggaagtgagacagactctgatgcttattataaggcaggagcctactctgcctccagagtatacccagatgcctctctaaatgtgttccatgaatacttagttaaggcagacatgtgatgactaaaattcatgatactgggaatttggagaggagatggaaataacatggaagtattgacagtttgaggtagagcacttagaaagtttcatatgttggctgagtggttattacacaagcgtgtgcctttgttccatgtttacttgattcggccagaaagcacatttccca

SEQ ID NO: 546179 - DNA, 943 bp, Homo sapiens
taagtcattgtgaggctcactgctgagagagtgtcagccacgagcaatagatcactagtgttactaataggctcctcaccaacacagctgcctggaattggcaagtcgagctcttctgggatcagccaaagaggacacctgggctcctccccatgtaggtggttttgtggccctacttgcatccaaacagcccttaatacacacaaaattgtcggagtgttttttgctttttccagataaagggaattggagggtaacctgtggttctaaacatgcagttaagaaagaatggtagaatggttttacttgccggaattaaggtggtgaagttctgttagaagtaaggttactgcccagtcgcacagggtgagaactgcagatggctcacccagagaaccaaccattaacgttctggtattgccctggtctacgcgctgcagtctgattttcctaggaaagttcttgcattttggctatagtttcaagtaacctaaaactggcttcatttaaggtgttagctagctgccaagccttagccattttttccatgcttgcttgcttcccttatcaccctgaggggatgccatttttaacaccttgtggtgttaaccttttgatgaagaggcccctatctcctgtgatgagaaccttccaggaagtgagacagactctgatgcttattataaggcaggagcctactctgcctccagagtatacccagatgcctctctaaatgtgttccatgaatacttagttaaggcwgacatgtgatgactaaaattcatgatactgggaatttggagaggagatggaaataacatggaagtattgacagtttgaggtagagcacttagaaagtttcatatgttggctgagtggttattacacaagcgtgtgcctttgttccatgtttacttgattcggccagaaagcacatttccca

SEQ ID NO: 546180 - DNA, 943 bp, Homo sapiens
taagtcattgtgaggctcactgctgagagagtgtcagccacgagcaatagatcactagtgttactaataggctcctcaccaacacagctgcctggaattggcaagtcgagctcttctgggatcagccaaagaggacacctgggctcctccccatgtaggtggttttgtggccctacttgcatccaaacagcccttaatacacacaaaattgtcggagtgttttttgctttttccagataaagggaattggagggtaacctgtggttctaaacatgcagttaagaaagaatggtagaatggttttacttgccggaattaaggtggtgaagttctgttagaagtaaggttactgcccagtcgcacagggtgagaactgcagatggctcacccagagaaccaaccattaacgttctggtattgccctggtctacgcgctgcagtctgattttcctaggaaagttcttgcattttggctatagtttcaagtaacctaaaactggcttcatttaaggtgttagctagctgccaagccttagccattttttccatgcttgcttgcttcccttatcaccctgaggggatgccatttttaacaccttgtggtgttaaccttttgatgaagaggcccctatctcctgtgatgagaaccttccaggaagtgagacagactctgatgcttattataaggcaggagcctactctgcctccagagtatacccagatgcctctctaaatgtgttccatgaatacttagttaaggcagacatgtgatgactaaaattcatgatactgggaatttggagaggagatggaaataacatggaagtattgacagtttgaggtagagcacttagaaagtttcatatgttggctgagtggttattacacaagcgtgtgcctttgttccatgtttacttgattyggccagaaagcacatttccca

SEQ ID NO: 546181 - DNA, 1235 bp, Homo sapiens
cacacatattgagaaagcccatattgagcagataatttgcattctctggcttgttcttctaaaaagagagtatcctttgagggttggtgagaattcattagatcaaattgctttcctgctaagctgtagtgagaatagctgggagttgagaacttagagggctctgggggaggcgatgggaggaacctgcagataacaggrtggtttaggtgatgtctagggcctcaggctgaggaaggaacaagtttcaggaactgtttgtgacatccctgatagcagggagtggactcagctgacggcacagaaatgtacaacaggaagcagacagcccttgtctatgtattgactttgcccgatcttcctggagtggacagcagccaccatgcagtggggtgaaggatccctgggctggatggtgggactagtggcgtgtctgtgctgctgccacgtttctggctctgggagaagctcagaggctgtttaggaatccagatctagactgtcctggggccctacccagtgaaatttgtctcagtgtgattgatgggttttatacactgtcttgagcctttcctgggaaggtgaatccgtgacttccctggtgttacccattgtcaagtgatttagcccataatttctttccagagcctggatttattactcatgattaccccctccctctcagaggtgctaaatataatttgagctgctaggttggctagcagtgtttgcttccatcagattttattactcttgtctttaattttatgccttttatcccatcccttctcaatccatctctgtgaggccgttgttgttctacccagagtagcagctggtactagctggagctggaggttctttgggtctcacattacagttgctataaccctaacctcaccactgatgtgatgacttgaggtctcatttgaatagccccaaagggaagggatggcaagagggaaacttgcttcctaaaaaccatattcttcgaaagctcacactttcaaatgctccatttccatcttaacatcagcaaccatcaaagagctgttcaagctcattaaaagctccctgaatttaatattttccaactcagggcctacaggtttccttccccagggtccgacagtgcctctgcacagaacctgtctctcttccgcctcatgccttcaaacagatgggaagcaacattagcttttccgtttgactttgttttcctttttccttttcca

SEQ ID NO: 546182 - DNA, 1447 bp, Homo sapiens
cctgtgaggcagaggcaatcacttccaccctgccaggggccaggctccaatgcccacagggtctggcatgcgatgtcaaacaggacccaggacacattctctatgttcaggggcagcccatccatctggccaattatagccatgyagtaacaaaggcctggtgttgccagatcttccttattttccagaagaacatagaattccagatttttttttcaattggggatgagaaaagggaagaattccagagggactgagagggacatggtaaccataatttagatgggcttatgagggaaaaggggtttggagaggaaagatgttcagttttgacatgctgagttgctggtgctgaagatgcccagaaggctgtgagaactcaggagtacagataagagaggcagctctttggtgactctgttatcaggccaccccacctcagcccccagttccacataggacagggtcatctgaaacatcccgtcttgctggctgtaaggacggtgaaaacctcaggcttgtggtactttcttggggccacagcaacaaagtaccacaaactgagtggcttcaacaaaagaaatgtatcgtcccacagttccagaggctggaagtctgggacctaggtgttggcagggccatgctccctctgaaggctctggggaagggtatgttcaggcctctcttctagcttctggtagttccttggcttctgacagcatcattccaatctttccacaatgttctcggtgggtgcaagcccaaatttccagtgtgacggccaaattggattaggagtccaccctacttttgtatgacctcatctttactaattacatctgcaacaatcatatttcaaagtacgttcaaagacatgggcggataggatgtcaacatatggactgggtggagggggacacaattcatacataacaagactctaaacagtggtttcatgtctctcagagtcagaatccctaacaacaagattaaggtatgtcgtcatttacctttggaaaagcactgtattcgaggaatcctgcaagtcctacagggagaaactatcctacaaataagaaggttatgattgacttgagagtaatataaataaccataagaatcaaagaggaggagagaaactgcttttgtctgtaaaaataaaaaattcttcgttaggtactacttaaccttggtattgagggaggcccagaattctaacagcgggagactgaggctggagaaatcaaagacaccccaagtagacggaacaggctaaacaaaggaaaggaaaggaaagtacaaactgtgtttggatcaggtctgtttgcccagataattgggtatgtataatgcagtcatgtgatagaagactaaactatagtttggcatcagtttgcagaaccctgaattggcaggataaggagtttggatataaatttgtaggcaa

SEQ ID NO: 546183 - DNA, 1447 bp, Homo sapiens
cctgtgaggcagaggcaatcacttccaccctgccaggggccaggctccaatgcccacagggtctggcatgcgatgtcaaacaggacccaggacacattctctatgttcaggggcagcccatccatctggccaattatagccatgcagtaacaaaggcctggtgttgccagatcttccttattttccagaagaacatagaattccagatttttttttcaattggggatgagaaaagggaagaattccagagggactgagagggacatggtaaccataatttagatgggcttatgagggaaaaggggtttggagaggaaagatgttcagttttgacatgctgagttgctggtgctgaagatgcccagaaggctgtgagaactcaggagtacagataagagaggcagctctttggtgactctgttatcaggccaccccacctcagcccccagttccacataggacagggtcatctgaaacatcccgtcttgctggctgtaaggacggtgaaaacctcrggcttgtggtactttcttggggccacagcaacaaagtaccacaaactgagtggcttcaacaaaagaaatgtatcgtcccacagttccagaggctggaagtctgggacctaggtgttggcagggccatgctccctctgaaggctctggggaagggtatgttcaggcctctcttctagcttctggtagttccttggcttctgacagcatcattccaatctttccacaatgttctcggtgggtgcaagcccaaatttccagtgtgacggccaaattggattaggagtccaccctacttttgtatgacctcatctttactaattacatctgcaacaatcatatttcaaagtacgttcaaagacatgggcggataggatgtcaacatatggactgggtggagggggacacaattcatacataacaagactctaaacagtggtttcatgtctctcagagtcagaatccctaacaacaagattaaggtatgtcgtcatttacctttggaaaagcactgtattcgaggaatcctgcaagtcctacagggagaaactatcctacaaataagaaggttatgattgacttgagagtaatataaataaccataagaatcaaagaggaggagagaaactgcttttgtctgtaaaaataaaaaattcttcgttaggtactacttaaccttggtattgagggaggcccagaattctaacagcgggagactgaggctggagaaatcaaagacaccccaagtagacggaacaggctaaacaaaggaaaggaaaggaaagtacaaactgtgtttggatcaggtctgtttgcccagataattgggtatgtataatgcagtcatgtgatagaagactaaactatagtttggcatcagtttgcagaaccctgaattggcaggataaggagtttggatataaatttgtaggcaa

SEQ ID NO: 546184 - DNA, 1447 bp, Homo sapiens
cctgtgaggcagaggcaatcacttccaccctgccaggggccaggctccaatgcccacagggtctggcatgcgatgtcaaacaggacccaggacacattctctatgttcaggggcagcccatccatctggccaattatagccatgcagtaacaaaggcctggtgttgccagatcttccttattttccagaagaacatagaattccagatttttttttcaattggggatgagaaaagggaagaattccagagggactgagagggacatggtaaccataatttagatgggcttatgagggaaaaggggtttggagaggaaagatgttcagttttgacatgctgagttgctggtgctgaagatgcccagaaggctgtgagaactcaggagtacagataagagaggcagctctttggtgactctgttatcaggccaccccacctcagcccccagttccacataggacagggtcatctgaaacatcccgtcttgctggctgtaaggacggtgaaaacctcaggcttgtggtactttcttggggccacagcaacaaagtaccacaaactgagtggcttcaacaaaagaaatgtatcgtcccacagttccagaggctggaagtctgggacctaggtgttggcagggccatgctccctctgaaggctctggggaagggtatgttcaggcctctcttctagcttctggtagttccttggcttctgacagcatcattccaatctttccacaatgttctcggtgggtgcaagcccaaatttccagtgtgacggccaaattggattaggagtccaccctacttttgtatgacctcatctttactaattacatctgcaacaatcatatttcaaagtacgttcaaagacatgggcggataggatgtcaacatatggactgggtggagggggacacaattcatacataacaagactctaaacagtggtttcatgtctctcagagtcagaatccctaacaacaagattaaggtatgtcgtcatttacctttggaaaagcactgtattcgaggaatcctgcaagtcctacagggagaaactatcctacaaataagaaggttatgaytgacttgagagtaatataaataaccataagaatcaaagaggaggagagaaactgcttttgtctgtaaaaataaaaaattcttcgttaggtactacttaaccttggtattgagggaggcccagaattctaacagcgggagactgaggctggagaaatcaaagacaccccaagtagacggaacaggctaaacaaaggaaaggaaaggaaagtacaaactgtgtttggatcaggtctgtttgcccagataattgggtatgtataatgcagtcatgtgatagaagactaaactatagtttggcatcagtttgcagaaccctgaattggcaggataaggagtttggatataaatttgtaggcaa

SEQ ID NO: 546185 - DNA, 1054 bp, Homo sapiens
cacctcatgcaaagctagggttcactgtgcccttggacacccttctcatgcagggtccatggctcccagactccctttaagcaaacagggagatgtccatgtgttcacaggttagagaagacagcttggcttttctgtcttgacccatattgcatagtaggctatgatgggaatgtcagctctgtttagctacagactgcagagtattagtatggaccccaattctttaagctttggaactcctccaaaatgttgttttaagcagtaatgcctttcagctattaagtctacatcccacctgaaaataaaggtgcaactaatacttaacagcctccttaagatttagggaacccactggggacccaagaaayagccaagaaatctgagctttcttctccaatattcaagaaatatcattggaactttttgctttcttgtaccacatcactttgagatttttaagaatctagacaaatgtaaaatcttttattactaagcagggcatgttccttgaatcttttcctcattttctgtcctgtgaaactagactagacagtctaataagaaacctcaaagttcctgtcatcttttgttcataagcctaaagacagctctaagtactagctccctgtttcctctctggactataccctggcctctctattgttccaaaccaaaaaaaaaagccttctgaacaagtcatccccaacccagacagaaggaaagaaacagaaccaattttctgggtctccaaaataccctaataactcataagtctgattgccctcattttttaatacctttattcctcctggccatcttgtgatgtggagggtaaagtttataaagaattgcatgtctttctaatcttacccaatttcttttttttttttttttttttttttttttttgtgacagagtctcgctctgtcacccaggctggagtgcagtggcgcaatctcagcacactgcaacctccgcctcctgggctcaagcgattctcccgcctcagcctcttgagtagctgagatgacaggcatgcgccaccacgccc

SEQ ID NO: 546186 - DNA, 2070 bp, Homo sapiens
cctcagttgaaggttacagcatcagctgccatcacaccagaactgccatcagacgagagcagccgctgcccgtatcacctgcgttcattatcagacttctgtgggggcccagggcacagagcgggggctcctgtcagccagtgacagaaatggccatcgccactacgaayactctaagtaccattctgtgtggtgagtttaaaatacagaacggtagtcgggcgtggtggctcacgcctgtaatcccagcactttgggaagtaggtgggaggatcccttgagcccaggagtttgagaccagcctgggcaacatagtgagaccccatctccaaaaaaataattagctaggtgtggtggcgtgcacctgtactcccagctacttgagaggccgaggtgggaggatcacttgagcccaggaggatgaggctgcagtgagctatgattgcaccaatgcactccaaccctggtgacagagcaagaccctgtccgcctacacccgccaaaaatacagagctatgatctcgagagcattttatttgagcaaaagataatttataaagcaaaatcaacaacatgagcctcctctgagagaaagctggaggccagccccatcatgttttgaaatttccctgatttataatcctcggtaaacacaaagggtgcatcctcacccggaacaaaactctcctggtcagacggtgaacaccccagagtgaggcctgtgggccacacgagcctgctgaaggggttaaccggcagtggtgccaagcaggaagccccgagacctgcccctccacagcgcctgcttgcaggggcccaagggcctcccctgcacagcctggcctgggggcactgacacatttttggcaaacagatcttggccggacagaaggtccaatccttccagccacttcacttaaaggaaaatcttctatttaagatccagactcagcctaacaatcacgaagatggctctgtttatgatccgcgactatgcaccttcagccacagcggcccagtgtgtgcagcttggcgaccttgagtttgtaaggatgagtaagaccttgtggcatttgcgtgactcaataaccaacaggtaattaaatatgaatgaagaagaaaggtagatgtaaccacataactcttttgattgtagatttagctgcgatgtcggcggcacttgcgaattccctccccactctgaggagctggacggaggctccatcccactgagggctgggcatgggcctgcctggccctgaaggcacccacggggccactcccaccagggtgtggatgaaacctgttttcttttctcttcccaattcatactctttagcagcgaagaaaaaacaatatatatgtgaactaagaaaaggactataaatcatgctaccataaggacacatgcacacatatgtttattgtggcactattcacaatagtaaagacttggaaccaacccaaatgtccatcaatgatagactggattaagaaaatgtggcacatatacaccatggaatactatgcagccataaaaaaggatgagttcatgttctttgcagggacatggatgaagctggaaaccatcattctcagcaaaatatcacaaagacagaaaatcaaacaccacatgttctcactcatcggtgggaagtgaacaatgagaacacttggacacaaggcggggaccatcacacaccacagcctgtcaggggctgggggccagggggaggggtagcattaggagaaatacctaatgtaaatgacgagttggtgggtgcagcaatccaacatggcacatgtatacatatgtaacaaacctgcacgttgtgcacatgtaccctagaacttaaagtataattaaaaaaaaaaaaagaaaaaaaattccaggtacaaaggggaagtcatttatttttgtgccatgctgccttgcatttttggaatgcctgtccctggagatggagctcacatctttccggaaagctctgaaggtccctgcgtctcagtatagctgctctgtagctttttagctgtctggcccctcttaggtgttgagaaagttattaa

SEQ ID NO: 546187 - DNA, 645 bp, Homo sapiens
catccccctgccagtgcccgcatctacatttgggcacagagaagccacacagcctcacgggagctgggggcctctggcagggcctccttccaggacacaataccaaggaggccagacccccagggctgtccgcactggatgaccctctggccactctgtcctgctgatgagaccctctccctgcctcctccctctcagtaaaactagagtaactaggcatttttaaagaagatggtggcgtcttccactgttgccctaaatggaaatgctccaccgcaaaactcaatgtgatgctagtgcctcacgacctaacaccctccccacggggcagcgtttgwcaggaacggtaaacccagcgcgtccgcacccaggcgcagaaactctccatcagggaaatgtgaaaaattgatctttttgcagctcggtgctgcctccaacacatccagagccaactggaactgtgagtgtgagcccagtggcactgcaagcgcccacaccagcaccctgccctgggcagagtcacgtgggaccatccccgcaggacagtgctgcacccagagcccccaccctgaaagcttcccgtgctctgagcagctcctcaggtgtgagcacacaaacagaggaggccatggtcagcacggcaca

SEQ ID NO: 546188 - DNA, 634 bp, Homo sapiens
ttttgccatatgaggtaatattcacaggttctagggaataagatatggatatatctttttgggggcaagctatagagatgaagtctctaatcttgttgactaaatacaaacatgaagttagaggaggctggagatgggggmaaaattgatttaacatggtcctgttttgagtgtgtattttgtgtagtgccttctaatctcaagtataaattaatattcaggaaataatcactgcattagatttggtaaggaccatagtcaggtagaaaaaaaaagtatcctagtgtttcattgaagcttctgacatccctgaccattttgagttcattatctacatccgtgtgcattcctgaatggtaaaattcattaatttggccagtatttatgaagcatctttataacagttcaaccagttacatatttaagcaattaaatttttctatagtgagttaaaaatggttgtgagtgtttcagttttgttcttagttgtaacagcttggactttttaaaagttatccagtaatgatcacctcttgtcaaaaaccaggtttaagaagatgccatttgattttgtgcaaacctcacttcccaagtcacaccaatttcttgtttgagaaaagcatttgatcataga

SEQ ID NO: 546189 - DNA, 549 bp, Homo sapiens
cagtgcattgtctaatgagctaacagttttcaattcagtattcattgtttcaatttttaaaaaatacctttcgcagacaattttgtgtttagcttgaatttattttagatcaacttattttaaattaaaaggttacgaaacttttatgtctttactctgctatatgatgtcatgcaatttcattgccatgaatttaaaaggctcatagaaacagaatactaaaatactaccaatattagaaataatatgactgtataatgttacagactaccgagccaaatggtggatatggaaaggtgcctgaattgtacaaaggcaggttatttgtcaaggcagtttacttggaccatcctgatcagaaaaattactcactgtcctcatawtgaaaatcaagcgaagcctggacttaattttgacggagtaaaaaagctagttgatagtgtggagggggataggaacctcaggagaacgcacctggactatttctcagcttggttttgacacatggggtgtgttgcaagtaatttattactaatagtgaaagcacta

SEQ ID NO: 546190 - DNA, 607 bp, Homo sapiens
agggcttgtgactaattatattttccgaagatggacacagctatatatcctagcctacatgtgacaatgtacagctctctgttgagaagaattcttaagctaaatctagacttagcagaaaagaatgacttaaaattattgacatgccaagatgggaatcaacaaataaagttttcatccaaaacagcataaaaagaaaagtaaaagacactcatgaaaactgtattattaaaaatatacatatatttgaaaacaatagatataagaaagtacaaaataaaggaaatgaatatcagcattagttcttgagttaaaaaaacaataaaatagacacatttacaactaatcttagttgaaaaagagagggaggaagagagggagagagtaagggacagagtaaggaaggaacagagaaagaaagagagaaatataaaatgtaaaaacaacaacaaaaggaattaaagctactaataaacaggaaactataaaagaaaaatggtcaaaaacttgaatttagaaaaatagacagttttctaggaaaagataatttatttgtytcaactagaaataaaaactaaagagaccaataaccataagattaatgaat

SEQ ID NO: 546191 - DNA, 634 bp, Homo sapiens
cctgcagcaaactccatcccccaggacagctgcggaatgttctagaaggcccaactctaggaaatcccttagtaggagccttgctctcaacagtgcctcctggaacgatgggccggccactctcttttccatcttgcatcatatgtatttgacttattttgtttataayctgtttccacgccactggaatgtatcttaagagcaggaattttccatgttttacttcctgctgtgttcctagtgctgggaatatagccaggcatataatacatgcctgataatattggctgaatgaatgaatgaataaatgaatgaatattacaggccagacacagtggctcatgcctgtaatcccagcactttggaaggccgaggcgggcggatcacctgaggtcgggagtttgagaccaacctggccaacatagtgaaaccccatctctactaaaaatacaaaaattagccgggcttggtggcgtgcacctgtagtcccagctactcgggaaattgagacaggagaatcacttgaacccgggaggcagaggttgctgagattgcaccactacattccagcctgggtgacagagtgagattctgtctcaaaaaaaaaaaccaaaaaccaaaacaaaacaaaaca

SEQ ID NO: 546192 - DNA, 634 bp, Homo sapiens
cctgcagcaaactccatcccccaggacagctgcggaatgttctagaaggcccaactctaggaaatcccttagtaggagccttgctctcaacagtgcctcctggaacgatgggccggccactctcttttccatcttgcatcatatgtatttgacttattttgtttataacctgtttccacgccactggaatgtatcttaagagcaggaattttccatgttttacttcctgctgtgttcctagtgctgggaatatagccaggcatataatacatgcctgataatattggctgaatgaatgaatgaataaatgaatgaatattacaggccagacacagtggctcatgcctgtaatcccagcactttggaaggccgaggcgggyggatcacctgaggtcgggagtttgagaccaacctggccaacatagtgaaaccccatctctactaaaaatacaaaaattagccgggcttggtggcgtgcacctgtagtcccagctactcgggaaattgagacaggagaatcacttgaacccgggaggcagaggttgctgagattgcaccactacattccagcctgggtgacagagtgagattctgtctcaaaaaaaaaaaccaaaaaccaaaacaaaacaaaaca

SEQ ID NO: 546193 - DNA, 634 bp, Homo sapiens
cctgcagcaaactccatcccccaggacagctgcggaatgttctagaaggcccaactctaggaaatcccttagtaggagccttgctctcaacagtgcctcctggaacgatgggccggccactctcttttccatcttgcatcatatgtatttgacttattttgtttataacctgtttccacgccactggaatgtatcttaagagcaggaattttccatgttttacttcctgctgtgttcctagtgctgggaatatagccaggcatataatacatgcctgataatattggctgaatgaatgaatgaataaatgaatgaatattacaggccagacacagtggctcatgcctgtaatcccagcactttggaaggccgaggcgggcggatcacctgaggtcgggagtttgagaccaacctggccaacatrgtgaaaccccatctctactaaaaatacaaaaattagccgggcttggtggcgtgcacctgtagtcccagctactcgggaaattgagacaggagaatcacttgaacccgggaggcagaggttgctgagattgcaccactacattccagcctgggtgacagagtgagattctgtctcaaaaaaaaaaaccaaaaaccaaaacaaaacaaaaca

SEQ ID NO: 546194 - DNA, 682 bp, Homo sapiens
ttgactgctcacattacagtagttcttttgttctttggaccatgtgtctttatttatgcctggccattccccatcaagtcattagataaattccttgctgtattttattctgtgatcacccctctcttgaacccaattatatacacactgaggaacaaagacatgaagacggcaataagacggctgagaaaatgggatgcacattctagtgtaaagttttagatcttatataactgtgagattaatctcagataatgacacaaaatatagtgaagttggtaagttatttagtaaagctcatgaaaattgtgccctccattcccatataatttagtaattgtctaggaacttccacatacattgcctcaatttatctttcaacaacttgtgtgttatattttggaatacagatacaaagttattatgctttcaaaatattcttttgctaattcttagaaygaagaaaggcataaatatattagtatttgtgtacacctgttccttcctgtgtgatcctaagtttagtagaagaaaggagagaaaatatagcctagcttataaatttaaaaaaaaatttatttggtccattttgtgaaaaacataaaaaaagaactgtcacatcttaatttaaaaaatatatgcttagtggtaaggagatatatgtcaacttttaagaggttga

SEQ ID NO: 546195 - DNA, 659 bp, Homo sapiens
agggtgagttcatgtcctttgtagagacatggatgaagctggaaaccgtcattctgagcaaactatcacaagcacagaaaaccaaacactgcatgttctcactcataggtgggaattgaacaacgagagcacttggacacagggtggggaacatcacacactggggcctgttgaggtgtgggggactgggggagggatagcattaggagaaatacctaatgtaaatgatgagttgatgggtgcagcaaacgaacatggcacacatgtatacctatgtaacaaacctgcacgttgtgcacatgtatcctagaacttaaagtataataaaaataataagaagraataaaaataaatcttgacccctacctcacaacaatgataaaaatatgtatattccaaatggattgtagatgtaatgtaaacaatgaaataaaagataccacagaaaattatctttgtgaaataggatcagaagcaaaaattgataaattgagtttaatcaaaattatgactttctattcaccaaaagacaaaaaagaattaaaaactagccatgaggttgaaaactactaaaaaaaggagttatgttcagaatacaagatttgtttaagtaataagaaaaacaagataaggaaataaataaagttctatggaagcaa

SEQ ID NO: 546196 - DNA, 550 bp, Homo sapiens
tgtatttcttttcatttcctgatgctttggctttatgaaatctttatgtataaaaattgtgcacacatatctttatgcacagtgttttggattttacccttcataatgagcttttttctctcctttgaatttgacctggcctggtgttaacagcccaggtgtaaaattccagtgagaaagaagtctgatgaggagtcagtaggatctttgggttgctgagaactgctcagtaccacggacagctccctgcactccaggaaacatcctgattcagtgtcttgagtattgtgaagcacagttagarcagaaacatggagaatcaccttaaaatggcaaattggcttctggtcttgcataagacttcattgaggcctaatgggctatgcaggtctactgtccaaagtacagaggttattcctagtgtctttaatattactgtccctttaggcaagattatccttatgataagggagactgaattaagctattttggctgaggcatatttttataaattcatccaattagcttcccttgttgtagttttggctc

SEQ ID NO: 546197 - DNA, 511 bp, Homo sapiens
gccaccctgggcacatagtgagaacacgcccacttctgctgtggacattgaggcacagaccacacctgggaaggcttgggaggcccctgggcacacacttgaaggacactgcacttttggggctacgcaggcacagggctagtccttcactgtccctgctgagcctgtgtgtggtcacccaccagctggccttcaggcttccttctgcctgcaccaagcatgtkgggggtaccgaggggccttgcttggctcctttccaactccacgccctcaataggcggcttggaggccgagctccggtcatccaagccaggtgtctggggaagggtcctggtctgccgcaggaagctgggtggagccggtcttgcctgctgtggcggtcccagctgccctctggtggccatgctcagctccccgttgctctgccagaggcggcagcccctcaatcagcaggggcagtgggaagggcctgtgcataactggttatggagtggggggaactctgtggccc

SEQ ID NO: 546198 - DNA, 1300 bp, Homo sapiens
tttgtttgtttattttggtaaaagtcccattaatcccagattcagcttctatagtgtgtacatttctgggtgtcctggtgtctgtcaggttgtatgtgctcaaaagatctttgtacagttgaaatcagagtcaaagcatagtgactttacctttctaaatctttcttcattttcctctttctctttctttccaactagaaagcagctaagctaattataaactcaagcctctagtttcctgctgaaccacactgactctcaggattatggatgttcttcttcatcaccctaaaatgcttcctcacgtacgctacctaatttcatttttacagtaacattttcagttgtgtattaacttaacagccatttctacagattaaatatgtgtaggtctgataggtttgctcagccagtaattggaagagttgaatttgaaaccatgcctttgattttaaatcaatataatttctcagatgctgtttcatcatgagtaagtagtcataaaagagataaaattattatatataagtttcctggcatttagaaaatatgtagtagatggtattattattattattttgctggtagtaatgcagtatgtggctatggctaatgaggagttatatatactagaatttcaaaataatcaacaaagtctgttaactaaaaaataaagtttgtttagaggctatgactaacttcattatcagagaattagagaaggtattaaccccaactctaacgtaatgcccacttaagtgagtataaatcagtagaactgtagaatcacagcaagatagtcaggaagtcattcttgaccccagttataatactcagaaggggataggatgggggagtggagacatttgagcagatgcagggaacaaacagtttatgaataataagggagagactttctccatcaatgctaagtcctgaaagtcatctttttctaaccaaagccagaggcrttggtaacactcccacagaggacattttgaagaaagcaatctcagaatttctgcagaagacttgttcacatagaaggagtgccataccttcattatttccagaatgtgtgaactagcaaataaaacaaaaatagcaaatttaattgtgagacattgcaaaattggccataaaaatcttttcatgtctgcagcacactctgttgtgctatgtggcagtgcaaatcacctccatcaaggtatcccataaaactgagttggccatgtgacttgctttggtcagcagggcttcagcaaaatgcctgaagcagaggcttagagagcactgttgc

SEQ ID NO: 546199 - DNA, 615 bp, Homo sapiens
tgtttttgttttacaaaagtgtatctgtatattttccctctttttatgcacaaaaggtagcattcaatttatactctctgcattttgtttttcttacttcacaatacatcctggaaatcatgttagttcatagagttttctcactcttttttatagcttcataataacctattttgtagaagtaccaaatgtgtgggcatttagtttgtttctatctaatattttacaagtactacactgtatagtgtatactacactgtatagtctttatgtattttcatattgttgaagctataacttaaatgtaaatccctaaaagtgaagtcaaaagataaatgtacatttaggactttttcatttttgcctatttcttctccatagcagttgaaacattttacattcccacgagcattgtatgaggctatttttttcacacatatttgccarcagaatgtgctgtcaagttcttaaatttttttcatctaatgggtgaaaaacaatataccagtgttttagtttttatttctgttgttagaattgcaaattactgttatgtttgcaattaattgcacagtcatacgtgtatggaggattttgatattttggggtgcattg

SEQ ID NO: 546200 - DNA, 1265 bp, Homo sapiens
acaggctcgggccgccatcacctctgcccaattctggagcattctcattccctcaggaagaaaccagccttgaccccatcagccgccaccacctgtctcccctgcctctgtggctgggcctgtcccggacatttcatagaaatggaatcccacattgtgtggccttttgtgtctggcatctctcactgagtgtgatgtcctcaaggtgcgtctaggctgtggcctgagtcagagccctgctctttgtcgtggctgagtcatgttccgtgatgtggaggcaccgggttttgtgcgtctccttattcagtggacgttggtgctgtttccagtgtctgcctgttgtgagttgagctgctgcgaagaggcaggcgctggtggttgtgtggcgaccgtccttgttgctctgtgactgaggcgctggtgcctccactcgccggctgatcgtgtctgatggtgtcaaccccatgcaaccaccgtgagcccagctctagagacctgccttccaacctttccaccttgtcctcctgcccccagcatgtcccttccaccccagccttcccaaattgctgcacggttctgatttttttcttttttctttttcctttttgagatggagtctcactttgttacctaggctggagtgcagtggcgcaatcacaactcactgcagcctcgaccttccagcctcaggtaatctgcccacctcagtctcccgagtagctgggactccaggcgcgccaccatacctggctaatgtttgtattttctgtagagacggggttttaccatgttgctcaggctggccttgaagtcctgggctcaagtgatcctcctgccctggcctcccaaagctctgggattacyggcggagccagcatgcccggccacactgctgggttctggagagcggcaggccgttcagattcctgtgctgttttgcacacattcccttctgttgtgaatcttcctctctcccagatcagatttggcctgggaacctctatattctcatccccaccagcctgcaggccactgggtcggtggtggaaggatgatgggagcagagagagggtgggcagtgggcatctgtctgctttcaccggagggctgaggagtgtgggaggccagtgctggtctgtttgccctggagagcaactcttccacttaaggatccccctcaggatccccctcatccatgcattccccacctgggtgactccgcccccacaggcactgggcaacacctcgggacatctgtgcattgt

SEQ ID NO: 546201 - DNA, 533 bp, Homo sapiens
catccttcacaactcaatggtgccattttccaccatccatcactaacaattcatcactctccaccatccaagggtaccatcttccactgacattctccattccccatcatctgccttgttctaatcccatcctccaccatcaaaatggtgccatccaaaattgttatcctctgccaccatttgccatccaatgtaccatctttccctgatgttttacattttctaaaatctcctttcccaaccccatcttcctcaatcttgtaccacccattggtttataccattgactattgtttactgtcctttcttagtcctagtatttcccattgattttctccacccsctgctggccaaacatttgcccttctccaattctgtcttcctccatccatcactgataaagcatcacccttcactgacccaaactaccacattccactgacattctccatcctgttatgcgaatgttcttctctccaattccagattccacccctccaagggcaccatcttgcactgctcacagcacaatg

SEQ ID NO: 546202 - DNA, 560 bp, Homo sapiens
aacccacacaggttccttctcaggttgggaatggaactgatatgacatcagtaaagaaaagactgccagacaaggtggctcacgcctgtaatcccagcactttgggacgccgaggtgggtggatcrcttgaggccaggagtttgagaccagcctggccaacacaatgaaaccccatctctactaaaaatacaaaaattagccaggtgtggtggtgtgcgcctgtaatcccagctactcgggaggtgaaggttgcagtgagctaagatcgtgccactgcacactccagcctgtgcaacagagtgagactgtctcaaaaaaaagaaaaagaaaaagaaaaagaaaagattgctactgatggaactgggtgctttgaaaactcagccaagcagagtctcctccagtagaaaaatgtctttaatgacagcatgccccgatggcatgcttgtaatttcacaagggcccaaatgagtctatcaggaccagaggtatctagaagctgtgacactatgaatgcacaatagcacctcaggaatgagacttctgagtgacatcagaggag

SEQ ID NO: 546203 - DNA, 560 bp, Homo sapiens
aacccacacaggttccttctcaggttgggaatggaactgatatgacatcagtaaagaaaagactgccagacaaggtggctcacgcctgtaatcccagcactttgggacgccgaggtgggtggatcacttgaggccaggagtttgagaccagcctggccaacacaatgaaaccccatctctactaaaaatacaaaaattagccaggtgtggtggtgtgcgcctgtaatcccagctactcgggaggtgaaggttgcagtgagctaagatcgtgccaytgcacactccagcctgtgcaacagagtgagactgtctcaaaaaaaagaaaaagaaaaagaaaaagaaaagattgctactgatggaactgggtgctttgaaaactcagccaagcagagtctcctccagtagaaaaatgtctttaatgacagcatgccccgatggcatgcttgtaatttcacaagggcccaaatgagtctatcaggaccagaggtatctagaagctgtgacactatgaatgcacaatagcacctcaggaatgagacttctgagtgacatcagaggag

SEQ ID NO: 546204 - DNA, 560 bp, Homo sapiens
tggtgaaaccccatttctactaaaaatacaaaaattagctgggcgtggtggcaggtgcctgtaattccagctacttgggaggctgaggcatgagcatcacttgaacccgggaggcggaggttgcagtgagctgagattgtgccattgcactccagcctggatgacagagcgagagaccagcctgggcaacawagcaagactttcccatcttaattaatcagtaagtaaataaatgacaaaacatccttcaagtggacttttcccatagccatccttcaaaaagacataagctcactttgggaggccgaagtgggtggatcacttgaggtcaggagttgagaccagactggccaacatggtgaaaccccatacctactaaaaatacaaaacttagctgggtgtggtggcgtgcacctgtaatcccagctacctgggaggctgaggcaggagaattgattgaattcaggaggcggaggttacagtgagccgagatggcaccttcacactccagcctgggcagcagagagagagagactgtctcaaaaacaaaacaaaacaaa

SEQ ID NO: 546205 - DNA, 560 bp, Homo sapiens
tggtgaaaccccatttctactaaaaatacaaaaattagctgggcgtggtggcaggtgcctgtaattccagctacttgggaggctgaggcatgagcatcacttgaacccgggaggcggaggttgcagtgagctgagattgtgccattgcactccagcctggatgacagagcgagagaccagcctgggcaacatagcaagactttcccatcttaattaatcagtaagtaaataaatgacaaaacatccttcaagtggacttttcccatagccatccttcaaaaagacataagctcactttgggaggccgaagtgggtggatcacttgaggtcagragttgagaccagactggccaacatggtgaaaccccatacctactaaaaatacaaaacttagctgggtgtggtggcgtgcacctgtaatcccagctacctgggaggctgaggcaggagaattgattgaattcaggaggcggaggttacagtgagccgagatggcaccttcacactccagcctgggcagcagagagagagagactgtctcaaaaacaaaacaaaacaaa

SEQ ID NO: 546206 - DNA, 560 bp, Homo sapiens
tggtgaaaccccatttctactaaaaatacaaaaattagctgggcgtggtggcaggtgcctgtaattccagctacttgggaggctgaggcatgagcatcacttgaacccgggaggcggaggttgcagtgagctgagattgtgccattgcactccagcctggatgacagagcgagagaccagcctgggcaacatagcaagactttcccatcttaattaatcagtaagtaaataaatgacaaaacatccttcaagtggacttttcccatagccatccttcaaaaagacataagctcactttgggaggccgaagtgggtggatcacttgaggtcaggagttgagaccagactggccaacatggtgaaaccccatacctactaaaaatacaaaacttagctgggtgtggtggcgtgcacctgtaatcccagctacctgggaggctgaggcaggagaaytgattgaattcaggaggcggaggttacagtgagccgagatggcaccttcacactccagcctgggcagcagagagagagagactgtctcaaaaacaaaacaaaacaaa

SEQ ID NO: 546207 - DNA, 1044 bp, Homo sapiens
ggagggccgtcctgcaggcccgtacacaggcgcttcatatccacagctggaaactaggtcgctgctggtgagaggcagcaggggacggtccacaggctttcgcagcacccttcctctgccactggttccctgggtcactgtgcaaaagcagaggctgcaaagtctgtggtggaacccgggaagccggagaaggaacacgggggcctttgaggcttcttcccgctgcccgattcctttcaggctcggcctgatttctctttgagacttgggctggttctgcccctcacacttccttgctggtctggacatttttcagcctcatctgtcctcttcttctcttcccacacactaggctttgacccttgggaggggctgtggggtgaagagaggccccaggcagcagggagcttgcctctgccaagagggcatggaagttagggagttggggtctgcctgagtcctgagctgggctccaggcctctggtcctgcacattccaccccagcctcccctcctgacactctgggcagctgcggatcttcccagcttcccaggaagaaggctgtcaaggaggctctggtgcctgtaacaccagccatgcaccaggcgatctccaaacattcagatcagtgggatctgatcaggcctctagatctaaccaccaggtgggcatgttagacaacatcatgggggtgtcatcagaaaatccagactgggagaaacgtgacaggacaaatgacstggttcttcagcacatacattgcaagaggagaaaaaaggagagagagagattgatggtggaacttagaggctacaggagacttaggagaccaattaactgattttaacacatggatgtaatttagattccgaccccaaaaacttttttaaaaagaacagtttatgggtcagttggggagagctgaaactgcctggttatttcgtgatattaaggaatcaactgttaatagtttttaggtatgataatggtaatgttactatgttttctaaaagaggatccttaagttttagaggtacatactga

SEQ ID NO: 546208 - DNA, 1044 bp, Homo sapiens
ggagggccgtcctgcaggcccgtacacaggcgcttcatatccacagctggaaactaggtcgctgctggtgagaggcagcaggggacggtccacaggctttcgcagcacccttcctctgccactggttccctgggtcactgtgcaaaagcagaggctgcaaagtctgtggtggaacccgggaagccggagaaggaacacgggggcctttgaggcttcttcccgctgcccgattcctttcaggctcggcctgatttctctttgagacttgggctggttctgcccctcacacttccttgctggtctggacatttttcagcctcatctgtcctcttcttctcttcccacacactaggctttgacccttgggaggggctgtggggtgaagagaggccccaggcagcagggagcttgcctctgccaagagggcatggaagttagggagttggggtctgcctgagtcctgagctgggctccaggcctctggtcctgcacattccaccccagcctcccctcctgacactctgggcagctgcggatcttcccagcttcccaggaagaaggctgtcaaggaggctctggtgcctgtaacaccagccatgcaccaggcgatctccaaacattcagatcagtgggatctgatcaggcctctagatctaaccaccaggtgggcatgttagacaacatcatgggggtgtcatcagaaaatccagactgggagaaacgtgacaggacaaatgacgtggttcttcagcacatacattgcaagaggagaaaaaaggagagagagagattgatggtggaacttagaggctamaggagacttaggagaccaattaactgattttaacacatggatgtaatttagattccgaccccaaaaacttttttaaaaagaacagtttatgggtcagttggggagagctgaaactgcctggttatttcgtgatattaaggaatcaactgttaatagtttttaggtatgataatggtaatgttactatgttttctaaaagaggatccttaagttttagaggtacatactga

SEQ ID NO: 546209 - DNA, 549 bp, Homo sapiens
tctgacagcttcggccctacaccgggccccctaggaggttctgaacatgcctctaccttcttttccagttccccatggaggaagaaggcctgtgggtcagtttgagaagtagaaagatgctggcacccaagaaagtggacttaaggcccgctgtcaggtggcctggggatggggtatagatggaggtgcgggaggtgacctgcatcgtcctgtagcctttctcccagaaagaggcatagcttataatggggtgtgtggggacagcacatgatagatgcccccatccctccccttctctggtccttgctatctaggcatcgccgtgttggggactgggccatctctcacccatgccttcatctttgaagcccggaacagattcaggttctccctgctcccagggctataccaacctagagtctcacagatgccttgattggagcaagccccmaggcagggcaggtgccccccatactgaggctaggccaggaagcccaaacagatgggtagcacttcaacagggccaaccctgctcccagctaggggcca

SEQ ID NO: 546210 - DNA, 1722 bp, Homo sapiens
gcaaatgtcaactttaaattctcacttcttctcttggtccaaatgttatggaaatgtcattctttcctacaagtcattaccaggaaatacttaggtcttaaaaggtaccttgggcttttccccactgagttgtagttagaaagaataataaacatcatgaaattcaaacctaggacaatatacccggaaaaatactaacacaataacctgggctgcaaaacttgtttagcaagtttcaactggaggttaattaaaatcggcttggaaacctcttaaaatacagactggmatgtaaaccacacacacgcagcaccacctagattcttccctcaggagctttctcctctccacttccctggatttctgtgggaacgtttccccagaattccatccggtctggcggagaccatggtgcccctgagcataacacaagcctttttctcccatctcaggggaggaccaagaggacggtggatagacaggcccctccttcgcagttctaacaaacagtaccccgacattcagctccttaagcctttgagcccttttggaaagtggggtggtattggagtgggggggtcagggcgaatggaggattgaaagaatttcccccagtgttacatgtttttggccaggcacagtggctcatgcctgtaatcccagcaccttgggaggctgaggcaggtggatcacttgaggccaggagtttgagaccatcctggccaacatggtgagacttagacttcatctttacaaaaattagtcaggtgtggtagcatgtgcctgtaatcccagctactccagaggctgaggtgggaggatcacttgagcctgggagctcaaggctgcagtaacctgtgattgtgccactgcactctagcctgggcgacagaacaagaccctgtctcaaaaaaaaagaaaaaaaaaacagaggagtttaagtgacagtgttctggacaggacaagagagcgtgaagaggtcaaaggcagaacaggagaaggtagaaatgccgcctgacattggacttgcccgtaagaggctattgaactggccaaacattctcagaccttagctgtgtatttcttccgaagttcctcaggttaccgctattattccttttgtctgggcttgtttggaatgattgtcagctaacactccgttggtggataagcatctgtgagatgtgcaggaaacaaggccgagtataattataacataattctataacaacattgcccaagactgcctcagtactatatgccagagtacatcatgactatcttgctgacaggcatttggatggcgattagtgttggatcccgtctgggaatcaggcttgaagccagagaaactggaaaatgatttttgtcttttaactccttggaggcctgtgtggaaaattcaggagagcacatttttgtttctagcaacagaactcaaacgtaatttggccaggcatggtggctcatgcctgtaatcccagcattttgggaggccaaggcaggttgggtcacttgaggccaggagttcgagaccagcctgaccaacatggagaaaccccatctctactaaaaatacaaaattagccgggcgaggtggtgcatgcctgtaatcccagctactccggaggctgaggcaggagaatggcttgaacccgggaggcggaggttgccatgagccgagattgcgccattgcactccagcctgggcaacaagagcga

SEQ ID NO: 546211 - DNA, 559 bp, Homo sapiens
tgttttgttttttttcttgtaaatttcttaagttctttatagattctggatattagacctttgtcagatggaaagattgcaaaaattttctctccttctgtaggttgtctcttcactctaatgatgacttcttttgctgcacagaagctcttttgtttaattagatcccatttgtcaatttttgcttttgttgaaattgcttttggcaattttttcatgaagtctttgcccatgactatgtcctaaatggtattgcctatattttcttctaggtgaacctcaatttttttatctgtaatgtgaragggctgatccaggtcattccagttgtgagaagtgctatggtgaagacattggcttaattttatttaatgcaccaatttccaaatagttgactgcagtgttttgttgttttgtttaagtcattactattaacattttgctgaactgtttctctgtttagaaacttctgaactaaatgacccttttggtcttttctagtgcccaaatgcagggattccacggttcaaaaagccatctcccatctggattaaatgta

SEQ ID NO: 546212 - DNA, 875 bp, Homo sapiens
tgtttgaggaatctgacgtggcaagaagctaatatttcataattttgcaagtatcgcaggggaccctgagagttgtgagagcttgaatcacatgacttagctcgggtaattaatactcaggcaacttggcactcgtaccagtctgcttgatctgcaagaagttcaaagagcctcatcttcccaagtgttggggctttgataatttcaggaagagaagcgagaatagtagctcrggcgtatgtccccctgaaggaaaggcagagcagcagcagggcaaccaccctatgggacctccctattcctgagcaagaggttgtccctagatcccaaataggccgagagactgggggagtcgagacttatctcaggggagcaagggaatgtctggctacagtgcctggtttggaaacagggagaggaatccatggctctgagcccaaccccaggccaccaacatgatttctatctctggaaacaaggattctgttaacagagggactttcagaaacatcttcattaatactggtaccaccgaaatgcccatggaacacttaggggtcagtcaaacctgaggtttaacttttcctttttaaatgtcagcagcaaactgctgatctaccaacagttaacaattttacctgctgctgtctaatcctttattcaccacaaatccattccaaagggagtcaataaggcaacataaaagtgttcaatgcatattaactgataaggaggagaagttagtgaagttcctcttaaagccagtacatttccaagctcttagtactgtttcattctccatgttttaaaattatacaaagtgtatattaggcaaaagaatagtaagataaaaacttatgcacccaaaacacagg

SEQ ID NO: 546213 - DNA, 546 bp, Homo sapiens
atgtaccaatcatctcccaccaatttattcctgtttaagcagttagcagaatcagtaaaattcgtaactcaagaaaaaaaaaatgggttggattaaatactrtagtagtctagctgctctgagctcaagtctccaggacagaaatacacctatgtggcaaatagtgaaactaatttccctcactgccctctctactattctgtttagaaatcttgactgctgttctaatggacaggtgctttcctgctcctaatagtgggaagtgatgtgatggcttaggaatgaaatttaagtacacctctccgaactctgggatgggtggatgataatcttcataagtaactgaagccacctaagaggcctgtccctactgtaaacagaagtcatttttgcccttgttgtaaagaacccactttgtttaatgttaagaggttggtgtgtttaatctgacctttgatttcaaagattgggcatggaacataaatatgctctatctaatttaatatcaacatgaccacattttaattctgctgtataattaacaca

SEQ ID NO: 546214 - DNA, 512 bp, Homo sapiens
acaggggctgggcaagtgcggggccccctcacaacccctccccaaggccctggctcttacctcttgggagaggtagggcaggacctgggcacaaatcccgttcagccttttgacgatctcagcctggaacacacagatgaagccggcttcagtcctgggcgggtggcaggtgcaggctagccacaggaggcctgcgcggggcccggcccagccctgccacttgcggcttctaagaggggctaggtctggccagggtgggatgagcaaagccgtgttcgggcccgagggcagccagtcagtggcaaaggtggggctggacaccggctgtcgcctgcagcttagagtgaggtaagtgcaggatgaggccagactgcacattcctcgggggtcggccactcaggcccctggcaggtagtaagcgcttgtgcgaatgtagggasggctgggggccgtaggctgtggggaaggtctctgcccctccccaccaccgggagaaacactcccagggaggc

SEQ ID NO: 546215 - DNA, 590 bp, Homo sapiens
gatgatggagtggaagggtgacattaaactcaatttttgttcaaactccagatctatccccttccaaaactttttttaataataaatttctccatggcttatgtgcttcattggtttactctaccttatcactgaaaacatccagtgaatcagagagaaaatagaaaatagttgactcttgttttgtggctctccactgtttttcatggttctattccttgggcttgagaacaacattctgatggtgtttaaaaactcagaaagagcccatctccttagatcagtagtccatagagcatctccctaggggcagaaggttagggggttaatctcggcaatggtgtggagtgtacagtgtctctcatttaccttccttacctctctmcatgctcctagttactgcttctctttgtaactctgaggtatgaaatacctcaaagcatatttgattttgtcacagatttctggcacagggctcttaaaacccttggaattccctgagtgataggagtattatttgttattcataaacagccccttttgatcatagctgagtttatgctaaggagatcatggccttaggatgggac

SEQ ID NO: 546216 - DNA, 1500 bp, Homo sapiens
gatgcagttgaaacccaaatgtaggtctatcggctcaaaatcttggctttcttcccctagatgatccggactattcattacaaatgctaaagccttgtttcccagatccccaaggccagatgtgatcaactaatcaatgccaatggaaaagagttcaccatctttctaacatttgctagaaaaacaacatctttccattttaaccttctaatggcatataatccattttttatcccctttcttgtttaatataagaagaattttagaggacaacatattgaccatgagaactgagtaaaccgatcatgagaaacacaagtaaagcagaagacgtgtctcttatatcatgttagtctcttccttttacggttttatgtgagactagtctgacccataccagtcttatttatccctttttgcataggtttatattaaaaaaaaaacactggtgaacaaacttagtttttttcttttcacctagggtgaggatgcaagagtaggagaaatcaatgccaacaatatatattaacttttaggtatgtttactgagtcaaagaacattctactttcataaggattaagccaatttctttgaatccttatattgattgacccgtcaatagttttacctgatctatactgacaaaggcataaaataatggatatatcgtgtctttatctggcatgtagtacaggatacatgctcaaaaatggtttgctgaatgaatgaacagatgacggaattaataaaatgatggttctcagccaggaaactcatcatagcaaagaaaatcaaacaggtttttttttcaggatttttagaagtgcgacagaaactgaacctttttctacattacagttgccctaggttagctaaatcaccatgtttctttccttttgcttggaatgaatcagatcaatgtggcatgttagacgcctcatgttgcacagaaactatgatcgaaacttatatgtctgatttaaaaggaggaaatggattggttgttacataatcaatatagttgagtagaaaaaattcttccagaagtgactaatgaagagcaactgtgaagtgtattattattggtggttgaatatactgtatacaactgcattaaaacaacggacaaggaaataaggaactgtgcctcattcaacagatacctgataattgctaagaatctaaagaggatccattggatagtactccattaagaaggcataaaagcaagcaaatttattgtttaatccaggagaacacatacctagtttggatccatctaggacttaactctaagtctttattagtgttgcraagtattattattccagcttctagaaactttctactgttgttaaatttgaaaaacacatcttgtaaaatgataaaagtttttctccactaaaggtgaaataaaaattcacagtcccaaatgagtcctaattcaacctgaattaagcatattaagtgttgtgtctgagttgttaggccctttctta

SEQ ID NO: 546217 - DNA, 964 bp, Homo sapiens
agaagttcagcttcggtttgctcgggatgaactagatagtatggtcaacaataatataaggaagaaagatcatgaacccctacgagctgtgtgctgtagcctcattaagtaagaagatttgtctattagtgtatttgtgctgcctttatatgaaaaatatgtttgattatgccagagtatttaaagttagtaaactttggttaactaggcttcttgggaaatgaattgttccttgccagttaagctttaaaaacaaggctagtccaaccttttgtcttgttcacaagaatataatgaacataagtgatttttaaaaatgaataattgtgaatcttattcctaatttggcaggataacataatagccccgaaggatgtgtctaggatattgaaccagaaactaaacgtgcttttaattaatatattttaaaattctggatcatggctttaatttattgctttattctccaatttaaataggattctagtttcatgggttttaattaatcaagatttcagtactctaaaataatatatttagtactagctttatgacaatttacactaatttttcttttattagacattaagttgttgatctagaatcttgttaccatagaaaaaaacttcccaactctgaatccyatttcatttattgtagcatttttctgtttccttcacatttacactttaaaaaaatttgaatgttacacagtcacatggtttgaagacaaaatgtatacaaatttgtatagtaaaaacctccttccagttccatccctgatctgtttaatgtctgtgttctcctaaacaagtttatcattcaatgcatattactcatttatgaaccaatattagatatattttcttgtccctcactattttccaaatgatggcatagtatacatacatttttctgcaacttgcttttttcaattcccagtgtattttggagacctttccat

SEQ ID NO: 546218 - DNA, 300 bp, Homo sapiens
atatcatttgggtcagagctcccctcccttcagattatgttaactctgagtctgtccaaatgagttcacttccattttcaaattttaagcaatcatattttcaatttatatattgtatttcttaatattatgaccaagaattttatcggcattaatttttcagtgtagtttgttgtttaaaataatgtaatcatcaaaatgatgcatattgttacactactattaactaggcttcartatatcagtgtttatttcattgtgttaaatgtatacttgtaaataaaatagctgcaaacctca

SEQ ID NO: 546219 - DNA, 1639 bp, Homo sapiens
ttttgagacggagtttcactctgtcccccaggctggagtgcagtggagcaatcttagctcacagcaagctctgcctcccgggttcatgccattctcctgcctccgcctcccgagtagctgggactataggcaaccgccaccacggccagctaattttttgtatttttagtagagacgaggtttcaccgtgttagccaggatgttctcgatctcctgacctcgtgatccgccctcctcggcctcccaacgtgctgggattacaggcgtcagccaccacgcccggccaatcagtgacttttctttatcttttattatattgatttaatctaagtacaaaccagtgagtcttgaaaaaactgcctgaagagaaatgtaaatttgatttataatttaatatttatcgctcctttaaaatgttaataactctataaagattaatcaggatgtatgttacaaagaagtttaatgtctttggataaaagcttcaactacaaactttcctactatcgraacaatattttcttcatcctctaagatttacagaaatactactgggtaaaaggaattagaatgtatcaaagataccagctctgcattgtcccctattatgccagattctttcacacacactatggagctttacgagaacagtagactacatatttcaaagttatctgaaaatacaaggaagttgggtggcagtactagggccagtctcaaaataggacatccttttactcctgagagagaaggtggaaagtacgaggtcataaaagctgagtgttttacacaaataataaagtactaaatctgctgagtgtggttgtaaacctaccctctgtatcctaatcataagaattcacgtgttgattattgctgtttttccttaaactgtatcttagcaattttttttcatgttctttagcaaatccatcttaggaatgatctgttgcatcccagaggaaagggttaatttgtgctacccagagtacatcggggtaagtttagctcttgaataaggttagctccaagggttgaagatgtggagccctttacctcaatctgccacagttttggaaaaagagttgagcagctgagatgggcactagagaggggctcagcagaactgcagcatcaggactatggatgcatttcatccatgttatggtaaaagctcatcactggaatttatcttagtgtatcaagttttattgctataaatagtttgtctttatgcatcttattcattttaatccagggaaactattacatgattatgagtaaacatgctttaagattttagtgtttgtttcagaaatgactatatatccatataattctctatatagaagctctctctctatatagacgctccccaggtagagggcatgagttcaatgtgaaaatggaagacgaatttaagaaaaacgtcaataaagatggattatattcatagagattgatgttttgcacaattaacacttagagtatttccatgttattgccaataactagacttattctccatgttaattttattaataaactacaattaaaattaaagtttaacccttatatatacatatatatgtatatatatgtaatttcaaaacttgcttcctgaattaattattttaaa

SEQ ID NO: 546220 - DNA, 1306 bp, Homo sapiens
ggaacctttttggatggtggaaaagggaaagaggtacttctctccataccccaggtggaagactgcaactaaactcactttcccaaaggaccagtgtctttcttcttccagcatggggaaccataacatcctactggcccaaagtctcctggtgctataaagttggcattcccagataacttgttggcagctggtaccccaaatccagacctcctgctgctgagccacccatgtatcctcccagagatgaggtggttctcagggctgcactgtaaaaagtgagagcaactgaagtgagggcgacgtctgcccactggcatagacacccacacagctgcggccacagctcagccccaccctctgcatgcctttcaacagcatgatgggaaaatcagggaaattcacaccaactcatgctttccttcctctgtgtaaaatttccctgtcccctgtaaagcctgtttcttagcccatacatgttacagtatgaaattattttccaagtcctgtggcatgacagatagaaacctaaagggatggatttggcctcacagatactattatctcctcattacatgtcatttcaattcagttaacacttattgaacatttacaatgtgcaaaactctgggctagacagtgttaataaatataaagattrataatttatcgtctattttccttggtaaatcacaatctagctgtggagacactttgaaaatcaatattcaattaggtataagacagttactatgggaagtagaagagagcagggaatagctgagtctgaagagttggaggagagtgtcttggaaggctttaccatggaaatggatttgaattaactcaggtaagagcattcaaggagttataaatgatctgagcagaagcacagaagagaactattcctgcaatcgtcagaacttcttcgtgattataaatgtaagtttctagataatgtcaggaagctgaaagtatggattgaagttatatacgtttgtgagttatatatgtatatatgattcatgtatgtttcacctaaatagcattaataatattttgtattttcttaggaaatacagagacagaaacaaatctctctctctttacatagtaaataggccttcccaaaacagtttgccaggtctaggttatttatttatttacttatttattttttgagacagtctcactctgtcacccaggctggagtgcagtggtgtgatgtcagctcactgcaacctgcacctctcgggttcaagcaactcttctgcctcagcctcccaagtagctgggattacaggca

SEQ ID NO: 546221 - DNA, 532 bp, Homo sapiens
tgccaatggaaaaagttctgaattaggcagtataaaacgagacctggaaaatggattcaacagatacaaattattatggcagataaacaagtaccctaaatattgtcataagtataatttaaatagctgtcatatgattggagaagagaaagtctactggacaatgtgattggaaaaaggaaatgtgacaaggaataatttggaatgggaagcagaggagaaaaagaataccagcctctgatgaataatacgtggctccaagactgcattaggtttgaagccaacactaaatcggggtccttgagcatttaaattaaaattctatttttgagaacttgtgaagaatctacttaaggttagtaacactggcataatatgcaaataattatgcaaacatatcttttgatattgtttcagaggcatgaacttgattttcaagayccaaacattagaaaatgacattttctattgcatattctaaaaccttagagttttactcaacattacatttaaaagttacatggttccaaaa

SEQ ID NO: 546222 - DNA, 774 bp, Homo sapiens
accacaaatgtacattgctcttgctcacaagagagtctgttcaactctcccttccttagccacctactcatatgtgaaagatatctgtggacaaaacactaaaagcatcgaactgataatgttttgggccagctcatgccagaacactcttaaagaccaattttattttctttgtaatgtaagatcatgtaggaacaatattctcctatctttgaaagaagttttcttaaaagacaatagttaaagaagtgctaatattacaggtgggtattcacttttttcttatcacaacctattagaaataagaatttaaagactgggtctaaagcagaaaacaaccagagataaaaataatgaaaattatgaagcactgatgtaccaattgtattaggtaggtagaaatctaaatatttagtaagcattatattaaataccatataagatagtacctaagtaaaagacatatttaatctttgcggacctcttatattccagtcacttatacaagacaaagaaagtaaaagcmtagtttcatttgttattagtcctgagaagcaggtgaacagtaaactagaaatgttcattccctctttctccttctgtcttagcatctatgctccagcactttctattcctctctttacagtgtgtagaaggcttataaagacttacattgacccagcaacaactggaagacattaaaaggctttttctttttagaagcaaaatcttgatacaaaaactttatagaagaaagagaacaaatacacgttc

SEQ ID NO: 546223 - DNA, 908 bp, Homo sapiens
acgcttgaaacaaaacctttgttgatttagttgcgcttctgtaaaccccggatgggatgctgctggaagcccagtagtaattgtacatctggacttcccacctcctgctccaacagactgtcgttggcagaaacatgtggtccattggcacagaccgtgtttcccatcacagcttatctgagcagtgttgaaaggttcaaagttattatttacagctcagtgaggagagggcagagagtcagaagctgtggatgagatccacgctgcaaatgctactcacggagaatgacagcgtctgagatgcctaaggggcagagaaagggattcttagcaactccccatgtctcagagagccgcacaagctatgcttcccgccctccagaagcctcctctgctgaatgcggccaacattgattccttcccttcctcaccgaccctattccatattagggtgaccaactcatccctgattgcctgggactttcttggttttcgtactaaaagtcccatgtcccaagaaactcctcagtacctggtaagcagagctagtgggtcaccctgcccatactgtcgagatgaagcatttttgtcattgactatatttggttaccagtctagccacactaacatcaaacacttgctgggtgtctagtgagtacactgtgctaaacttagaggacacactgccctyatctgattttttttttctctatttttccacatgtttcaaaatgttttttctatacctagcattcagatcttgttttctttgtaccattgtcaaaaaacaaaacaaaacaaaaaacagagcttcttgggaaaatggttgattccaagactggggcaagaaaagtaataatatgagcttggaacattttatgatgccagaaaataaggagatgttcaag

SEQ ID NO: 546224 - DNA, 1130 bp, Homo sapiens
tgcactccagcctgggtgacagagcaagactctgtctaaaaaaaaaaaaaaaaaaaaggaaaaaaaaawatatatatatattttataggttctaagaaattgcttaaaaattacacacactcacaaactgtgaaaccaatagtatttgtgtaattgacagtgggagcttgcattctgcaacctgggacgaagaataactacaaaggtgcatcaacttctttatgaatagatcaccataaaatattaatattatgttcttcaagggtccagaatagaagctgaacgttttttgtataattacataaaattacatattattttaagatatataatcatatacattgtaatttttgcgacctattgaaatcataaccatctttataaagccatgacactggtacctataatcaaatcattctccttgctgacaaattattctcattgcctttcttctggcatccaatcatttccattcttttatttacaatttcgttttagaaatttacccttttggactttatattttcctcttaggtttatctattatgtaaagtatttttgtagattgcagtttagacaggaggagatgattctacgaaataatttgctgtcggtgtgttatcattacctcattcccagagggtgctactttggtggaaaaaccaggctcagtggctcacgcctgtaatcccagcattttgggaggtcgatgtgggtgaatcacccaaggtcaggagtttgagactagtctggccaacctggtgaaaccccgtatctactaaaaatacgaaaattagccgggcgtgttggcgggcgcctgtaatcccagctactctggaggatgaggcagaagaatcgtttgaacacgggaggcagaggttgcagtgagctgagatcgcaccactgcactccagcccgggggacagagcaagactctgtctcaaaaaaataaaaaataaaataaataaaatatatggagctataatttctacccacttaattgcattcctctaaaagtcattaacttgaaacaagttttttgggttttttttggtccattaagctaattcttgactctatacttataaagtttataaaattatttgtttataaagttgataaacttaatt

SEQ ID NO: 546225 - DNA, 2111 bp, Homo sapiens
ttctgtctttgaacatagttgtgtgaggatttgatgctcaaagctgctgtagcctttttgaaaccatgagaagaggccaggcgccgtggctcacgcctgtaatctcagcactttgggaggccgaggtgggcggatcacgaggtcrggaaatcgagaccatcctggccaacatggtgaaaccccggctctactaaaaatacaaaaattagctggacctggtggcgtatgactgtaatcctagctactcgcgaggctgaggcaggagaatcacttgaaccagggagtcagaggttgcagtgagccaggatttcaccactcactgcactccagcctggccacagagacagactctgtctcaaacaaacaaacaacaaaaaaaacaaacatgagaagaaggggccagtgtttgcaaggatgcacaccttgagccctgatagcatgcaggtactgaactaaaaccagaatcctcttcccacccagataaaatcccccgggcttaggccctttcagccaggaattgtttcacagccaaaagcattcctgttggacacactgcacacctggttcttccactgcctggctcttgcaccaggataggtcgctaagcatcagacgctcatctatggcataagcatgctaagagaggccaatcctatcagctttatttaagcacagagttcccgagagggccaatcagttgttacagaggggaaacctcaaaacttcttttatgtacctaacctttaaaacacatatggccgcctgtagctcacaatctaaaaagaaaatcatcaagccttcccacctgattatttgttattgtccataactctggggaaaaataccactgtatttgggctttttattgatttttgcacatttcttcaactagaaaatctggaggcaaatgtgtgtcaatgctcgaaggcctcttaaatatgtgaagagaagagaacatgttttgtgagatgttttctatccaggatttgtaaagccacagaggaggagtatgagtctgaaagaggagggtagaggaaggacagaggaggagggagaggggaaaagagaaataatgctttagcaaatttattttaaaataacactcttatgtttatctgcactttatacttaagttgtgttgaaaggcaaaaccctgttgccctaaagagactcccaagaggctgactttgagctggcatcataagagccagtttggaacccactccaccaaggctgctatgagttgaagatgacaggcttgaaatcctcttcccggggcaggaggaaagagctgcacaggccatgtagcacgcaggctaagtgtgcattcagaacactagtaatcagaataagaatcacagttaaaggaaaaatgttccagcccctaggaacatatatagaattctgtacacagaatatgtgggaaaaaatactttcagcacacatgatattgcttttattagttaacaaaataaattatccttctggaattgcatatgggagaggcaacatgatttgatgagtgtttagggactttgagtcttaatccagcccatagaattgttgtttgaatgtgagcctcgctccatatttaccagccttgtttatataaggcaggggtcagccactaacagattctacatgcagagtctatgttgcaggtcatcttacacagaactggtgttgagaacagaaagcaagagaaacagcctcatgaagcgtgctgccttatcttgcaacttattttgatgatttagacctcgtgtgtttttccttattttgatccaggtgaataaatcagcattaaaaagtgacaaaaaaacacttcttacagcttcatggatttctcttttattctcctttcttcttactgcttctctttcccacctatgccacaccaacagcatcctccgtgatagcacctctatctttgcaaaacaactggtagatcctctccacttacagtttttgatttgtataaccctcggatgaattcagccaactgcaaaaataaaagcagccgaacaaacaacagcaaagccaaagcaaaacaaaacaaaaagaaccttataaaagcgctgctgttgagcacactgagaacaacttggagc

SEQ ID NO: 546226 - DNA, 2111 bp, Homo sapiens
ttctgtctttgaacatagttgtgtgaggatttgatgctcaaagctgctgtagcctttttgaaaccatgagaagaggccaggcgccgtggctcacgcctgtaatctcagcactttgggaggccgaggtgggcggatcacgaggtcgggaaatcgagaccatcctggccaacatggtgaaaccccggctctactaaaaatacaaaaattagctggacctggtggcgtatgactgtaatcctagctactcgcgaggctgaggcaggagaatcacttgaaccagggagtcagaggttgcagtgagccaggatttcaccactcactgcactccagcctggccacagagacagactctgtctcaaacaaacaaacaamaaaaaaaacaaacatgagaagaaggggccagtgtttgcaaggatgcacaccttgagccctgatagcatgcaggtactgaactaaaaccagaatcctcttcccacccagataaaatcccccgggcttaggccctttcagccaggaattgtttcacagccaaaagcattcctgttggacacactgcacacctggttcttccactgcctggctcttgcaccaggataggtcgctaagcatcagacgctcatctatggcataagcatgctaagagaggccaatcctatcagctttatttaagcacagagttcccgagagggccaatcagttgttacagaggggaaacctcaaaacttcttttatgtacctaacctttaaaacacatatggccgcctgtagctcacaatctaaaaagaaaatcatcaagccttcccacctgattatttgttattgtccataactctggggaaaaataccactgtatttgggctttttattgatttttgcacatttcttcaactagaaaatctggaggcaaatgtgtgtcaatgctcgaaggcctcttaaatatgtgaagagaagagaacatgttttgtgagatgttttctatccaggatttgtaaagccacagaggaggagtatgagtctgaaagaggagggtagaggaaggacagaggaggagggagaggggaaaagagaaataatgctttagcaaatttattttaaaataacactcttatgtttatctgcactttatacttaagttgtgttgaaaggcaaaaccctgttgccctaaagagactcccaagaggctgactttgagctggcatcataagagccagtttggaacccactccaccaaggctgctatgagttgaagatgacaggcttgaaatcctcttcccggggcaggaggaaagagctgcacaggccatgtagcacgcaggctaagtgtgcattcagaacactagtaatcagaataagaatcacagttaaaggaaaaatgttccagcccctaggaacatatatagaattctgtacacagaatatgtgggaaaaaatactttcagcacacatgatattgcttttattagttaacaaaataaattatccttctggaattgcatatgggagaggcaacatgatttgatgagtgtttagggactttgagtcttaatccagcccatagaattgttgtttgaatgtgagcctcgctccatatttaccagccttgtttatataaggcaggggtcagccactaacagattctacatgcagagtctatgttgcaggtcatcttacacagaactggtgttgagaacagaaagcaagagaaacagcctcatgaagcgtgctgccttatcttgcaacttattttgatgatttagacctcgtgtgtttttccttattttgatccaggtgaataaatcagcattaaaaagtgacaaaaaaacacttcttacagcttcatggatttctcttttattctcctttcttcttactgcttctctttcccacctatgccacaccaacagcatcctccgtgatagcacctctatctttgcaaaacaactggtagatcctctccacttacagtttttgatttgtataaccctcggatgaattcagccaactgcaaaaataaaagcagccgaacaaacaacagcaaagccaaagcaaaacaaaacaaaaagaaccttataaaagcgctgctgttgagcacactgagaacaacttggagc

SEQ ID NO: 546227 - DNA, 2111 bp, Homo sapiens
ttctgtctttgaacatagttgtgtgaggatttgatgctcaaagctgctgtagcctttttgaaaccatgagaagaggccaggcgccgtggctcacgcctgtaatctcagcactttgggaggccgaggtgggcggatcacgaggtcgggaaatcgagaccatcctggccaacatggtgaaaccccggctctactaaaaatacaaaaattagctggacctggtggcgtatgactgtaatcctagctactcgcgaggctgaggcaggagaatcacttgaaccagggagtcagaggttgcagtgagccaggatttcaccactcactgcactccagcctggccacagagacagactctgtctcaaacaaacaaacaacaaaaaaaacaaacatgagaagaaggggccagtgtttgcaaggatgcacaccttgagccctgatagcatgcaggtactraactaaaaccagaatcctcttcccacccagataaaatcccccgggcttaggccctttcagccaggaattgtttcacagccaaaagcattcctgttggacacactgcacacctggttcttccactgcctggctcttgcaccaggataggtcgctaagcatcagacgctcatctatggcataagcatgctaagagaggccaatcctatcagctttatttaagcacagagttcccgagagggccaatcagttgttacagaggggaaacctcaaaacttcttttatgtacctaacctttaaaacacatatggccgcctgtagctcacaatctaaaaagaaaatcatcaagccttcccacctgattatttgttattgtccataactctggggaaaaataccactgtatttgggctttttattgatttttgcacatttcttcaactagaaaatctggaggcaaatgtgtgtcaatgctcgaaggcctcttaaatatgtgaagagaagagaacatgttttgtgagatgttttctatccaggatttgtaaagccacagaggaggagtatgagtctgaaagaggagggtagaggaaggacagaggaggagggagaggggaaaagagaaataatgctttagcaaatttattttaaaataacactcttatgtttatctgcactttatacttaagttgtgttgaaaggcaaaaccctgttgccctaaagagactcccaagaggctgactttgagctggcatcataagagccagtttggaacccactccaccaaggctgctatgagttgaagatgacaggcttgaaatcctcttcccggggcaggaggaaagagctgcacaggccatgtagcacgcaggctaagtgtgcattcagaacactagtaatcagaataagaatcacagttaaaggaaaaatgttccagcccctaggaacatatatagaattctgtacacagaatatgtgggaaaaaatactttcagcacacatgatattgcttttattagttaacaaaataaattatccttctggaattgcatatgggagaggcaacatgatttgatgagtgtttagggactttgagtcttaatccagcccatagaattgttgtttgaatgtgagcctcgctccatatttaccagccttgtttatataaggcaggggtcagccactaacagattctacatgcagagtctatgttgcaggtcatcttacacagaactggtgttgagaacagaaagcaagagaaacagcctcatgaagcgtgctgccttatcttgcaacttattttgatgatttagacctcgtgtgtttttccttattttgatccaggtgaataaatcagcattaaaaagtgacaaaaaaacacttcttacagcttcatggatttctcttttattctcctttcttcttactgcttctctttcccacctatgccacaccaacagcatcctccgtgatagcacctctatctttgcaaaacaactggtagatcctctccacttacagtttttgatttgtataaccctcggatgaattcagccaactgcaaaaataaaagcagccgaacaaacaacagcaaagccaaagcaaaacaaaacaaaaagaaccttataaaagcgctgctgttgagcacactgagaacaacttggagc

SEQ ID NO: 546228 - DNA, 2111 bp, Homo sapiens
ttctgtctttgaacatagttgtgtgaggatttgatgctcaaagctgctgtagcctttttgaaaccatgagaagaggccaggcgccgtggctcacgcctgtaatctcagcactttgggaggccgaggtgggcggatcacgaggtcgggaaatcgagaccatcctggccaacatggtgaaaccccggctctactaaaaatacaaaaattagctggacctggtggcgtatgactgtaatcctagctactcgcgaggctgaggcaggagaatcacttgaaccagggagtcagaggttgcagtgagccaggatttcaccactcactgcactccagcctggccacagagacagactctgtctcaaacaaacaaacaacaaaaaaaacaaacatgagaagaaggggccagtgtttgcaaggatgcacaccttgagccctgatagcatgcaggtactgaactaaaaccagaatcctcttcccacccagataaaatcccccgggcttaggccctttcagccaggaattgtttcacagccaaaagcattcctgttggacacactgcacacctggttcttccactgcctggctcttgcaccaggataggtcgctaagcatcagacgctcatctatggcataagcatgctaagagaggccaatcctatcagctttatttaagcacagagttcccgagagggccaatcagttgttacagaggggaaacctcaaaacttcttttatgtacctaacctttaaaacacatatggccgcctgtagctcacaatctaaaaagaaaatcatcaagccttcccacctgattatttgttattgtccataactctggggaaaaataccactgtatttgggctttttattgatttttgcacatttcttcaactagaaaatctggaggcaaatgtgtgtcaatgctcgaaggcctcttaaatatgtgaagagaagagaacatgttttgtgagatgttttctatccaggatttgtaaagccacagaggaggagtatgagtctgaaagaggagggtagaggaaggacagaggaggagggagaggggaaaagagaaataatgctttagcaaatttattttaaaataacactcttatgtttatctgcactttatacttaagttgtgttgaaakgcaaaaccctgttgccctaaagagactcccaagaggctgactttgagctggcatcataagagccagtttggaacccactccaccaaggctgctatgagttgaagatgacaggcttgaaatcctcttcccggggcaggaggaaagagctgcacaggccatgtagcacgcaggctaagtgtgcattcagaacactagtaatcagaataagaatcacagttaaaggaaaaatgttccagcccctaggaacatatatagaattctgtacacagaatatgtgggaaaaaatactttcagcacacatgatattgcttttattagttaacaaaataaattatccttctggaattgcatatgggagaggcaacatgatttgatgagtgtttagggactttgagtcttaatccagcccatagaattgttgtttgaatgtgagcctcgctccatatttaccagccttgtttatataaggcaggggtcagccactaacagattctacatgcagagtctatgttgcaggtcatcttacacagaactggtgttgagaacagaaagcaagagaaacagcctcatgaagcgtgctgccttatcttgcaacttattttgatgatttagacctcgtgtgtttttccttattttgatccaggtgaataaatcagcattaaaaagtgacaaaaaaacacttcttacagcttcatggatttctcttttattctcctttcttcttactgcttctctttcccacctatgccacaccaacagcatcctccgtgatagcacctctatctttgcaaaacaactggtagatcctctccacttacagtttttgatttgtataaccctcggatgaattcagccaactgcaaaaataaaagcagccgaacaaacaacagcaaagccaaagcaaaacaaaacaaaaagaaccttataaaagcgctgctgttgagcacactgagaacaacttggagc

SEQ ID NO: 546229 - DNA, 2111 bp, Homo sapiens
ttctgtctttgaacatagttgtgtgaggatttgatgctcaaagctgctgtagcctttttgaaaccatgagaagaggccaggcgccgtggctcacgcctgtaatctcagcactttgggaggccgaggtgggcggatcacgaggtcgggaaatcgagaccatcctggccaacatggtgaaaccccggctctactaaaaatacaaaaattagctggacctggtggcgtatgactgtaatcctagctactcgcgaggctgaggcaggagaatcacttgaaccagggagtcagaggttgcagtgagccaggatttcaccactcactgcactccagcctggccacagagacagactctgtctcaaacaaacaaacaacaaaaaaaacaaacatgagaagaaggggccagtgtttgcaaggatgcacaccttgagccctgatagcatgcaggtactgaactaaaaccagaatcctcttcccacccagataaaatcccccgggcttaggccctttcagccaggaattgtttcacagccaaaagcattcctgttggacacactgcacacctggttcttccactgcctggctcttgcaccaggataggtcgctaagcatcagacgctcatctatggcataagcatgctaagagaggccaatcctatcagctttatttaagcacagagttcccgagagggccaatcagttgttacagaggggaaacctcaaaacttcttttatgtacctaacctttaaaacacatatggccgcctgtagctcacaatctaaaaagaaaatcatcaagccttcccacctgattatttgttattgtccataactctggggaaaaataccactgtatttgggctttttattgatttttgcacatttcttcaactagaaaatctggaggcaaatgtgtgtcaatgctcgaaggcctcttaaatatgtgaagagaagagaacatgttttgtgagatgttttctatccaggatttgtaaagccacagaggaggagtatgagtctgaaagaggagggtagaggaaggacagaggaggagggagaggggaaaagagaaataatgctttagcaaatttattttaaaataacactcttatgtttatctgcactttatacttaagttgtgttgaaaggcaaaaccctgttgccctaaagagactcccaagaggctgactttgagctggcatcataagagccagtttggaacccactccaccaaggctgctatgagttgaagatgacaggcttgaaatcctcttcccggggyaggaggaaagagctgcacaggccatgtagcacgcaggctaagtgtgcattcagaacactagtaatcagaataagaatcacagttaaaggaaaaatgttccagcccctaggaacatatatagaattctgtacacagaatatgtgggaaaaaatactttcagcacacatgatattgcttttattagttaacaaaataaattatccttctggaattgcatatgggagaggcaacatgatttgatgagtgtttagggactttgagtcttaatccagcccatagaattgttgtttgaatgtgagcctcgctccatatttaccagccttgtttatataaggcaggggtcagccactaacagattctacatgcagagtctatgttgcaggtcatcttacacagaactggtgttgagaacagaaagcaagagaaacagcctcatgaagcgtgctgccttatcttgcaacttattttgatgatttagacctcgtgtgtttttccttattttgatccaggtgaataaatcagcattaaaaagtgacaaaaaaacacttcttacagcttcatggatttctcttttattctcctttcttcttactgcttctctttcccacctatgccacaccaacagcatcctccgtgatagcacctctatctttgcaaaacaactggtagatcctctccacttacagtttttgatttgtataaccctcggatgaattcagccaactgcaaaaataaaagcagccgaacaaacaacagcaaagccaaagcaaaacaaaacaaaaagaaccttataaaagcgctgctgttgagcacactgagaacaacttggagc

SEQ ID NO: 546230 - DNA, 2111 bp, Homo sapiens
ttctgtctttgaacatagttgtgtgaggatttgatgctcaaagctgctgtagcctttttgaaaccatgagaagaggccaggcgccgtggctcacgcctgtaatctcagcactttgggaggccgaggtgggcggatcacgaggtcgggaaatcgagaccatcctggccaacatggtgaaaccccggctctactaaaaatacaaaaattagctggacctggtggcgtatgactgtaatcctagctactcgcgaggctgaggcaggagaatcacttgaaccagggagtcagaggttgcagtgagccaggatttcaccactcactgcactccagcctggccacagagacagactctgtctcaaacaaacaaacaacaaaaaaaacaaacatgagaagaaggggccagtgtttgcaaggatgcacaccttgagccctgatagcatgcaggtactgaactaaaaccagaatcctcttcccacccagataaaatcccccgggcttaggccctttcagccaggaattgtttcacagccaaaagcattcctgttggacacactgcacacctggttcttccactgcctggctcttgcaccaggataggtcgctaagcatcagacgctcatctatggcataagcatgctaagagaggccaatcctatcagctttatttaagcacagagttcccgagagggccaatcagttgttacagaggggaaacctcaaaacttcttttatgtacctaacctttaaaacacatatggccgcctgtagctcacaatctaaaaagaaaatcatcaagccttcccacctgattatttgttattgtccataactctggggaaaaataccactgtatttgggctttttattgatttttgcacatttcttcaactagaaaatctggaggcaaatgtgtgtcaatgctcgaaggcctcttaaatatgtgaagagaagagaacatgttttgtgagatgttttctatccaggatttgtaaagccacagaggaggagtatgagtctgaaagaggagggtagaggaaggacagaggaggagggagaggggaaaagagaaataatgctttagcaaatttattttaaaataacactcttatgtttatctgcactttatacttaagttgtgttgaaaggcaaaaccctgttgccctaaagagactcccaagaggctgactttgagctggcatcataagagccagtttggaacccactccaccaaggctgctatgagttgaagatgacaggcttgaaatcctcttcccggggcaggaggraagagctgcacaggccatgtagcacgcaggctaagtgtgcattcagaacactagtaatcagaataagaatcacagttaaaggaaaaatgttccagcccctaggaacatatatagaattctgtacacagaatatgtgggaaaaaatactttcagcacacatgatattgcttttattagttaacaaaataaattatccttctggaattgcatatgggagaggcaacatgatttgatgagtgtttagggactttgagtcttaatccagcccatagaattgttgtttgaatgtgagcctcgctccatatttaccagccttgtttatataaggcaggggtcagccactaacagattctacatgcagagtctatgttgcaggtcatcttacacagaactggtgttgagaacagaaagcaagagaaacagcctcatgaagcgtgctgccttatcttgcaacttattttgatgatttagacctcgtgtgtttttccttattttgatccaggtgaataaatcagcattaaaaagtgacaaaaaaacacttcttacagcttcatggatttctcttttattctcctttcttcttactgcttctctttcccacctatgccacaccaacagcatcctccgtgatagcacctctatctttgcaaaacaactggtagatcctctccacttacagtttttgatttgtataaccctcggatgaattcagccaactgcaaaaataaaagcagccgaacaaacaacagcaaagccaaagcaaaacaaaacaaaaagaaccttataaaagcgctgctgttgagcacactgagaacaacttggagc

SEQ ID NO: 546231 - DNA, 464 bp, Homo sapiens
tccctgctccagcacccccagcccccacagccccccagcccccaccagcaaccatcctttcttgacagaaccacaatccccgaggtccagcctcctgggcgacgtcacctgcctctgggccagctccctgctgtggtccctccagctctccttcctgagctcccttcttcaggcctgcctactttcttccagcctgaaagcctaatttttcgataagctattaattaatgttaatgacttcacatacttccttcccaggaaatccattttcattttcagagtattcttaaaagtcaaatcccggggtctgaccacaaggacaaaccaccaagcgttcgacctttctctgtggagctcccaacagcactagtggaacctgctaaagttcagcccccggcccctgagcaaagccaggccaacyggggaagccctggataggaccagccaacttctcagatggccca

SEQ ID NO: 546232 - DNA, 464 bp, Homo sapiens
tccctgctccagcacccccagcccccacagccccccagcccccaccagcaaccatcctttcttgacagaaccacaatccccgaggtccagcctcctgggcgacgtcacctgcctctgggccagctccctgctgtggtccctccagctctccttcctgagctcccttcttcaggcctgcctactttcttccagcctgaaagcctaatttttcgataagctattaattaatgttaatgacttcacatacttccttcccaggaaatccattttcattttcagagtattcttaaaagtcaaatcccggggtctgaccacaaggacaaaccaccaagcgttcgacctttctctgtggagctcccaacagcactagtggaacctgctaaagttcagcccccggcccctgagcaaagccaggccaactggggaagccctggataggaccrgccaacttctcagatggccca

SEQ ID NO: 546233 - DNA, 598 bp, Homo sapiens
ttttttgagatggagtctcgctctgacacccaggctggagtgcagtggcacaatctcagctcactgcaaccttcgcctcccgggttcaagcaattctcctgcctcagcctcccaagtagctggrattgcaggtgtgcaccaccatgcccagctaatttttgtatttttgtatttttgtagagatagggtttcaccatgttgtctctcaaactcctgacctcaagtgacccacccgtttcggcctcccaaatgctggcattacaggcgtgagccaccgcacctggacttaactgctttactttctgtgtggacttgacttattgtttttaaggggaatattctgttccccaacctttgttagcttcctgagatttctgtctaagaacatatttcaagtttatacttactgtaatggtataacaatatctatggataatttatcattggaaagcttttctgtgtacttcaaaatcccccatatatactttattcatttttgaagataaatgtgtccttaaaatttgttaatattttattccaagtattttcaaaaagctttatttctaatttgttcaacttttaattcttaaacaactga

SEQ ID NO: 546234 - DNA, 598 bp, Homo sapiens
ttttttgagatggagtctcgctctgacacccaggctggagtgcagtggcacaatctcagctcactgcaaccttcgcctcccgggttcaagcaattctcctgcctcagcctcccaagtagctgggattgcaggtgtgcaccaccatgcccagctaatttttgtatttttgtatttttgtagagatagggtttcaccatgttgtctctcaaactcctgacctcaagtgacccacccrtttcggcctcccaaatgctggcattacaggcgtgagccaccgcacctggacttaactgctttactttctgtgtggacttgacttattgtttttaaggggaatattctgttccccaacctttgttagcttcctgagatttctgtctaagaacatatttcaagtttatacttactgtaatggtataacaatatctatggataatttatcattggaaagcttttctgtgtacttcaaaatcccccatatatactttattcatttttgaagataaatgtgtccttaaaatttgttaatattttattccaagtattttcaaaaagctttatttctaatttgttcaacttttaattcttaaacaactga

SEQ ID NO: 546235 - DNA, 1028 bp, Homo sapiens
gaaatgatttgagcattaatgaaaacttttccatcagtctttgagttattcattatgtaacacacattttgggcaatgaaggatcatctgcttgagttattgctgggggcctgtagtgctgtcaggtcttgttaggatcagtatattggttagaacttcatgtcctaggctcgggccttacctttgcaggtcagtcaggcagattccataccgaatagcacagaggttaggaaaatagattctgtgccaaactgcctgagtttaaatctcagctctgtcattaattaccagtgaatgtgacttttaaaaaattacctaacatttttatgatttagtatcttcattcacaaaatgagaacagcaacagaatctaatttatcataagactattacaagaataaaaggagtcaatatagataaagctctgagaacagagcctggtacctaggaaactctacataagtgttagttactagtattacttgagactggtatttaaacagaaagctattttgttcattcagaataractttgttcctttctaatgatgccccagtctcctagcatagtactttttaaatgttaagatacctaagataaattttgattcagaaagttgtttggaggaaataggcacagagtatttattccaagctctggtaaaggccagtgagatattcctacaccataataaagacatattcactattgattaggttacttctgtctcccacaatcattatcttactcctgagtttcttcctgcccatgtacagcttacagctagtggttcagggtggggagaagatagaatcgggaaagaatcccagaagtgctagacattaagctaagatctttttgataatatactcagggtgacctgtttgaagaactactatgctctactccactaactcccttgggtagaatgtgacttgggttcctaagctgtggaaggactttggaatagtcaaggaactctaagaattgctaaatgtccctgatagactagagagaaggaaggttt

SEQ ID NO: 546236 - DNA, 556 bp, Homo sapiens
tggactaatcacctatcattaggctccacctcccaatgctgttgcattgaagattaagttcccaacataggttttttggaggacacattcaaaccatagcatgcctgttttgcagtcactaattaaaaaatcaaatagtttctttgtcagaattttgttaacacacsagtaggattcactggtagactgataaaatgagacaatgtagatgagatgggtactatgtacctcaatgactaaatgagtcaaagataataaatcattattcattagtgtgttgcctcttctaaagcaggtaatatttcagttaatgacaaacataagacaaaggagcttcaaactagaaaccatcacctgaaatcatcaatttagcaaaatctatttcttagaaaaagtacttattcaaaattgacctcaggctcaaaattgagataattatataaaggaaatgtaggttgtgatgatttgttttttcaagcaatagtaaacaaaggcactctgttcacagaggagcagaaatactatgttgcctgttccttgctacaatcagaagata

SEQ ID NO: 546237 - DNA, 552 bp, Homo sapiens
tatagaaataaatgtattagagaratttgtcagataatgataaatgtcagatagttaattttactttgttttcctgaatgtcagactgtttgttgcatttgttaccttttaaaattttgtgattgcttttgactgatttgctcattttaaatgcacttctatagccatttttttagttataattttataatctttttaataacaaaaactcccaaattatgtaagtttcaatcctaaaagattgtctgtctctgcttgtactgacaacaaattgtcaattctgcttaaaattttgttttgaattgtgatgaaaaaaatcattcatatacctgagacataaattaaattgggaaatgttgagttcaaaaaatagaaaaatgtgtgagcataggtgggtgtttatgtattaccttactgggtaactaatcctaaaataagagtttgagcatactgcatcctgtgacacctttgattgtaagcttttgtgaccagttcttattcttgaaaaatttagactaagtgggtgataattacataattattcaaattctc

SEQ ID NO: 546238 - DNA, 552 bp, Homo sapiens
tatagaaataaatgtattagagaaatttgtcagataatgataaatgtcagatagttaattttactttgttttcctgaatgtcagactgtttgttgcatttgttaccttttaaaattttgtgattgcttttgactgatttgctcattttaaatgcacttctatagccatttttttagttataattttataatctttttaataacaaaaactcccaaattatgtaagtttcaatcctaaaagattgtctgtctctgcttgtactgacaacaaattgtcaattctgcttaaaattttgttttgaattgtgatgaaaaaaatcattcatatacctgagacataaattaaattgggaaatgttgagttcaaaaaataraaaaatgtgtgagcataggtgggtgtttatgtattaccttactgggtaactaatcctaaaataagagtttgagcatactgcatcctgtgacacctttgattgtaagcttttgtgaccagttcttattcttgaaaaatttagactaagtgggtgataattacataattattcaaattctc

SEQ ID NO: 546239 - DNA, 645 bp, Homo sapiens
aacccataaagcaaaatcctgccccagaggctgagggctctgacatctttcgtcttccggataactcgatccaacatcacaattccatgtctactaacaaaatcatgtcactgagataaatattaaactcattttataattcaggtataaaaaccaagctgtgagtggatgcagttggaaaggtcctcttttgaggtagggtcttggtatttatagaagagtgccttgtttttgttttctttctctttttttttttttttttttgagacagagtctcactctgttgtccaggctggagtgtggtggcacaatcttggctcactgcaacctctgcctcccgggttcaagcaattccctgcctcascctcccaagtagctgggatattacaggtgcccaccatcacgcacagctaattcttgtatttttagtagagacggggtttcaccatctcttgcttctctttgttatactttattttattttctttttggccctttgctttgtgcatttacaaaaggccaagaaaatcaatcccaggataactagaaagcaaaccaggaattgaaagttggaccttctgttaatttggcatcagaataagagacttatagaaaatattagaagaaaattagcctagcatctca

SEQ ID NO: 546240 - DNA, 556 bp, Homo sapiens
gtttgtaaaatgtcagagcatagaaatcatggtcttttatataaatgaggaaaatagaatgacaattggacctgaattcaagttgtttttttcactgtcttgtactttatycacagtgattttagatgagcctcacataaagaatattaacgagaaatatggagctattctacttgaggctcttcccaaaagtctgctttggtaaagaggtctagaatacatgccaggcgattttaaatttttgaatatttatttcatagtaaaggctaaggagaccacttgtgatagccacaagtttaacaactgttttgtaagtagatatactaggtgtcagataaatgaaaatatgacaacattcttgccttttaggaacatacctcctggtagataagtcttgcattaatcatttaagtgcaaggtaaacatattttgattgttagtttttttcctctcctgtctcattctaaagtgaaagtaaaatagctgagatataggtgaaaagagagacagatacaagtgtgtgatctccatgagaaataagtgagctacattactt

SEQ ID NO: 546241 - DNA, 525 bp, Homo sapiens
actgataggaagctattaaagtcacatagacaaatgattaaaagacagacaatgtgaagagaggaaacaatggcttaagaagcttacaggagaaagttcaacatccttaaaaatcaaagacaattaaaatgagatgccctttcccctattagcaaagttgctactaaacaccctacaatgaaaagtgctgttattacataatgccagctgggcgggaggtgtggggggtagtggrtgtgtgtgaggaacacgtatccccaagcattactagcagtagcagcagtgcaaactgatgtaatgtttccaaaaggaacttggatatatcaaaaatcttaaaagcaattatacaccttctgatgcagcaattcctctttggcaaatatgtatcgtaaagaaattttacatttggaaaaaggtttaagcaccgaaatgttgattatagtatgttcataactatgaaaaattgaaactgaattttacctcctaacaacagaggaggagccatccacagaaagcactgggttt

SEQ ID NO: 546242 - DNA, 552 bp, Homo sapiens
gggcgaaatgtttgttcaccaaaaggcagagagtgaattacagaggtctcattgctcctatgctcaatgtatttctttttagcacgagccttctggtattcacggacatttgagctgggaacagagaattcgccatccttcttaaactcaccagatccctctccaggaacacttttctgaggtttggcacggaatacactctgtatgacagagtcttcatagttgcgattcttactgcccccttcacaagggttctctctggcaggaatcttctgtcgcttatcattaaggtctgagatataaatggaggattctcccttctcattagattccaccaattcatttccattgtgacttcttggaggtttggaagccactaagctatggataacagacctactgtattcccttccttcagaggtgttccctccagcacgaactctctgatggttgatagcatcgaagctctgaatggtagactctgccattacttttggtttactgggccctgctacactgtgacttttctgagcttccacagaggstaagcta

SEQ ID NO: 546243 - DNA, 2116 bp, Homo sapiens
aaaacagagagctccaggttcccaggctcatctggccccttctttatcatatacccgcaacatggtttctgcaggctttgcccaagtggggcttgcttccaagcaagttccaaagctcagtccagtagctaacccccacttcagactctttgctggcttcccagttcctaaggggctgagtccacattcaggagaatggactgcagaccccctactgtctggcagccgatcttaaagtacacgttattctactacaaaaaaaacaaaacccaagaaaacaacacacacaccctccctgaaagcagtgctccctataaaagctcactgaagcatctttaatgaaccttcctgaggaggctgggggtacagctggaagcagcctgttgcaaattccaaatagctttatatactttatcgttgaataaaacggtattaagtatttaaggtgtctgtttagatataaaaatgtctcattatgacatcaattaatttaccctctcctcagatctctgagtgaagctgaccactcggggatggcgggtcatcttcatggaggccccaacccactgtgtctccatctggaagcatctggcagcgcctgcccatgggtgaccagtggggatgggtactcaccactgaaagaatggactgagtgaggtggtgaggactctcttctgttccgggtcatgtcgtcgtcgctggtcacgtcactgttgttgtcgtctaagaggacaccggtcgccaagttactatctctggcccacattctcacaatagttccccccaatccctgagccgcatctccctgtcacagacacacatggttggaatgacctgatcctgacatttctgagytcaaaacccttcagcggcttccaaccactcctggcatactaaaaactgggtggggggagcatggtggctgtgaccaccccgacctcacccccagacacaaacagccagaaggcaacctcctagcacaccacaccaaaaaggcaggagccataggaggttttctcccttctacagaagtgtctcctttccctctcctgactcaggatggtggttctgcactagggaggttttggcgaccaggggatacctgggcatgtgtggagacacttttggtggccacacccagaaaatcatgatgcagctcaatatcccacagtacacaggacatccccaccgctgcccaggacagagagttatccagtccagaccatgtcagaagtgtggaggctgagagccccaggggacacctgaggcctgcactgaccaccaacaccccgtggagactctcaccttctggttggtacatctccttgtaattctccagcagagtgacgagcttctcacagttctccggcttttttgctcgcacccaaggcttgagcttttcagggatgatggtcaggtactgctcaaggaccaagagctcgatgatctcctccttggtgcgggtctccggctgcaaccaatcgaggcagaggtttcggagtttgatcagggtcttccgaggcccaacaaattccacatagattaggttccgaaacctctgatgaaaaaactcagagtcagttggaccttctcctatgatgacatccggctccttagtcaagtcactgtctagctcatacagatttggggcccaggacttcttaggtttggtggcagacaagtgctttggaggcagcatttctctaagtaaaattttcactggaggaaccaaacatgagtcaacaggaaagacgcggcagcctgtgaccgtcagtactcagggacctgtggatcgtaaggagatatacacatgtcccagaagttgaagaccaggcagcagtggaggccaccttaccagaggcatcgacaatgcttttgggatatgggagtccccagtaaataggcaaacaaccgcacaaagttggcctcagcacagcagttacaagcatgacctctgggcttcacagagacctactcgaggagttagctcggctactaacttgggctactaacttgggactgtgggcaacttgtctaatgccctagaagtctctctgtaatctgagaaataagaataacagcacctccatccctttcagaattgtgaagcttaaat

SEQ ID NO: 546244 - DNA, 531 bp, Homo sapiens
atgttcactttaccatgtgttaaaaaatacacatgccacaaattagaatgtagggaaactgtgtgatttgctcactgtggaggcactaaatgttttaatggttaggaaattctattaatttttcttaacttccctatgagcaaagaaaacctaatttctcttccctctgaagtccctatcagctttaacattcgaattctattcgaaacggcatttcagaaccatacacttgataatgccaccactgtataatctgttctgtttatactttctcccaaggagactaaaatgcttttcagatgagtcacaaaaccttgatgtacagatcctaaggaaagcagactaatgaacaaaaaaagtcaactccrgaagatcatttaaaaactaacaatgtcagagtaacagaactatcctgtaactaagccaacctaactgaaggggaaaagtcacaaaaagtgagcaaagcagtacactcttacctgggagcaactgtaatctagtatttttatgtgggcactgagagccaggtcc

SEQ ID NO: 546245 - DNA, 571 bp, Homo sapiens
ggtacctttgaagagagtgctattttcagaaagttttcaatgtagcattgtccaatgacccggtcacaaaatcacagatccttggcattgttgtgaacaaaagaaattccttgttcctgtcttaaagcaatgtgattacagagcctgtgatcagataggtgacccaagacgaatgctttcctgaatataactcaagtttatctttatctgtccccacctttatctctgcctgtgttttttgcattcgaagatggatttatttcsagtcctggccctccaccccaccttgtgtttacccttggctgtggtgctgaggccaaatgcattctcttacccacccatgcccttgtggcctagcgtttcacacagatagatggcaagcagacatcaaaggcgggttttggctctcgaccgagcaaccctctctccccatgacctctggaatggtagggctgatggtgggcatggtacctggagagaccccagcacttttccatttgtcacagggaaggagcaaacctgttttcatttgtttgtttgttttttggaaaggctttcagttgggttttca

SEQ ID NO: 546246 - DNA, 1361 bp, Homo sapiens
aatatttcaacactgctctctcattaaaatgatcagggcataagcctggaagattccagtgtgtgcctcacctgggacctccccaagggaaccgtgcctgccaagcaaagcagaaatagcgtcagggaggaagcgtaccccctctgctctctcccctcctggatcgagtcattaatgagcactttttacccttggcagggccaggtaagtttgagaagtgtacctcctgtggtgtttaaacgcattccggttactcccatgatagcgatgcatgaagaagcaacatattgacccccccagagtatatattaaattctgaaggattaatcaaaactgcaccatgttgtgtgcaattaaacccttgaaaggcaaaataaatttgctggagcagtagcagctcttgtaccacttctagccggaatgagacatttttcagttctattactaacagatgagtttttgctcaggagcgtctttcaggaggtgggctgggctagaaggaggcatctgcaaacattttgcagatgggaggagaacagggastcaaactctactagtgttaccctttagaactgggtaaataccaagcaaaatccttccatcacaaggagcactgagttgtgtcattttcttacgagaggagaaaatgccaaagagttgtcacaggagtaatggagggaagggaacctcaggggcctgccagggctctccgtggtgatgggtgtggcctgcaaggagggccactgggaaggattactgtttactcagccatgttcctaacttaatggagatgaggatttggtgtgcatttccaattcaggtaaacaaaatcttggagagcattttattttctcccctcctacaactatgcctgaagccactcaggatggctcctcacagagacacctctgcattcccatttaaatattggtggtgccaaattgcacataggatagccattttggtttattgtagttttaatagagtcaattagagtctattgcaaagacctaggaagctgtatatttagttcaccaaggaggtaaaagaggaaaaggttggcactggattgctctggagtgacacatggtagcgaaggggccacaggagcagtacttccgagctagccctgtgagcaggtggagaatcaaagcagtgcaaggtgtgcaggaagggaattaagtagctccaaaagtcttaatgaaggcacagatgagaccagaattacatttttctttgtccacttttgacaacaaatttcctgtgccagccaggtgccaaggctcaagagagacttgtaaggatggcaagtgtagcatgctcttaagagcaaaaattcaacttcatgtttcctgttccac

SEQ ID NO: 546247 - DNA, 1876 bp, Homo sapiens
taaagactagacaaaaaagtccagattatgcagagttctatgagttgtgttaagacatttgtttttttactgtagagaaatgaggagccctagataagttttaagcagaggaatgacttttgcattaaaaaaatccctttggttgtagagtggagaacatattaatgagagctggagtagagacagggtgctggaaggaggatcttccaggagtgaagaggggcgtggtggtctgacctaggtggtgtcaaagggactggaaagaagtcagtgggtatgagagatttttaagacataaagttaacaaagcttgaagattgattggcatgggggtggagaagaggctaagaaatggcagagccagtcatctcagattcaagtctagggctctacacaatgtgacaaggcctgctggagccagggacctgttcttaatttagatcttaactatatctgggcaatgaacagtgagtgtcggaactagggatacagagactggttaggaaatgaggccacttcccaagctctgctgtggtattttggatgctggagttgtgggaatctgtggaggaggggtgtgtgtgtgtgtgtgtgtgtgtgtgtgtgtgtgtgtgtgtcagagagagagagagttaagttttctctcctgccccagtttctatgagctgctctgtcttttgtgttctttgccaagaggaaagaaaacagattgttcttgcttagagcattcagctgactcaactgatgccaaaccaaaaaaagccctaagaacataataataattgctcatgtgtacacatcactttacagtttaccaagggctccacattacacttataaaactgcaaagcctatgaggcaagcactctgccattaattctacttcaatttgaaagagacaaagaatgttcagagaggttaaaatgactggtttcagccatgtagcatattttcataatccagatcttctgactttacactgaggtcttcttccattagctgtagcaggcttgggttcactgtgaaggggccaccaatgacatgaaggattctgtgtagtcctttctcatttacaaagtccttctatattggacattttacttttattatcacaacaagactcaggtttttggtctcatcctatatgagaaaacaaggtacccaaggtcaaacacagatacccaaggtcaaatagtcagcaagtagtacagctggaaattgagcccagttcttcttatttcattgcccatttttgcctcccagaactactgttaagctaaggtgcatgagatcttaggttcagagagagagacttaaataattcagataagatgtgtgttggggatgctctcacaaatccagagtccaggttaaagctctccactgaatgaggccaggttagcagcagtgaggagtggttgggttaagagcagctgtcgctgctatctcctaattggaaataattgggattctgtctcaaaccacagagccctgatttagccaactcagcctcaaccaggaagcatctgttgccatctccaatggcaacagttcaatccccactccagcgcaccattcttccctgccaactggcaggcartgactactcacagcctgccggcttctagacccagccctgaggccccgggaagaatcaagttaggtcaacatctcaagttaggataaagtgaagaggtggaggctgggaaaggcttagtagcacaatgctaaatgactatcttgggaaaagggaactaagatttctgaggatgtatcagacactgttctgggagactgacacatgcaaatctatgtcatgtatagattcacaggataatgccattttacagaggaagagacagactcacagaggtta

SEQ ID NO: 546248 - DNA, 540 bp, Homo sapiens
ttattaaaagtaacgtattaagtccagagtgtacaaattagaaaagttaagaatcaattgttgacttttyaatagtgcaaaccaacttgaccaacttccagggcatatttctatttcaaagttgctctttccttttaccctttctgatggcaaacagagaaatggaaactacatgcagggatgggttcctgggtgatcttaaggggcagagctccctatctgcttttatgccctcctgtgcatgaaccagtacgtaagataaatatttgtcccatctcatttgagacctttagtctctattagagcatcttggtctattctccatcatgaaaattgatactggatatttggcacttccctaaataaaacaaaatatatggcaacagtgtaatagtgtgggcaggaagctggtgacttcattatggtcatgctataatgaaaatttgcaaaactattacattgaaaacttagaagataggcctgatacactaaggccatggccctagcaacatagtttaacaatgtctgggtattggtgca

SEQ ID NO: 546249 - DNA, 927 bp, Homo sapiens
tttgcatgtggtatcaggaggtattaaacacacacacacaccaacagttaatattctcatttcagttttctagtcagaataaagaggctatgacatgttaaaaggaacagagcatttgtatcagggatggagactgaagccctgacactgtcactgattagaacccagcctgagggtcatgttaacgactctggtcctcggctttctcaaactataaatgaaaggatgcctttcagctcaaaatactctttatttttctgaaataaattatccaaatatgctgaatcaaggagctgatacttttttttaagagatgaggtctgtctctgggatctcactgctgtgaatagtagtggctactcacagtgcaatcatgatttactacagtctcaaactcatataggcccttgccacagagctccmctggaactgatactttttgaggaacattctggatgtcagagacttgcagggacttgggaatagtaatgaggacatcaattctggtgagagcacagtccctaggcgagactgatcacatggagagtgatggattaaagaaataatatgtattaagaataattaaagccagatttcttttggagataagatttgcaaatatgcaaaaggagaaagaactctgtgatgataggttgaaattaaaaataattgtagaggctgggcgcggtggctcacgcctgtaatcccagcacttttggaggctaaggtgagtggatcacgaggtcaagagattgagaccatcctggccaacatggtgaaaccctgtctctactaaaaatacaaaaaaaaaaagccaggtatggtggcgggtgcctgtagtcccagctactcgggaggctgaagcaggagaatcacttgaacccgggaggcagaggttgtagtgagccaagactgcaccactgcact

SEQ ID NO: 546250 - DNA, 2444 bp, Homo sapiens
taatatcttttacatgattgcaaatgaatctgaaggtggatcatcgttattctcatgattatcttccaaactttaagttaatgtgctcttaccacattcaacagggatgtttttagtcatctttaacaacagtttcaacggaattttcaaacacataacactttctttttgcattcttataccactacttgagataatattttattaaattatgtaacaacacaagaagtgcaattgtcataacagtttagaaaacaaacacatataacttttaagaagcagactttgtagcaaaaataatatggtgcatgagtcaactgactaaattctctgagcacttattgtgccacggatattaataatactttttaaaaagatatcagaaccttaaaagtttctactctactgagttgtgcctgmctaactgtatctccttccaagccctgttggtaggtcttctccccactgttgcgtgtgcgtgctcctctgttaaaatgtctactgtcagggtccacttccctggggagccctaactcctcgcagataaaccaagatatcacatccccacagtcctgctggactctgacattccaggaagctcatagcagtttttttctcttttttaaaaaatcccatttgaaatgtacaaagggtgttgcacattgactccaatcatagttaaggatgctgaacctggaggaaagaaagcacatttaattcagataaaagcatagctcattttcccaaccccaccaaatcaggcaattatagcacggggccagaattttctcccacatttcgcacgtaaaacataattccgccaccagctgctcaccagcattttgttgtctcctcaaccgacaacaaaatgacaaaacagatcagcagagggtgatctgccagcatcaccaatgagatgcaactcccctccaaccagcctgtcattaggaaaccgttttctgtttctaaaataaaccctctgaaatcactgccttcctacatctgtgcttctacctagaagagagagatgttctcctaactcacaacaggtgctgagatatgtcagtggagaaagaggacgaactatgcataagtaatgagaagcagaggggcagttactcagggtctgagacagagtctttttgctcatgatgtgtacagcattaaggaaatttagaaatttggcattaagtgtgtgtaaaaataggatccctggaaacctatgttttgtcacatcagctccttacattttccttttatgttactcattttccttctgatcttactatactctctatccacatcacccatctttccccaactcctctccacaaatactcattaagaacctattaagtaaaaatgtactaaatgctttaaatgcaggaaaagagggctaggaagaatatttcaaacccaaattggcaatagctgcttctgccctgcaggcaggtggcatcatagtaggaacataaactttagctccccattccttggtagacagaggggcagagagaagggaagaaaatgtgaaaagtcagacagttctactttgtctctaaggagaaagcatatgccaagaggagcactgcataccagagtacattaaggaatcttcacataagcaaaaatggaatggagagctatgttggtttatttaaaaataaaaattaaaaacaaaaaacaaaaaacaccacagccaccaccaacaaaaccccaaatcccaaaacaaaactgagaggaattaagctttcaggaagcagtaggtgctagaagggtcagcgcctgacagtgggaggcctagagatttcagcagacagaaggcaaaaatccaaggttctgtgtaattctcctggtgctgttacaaaagttcagtaaaattggtgacatgcccacaagtcttgatgagtaacaatttggaggtaggatccaaaggaaaggaattgaagattaaacatgggggaatgtgtcaacatcaagagatgataagatcatgggttgacagaactcattcaatggggctccaggaacaaaggtaaccagtgagcacttacatccctaccctcaatgcatccggcaaaagtttcagaatggctgaattgtgtacaggtagttgtttcattgtgcatgcaatagagttcaagcagatttccttggaatattaaagattggacactccagctgatatcaaagcatattcatgaatcccccagcagctgttagcattcccatttgacaggtgatgaagctgagacataagagaagttatattatttgttcaaggttacataattaaaagcaaagctataaagaagccagttattgtttttataccatgctaaggtattttagggacacgtaaatatcaaacattttgtaggttctttaatttatgtgatccttattacaccataggactagtttcattttactgatgaggaaaa

SEQ ID NO: 546251 - DNA, 2444 bp, Homo sapiens
taatatcttttacatgattgcaaatgaatctgaaggtggatcatcgttattctcatgattatcttccaaactttaagttaatgtgctcttaccacattcaacagggatgtttttagtcatctttaacaacagtttcaacggaattttcaaacacataacactttctttttgcattcttataccactacttgagataatattttattaaattatgtaacaacacaagaagtgcaattgtcataacagtttagaaaacaaacacatataacttttaagaagcagactttgtagcaaaaataatatggtgcatgagtcaactgactaaattctctgagcacttattgtgccacggatattaataatactttttaaaaagatatcagaaccttaaaagtttctactctactgagttgtgcctgactaactgtatctccttccaagccctgttggtaggtcttctccccactgttgcgtgtgcgtgctcctctgttaaaatgtctactgtcagggtccacttccctggggagccctaactcctcgcagataaaccaagatatcacatccccacagtcctgctggactctgacattccaggaagctcatagcagtttttttctcttttttaaaaaatcccatttgaaatgtacaaagggtgttgcacattgactccaatcatagttaaggatgctgaacctggaggaaagaaagcacatttaattcagataaaagcatagctcattttcccaaccccaccaaatcaggcaattatagcacggggccagaattttctcccacatttcgcacgtaaaacataattccgccaccagctgctcaccagcattttgttgtctcctcaaccgacaacaaaatgacaaaacagatcagcagagggtgatctgccagcatcaccaatgagatgcaactcccctccaaccagcctgtcattaggaaaccgttttctgtttctaaaataaaccctctgaaatcactgccttcctacatctgtgcttctacctagaagagagagatgttctcctaactcacaacaggtgctgagatatgtcagyggagaaagaggacgaactatgcataagtaatgagaagcagaggggcagttactcagggtctgagacagagtctttttgctcatgatgtgtacagcattaaggaaatttagaaatttggcattaagtgtgtgtaaaaataggatccctggaaacctatgttttgtcacatcagctccttacattttccttttatgttactcattttccttctgatcttactatactctctatccacatcacccatctttccccaactcctctccacaaatactcattaagaacctattaagtaaaaatgtactaaatgctttaaatgcaggaaaagagggctaggaagaatatttcaaacccaaattggcaatagctgcttctgccctgcaggcaggtggcatcatagtaggaacataaactttagctccccattccttggtagacagaggggcagagagaagggaagaaaatgtgaaaagtcagacagttctactttgtctctaaggagaaagcatatgccaagaggagcactgcataccagagtacattaaggaatcttcacataagcaaaaatggaatggagagctatgttggtttatttaaaaataaaaattaaaaacaaaaaacaaaaaacaccacagccaccaccaacaaaaccccaaatcccaaaacaaaactgagaggaattaagctttcaggaagcagtaggtgctagaagggtcagcgcctgacagtgggaggcctagagatttcagcagacagaaggcaaaaatccaaggttctgtgtaattctcctggtgctgttacaaaagttcagtaaaattggtgacatgcccacaagtcttgatgagtaacaatttggaggtaggatccaaaggaaaggaattgaagattaaacatgggggaatgtgtcaacatcaagagatgataagatcatgggttgacagaactcattcaatggggctccaggaacaaaggtaaccagtgagcacttacatccctaccctcaatgcatccggcaaaagtttcagaatggctgaattgtgtacaggtagttgtttcattgtgcatgcaatagagttcaagcagatttccttggaatattaaagattggacactccagctgatatcaaagcatattcatgaatcccccagcagctgttagcattcccatttgacaggtgatgaagctgagacataagagaagttatattatttgttcaaggttacataattaaaagcaaagctataaagaagccagttattgtttttataccatgctaaggtattttagggacacgtaaatatcaaacattttgtaggttctttaatttatgtgatccttattacaccataggactagtttcattttactgatgaggaaaa

SEQ ID NO: 546252 - DNA, 903 bp, Homo sapiens
gaagaaaaggagatactcagaaggtaagagaatgccactactaaatgtccttgagtaggagtcagctcttctcctcccatgtcttgtcctcccaacgctrcatacctgggaaggaatcccagaaacttggacaagtgaggttcagagttggcctcagcacagctaggtcagctcctgcctcctcagaaggacgggaggaaacgcattcagatctctttcctctgtgaacttgcccttgtgaggggtcagctgtggaataagctcccttggggtagagtcttcatggctgagaacctcctgaagaggctactctgaaacctagagggagagaaagaggaagaccctggaactgcattgggagtaaattatagaactatgaaacaccatcatcacgtaactcaaggaagatgggcttgagttcagtgctggggaagccatggggctaattttcagattaagtttatctaaaaattgcttagtttaatgattaatctgacagctgagatgcacttcagcttccagagagagaataaacagccttattctaaacaaatattcctcacacttgattgtccagacttgatcatgaagggcagactccaccctcttgctgatcactctataattaaactttctgtgcccatcagggcagaaacactgtgaaaagcattttgaagagtaagatgattctaacctgacttgtctgaaaagcgatgtcaggagttatgacttcctgtgcctttgatctccttatctgagtctattatctaagggtgccaattaacatttacagtttgtggttagatgccttggaaatgcttcactgagtgtctccaggagcccatgtcaattatttactggtcttaataagtttctcttcagcattttggtccttaggggtca

SEQ ID NO: 546253 - DNA, 1508 bp, Homo sapiens
gcctactctggttgacagggtactgtcccatggagtacaggtaacaaatggtgctggcggttttgagacgtcacagtcctcaaagcagctagggagtcagaaattacatgttaagtgcagtttttagttccctggatatgaaatacccactactatatatttgaggactgacttacctaagtcctagtgaataaaaagagaggaaaagaaagaccaaaatcataaggcaaaatctaatcaagtgctagttttgaggcatgatctaattatttgacagcttgtatgtgcctttgaaaggctcgataaggccaggtgtagtggttcatgcctgtaatcccagcattttgggaggccgaggcaggaggatcacgaggtcaggagatcaacaccatcctagctaacatggtgaaaccccgtctctactaaaaatacaaaaattagctgggcttggtggcgcacacctgtagtcctgctactagggaggctgaggcaggagaatcgcttgaacccagaggtggaggttgcagtgagccaagatcgtgccactgtactccagcctggtgacagagtgagactccgtctcaaaaaaaaaaaaaaaaaaaaaagtcttgataaatagattcccccaaaccccgttttagtcttcctgctctttctccttgttctaaacaggaagaacaaattctgatgattgtgaatgagaagacacagtccctggtgggatgaaaacttgtaattctatttcaccccattcataaaccttcctaggtaagctattggttggattctagttctgaattattcagaggagacagcattgaaatatcatgtgaaataagagagagcctgtaatacatatttagtattcttttaatctgctgtcctatgtcaaacctccctaatcctccctgctcccccaggctcagtaatctctccagtgacacacacacaacccactctaaataatcccctcacttcttctgcagcagaaggcagccttctttaacagatttcattcccataatgtaatacaatccttcttttaaaaagctatttttaaaacgaacagttgctttcgaggaaaattataaatagtacctcattaattgggacccagcctcaataacggtatgtatgtgagaaggctgtaaaaacatgtcacatcggatcccttaagagcacagataatttgagtgttatcacaatcgttcttccaccctaagggtctgggtggcccacttctaaaacagmtgtattttaaaagagtttggtttaagtgggaccaacttaaaatgaattagcaaatgaaatccaggagcacatttaggtaggaaagactacagtagggtgagactgtatagaaatggaaagtatatttcactacaacagagatagaaacgttgttgtgttttgtatcttccaacagtgggcaatggacaaattcatgttatataaggaaggattgaaagaatcaggaaaggggccgggtgcggtggctcatgcctgta

SEQ ID NO: 546254 - DNA, 527 bp, Homo sapiens
tttttaataacaaagatactatattttgacttaaaagtacagtacttaggttatttacatactatgaataattatttgaaaaatattccttttgtttaaccactcatgctaggaagtcaggatacaattagatttaaaataagtagattagatgaatgcaaatgcattaaatacaaaaacatttaacaaactgtatatttaaacatatcaaaatccacaaagtgaaagattaatgttgctgtaaaaactaagtaatccaggctgggcacgatggctcatgcctgtactcccaggactttgggaggccaaggcgggcggatcacctgaggttgggagttcaagacgagcctgaccaacatggagaaaccctgtctctactaaaaatacaaaattagccaggcgtggtggtgcaagcctgtaatcccagctattcagggggctgaggcaggagaatcacttgaacccaggaggcagaggttgmggcgagctgagatcatgccattgcactccagcctgggcaacaagag

SEQ ID NO: 546255 - DNA, 603 bp, Homo sapiens
taaaataagatacaatgtctaaacatcagtattaaaactagtataaatwtttacttgtttatacaagcaaaattcaagctcgacataaattttatgggaaataaaagaaaaatattaagggagctctttaatgacataaacatatatatataaacacacacatataacatgtatatatgttatatgggatagatatagatttaacaggctatatctatatttgtatctgtaactacagctgtatgtatccacatttctatgtatttactcagtgatataaatatagactggaataaatataaagacacatatgattcttggataaaaaggatttagcatcataaagacaaattctttccaaattcacttatgaattcacaacaatatacagtttcattagtataatttaatatttctaaataaattccaagattcatttaaaggaatatacatgtatacaagcagtcaagaaagaagcaagagggcactaaactaacttgctattaaaatacatttttaaacttagtcactaaaactgagcagtactgatttggagtactggaatttaggtgtatgggatctcaaaagcacagagctcaaagg

SEQ ID NO: 546256 - DNA, 603 bp, Homo sapiens
taaaataagatacaatgtctaaacatcagtattaaaactagtataaatatttacttgtttatacaagcaaaattcaagctcgacataaattttatgggaaataaaagaaaaatattaagggagctctttaatgacataaacatatatatataaacacacacatataacatgtatatatgttatatgggatagatatagatttaacaggctatatctatatttgtatctgtaactacagctgtatktatccacatttctatgtatttactcagtgatataaatatagactggaataaatataaagacacatatgattcttggataaaaaggatttagcatcataaagacaaattctttccaaattcacttatgaattcacaacaatatacagtttcattagtataatttaatatttctaaataaattccaagattcatttaaaggaatatacatgtatacaagcagtcaagaaagaagcaagagggcactaaactaacttgctattaaaatacatttttaaacttagtcactaaaactgagcagtactgatttggagtactggaatttaggtgtatgggatctcaaaagcacagagctcaaagg

SEQ ID NO: 546257 - DNA, 603 bp, Homo sapiens
taaaataagatacaatgtctaaacatcagtattaaaactagtataaatatttacttgtttatacaagcaaaattcaagctcgacataaattttatgggaaataaaagaaaaatattaagggagctctttaatgacataaacatatatatataaacacacacatataacatgtatatatgttatatgggatagatatagatttaacaggctatatctatatttgtatctgtaactacagctgtatgtatccacatttctatgtatttactcagtgatataaatatagactggaataaatataaagacacatatgattcttggataaaaaggatttagcatcataaagacaaattctttccaaattcacttatgaattcacaacawtatacagtttcattagtataatttaatatttctaaataaattccaagattcatttaaaggaatatacatgtatacaagcagtcaagaaagaagcaagagggcactaaactaacttgctattaaaatacatttttaaacttagtcactaaaactgagcagtactgatttggagtactggaatttaggtgtatgggatctcaaaagcacagagctcaaagg

SEQ ID NO: 546258 - DNA, 603 bp, Homo sapiens
taaaataagatacaatgtctaaacatcagtattaaaactagtataaatatttacttgtttatacaagcaaaattcaagctcgacataaattttatgggaaataaaagaaaaatattaagggagctctttaatgacataaacatatatatataaacacacacatataacatgtatatatgttatatgggatagatatagatttaacaggctatatctatatttgtatctgtaactacagctgtatgtatccacatttctatgtatttactcagtgatataaatatagactggaataaatataaagacacatatgattcttggataaaaaggatttagcatcataaagacaaattctttccaaattcacttatgaattcacaacaatatacagtttcattagtataatttaatatttytaaataaattccaagattcatttaaaggaatatacatgtatacaagcagtcaagaaagaagcaagagggcactaaactaacttgctattaaaatacatttttaaacttagtcactaaaactgagcagtactgatttggagtactggaatttaggtgtatgggatctcaaaagcacagagctcaaagg

SEQ ID NO: 546259 - DNA, 577 bp, Homo sapiens
accgctgctctaatgctactattatatagccaagtgtaattttaaaaagctctggaggtagaatcaggacaactaaaactgccctaactagatgcgtaacttcaggtaagtcaaagaattcttagcctccaggataaactgggtgacataaaatttttttttcagccctacaattatataaatatatatgagaaattatgattatgcaataattagaaaaaagatwtattgacataagaagaaaattatagtgcaaagagtatgtttgttactaaaatttgaatttcaattagttatgtagagtgcaaagagagataaataactaatgacctaagaggttagttattaatatacctaaaaattatagaaaatacctcagaaacttccttgagttgtccttcaataactataaattgttttctatgatttattgttgtttattatttaggcctttaattatttgacctacctctctctttaggcttgtctagacaacttgtttttttttttttttcccccaaaggaagcatggcaatgcagtcaggtattgtttgtttttgaagataacatggtgaca

SEQ ID NO: 546260 - DNA, 577 bp, Homo sapiens
accgctgctctaatgctactattatatagccaagtgtaattttaaaaagctctggaggtagaatcaggacaactaaaactgccctaactagatgcgtaacttcaggtaagtcaaagaattcttagcctccaggataaactgggtgacataaaatttttttttcagccctacaattatataaatatatatgagaaattatgattatgcaataattagaaaaaagatttattgacataagaagaaaattatagtgcaaagagtatgtttgttactaaaatttgaatttcaattagttatgtagagtgcaaagagagataaataactaatgacctaagaggttagttattaatatacctaaaaattatagaaaatacctcagaaacttccttgagttgtccttcaataactataaattgttttctatgatttattgttgtttattatttaggcctttaattatttgacctacctctctctttaggcttrtctagacaacttgtttttttttttttttcccccaaaggaagcatggcaatgcagtcaggtattgtttgtttttgaagataacatggtgaca

SEQ ID NO: 546261 - DNA, 531 bp, Homo sapiens
aagtgagtttatttatgggttctctcttttgtcccattggtctatgtatctatttttatgctaatgccacatggtttttattactataattttgttgtatattttgaaatcagggagtatgaagcctccacctttgttcttcctgctcaaaaattgctttagctattccggatttttttgggactctgtacacgttttaggatttttagttaattataaaagtattatatatctgaaatttcctaaaaagagtagatctcatgtgtgctcaccacacacacacacacacacacacacactcaaacacacacacatacacgatggcaacttatgtgaggtgatggctatgttaattagcttaattgtggtaattatttcacaaagtatacatatatcaaaacaccayattttatacctcaaatatatatatttttgtccttcatacctcaagaaagctaggaaaaataaatgaaaaattaagcttcagtaatatttaaaataaaatcgatggtggtatatgtataatataca

SEQ ID NO: 546262 - DNA, 556 bp, Homo sapiens
tttttatattatatgtatttattacataataagcaatgccaaggtgattacttcaattacttttcccaaaatccagtgtttttatatttgtcactatactggattcttgaggtgaatattgatcacaagataatgctttagtttttgaactaaagccamaaagttaatctgtttacttgttgttgaggtttaaagaaaatggagaagctttgataatgaattaaacctgttaaagcaaacatccggggcacctggatttgggatttctatattttctctgcaaaaagcctctacatttttttccataggaagcccagcaaaacttattgaggcatgcatttaagaaaccatggctaaaggtatgtgtccttgcagctctaaatgcctattaattgtctagatcatcttaaaccacaggcaagtatagattattgtactaattccaggaaaatctctccgcctctctgtcctactgaacaaatcctttctttccccatccctcattcagaatttgcagaaattatattagatatatttttccaaagttatcttgaat

SEQ ID NO: 546263 - DNA, 859 bp, Homo sapiens
ggccatgtccatttctgataattctgctatttgaacatcatcccagaaaaagagtgaaactgcctattaaaatagccatctaatctacatccaacattcctgaaatatgctgagtaaataaataagtaataagtgaaaatattctgtaacttcctaataggaacaaaattcacayaaactagagcagcaatcaggtatcttcaataataaatatttataatattcattattttctcatgcaacttaatgttttttctttttcatttggaaaatgcctaaatgatgtacattttctaaaagataagatgtatttttagaagcaaattttttactaagaagctagcactttttcaactcccttttgggaaataaactgaaagagtatattactaaaatatataaaaatgttgtcccataattgtaaatgcttttaagaaacagaaaactgcttggaattcttaaggcaggattaaatttagtgcagcaaaattcaaaatgccctttgaacctcctgctttttattttcagaatatagccaaagtgacatataaaggttttaagaagtaatttcctttatcatgaaaaagcaaaactttttgcatcttcctgtaaacaactcaagactctttgctctagtctaggcctaattcatttagactcttcaaatcagttctgagcctggacttttaaaaggacctagtaaaaactaaaattaatagagtaactttctaataatattaattttaatagaaatgtatttctatagcttcttagagttcaggtaaagctttcctataccttatctaatttgaacttctaaatagcctatgtaagagtcctaagaatggctctgttgacc

SEQ ID NO: 546264 - DNA, 859 bp, Homo sapiens
ggccatgtccatttctgataattctgctatttgaacatcatcccagaaaaagagtgaaactgcctattaaaatagccatctaatctacatccaacattcctgaaatatgctgagtaaataaataagtaataagtgaaaatattctgtaacttcctaataggaacaaaattcacataaactagagcagcaatcaggtatcttcaataataaatatttataatattcattattttctcatgcaacttaatgttttttctttttcatttggaaaatgcctaaatgatgtrcattttctaaaagataagatgtatttttagaagcaaattttttactaagaagctagcactttttcaactcccttttgggaaataaactgaaagagtatattactaaaatatataaaaatgttgtcccataattgtaaatgcttttaagaaacagaaaactgcttggaattcttaaggcaggattaaatttagtgcagcaaaattcaaaatgccctttgaacctcctgctttttattttcagaatatagccaaagtgacatataaaggttttaagaagtaatttcctttatcatgaaaaagcaaaactttttgcatcttcctgtaaacaactcaagactctttgctctagtctaggcctaattcatttagactcttcaaatcagttctgagcctggacttttaaaaggacctagtaaaaactaaaattaatagagtaactttctaataatattaattttaatagaaatgtatttctatagcttcttagagttcaggtaaagctttcctataccttatctaatttgaacttctaaatagcctatgtaagagtcctaagaatggctctgttgacc

SEQ ID NO: 546265 - DNA, 550 bp, Homo sapiens
tggacttatttctactgtttaattttgttttgtgtttatcattctttattctttgcttctctgtcttccttyagccttctattaagttgatacattctcttcgtttattgttgttcatttgttgatttaggtgcctgctgatatggtttggatctgtgtctcatcccacatctcatgtccagttgtaaactccaatgttggaggtagggcctggtgggaggtgatttgatcatgggggtagatttccccctggtactgttctcatgatattgagtgattcctcatgagatctggtcatttaaaagtgtgcggcacctcctcctgtttcctgctgctctggcaatatgaagtgctggctcccccttcaccttctgccatgactctaagtttcctgaggcctccccagaagaagccactatgcttcctgtacagcctgaagaactgtgggccaattaaacctcttttctttataaattactcagtctcaggtagttctttatagcaatgcaagaaaagactaatacacttggcttagtcagcttgggctgct

SEQ ID NO: 546266 - DNA, 646 bp, Homo sapiens
tgccactctactagctgcatcaagcatttacaggcctccctacagaatgggttcagcagtaattaaaataacacccttcctcagggtgaagttacacttgaagacttcggggatgtttttctttccttcctttgggtaaattccttctccccgaaatataagaaaaagatgagagtggagagagcttcagagaaagatggggagagagggagagaagtttaaaatagtacaccaaagcgtgtgtcacataaactatkttaaaatgttagtatttcttccattccctagcagacattgatagacaaacaggttaaaaaaaaagcaagggggaaaaatatcatttactcactgtagcagcaggaaatcaaggaaagaaaataaacagggcttgaattgtgggcctttaacctgctagtcagacagtttcattctgtgtgtatttgtgtgctggtaaatggcgaaggggaggtacagggacgggagggctgtgggattctcgggactcccacagctaccagtccagctgtacaaacacgcacaagctttgttaaggtacggtgggcaacaagctcaaactgctgagctatctgacctataaatccctcgcaaaagctccacttgaggggaagccagaagttatgtgtca

SEQ ID NO: 546267 - DNA, 633 bp, Homo sapiens
cagttatgcttggctgggcttgaaatggcttaaattgctctcagaagccatcagccccatccacagcatggccccattctacatctgcaacttctgctgcttctcccgccgtctttttctaccctagggtcactcaggtgctcctgcgtatgtgtcctttctgacaccgagtggctgttcttcaagtctgctttgggttttttaaaagcactcttcaaaggaagataaactaagagttaaataaaaggacaacaaccactgatattcctaccagacattaaaaaaaaaaggaaacagtataaatctcacaattttattttattttcaaaaatgaaaaaaaaaacccggcttttttcacttaacaatattattcatcattaatatcccttaaaacataaaattggatggctgctttgtagtctgtgtatagatacagaattatttggccaggtgtggtggctcatgcctataatcctagtactctgggaagccaaggcgggcagatcacctgaggtcaggagtttgagctcagcctggccaacacagtggaaccccrtctctactaacaacacaaaaattagctgggcatggtagcacacgcctgtagtcccagctactcaggaagctgaggca

SEQ ID NO: 546268 - DNA, 1191 bp, Homo sapiens
taataaagtagaagattcaatccaaaattactagataaaaagaaataggaaagtgtaacccacactcaggaggaaaggtaattaacaggaactaagcccaaaatatcacagatgtacttgtttcttattttgatatgatggaaatgcactgaaaatttaaagattaaataaaatatggcagtatagtgatatgcatgacactttaaaatgctgtcaagttggctgggcatggtggtgtgtgcctgtaatcccagctacttgggaggctgaggcaggagaatcgcttgaacctggcaggcggagcttgcagtgacccgagatcttcccattgcactccagcctgggcgacagggcgagactctgtctcaaaaaaaaaaaaaatgctgtcaagttatatataattgtgttattgcaaaggacatacaaaagagatggcaggctagatttggcccatggtccataaattgctgacccttgatttagttcataaagcaaaaggataaagagatgtaaaagattcaatatggcaagtcaatttcccttatattaattcataaattcaggacaatatgaaaaccctattataattttaaaaggagaattcaacaaactaattccaaagtttatctggcagagtaaatgtgtaagaataacaacatcaaaaacgtttgaaaaataagaataccagagagtacttgcctaatagwtatacaatataaccacaaatctatggtactttaaatcagtgtgatactgatgtaaacaaaacagaggagagaatctataaatagatccacatatatggaaattcaatatatatgggggcaagatgacattttaaatcagttggaaaagcatgaattccttaacaaatactgctggatcatctggctatttgggattagatccttatttcagataaaaaaatctaaatgctcacaaaaaactataaaagtactatagaaaatatagaaaaaacagttctttagaaaaacattttattttaggttcggggcacatgtgcaggtctgttgtataggtaaatggcgtgtcgcagaggtttggtgtgcagattctttcatcattcaggtaataagcatagtacctaataggtcattttttgatctttacccttctctcaccctccaccctcaagcaggccctggtgtctgctgttcccttctttgtgtc

SEQ ID NO: 546269 - DNA, 1336 bp, Homo sapiens
agaagaactaataagtagcagtattgggtgccagaagatctaagaaaatggattgaataaaagaaaaatgttaaaatatgcatatacaaataatggttacaaaacaaaawatatatataaccattaaattaaacataattatttattcaataagttaaaattcgtattacacaaaattccgattagtcagccagaacacaaatctgaggaaaaaataaattccgcatagaataaaatataaaatagattaagagaaatggaaaagagaagaaatccattgtcaaattccagccatttatcacaaaccaaactacagtaacaataacttcaaatatataaatcaaaatgccagcctagcagaaaggaattaaacaacactttataattgaaagccattcacatagttctctcttatttattatcatatcaacaataagataattagtaacaatttggaggatttaaacagcataattaatactcttgatttttgtgaatacagtgttctcaattacattgggaataaatttggaaattgatcatagtttaggacataaagcaggtttcaataaattccaaataatccatatcacacagaatacaatcttgggacaaactataattgaaataaaaaataaaccaaaatgttgctacaaaaaaatacttaaaacacaaaaatttaaaaatgttctaaatagtaaatcaaaagacaagaaattgtaatgaagatgacatagactttatataattatattttaatgattaaaaacaaactactaagcgtactggttgaaaataaagagataatgaaaatatagcatcaatttcttataagagaaaatcttaagaaagaaaagtgagaatggaatcaaagaaaacagaagaaaaatttagttagagcagaccaaaggtatgaggaaaaaatttaaagaagagaattataaaagaaaaaaaaaaaaacaccaaagcatttttcatgaagatgcaaccttcaaatcattgataaagagaggaaatagaagaagcaaaaatgacaaagtgggcattaatacaaaaccagcagtgattttaaaataaaaaattttttttttacttttagaaataatttttttattatttttagaaataacctcttaaaccttgaattactagaaaacaatttcttttctagaaaaaattcaaattataagagctagctctaaaaaagaaagaaaatctgaaagtgactctaaaattttatacttagacacataaagatcatgccaaaaacattttacaatcaactgttactgaatttcaaaggaagagacaattcaaacttataccactatagaca

SEQ ID NO: 546270 - DNA, 609 bp, Homo sapiens
taaaataaaataaaatgttaaaaattgatgaacccaactcttggcttttatcgtgcctgcatccgggcagctgagtatcactagagaaaagcacatagctgagaagactgggaccaaagaaaatggtggtcctcgatgttatatggaacctgaatgtggcttgacaatcctggctatgcttcagtgattaactccctwcctgctcttcaaagtgacaacttctaacatctcccattctccttccttaaactgtttaaaagagtgattgctggggccaggcccggtggctcatgcctgtaatccgagcactttcggaggccgaggtgggtggatcacgaggtcaggagttcgaaaccagcctggccaagatggtgaaaccccatctctactaaaaatacaaaaattagccgggtgcagtggtgggcacctgtaatcccagctattcaggaggctgaggcagaagaatcgcttgaacctgggaggcggaggttgcagtgagccaagatcataccactgcgctctagcctgggtgacagagcaagactccttctcaaaaggagtgattacaattgtcattaggactattctgtgtctctgccttctgggcac

SEQ ID NO: 546271 - DNA, 501 bp, Homo sapiens
agcagcctaggaaagcaggcggctcctgtgctggaggaggcgtgatgctctggagggaaaccgagctgagcagcgagaggtggggtgaggctgagacccgcccgatttaggcaaagatgaggtgcacttcgcagcgtcacactcttctcactgcccagccccgacttgccccttaagtccctctctggactcactccccttagccagggatggcacagaatcagtggccagcataggtttggaagcagagaggtccacacggcttgcgcctccctccgggactgctcaccaccccgcagcccggcgcttgctgggactgtaggccggtagccctgcgaccaacagccgaaagcggttaagaaactactcccagaatgcctggcgaggcgcgcaccacgcggccccttcctccaggcattcgcaccaccccccactcccgttgcatgctrggattgtagttgatcgcctgcgatcaacggccggaagcggctaaaactactc

SEQ ID NO: 546272 - DNA, 529 bp, Homo sapiens
gagcaatctgggaagacctcactgaggaggtgacttttgagcaaagacctggaggaggtagcaagagagatagccatgtgaggatgcaagggaaaggcatccaggaagagggaacagcatgtgcaaagatcctgcggcactgaggccaggggacrgagcagaagaggaacggggtttgatggttgataaagcatccccccagctgccgtgggcatggaggtgagtgaggagctacttcaccagtccaagcccttgagaatggggctcaaacctggaggaggttgacgtggcactgggaggtgccagattccaggtcttgtttggacagcagcccaaaggaccggctgatgggttgagaggtagggtgtgagagagggaagggggctccaggtttggggtccactgctcaaggcaagaaggctggcactggcacagactgagatgggaaggggcctcgcagggaggggttggggttgggtttgggacttggtacattcaaggtgcccatcggacatcccaaattgtccct

SEQ ID NO: 546273 - DNA, 529 bp, Homo sapiens
gagcaatctgggaagacctcactgaggaggtgacttttgagcaaagacctggaggaggtagcaagagagatagccatgtgaggatgcaagggaaaggcatccaggaagagggaacagcatgtgcaaagatcctgcggcactgaggccaggggacagagcagaagaggaacggggtttgatggttgataaagcatccccccagctgccgtgggcatggaggtgagtgaggagctacttcaccagtccaagcccttgagaatggggctcaaacctggaggaggttgacgtggcactgggaggtgccagattccaggtcttgtttggacagcagcccaaaggaccggctgatgggttgagaggtagggtgtgagagagggaagggggctccaggtttggggtccactgctcaaggcaagaaggctggcactggcacagactgagatgggaaggggcctcgcagggaggggttggggttgggtttgggacttggtacattcraggtgcccatcggacatcccaaattgtccct

SEQ ID NO: 546274 - DNA, 541 bp, Homo sapiens
aaaaaaaaaaattgagtaaatgggttatttccccaagattgcctttttaaagaaaaccagttttataaacctgttttctagaaaatcagttctgtaaaccaacattcatcaggcttatcatatggctttttagattttgcattatttttgtgaggatttttattagtatgtttcctaataatgggccatgtttaaattttttttgttatatttttgaagtatgccttactagatcatgttgtgatataattataacatatgctgctttctcyttgcttggattttaaaattttgcagttaaaattattttcttttttgtgtgctttgtcagattttcacatcagtgttacactagtattttaatggcctattttattctattcttttattttcaaattttctatatccttaagcttaaaaatgcctcttttaaacagtgtaaaattgaggtttttttattattaggttttataatttttgtattttaattggagcatttagtttgtataatatagttaatatactctttgctttctatttt

SEQ ID NO: 546275 - DNA, 541 bp, Homo sapiens
aaaaaaaaaaattgagtaaatgggttatttccccaagattgcctttttaaagaaaaccagttttataaacctgttttctagaaaatcagttctgtaaaccaacattcatcaggcttatcatatggctttttagattttgcattatttttgtgaggatttttattagtatgtttcctaataatgggccatgtttaaattttttttgttatatttttgaagtatgccttactagatcatgttgtgatataattataacatatgctgctttctctttgcttggattttaaaattttgcagttaaaattattttcttttttgtgtgctttgtcagattttcacatcagtgttacactagtattttaatggcctattttattctattcttttattttcaaattttctatatccttaagcttaaaaatgcctcttttaaacagtgtaaaattgaggtttttttattattaggttttataatttttgtattttaattrgagcatttagtttgtataatatagttaatatactctttgctttctatttt

SEQ ID NO: 546276 - DNA, 491 bp, Homo sapiens
tggcagtagctaaatgaccttgaagaggattctcaaatagctttttatgtagcgatttatttttcatattaataaatctaaattactaaggaaacctctgattttcagtaagatgttttaaytgacaacatttcagaggtactagcttatgcacaaacacagaaaataacttttcaacataaactgaaaacaatattctagtattccttctcttacctttccagaaaccaagaaaaataaacataatgcattcattgtcactgaattcaggctcccacaaaccaaaaaagtagactaaactccaggccctcagggaacctggtaaaaaactgaggctggagaagtaactctagctcacccccaagttgtaataaaaagctgattcatgaagcctctcccttaaaaacacgtgttctgtcagagttacctagatttcatgctccctagctgctaataatgaacacatcaataactatcatgatataattaca

SEQ ID NO: 546277 - DNA, 681 bp, Homo sapiens
cccccccatccaccaagttatccttaaaaactctgctcccctcatgcttggggagaccgatttgagtaataaaattccagtctccctcacagtctgctgtgtgaattactttttctctattgcaattcccctgtctggcagcaggcaaggtgaaccccttgggtggttttagaactaccaatgggtcacatctactcacagcatttatgttgctaagtccttaacctcagctactcaaagactttacagagaacactgaacacttgacaatactgtggatatgggagccagtggggaaagacgactgccgggagccaggcccacmgtaagtattgcccatgtcattcacacccactggaacctccctgcagataaaatggagtatctccatcagagcccataggtagagcaagaaacctcacctggatcatcccaaactctggcatgaaaatgaacacaatagggacacaaacaggaatgtctgacaggtaagagtcaaactgatcaaggttgtatccagcactaccccatgtgatgcggctcagaccccacagaagctggcaaagcttccatgagaggaagtagcatgacattggctaggctccctcaagtcagaggaactcaggaaaatgtcagaagggagaatggatacctatcaccaaaaagttacattaataacct

SEQ ID NO: 546278 - DNA, 1451 bp, Homo sapiens
tctcttcttgcatacaaatcatctgttaataatctttctagactttagtaggaaaataatgaagcactgtttcttttccacttttttaaaatggaaaagtttacatttttctgtcatcattctcaatctccataattttttcaatattaacagtgcccgatgattaaatttggacacaatgttcatatactgttatttaaagaaaaattatattcttaccatatcccattgcctttttggccttttgtttctcttccccatgtttattcatttgttacagttgtaaggtttttcttgaggaggtaagtaatcccacttttcttctgtcatctctaaaaactaagtaaatacaatacaatttaaactagaagctctgttcttatcttttaggacccctagtgagacatgtagctattttggaatgaggctatactaatcatgttgactagctacttattagtgagagagaagggggcagaagtcactgtcctgtcaccaggtagataagaatgtgggagacaaagaatgatgctgtctctgcacgtcctccacgtggggacattggaatcttttcctggggctgtggcatttcttttgtattgactgcagctgtcaggatcaaagaagaactaatgagacagaagtaaatagcttcattctcaggctacctgagaggagcaatgtctgatggagattaaaagatgaaaggggagaaaaattctttctcagccacacccagatacaactaagtcactcttttcacatgcttctgattcttcaaattctatgttaccacttagaatctagtggcaaaaaaaaaccttttcctaatgcttttttccttattacgtttttattatttttaagatagagaacagtgatgtttcctgatctcaatgcttttatatttagagctagaggtttattcagtcagccagtcatttattcaattatatattgactatgtctatatgttccagacccaaacatgaaccaaggaaaggctccaaaaacttggaagttttaagtayatatttgaaagaggactgataagtgaatatctgattagtagttaaaatgttatataatttggccagacatggtggctcatgcctgtaatcccagcactttgggaagccgaggtgggtggatcacctgaggtcaggagttcaagaccagcatggccaacatggtgaaaccccatctctactaaaaatacaaaaaggtagctgggcctggtggtgggtgcctgtaatcccagctactccagaggctgaagcaggagaatcccttgaatccgggagacggaggttgcagtgagccaatattgtgccattgcactctaacctgggcaacaggaacataactccatctcaaaaaaaaaaaagaacagttacataatttttcacctttcttctcgggtaatgactacttcacatgcatggatcagg

SEQ ID NO: 546279 - DNA, 1451 bp, Homo sapiens
tctcttcttgcatacaaatcatctgttaataatctttctagactttagtaggaaaataatgaagcactgtttcttttccacttttttaaaatggaaaagtttacatttttctgtcatcattctcaatctccataattttttcaatattaacagtgcccgatgattaaatttggacacaatgttcatatactgttatttaaagaaaaattatattcttaccatatcccattgcctttttggccttttgtttctcttccccatgtttattcatttgttacagttgtaaggtttttcttgaggaggtaagtaatcccacttttcttctgtcatctctaaaaactaagtaaatacaatacaatttaaactagaagctctgttcttatcttttaggacccctagtgagacatgtagctattttggaatgaggctatactaatcatgttgactagctacttattagtgagagagaagggggcagaagtcactgtcctgtcaccaggtagataagaatgtgggagacaaagaatgatgctgtctctgcacgtcctccacgtggggacattggaatcttttcctggggctgtggcatttcttttgtattgactgcagctgtcaggatcaaagaagaactaatgagacagaagtaaatagcttcattctcaggctacctgagaggagcaatgtctgatggagattaaaagatgaaaggggagaaaaattctttctcagccacacccagatacaactaagtcactcttttcacatgcttctgattcttcaaattctatgttaccacttagaatctagtggcaaaaaaaaaccttttcctaatgcttttttccttattacgtttttattatttttaagatagagaacagtgatgtttcctgatctcaatgcttttatatttagagctagaggtttattcagtcagccagtcatttattcaattatatattgactatgtctatatgttccagacccaaacatgaaccaaggaaaggctccaaaaacttggaagttttaagtatatatttgaaagaggactgataagtgaatatctgattagtagttaaaatgttatataatttggccagacatggtggctcatgcctgtaatcccagcactttgggaagccgaggtgggtggatcacctgaggtcaggagttcaagaccagcatggccaacatggtgaaaccccatctctactaaaaatayaaaaaggtagctgggcctggtggtgggtgcctgtaatcccagctactccagaggctgaagcaggagaatcccttgaatccgggagacggaggttgcagtgagccaatattgtgccattgcactctaacctgggcaacaggaacataactccatctcaaaaaaaaaaaagaacagttacataatttttcacctttcttctcgggtaatgactacttcacatgcatggatcagg

SEQ ID NO: 546280 - DNA, 1451 bp, Homo sapiens
tctcttcttgcatacaaatcatctgttaataatctttctagactttagtaggaaaataatgaagcactgtttcttttccacttttttaaaatggaaaagtttacatttttctgtcatcattctcaatctccataattttttcaatattaacagtgcccgatgattaaatttggacacaatgttcatatactgttatttaaagaaaaattatattcttaccatatcccattgcctttttggccttttgtttctcttccccatgtttattcatttgttacagttgtaaggtttttcttgaggaggtaagtaatcccacttttcttctgtcatctctaaaaactaagtaaatacaatacaatttaaactagaagctctgttcttatcttttaggacccctagtgagacatgtagctattttggaatgaggctatactaatcatgttgactagctacttattagtgagagagaagggggcagaagtcactgtcctgtcaccaggtagataagaatgtgggagacaaagaatgatgctgtctctgcacgtcctccacgtggggacattggaatcttttcctggggctgtggcatttcttttgtattgactgcagctgtcaggatcaaagaagaactaatgagacagaagtaaatagcttcattctcaggctacctgagaggagcaatgtctgatggagattaaaagatgaaaggggagaaaaattctttctcagccacacccagatacaactaagtcactcttttcacatgcttctgattcttcaaattctatgttaccacttagaatctagtggcaaaaaaaaaccttttcctaatgcttttttccttattacgtttttattatttttaagatagagaacagtgatgtttcctgatctcaatgcttttatatttagagctagaggtttattcagtcagccagtcatttattcaattatatattgactatgtctatatgttccagacccaaacatgaaccaaggaaaggctccaaaaacttggaagttttaagtatatatttgaaagaggactgataagtgaatatctgattagtagttaaaatgttatataatttggccagacatggtggctcatgcctgtaatcccagcactttgggaagccgaggtgggtggatcacctgaggtcaggagttcaagaccagcatggccaacatggtgaaaccccatctctactaaaaatacaaaaargtagctgggcctggtggtgggtgcctgtaatcccagctactccagaggctgaagcaggagaatcccttgaatccgggagacggaggttgcagtgagccaatattgtgccattgcactctaacctgggcaacaggaacataactccatctcaaaaaaaaaaaagaacagttacataatttttcacctttcttctcgggtaatgactacttcacatgcatggatcagg

SEQ ID NO: 546281 - DNA, 310 bp, Homo sapiens
gacctgcagaataaagtccaaattcattgacttggtactcaatgtttttcccttgtscctcactgacccttgaccatgcactgagactcctcattttcagccattcactacactgtccattccatctcacacatcttcagacctgagtttgctcccatccaagtgtgagtcaggggcaatttaatgtagccgcagggtgtgggcaattttgttatatctaggaaaatctcaacccatatgtccattgactcaacactttcacttttagatttattctacagagacgttagaacaactctcaaaatatatc

SEQ ID NO: 546282 - DNA, 1081 bp, Homo sapiens
catacctggctaattttttttttttgagttggaaattcgctcttgttgcccaggctggagtgcaatggcgtgatctcggctcgctgcaacctctgcctcccaggttcaagtgattctcctgccttggcctcccaagtagctgggattacaggcatgcaccactgcatctggctaattttgtacttttagtagagatggggtttctccatgttggccaggctggtctccaactcgacctcgtaatccacccccctcggcctcccaaagtgctgggattacaggcatgagccactgcacctggcctatatatatattttactactatatgtatatgtatatatgtgtatatatagcatatatatgtatatatgtgtatatatagcatatatatgtatatatactagtaacagtatatatatacacattttcactacactagtcaaagtatacacacacacacacttagcagtatatattatatatatattccagtatatatatctacatgtaaaagatatatagatatatatatagatacataaaatatatatggatacatacactggaaaagtcagtgaggagaaaacgattcattgacaatactaaataaaaaccaaaccaaccaggaaacatttaggaactagcttcacttttgacatgtaaccagaacaacacagtaaaggttgttgcctgggaattagaagtgaaacaccacgcccaaatggctcaagctggtggccagagataagaacttaaaggcatctctcccgcctagcaractgggccccctggtttcccatcacttcctttaaacagactactcaggcatttgcccacaaacttaaaggggctttaagttcaactttaagtgacaccctatttgttgcaggtggtaaacgattttaccaagacagctgtaggtaaagaaaggcagatttaaccactcttcctctttccctaagcggcctgaggtaatctgtgaaaatggttcgctattcatttgacctagagaaccccacaaaatcacgcaaatcaagaggttcaaatcttcgtgttcactttaagaacactcatgaaactg

SEQ ID NO: 546283 - DNA, 1428 bp, Homo sapiens
tgtatctgtgactctgccagacattgttacagtttaacagctacataatactccatcaagagaatatttagactgggcgtggtggctcacacctgtaatcctggcctttttgggaggccgaggcggatagatcacttgagatcaggagtttgagacaaggctggccaacatgacaaaccccatctctactaaaaatacaaaaattagccacatgtggtggctcatgcctatagtcccagctactcgggaggctgtggcacaagaattgcttgaacccataaggtggaggttacagtgagttgagattgcactccagcccgggcgataaagtgagactctgtctcaaaaaaaaaaaaagaagaagaagaagaggattttcagtttgttccagaaatgttcctattataaatacatctttgtgcttaaagttttttcttttcctatatttaagattttttttcaggctagatgcagtggctcatgcctataatcccagcattttgggaggccaaggcaggaggattgcttgaggccaggagttcgaaactagtctggtcaacatagggagaccctgtctctaaaaactatgtttaaaaaaacttagccacacatggtggcatgcccctgtagttccagctacttgggaggctgaggagggaagatcacttcagcccaactgttcaaggttgcaatgaatgagctatgattgcatcaccgtaccccagcctgggtgacagagcaaaaccctgtctcttaaaaaataaaaatatacggccaggcacagtggctcactcctgtaatcccaacactttgggaggccgaggcaggcggatcacctgaggtcaggagttcaagatcagcctgggcaatatggtgaaaccccgtctctactaaaaatacaaaattagctgcacgtgcctgtaatcccagctactcgggaggctgaggcagkagaatcgcttgaacctgggaggcagaggatgcggtgagccgagatcatgccattgcactccagcctaggcaacaagagtaaatctccacctcaccaaaaaataaaaataaaaaataaaataaataaaaatatacattttttttcagtactaatttggaagtaccattatgtgccagagacagggctaagcactttatgtgcattatttcctttaaatttcaccatagataaccctctggagtaggtagtattttccccgggtagacactagtgctcagaggatatgtaattttcccaatgccacacagctactgcatgatgaagccaagatttgaaatcaacaccaccacttactttcaaaatatgttgatggtgaattttggtttgtttacggctgtgtcatcttttgcctggctttgctctactgagccaccactgagtcttgtatatgtctctctttatttttggttatgtgc

SEQ ID NO: 546284 - DNA, 664 bp, Homo sapiens
ccttccatcatggttttcatccagtttattcctatggggatataaaagtgtgtcagaaacagtataatatacaaatcattagcttttttattacgaattgtggttaaacactatgtgaaccgaagagtagttgaactacaatgcacaggctctgccccagtcacagttcttcctgctctacttccccaaaactagaataggcctaatgtggtgggttttcttccccgccattattttgtctagttccttatatttgtgtccaaaagaggacaggtttagaaaggacttccttacttttaaccgcagctatcaatccagttgttggagctttagccttttgtgaaggatagaaagaccttgcagtcatggttgacctgggccagccactgctgaagttgccggggagaacccctgagctccatcaacaggtcactcctrcttccacagatcactgcacctagaattgcagtctcaactagtctgtgaattgacatgttaaaaaaatactacaggtatgctttgaatattttatttttacgaattgtggttaaacactatgtgaactgaagagtagttgaactacaacgcacaggctctgccccagtcacagttcttcctgctctgcttccccaaaactagaataggcctaatggacagctaggag

SEQ ID NO: 546285 - DNA, 1109 bp, Homo sapiens
cagattacctgagaagatataggcatatagatatatagagagtaacatctcaagtaaccagtgcttgatatctactcttgattcctctttgatgaagcagaggcaatctattagtctgaagtcatcccaatcctctatagctacagtctcatttaatgaaaatagttagtcatagcgatgatcaaggtcatcagaagattctgaagcattgcataaaaggattaatttctgtggtatgctagatttctccttgcatctctccagaatagccccagtgggtaggactactgcaatcatcttctaatggtggagccctcacagtccaatctctttgcctcctcaagagtgaccctttctaaatgaccaccccatcatgtcacacacattgcagccttcccaccattactgttgcctttcattgctcttaatataaaatgaacagccttcagtgaaactcacccagtcctggatacctctcaagcactctctctctagccaggatgctcctcctcaaacccaccatagttcctcccaccatcaagcctttayatcgctgttcttctacctagaaaactattccctcctctcttttccaagttaacaccaactcatccagcagacctttgtttgagcgctcctttctcagctgtaagtagactgccttattgtacactgtcatagtggcccatatcctcacaatcacttgttatcattgtatatccatgcttgttcatatgattgtttgattaatgtctatcttctttacaaaactataaactgtaaaccccataagaatccagcagcacagtgtctgacatataatgtatccttaataaatacttattgattaaattacttatgagatagaaaaatgtgttcataccttttacaaagatttgccacaagagttaagaactaaggagtgctttagctgatcgaatgttatttgtgaaaaaaaaaaaaattagctattcagtatatctaattctctatatatctgtaatcgttgtgacttaatgttttattcataccagccacaagtggggaaagactactctagcgtttttaacacagaaaatttaataaagtattttcacaggggtaaaacc

SEQ ID NO: 546286 - DNA, 981 bp, Homo sapiens
atataatatattacataattatataattactattaaccttattttatttattaatttattgatcaagactcaaagaagttttcagcatggttcaaactgtggagtgatgacstattgagtcattagcagctagtgaaagccttttagctgttggtgaccattaataaaaaataactacaaagcattacaaaagaaaatagagtacgtcacatataatcctggtaactacagttttataaaacttttatttgtactttatgaaagtgtatgtgtgtgccatacacatgtatgtgtgcatttgtgtgtatgcactgggccatgctatttcttactttgggctgtctcagtcaaaaaagtacaaaaatcactgatctaaatgaattactgataacccaaaggaaataaatagtgtattaggaaattgaacacaggttgcctactccacatttggtacaatttgttctgtaccaaaattcagaaagatatgataaaactgtaatttaagggatttggtatattagatttatgaagtcaaaatagagaaaacactataaagtacaataatcaaaatgattccatatttccaataattttataaattattagtttgagtgtagattgaagtataaattggcagctcttatcaaaatttaattatgcataccttttgcccaaaagttctatttccaagtacactttaagagatatgctaatatgtaagcatatatccacaaggatgcttattgcagtatttattaagcaaggcaataaagggaagaaaaaggagactcatgcagtatccatcaataggtgtcactgtgggacaacacaaaaattgaaattaggcgttaaggtttcattctgtaataatcaatatttttgttagaactcggttgaggccgggtgcggtggctcacgcctgtaatcccagcactttgacaggccaaggcaggtggatcacgaggccaggagttcgagacc

SEQ ID NO: 546287 - DNA, 981 bp, Homo sapiens
atataatatattacataattatataattactattaaccttattttatttattaatttattgatcaagactcaaagaagttttcagcatggttcaaactgtggagtgatgacgtattgagtcattagcagctagtgaaagccttttagctgttggtgaccattaataaaaaataactacaaagcattacaaaagaaaatagagtacgtcacatataatcctggtaactacagttttataaaacttttatttgtactttatgaaagtgtatgtgtgtgccatacacatgtatgtgtgcatttgtgtgtatgcactgggccatgctatttcttactttgggctgtctcagtcaaaaaagtacaaaaatcactgatctaaatgaattactgataacccaaaggaaataaatagtgtattaggaaattgaacacaggttgcctactccacatttggtacaatttgttctgtaccaaaattcagaaagatatgataaaactgtaatttaagggatttggtatattagatttatgaagtcaaaatagagaaaacactataaagtacaataatcaaaatgattccatatttccaataattttataaattattagtttgagtgtagattgaagtataaattggcagctcttatcaaaatttaattatgcataccttttgcccaaaagttctatttccaagtacactttaagagatatgctaatatgtaagcatatatccacaaggatgcttattgcagtatttattaagcaaggcaataaagggaagaaaaaggagactcatgcagtatccatcaataggtgtcactgtgggacaacacaaaaattgaaattaggcgttaaggtttcattctgtaataatcaatatttttgttagaactcggttgaggccgggtgcrgtggctcacgcctgtaatcccagcactttgacaggccaaggcaggtggatcacgaggccaggagttcgagacc

SEQ ID NO: 546288 - DNA, 663 bp, Homo sapiens
aagactaacttgataaatataatattctgagaggccagaatggggaaaatggcagcagagaaatgtgtcctcatagatttgaactgggtcatctgagaagctttgacgattgctctgaagacttcagattttattctggaagcatgttgaggcatcagaagtgccaagagctgggcgtggtggctcagacgtgtaatcccagcactttgggagaacggtttgaggttaagagtttgagaccagcctgggtgacatagcaagatgcccctgtacccgatcttttattttatttttttatattattatactttaaagttctagggtacatgtgcacaacgtgcaggtttgttacatatgtacacatgtgccatgttggtgtgctgcgcccattaactcgtcatttacattaggtgtatctcctaatgctatccctcccaactccccccaccccacagcaggccccagggtgtgatgttccccaccctgtgtccaagtgttctcattgttcgattcccacctatgagtgagaacatgaggtgtttggttttctgtccttgcaatagtttgctgagaatgatggtttccagcttcatccaggtccctacaaaggacatgaactmatctttttttatggctgcatagtattccatggtgtgtatgtgc

SEQ ID NO: 546289 - DNA, 1385 bp, Homo sapiens
cactagcctcccaccgacagcaggccctggtgtgtgatgttccctccctgtgtcaatgtgttctcattgttcaactcccacttataagtgagaacatgcagtgtttggttttctgttcttgtgttagtttgctgagaatgatggtttccagcttcatccatgtccctgcaaagggcatgaactcatccttttttatggctgcatagtattccatggtgtatatgtgccacattttctttatccagtctatctctgatgggcattttggttggttccaagtctttgctgttgtgaacagtgctgaaatcatcatcactggtcattagagaaatgcaaatcaaaactacaatgagataccatctcacaccagttaggatgttgatcattaaaaagtcaggaaacaacagatgctggagaggatgtggagaaataggaacgcttttacactgttggtgggagtgtaaattagttcaactattgtggaagacagtgtggcaattcctcaaggacctagaaccagaaataccatttggcccagcaatcccatcactgggtatatacccaaaggattataaatcattctactawaatgacccagcctcatttcttaagccccacacccacctctactccagcctcttgaccatttgccccagtcccctgacagtttgccccaagctcaggaactctgggcattgttcctgcttcctagaggtctcatcccaaatgtccaccatacagtacttgcgtctctgcacccaatgtcttccctgaatcctttttggcatgcccttctctgtcattttctggcctgctttatcctgcttcacttttcttctaacatttatatattatattcttagcactaatatattttttgaggcacaacctacataaagtaaaactcatctattttgttgtaagttctatgagttttgacaaatgcagagtcatgtaaccaccaccacagtcaagaagagtttccattaactcaaaaaattccctttgtagtcaacctctcccttgaccccccagcccctggcaaccactgatctgtcttctgctcctttagctttgctttttgaggttgtcatatgaatggaatcacacagcgtgtagctctttgagtctggatcctttcttttggcataatgtgctgttgcatattgcagtagtctgctcctttttagtgctaaataatattccattccagggatgtataacggtttgtatatccattccccagtagaggacatctgcattgtttccagtttggggtgattataaatgaacaattttgttcagatttttgtgtgaacaaatgcttttattttctcttgaacaaatatatagaaatgagatgacaagtcctatgatgaagatac

SEQ ID NO: 546290 - DNA, 1385 bp, Homo sapiens
cactagcctcccaccgacagcaggccctggtgtgtgatgttccctccctgtgtcaatgtgttctcattgttcaactcccacttataagtgagaacatgcagtgtttggttttctgttcttgtgttagtttgctgagaatgatggtttccagcttcatccatgtccctgcaaagggcatgaactcatccttttttatggctgcatagtattccatggtgtatatgtgccacattttctttatccagtctatctctgatgggcattttggttggttccaagtctttgctgttgtgaacagtgctgaaatcatcatcactggtcattagagaaatgcaaatcaaaactacaatgagataccatctcacaccagttaggatgttgatcattaaaaagtcaggaaacaacagatgctggagaggatgtggagaaataggaacgcttttacactgttggtgggagtgtaaattagttcaactattgtggaagacagtgtggcaattcctcaaggacctagaaccagaaataccatttggcccagcaatcccatcactgggtatatacccaaaggattataaatcattctactaaaatgacccagcctcatttcttaagccccacacccacctctactccagcctcttgaccatttgccccagtcccctgacagtttgccccaagctcaggaactctgggcattgttcctgcttcctagaggtctcatcccaaatgtccaccatacagtacttgcgtctctgcacccaatgtcttccctgaatcctttttggcatgcccttctctgtcattttctggcctgctttatcctgcttcacttttcttctaacatttatatattatattcttagcactaatatattttttgaggcacaacctacataaagtaaaactcatctattttgttgtaagttctatgagttttgacaaatgcagagtcatgtaaccaccaccacagtcaagaagagtttccattaactcaaaaaattccctttgtagtcaacctctcccttgaccccccagcccctggcaaccactgatctgtcttctgytcctttagctttgctttttgaggttgtcatatgaatggaatcacacagcgtgtagctctttgagtctggatcctttcttttggcataatgtgctgttgcatattgcagtagtctgctcctttttagtgctaaataatattccattccagggatgtataacggtttgtatatccattccccagtagaggacatctgcattgtttccagtttggggtgattataaatgaacaattttgttcagatttttgtgtgaacaaatgcttttattttctcttgaacaaatatatagaaatgagatgacaagtcctatgatgaagatac

SEQ ID NO: 546291 - DNA, 538 bp, Homo sapiens
taggctgcaaaactattatactctcctggtgtttcagtgattgggattgggagacaaagtgttgggattttttgctttggggtccctctattttttttgtttgtttttttgagagggagtcttgctctgtygccaggctggagtgtggtggcgcgatcttggctcactgtcacctccgcctcccggggtcacgccattctcctgcctcagcctcctgaatagctaggactacaggtgtgtgccaccacacctggctaattttttgtatacatttttagtagagatggggtttcaccatgttgaccaggatggtctagatcttttgacctcgtgatccacccacctcagcctcccatatcccaggcatgagccaccatgctcagccagggtccctcttaaacttgtatttttaaggtctggggtccctcttaaccttttttttttcccttctttcttttttgagatggagtcttactctgtcacccaggccggcagtggggcgtggtctcggctcactgcaatgttcaccttctgggct

SEQ ID NO: 546292 - DNA, 538 bp, Homo sapiens
taggctgcaaaactattatactctcctggtgtttcagtgattgggattgggagacaaagtgttgggattttttgctttggggtccctctattttttttgtttgtttttttgagagggagtcttgctctgttgccaggctggagtgtggtggcgcgatcttggctcactgtcacctccgcctcccggggtcacgccattctcctgcctcagcctcctgaatagctaggactacaggtgtgtgccaccacacctggctaattttttgtatacatttttagtagagayggggtttcaccatgttgaccaggatggtctagatcttttgacctcgtgatccacccacctcagcctcccatatcccaggcatgagccaccatgctcagccagggtccctcttaaacttgtatttttaaggtctggggtccctcttaaccttttttttttcccttctttcttttttgagatggagtcttactctgtcacccaggccggcagtggggcgtggtctcggctcactgcaatgttcaccttctgggct

SEQ ID NO: 546293 - DNA, 790 bp, Homo sapiens
tttttcttcatcatgagtaatatatccctcaatgaaaatctagaattagagtaaatttgctaatgaattcaataacttttccataatatttttagttatgtgcttaaggttctcttagtgtttctcccactttttaatagcttatgccttttttgcctttgttttttattggttcattttaaagcaaaaacctcacaacatgtgctccccagaagcactgtaacctagtggtaagatcatagactctggggacacaggctggccacgtctcttctcctgtctgagccttagtatcctcctgtagtcatgagaactgaagatctatcctgaagatttgataagatagtaaagtgcttcacataatatcgggcatataaatacataataaatgcttcctgacctcaggtgatcctcccacctcggcctcccaaagtgctgggattacaggtgtgagccaccacgcccaaccaagaaattcttatgtaaaaagaggttgggctcagtgcctcaattctagcactttgggaggtcagggcaggtggatcacttgaggtcagaagtttgagaccggcatgggcaacatgatgaaaccccatctctactaaaaaataaaaataattatccaggtgtggtggtgggcrcctataatcccagcttctcaggaggctgaggcaggaggatcacttgaacctaagaggcggaggttgcagtgagccgagatcatgccactgcactccagcctgggcaacaacagcaagactccatctcaaaaaaaaaaaaaaaaaaaaaa

SEQ ID NO: 546294 - DNA, 885 bp, Homo sapiens
tgacagaagtggcttaatatactctttccagaccaaagcatctttatctgcaaaatgagaggattaaattaggttatctctaagttcatttaaaattgttttaaaacaatctatgtagataaacagagtagcagtctgcaatgtatttaaaaggaaatggactagtcaagttggcaagatctatgtgaaagaattattgttgtgctatataaaaaaagawtctgcctttttaaataagacgagtaatgacaaattaattttcatgcaggttgaaaatgtggcagatgtgtatggagaatgagaaaattcctgttataatagagatgacttaaattatgaggatggtaaagaagagggaatgttttctgtcctttcaagatgtcaaagcttaattgaacatgtttttaaaaatgaaaataaaaatctcagtgcaaagaatacatttacttctctagtagactattaattgcagaatcgcaatacatatgatctccttcttctttgttaaccaagtctcaatcacatttggttaacaaataaaatactacactccccgtcatcccttgtagcgaaatgagcttataagtctaagtcctgcccagtgagatgtaagcttactattttgtgacagtctttctgggaaggctgcttaaagggagccaataagtcaaggagaaaggataatcgtttatccttccccacctcttcctgctacaacagaagggatggctggagctatagcagccaatttagactatagataaactcaaagaaggaagctccatgctaaaaatggaatataggaagaaatagactgtatcaccgataacgtcctcgtgccaccagaatgatttatcttcaaacttctcttttaactgaaaaaaa

SEQ ID NO: 546295 - DNA, 885 bp, Homo sapiens
tgacagaagtggcttaatatactctttccagaccaaagcatctttatctgcaaaatgagaggattaaattaggttatctctaagttcatttaaaattgttttaaaacaatctatgtagataaacagagtagcagtctgcaatgtatttaaaaggaaatggactagtcaagttggcaagatctatgtgaaagaattattgttgtgctatataaaaaaagattctgcctttttaaataagacgagtaatgacaaattaattttcatgcaggttgaaaatgtggcagatgtgtatggagaatgagaaaattcctgttataatagagatgacttaaattatgaggatggtaaagaagagggaatgttttctgtcctttcaagatgtcaaagcttaattgaacatgtttttaaaaatgaaaataaaaatctcagtgcaaagaatacatttacttctctagtagactattaattgcagratcgcaatacatatgatctccttcttctttgttaaccaagtctcaatcacatttggttaacaaataaaatactacactccccgtcatcccttgtagcgaaatgagcttataagtctaagtcctgcccagtgagatgtaagcttactattttgtgacagtctttctgggaaggctgcttaaagggagccaataagtcaaggagaaaggataatcgtttatccttccccacctcttcctgctacaacagaagggatggctggagctatagcagccaatttagactatagataaactcaaagaaggaagctccatgctaaaaatggaatataggaagaaatagactgtatcaccgataacgtcctcgtgccaccagaatgatttatcttcaaacttctcttttaactgaaaaaaa

SEQ ID NO: 546296 - DNA, 885 bp, Homo sapiens
tgacagaagtggcttaatatactctttccagaccaaagcatctttatctgcaaaatgagaggattaaattaggttatctctaagttcatttaaaattgttttaaaacaatctatgtagataaacagagtagcagtctgcaatgtatttaaaaggaaatggactagtcaagttggcaagatctatgtgaaagaattattgttgtgctatataaaaaaagattctgcctttttaaataagacgagtaatgacaaattaattttcatgcaggttgaaaatgtggcagatgtgtatggagaatgagaaaattcctgttataatagagatgacttaaattatgaggatggtaaagaagagggaatgttttctgtcctttcaagatgtcaaagcttaattgaacatgtttttaaaaatgaaaataaaaatctcagtgcaaagaatacatttacttctctagtagactattaattgcagaatcgcaatacatatgatctccttcttctttgttaaccaagtctcaatcacatttggttaacaaataaaatactacactccccgtcatcccttgtagcgaaatgagcttataagtctaagtcctgcccagtgagatgtaagcttactattttgtgrcagtctttctgggaaggctgcttaaagggagccaataagtcaaggagaaaggataatcgtttatccttccccacctcttcctgctacaacagaagggatggctggagctatagcagccaatttagactatagataaactcaaagaaggaagctccatgctaaaaatggaatataggaagaaatagactgtatcaccgataacgtcctcgtgccaccagaatgatttatcttcaaacttctcttttaactgaaaaaaa

SEQ ID NO: 546297 - DNA, 2939 bp, Homo sapiens
aataatattattttttgtccaccacagccggtagtttaatcatccccatcatactaggtatttatatgctgattttatttctggaatgctttctaattattagctgtttaataatcataccatctccacagtgtacaagaaatgccacctgcttttacatgaaaatggagaattgaaggttactctgtttggggaagaagctctatattctaactgaaacttatttaaaacaaaatgattaaccgggcacagtggctcatgcctgtaatcccagcactgtgggaggccgaggtgggcagatcacttgaggtcaggagttcgagactagtctggttaacatagtgaaaccccgtctctactaaaaatacaaaaaattagctgggcgtggtggcgtgcgcctgtagtcccagctactcgggaggctgaagcaggagaattgcgtgaagttgggaggtggagcttgcagtgagctgagatggcaccactgcactccagcctgggggacagtgcgagactccatctcaaaaaaaaaaaaaaaaaaaaaaaaaagattccccccctttcctatttttcactgcgagcagctcacctacagaaataactgagtggaaaaaatggagtttggggatcaaatgatatagaatatataagggtgctaacttgggcataagccaacctgatgaggaaatggcaaacccgtgagccacatggagagggagagttgggaatatttagctacagaagacctgaagggctcccctggagaggcttgcgctgtaggtccccagctgtataaatatgaccaatggagaaaagccaccagcagcagaatttgactgaattagaagatttacttcatctcacagagcttgtcactggaggtggaaaaagaagcatctttcctgccataggccttgtggtctttaatctgcctcatttcaacaggcagcaccagggtcgtggctgcattaaaatactcaggttgtaggaaatgaaaatgcgaacatcactcggcaagtgaaaaaccgaggtgctgataaagtgacctacatagggtcacacatttagttagcaacatatctgggatggaaacctagggctcttgagttctaatcctaatgattatctcaccattagacaaagccagctacggttccaagcaccctgaactctacttcactattaagttattgtgctttctgtcatggcttagtttttgacaatgaaatattcaatttcaattttttagacacaaaagtatagacattaatacaactcattatatagctgacaacaaagataaaatataagcaaaaataaagactataattcatcataaataaatatactaaaacaacacctgtggttcccttctagtcttttctatgcatagtatttaygtaaaagagattatacttgtagttttctactctgcacttcctcttaaaaatatgaatatttgctaatgtaataataaaagttatgaaaaaatattcttattccatgtctatagttgcttattaagtggatctctgtccttggatttaattttcagcttgtattttaccacttttactgtgattaattatgtaattattaaagttatccatgtatattaaaataaaaattcaaaatattactgaaaatttacaataaaaatataaattattcctcatcaccaccatcactatcatcaccaaatccaacatgacccctattctctctccaagttctcagagaaaagcaattttgccggtgtcaatgctagttctgtggtggacagctctgtatgcccaggaagcaggaacacagatccacttccttatttccccagttcaaacacaatccatcacctctcagctgtaagacaaagagttccactaacttccacaatcaattgttcttttctccttttcttaccaatttttcctgtatcatcttttcaaattgacattatcactttactaatgaatttaaaacactgttttttaatccattttggaagaaacttgctcattatccaccaaactgattttcttttttcggctgctcttcagctattccacatttcttggcctcctttgctatgtgactacgttctagctactggaatatggcagaagtatgtgctaggttcaggcctggccttcaaaacatccggggatgccttctgagaactctctggttctctcccattctaaagttggaattaaactattcttgaatcttcagagatgatggatgttcaaggtggagggacctgggttcttgattcagcattctgaaggcctctgctaaataactgatgtattttattgtaataaaataaattttattttgagcaattgagaaagaaactactattttcttaaaagattgagattacagggtttatttgctatagcagctggaagaaccttaagtaatgtacccatcaattttacacagcatctcttgctacccatttgtaaaatgaaaaatgcagtgtatcctacatctgtctccagtaccttccaacagaaaacctaccatgcctcttgtaatgttgaggcttgtactattgactttctgttccaaaatcacaaaggaacctctttggaaaggagattctccttccttgggaaactgaaaatcaattaaaaacatttaaaatattaggcatatgaaaatatcattccctgaagaactaagtaacgtgattatagccacaaagaagatgtaattttatattactaaacttttgccatttgaagaaaaatgttcctagctttaagattggatgaattatctttttataccaacaacaggagaataaaagcaaaatataaagaagaaaaagaggccaaaaattataagcaaaaacaaacaaaaaagctgcagaaatattcctgaaacaaatactgatcaaactacatttatttcagtgattttttaaatag

SEQ ID NO: 546298 - DNA, 647 bp, Homo sapiens
ccaccatggtatttcacacactcctacctcatcgtagtacaggacttgtgacctcattattataacacaactagaacactgagctcttgtgctttcagatgtgccttgtgtgtaacaaaaaataacaatagaaaaggattatttgaattccaactcactaatgtttcttttgagtagattacaggcttttggatacctaaggtaagacactcaacctgtatttccatacaacctggctgtaattcaagcttctaaaggagtaaatcaggaaaagtactctgttaggtatggaatcatttttcgaattatgtgggttgcagcgtaaattcaccaacacactcctatttcagaagtttttcttcctgtttttcattaaataaagtaggtaaaaggcccctgccataaagcattaaccccacctctgtggacaragatagttaggatggggtttagaatgcatttacttatgggtcgtggttttccttccaatctggctaacatcagcttaagcttccttaagtaatttcttggtcttcctaactggagctagaagtttgagataaacatgatgaactgttctattctaaaaaaaattagggaacaatgcatattactagaactagtttattttattaagaaataaattg

SEQ ID NO: 546299 - DNA, 647 bp, Homo sapiens
ccaccatggtatttcacacactcctacctcatcgtagtacaggacttgtgacctcattattataacacaactagaacactgagctcttgtgctttcagatgtgccttgtgtgtaacaaaaaataacaatagaaaaggattatttgaattccaactcactaatgtttcttttgagtagattacaggcttttggatacctaaggtaagacactcaacctgtatttccatacaacctggctgtaattcaagcttctaaaggagtaaatcaggaaaagtactctgttaggtatggaatcatttttcgaattatgtgggttgcagcgtaaattcaccaacacactcctatttcagaagtttttcttcctgtttttcattaaataaagtaggtaaaaggcccctgccataaagcattaaccccacctctgtggacaaagatagttaggatggggtttagaatgcatttacttatgggtcgtggttttccttccaatctggctaacatcagcttaagcttccttaagtaatttcttggtcttcctaactggagctagaagtttgagataarcatgatgaactgttctattctaaaaaaaattagggaacaatgcatattactagaactagtttattttattaagaaataaattg

SEQ ID NO: 546300 - DNA, 647 bp, Homo sapiens
ccaccatggtatttcacacactcctacctcatcgtagtacaggacttgtgacctcattattataacacaactagaacactgagctcttgtgctttcagatgtgccttgtgtgtaacaaaaaataacaatagaaaaggattatttgaattccaactcactaatgtttcttttgagtagattacaggcttttggatacctaaggtaagacactcaacctgtatttccatacaacctggctgtaattcaagcttctaaaggagtaaatcaggaaaagtactctgttaggtatggaatcatttttcgaattatgtgggttgcagcgtaaattcaccaacacactcctatttcagaagtttttcttcctgtttttcattaaataaagtaggtaaaaggcccctgccataaagcattaaccccacctctgtggacaaagatagttaggatggggtttagaatgcatttacttatgggtcgtggttttccttccaatctggctaacatcagcttaagcttccttaagtaatttcttggtcttcctaactggagctagaagtttgagataaacatgatgaactgttctattctaaaaaaaattagggaacaatgcatattactasaactagtttattttattaagaaataaattg

SEQ ID NO: 546301 - DNA, 1229 bp, Homo sapiens
gaagcattaacgaacatttcttcagctgcacacggaccttcaaaaagttctaaaacagggtatgttattatgttttacaggaagatgtgtttaatatttgtaagtcaatatggataataacactgatttaaatggactgatagatgcatttgtcttttaatgtctattataataacaattgccaaaagcctatgaaaaattcaacatttacttgttgattagtctgtttttgattcatatatgcaattaattcttaagtgaagtttttcagagacactagcctctccttaaaaggcaaccatgttcacttgaaaatgtgaacagactatagatttgagattctggcttcacgctttgtcctgggaagcaaccttggatttggaatttaatggcttcctggctatctggactgtgaagaaatgcttctgaggggagacagatgtttgtctgaaactctattgtttaaagagctggactttgtctgtaacagcaggtatgaagatcagaaagaaagattgggagcccaaatgaaggcattagtactttgtaaacatagacctcatgcygcagtctgggtggattgatgataatgctacaaagaaaaatgcagcaaaggaaacttaggaatgaacctaaaagacacagtgtcttagtaaactaaaacgaaagtaaaaggagaccttcaaagcccactgcttgtaagatgagcttcttttttgaatattattccttaaaggacaccacacacacccaggtgaactcatggaatttgcattaaataattgataactttttgacatttatttgaagtttccttccaggaaaaaatggttcaagtagcactctggcattatttcataattaagcagccttttgcatgtaccatatgcaaccaccaaatctaaggtcctgtgttatgtagcctttccaacctttctaaatctcaagttttcagtaaatttaatgttttctttagagaaaaagacagtgagagacaggcagtgtccatttgaactagcaaatagtctgaccagatgacgagtctactagctcttctagtagctgctgcaaccagcaacttagtgggggcaacatcctcagccatgccacgtgggctttgcctgaagacaatagataacagccaagaggcagacaaagaaaatatgtgtaaaaacaatggtaaataaagtaaataaaattaacgaattagataaatgaataaaaataaa

SEQ ID NO: 546302 - DNA, 1047 bp, Homo sapiens
tgggcttcaaatttattgctcatttgcctcctttasttctaaaataaagtacagattcacatttacaatttgatcaaagtcatcatgatgaaaatttctaaggcattgtcagtcgtgattgtgctaatttttaatgatagccccctactaatcaataggtaatttaattcaaaaatgtgaagctataaactttaatgttctgtttggtattttcttattaattggaaagatggctcagtcaacttttagggagagagctaagaagatctctccattacagtccgatcctgatgggtggcattgaccagacgcagtgctaggaagatctatccattagagtccaattctggtgggtggcattgaccagaggcagcgccactccctggggccacacactgttggtgttggttctagttggaatctctgatcctactctgtgtgaaatacgtgactgctcatctctgcatcttgcaccaaggctgtgccttgccctaatcttccctcctacacttatttttataacctaaatacaaaccttgcagagaaagggaaagattggatctctctgctccagtatatgcttttatttgtctcacccaattcagtctagtacttcaagtcagtctaccaacgcaaaacaagatcaaatgctaaactgtcgagaagactaacaattccttccaaaagcatttactgtttatcttttcacataccactcagtccgctgtgattgctggtatccttggtattttatcttattttttcttaataatacatgcctttcttaaacattaaagtatcacttcttgtaagagcaagagttaaaagatagttaagatgttgaagaattccatttgctttaaaaacaaaagactgaaaccatcttgattccccttccaccttcatagataacagaaacataggtgccaatgctctcctcaatcctttaaagcaattgcctttttaaaccatttgcaatttgtttcctgcttaaagacatgaggaattcattacaaactatttagagaataaatatccaaggagtca

SEQ ID NO: 546303 - DNA, 1047 bp, Homo sapiens
tgggcttcaaatttattgctcatttgcctcctttagttctaaaataaagtacagattcacatttacaatttgatcaaagtcatcatgatgaaaatttctaaggcattgtcagtcgtgattgtgctaatttttaatgatagccccctactaatcaataggtaatttaattcaaaaatgtgaagctataaactttaatgttctgtttggtattttcttattaattggaaagatggctcagtcaacttttagggagagagctaagaagatctctccattacagtccgatcctgatgggtggcattgaccagacgcagtgctaggaagatctatccattagagtccaattctggtgggtggcattgaccagaggcagcgccactccctggggccacacactgttggtgttggttctagytggaatctctgatcctactctgtgtgaaatacgtgactgctcatctctgcatcttgcaccaaggctgtgccttgccctaatcttccctcctacacttatttttataacctaaatacaaaccttgcagagaaagggaaagattggatctctctgctccagtatatgcttttatttgtctcacccaattcagtctagtacttcaagtcagtctaccaacgcaaaacaagatcaaatgctaaactgtcgagaagactaacaattccttccaaaagcatttactgtttatcttttcacataccactcagtccgctgtgattgctggtatccttggtattttatcttattttttcttaataatacatgcctttcttaaacattaaagtatcacttcttgtaagagcaagagttaaaagatagttaagatgttgaagaattccatttgctttaaaaacaaaagactgaaaccatcttgattccccttccaccttcatagataacagaaacataggtgccaatgctctcctcaatcctttaaagcaattgcctttttaaaccatttgcaatttgtttcctgcttaaagacatgaggaattcattacaaactatttagagaataaatatccaaggagtca

SEQ ID NO: 546304 - DNA, 1434 bp, Homo sapiens
cttctagacaatgctattacagaggaacaatttggctttgagaagttaaggaaaataagtgasaaacatttcagttttgagaagttaaaccaaattagaaactacagttctagagacacacggcttggatttggactcccctcagtcccaaaactcatggtatttttgctgtggttccctccccaataccccacaaatagggcaaatcacctcttgcaacactgtcccatctctcaaagggtgagcagcatatttcagatcagtaggttacctgtatctcatttcacattgagcacaggtggctgtgccgtctgccaactcacaaaattgccaagtgattcacctcaaaagggccccgttagaacagcgatccatctggccagtagcccccggccgttccctctccagcctccccataccttccggttgtgtaccagccagcgttctgatctggcctgaaagctctctgcctccaagatacttgccgcagtatctcctgggctgagcgagtttagagggaatcaaacccacacttaagttaccagggaactgttccaccgaaacccgcaacactgtaattacaataaacccttcagcaccactggctctgagaggtaaaagaaattaaatcaataagcatagatcgaatcaggagcaatcttatgggagattcatgtaaatgcacaatcttacattggaaatgagtttgaagattaatacccttcacaaatgtaaaagtagaaagaagtatgtaggagaaaatgctgctgcaacagtaggtcaacccctctttttaagagctgtcagctatattgtatgaagaactcatgaaacttaacgttctcagtatttttttaaaccccataatgcaaattcttccacagaataacaagtgatgcatgcttgaaatttatttttaaatcaagagcaaaatgaaaccctttaattaatctcggagaatttagctccttgcctttcagatctgtcttctgcacagttagatgcttaaaataattgcatccgctcgtgtgaaactgcagcagtaattcagtgggtttatacttgtgcaaccttttaaaaacaggccttaaaacattcatctgttgaaccaatttaccagctttcaataaagcatctttaagatactttctgttacatttatatgacataagctgtattattttaataatctgtgcttgagatatatggtgatgagggaattattgctcacctggggagatggtgtaattagcaaagaggcacagtcagggaataaaaatgattaaaaaaaaaagaaaagcttgctgaaattaaccagccaccgctactaggccactatgatgttggcttaagctgttggggacgcaatggagtgggaagcagagaagaggaaaaccaagcaaacttctggtgcctgaaataattacaatttct

SEQ ID NO: 546305 - DNA, 1434 bp, Homo sapiens
cttctagacaatgctattacagaggaacaatttggctttgagaagttaaggaaaataagtgacaaacatttcagttttgagaagttaaaccaaattagaaactacagttctagagacacacggcttggatttggactcccctcagtcccaaaactcatggtatttttgctgtggttccctccccaataccccacaaatagggcaaatcacctcttgcaacactgtcccatctctcaaagggtgagcagcatatttcagatcagtaggttacctgtatctcatttcacattgagcacaggtggctgtgccgtctgccaactcacaaaattgccaagtgattcacctcaaaagggccccgttagaacagcgatccatctggccagtagcccccggccgttccctctccagcctccccataccttccggttgtgtaccagccagcgttctgatctggcctgaaagctctctgcctccaagatacttgccgcagtatctcctgggctgagcgagtttagagggaatcaaacccacacttaagttaccagggaactgttccaccgaaacccgcaacactgtaattacaataaacccttcagcaccactggctctgagaggtaaaagaaattaaatcaataagcatagatcgaatcaggagcaatcttatgggagattcatgtaaatgcacaatcttacattggaaatgagtttgaagattaatacccttcacaaatgtaaaagtagaaagaagtatgtaggagaaaatgctgctgcaacagtaggtcaacccctctttttaagagctgtcagctatattgtatgaagaactcatgaaacttaacgttctcagtatttttttaaaccccataatgcaaattcttccacagaataacaagtgatgcatgcttgaaatttatttttaaatcaagagcaaaatgaaaccctttaattaatctcggagaatttagctccttgcctttcagatctgtcttctgcacagttagatgcttaaaataattgcatccgctcgtgtgaaactgcagcagtaattcagtgggtttatacttgtgcaaccttttaaaaacaggccttaaaacattcatctgttgaaccaatttaccagctttcaataaagcatctttaagatactttctgttacatttatatgacataagctgtattattttaataatctgtgcttgagatatatggtgatgagggaattattgctcacctggggagatggtgtaattagcaaagaggcacagtcagggaataaaaatgattaaaaaaaaaagaaaagcttgctgaaattaaccagccaccgctactaggccactatgatgttggcttamgctgttggggacgcaatggagtgggaagcagagaagaggaaaaccaagcaaacttctggtgcctgaaataattacaatttct

SEQ ID NO: 546306 - DNA, 1434 bp, Homo sapiens
cttctagacaatgctattacagaggaacaatttggctttgagaagttaaggaaaataagtgacaaacatttcagttttgagaagttaaaccaaattagaaactacagttctagagacacacggcttggatttggactcccctcagtcccaaaactcatggtatttttgctgtggttccctccccaataccccacaaatagggcaaatcacctcttgcaacactgtcccatctctcaaagggtgagcagcatatttcagatcagtaggttacctgtatctcatttcacattgagcacaggtggctgtgccgtctgccaactcacaaaattgccaagtgattcacctcaaaagggccccgttagaacagcgatccatctggccagtagcccccggccgttccctctccagcctccccataccttccggttgtgtaccagccagcgttctgatctggcctgaaagctctctgcctccaagatacttgccgcagtatctcctgggctgagcgagtttagagggaatcaaacccacacttaagttaccagggaactgttccaccgaaacccgcaacactgtaattacaataaacccttcagcaccactggctctgagaggtaaaagaaattaaatcaataagcatagatcgaatcaggagcaatcttatgggagattcatgtaaatgcacaatcttacattggaaatgagtttgaagattaatacccttcacaaatgtaaaagtagaaagaagtatgtaggagaaaatgctgctgcaacagtaggtcaacccctctttttaagagctgtcagctatattgtatgaagaactcatgaaacttaacgttctcagtatttttttaaaccccataatgcaaattcttccacagaataacaagtgatgcatgcttgaaatttatttttaaatcaagagcaaaatgaaaccctttaattaatctcggagaatttagctccttgcctttcagatctgtcttctgcacagttagatgcttaaaataattgcatccgctcgtgtgaaactgcagcagtaattcagtgggtttatacttgtgcaaccttttaaaaacaggccttaaaacattcatctgttgaaccaatttaccagctttcaataaagcatctttaagatactttctgttacatttatatgacataagctgtattattttaataatctgtgcttgagatatatggtgatgagggaattattgctcacctggggagatggtgtaattagcaaagaggcacagtcagggaataaaaatgattaaaaaaaaaagaaaagcttgctgaaattaaccagccaccgctactaggccactatgatgttggcttaagytgttggggacgcaatggagtgggaagcagagaagaggaaaaccaagcaaacttctggtgcctgaaataattacaatttct

SEQ ID NO: 546307 - DNA, 606 bp, Homo sapiens
ttgagcttctcaacttttgcaatctggaaaagaatggaatattttcagctctctgaaaacatcgcttcagtcaagaacataaagaaggcaacagagaagtcttttttaaagtttcaccagatttaaattctctcctatcaatcatcctaacatattttaaaatttgggcttctttctttccctatagactatatctttccatttcagaccttttttgatactttaattttgactaaaatcttagaagtaatataataaccgtaggctwtaaagtaagatatactattgtctcaagattttttactttttttttgagacagggttttactctgttgcccaggctggagtgcagtggcacagtcttggctcactgcaggctcgacctcctgggctcaggcaatcctcttgcctcagcatcccaagtagctgggaccacagtcatgcactgccacacccagctaatttttatactttttctagagatggggttttgccatgttgcccaggctggtctcgaactcctaagctcaagcaatctgtccgccttggcctcccaaagtgttgggactacaagtgtgagccaccatgcccagctgatttttgact

SEQ ID NO: 546308 - DNA, 2172 bp, Homo sapiens
accctgctgtggccccgcttctccagcccctccgcagggttcctcccactgaactgcctgcccttctgcccagaacaagtccagctaagatggctcctcctctaggaaggcttccttggttcaggaaagagtggagggccagccttttgctgccacagccctaagagcttaccctaagccccggcactgcctccccattcccggccctccatggctctggccttaggggacctgggggcctgagcttggccacatgggcatcctcagccttgatccaggggcagactgctgggatgtgggcggggtgggaagaggagtggccaggagtgggggactcaagaaggcccctcacctggataccatggggaatgctgtaaactatgaggatggtcccgcagtcctcgtggccggggagcgacatctggaaccgtaatacctccatctttccctggggctgggtccccgtcttctctccatagatggttttgcaggagggacactgcagacttccatcctgacagaggcagacgcaacccactgagctggcagtctgagaacacccaagaccgtcacctccaccgtcagatggtaaagggccccgggaatgggctggccaccatcccagggagttgctggcagcctcctgcccggaaactggcttccaacagcttccctggaaagctttgttttgcaccagcaactcatgccattttcgttaagggacatgctatcaggagacaggtggcgagtgggaaaactcggatcctgagcagaaatctccacgggtgaatcgcatttgcagtcggatagacagccttgcagcgtctgatctgcggagctgggccctggctgcccaggatggcagacactagggaaggcygagccaggctccgatgcgccacatgactcggttctctaagcctctaaactctgcccatcccgcctgaaggccgatgcagggagagcagctgggggtcagtctgggcgcggctcttcatgtgtaggctgctgtggggcccaggatcagccctgcctcaaggcctggctcccacctcccagtggggtgaccctgggcacagcccctgctctgagcctctccctcatgagcactgtgctgactgcacagggatgctgtaaggaagaagggagacagtgtctgcggtgcttacaagtggccgagggggaggcggtgccctggggctcagagaagcccagaatcttctcaggcctggctggaggggtggagggaaccagccgcactggtcctcctttctaaagtgtggggcagacctagaagagtagggcaggcctaggagagccggccaggcctttagaaaggtcttcaagctggccccacgcccagcaccatcttttgcagaggcccattcctacagccacccccggaaccctcccgcccctgcaggggacagctcaggactgtgggggcgggccacccgcctccgccctgggccagtgggggcaccttattgccgttgcagtacatggccaggaggcacagcaggtggaaggcatggctgcacttggtgaggtggcccacagctagggacccgattgccttgctgtcagtcacatcgctgtatccagacgctgtggacagcttctccatgcagatgatgcagtcctggaggagaccaaacatgggtcatgctcgccaacagtgggctgggctgacgtgggccagtcttggaaaaagaggctttcatgtgctgaaatgctggaagtgcagtcaaagtcaattccgaggccaggcgcagtggctcaggcctgtaatcccagcactctaggaggccgatcacttgaggtcaggaatttgaggccagcctggccaacacgggaaaaccccatctctactaagaatacaaaaattagctgggcgtgttggcaggtgcctataatcccagctactcgggaggctgaggcaagagaatcgcttgaactcagggggcagaggttgcagagctgagattgtgccactgcactccagcctgggtgacagagcgagactccgtctcagaaaaaaaaaaaaaaaagtccattccacaggctggagacacaggtgagtcaccgggacctgtgcctctgaagggcttaccagcagcacaggcccgacatgacagcagaagccaccaaatggggaggacggacagggca

SEQ ID NO: 546309 - DNA, 651 bp, Homo sapiens
gtagctcatcccctagctccctgtaaagcctggagctacttctctgtactctggcttaagtatttttgtccagtaagtgttgagaaaatcaaatggtcctgatatagctatatgactgctctccattatacatgaaccaggaaatagggaaggaagatagaaaaagtgtggtgggggttgggcctggtggctcacgcctgtaatctcagcacttcaggaggccaaggctggcggatcacttgaggtcaggaatttaagaccagcatgggcaacatggtgaaaccctgtctctacaaaaaataaaaaaaaaattatccagacatggtggtttgcgcctgtagtcccagatacttgggaggctgaggtgggaggatcacctgtgcctgggaggccaaggctgcagtgagctgagatcgcaccgctgaactccagcctgggtgtcagagtgaaaccctgtctcaaaaaaaaaaaaaaaaaaaaaaraaagaaaagaaaagaaaggaaaagaaaagaaaagaagaaaagaatggtggggaaaaaagggtgagaggataagaaacagttaaaacaataattaggatttgggaaatacagacgttactaaaaactgaagaaaaacaaagtattctaacccttaaaatgatggacaga

SEQ ID NO: 546310 - DNA, 651 bp, Homo sapiens
gtagctcatcccctagctccctgtaaagcctggagctacttctctgtactctggcttaagtatttttgtccagtaagtgttgagaaaatcaaatggtcctgatatagctatatgactgctctccattatacatgaaccaggaaatagggaaggaagatagaaaaagtgtggtgggggttgggcctggtggctcacgcctgtaatctcagcacttcaggaggccaaggctggcggatcacttgaggtcaggaatttaagaccagcatgggcaacatggtgaaaccctgtctctacaaaaaataaaaaaaaaattatccagacatggtggtttgcgcctgtagtcccagatacttgggaggctgaggtgggaggatcacctgtgcctgggaggccaaggctgcagtgagctgagatcgcaccgctgaactccagcctgggtgtcagagtgaaaccctgtctcaaaaaaaaaaaaaaaaaaaaaagaaagaaaagaaaagaaargaaaagaaaagaaaagaagaaaagaatggtggggaaaaaagggtgagaggataagaaacagttaaaacaataattaggatttgggaaatacagacgttactaaaaactgaagaaaaacaaagtattctaacccttaaaatgatggacaga

SEQ ID NO: 546311 - DNA, 651 bp, Homo sapiens
gtagctcatcccctagctccctgtaaagcctggagctacttctctgtactctggcttaagtatttttgtccagtaagtgttgagaaaatcaaatggtcctgatatagctatatgactgctctccattatacatgaaccaggaaatagggaaggaagatagaaaaagtgtggtgggggttgggcctggtggctcacgcctgtaatctcagcacttcaggaggccaaggctggcggatcacttgaggtcaggaatttaagaccagcatgggcaacatggtgaaaccctgtctctacaaaaaataaaaaaaaaattatccagacatggtggtttgcgcctgtagtcccagatacttgggaggctgaggtgggaggatcacctgtgcctgggaggccaaggctgcagtgagctgagatcgcaccgctgaactccagcctgggtgtcagagtgaaaccctgtctcaaaaaaaaaaaaaaaaaaaaaagaaagaaaagaaaagaaaggaaargaaaagaaaagaagaaaagaatggtggggaaaaaagggtgagaggataagaaacagttaaaacaataattaggatttgggaaatacagacgttactaaaaactgaagaaaaacaaagtattctaacccttaaaatgatggacaga

SEQ ID NO: 546312 - DNA, 664 bp, Homo sapiens
actgactgtagtattttgcctgtagtttaagcctactacaggcttaaacaacagaaatatattttctcacaattctggggattagaaatctgaaatcaaggtgttggcagggttgggtttttctgagacctctctctttgtcttatagatgcccatcttctccttgtgtattcacatggccttctgtatatgcctatgtcctaagttcctcttaaaaagacactagtcatagtggatcatgacttaatgtaatcaagttacctsattaaagaccctatctccaaaaacagtcacattttgagatagtgggagttacgacttcaacatatgaattttagggaaatgcaattcagcccataacattaagttagcttgagagttatatattgtattatactggattttttccctaagtagtaagctcttggctttctctaaccattttttatttgatttggttttttgttttttgaattttttttctatttacctttaatgtatctagaattattcactacaataaactaatgcttttagacacatgtcattttccttatgcctcaaattcaatgtttttagtatattagcacttatatttcctttctagtatattgaatttgcatggtatatattttccagtcttttttacttttagatttttaag

SEQ ID NO: 546313 - DNA, 1512 bp, Homo sapiens
gaataatattttctaatacatgaaaattatatgaaactcaaacttcaatgttcataaataaagttttcttggaacatagtcatgcctatccatttatgtattagctgtacatgctttagcactacaatgacagagttgagtgattgccatagagccggaatggtctgcaaagcttgctggacctttgcagaaatagtttgccaacccttggtctagggtggtcagcaagaatgttattggcctatggagcaagagatggtgcttgcacggaggccctgagtctgagcagtgagttcactcctgtggctctccaggaccttcttctcaggttctccaacaaagctcttgcagctctgaggacctggcttcagagctactttaaaactttcacaggacctagcctctcctactttactacatcaaactttactaaatatactacattgctaataaatgtaatttatatgtaactgtaagagtcgagttggaggacagttttctggttgagacaatactacattttgtagacatttaaatgaaagatgcacttatttagagaaatgtcacaattctggatctctcctggcttagccatccagaatcaaggactcaggaagcagacacttgcgttccaatcttgaccctatcatttactagcaaaataactattttgtgactcagtttcttcaactgtaacatgaagatggaaataacagtaccacagggatgctgaagagcaaatgagtcagtatgagagaagctctcagaatagagcctagggcatagcaagtaccatataggcatttggcaatattactacttttatttgtagttttcatttcatgtgttagaccctatccaatttttggttcagttctgaaacactttctttaaataagactatgaaaagtccatttgtgctgctgtgcggtggcacctagtggcttggacaagctctgccccatgtttagggagcagtgatttccctgctattttgaaggtgtgttttccatgggcttactgtttgtttggctcacctttatttgtcatcagagaagcatggcacctaatggttggattagagttttatcttttgggggaaagaactaggaaagccactgccttgttttgttctaaactttggtttggaactccctgaagtcagcctaattatcaggagaccatgttaaagaagtcacatgactggagcagaaaagagcctgtgtttgcttggcctgttcttcatattgaatgtggggttctgtaggttgtgtaggttcagaatcctgggttctagttgagatgttatcagtcaaaatctttattcactggatcacttgttatcactcaaaatgtttattcacaggatgtattctatagcaaaataatgtgatcaaccacctccatctttgaaggtagacatcttctatatctcactagcttaactgctcaggatggagascctgagtttttcactagactttccatgctcagactgggccatatattaac

SEQ ID NO: 546314 - DNA, 1241 bp, Homo sapiens
cctcctctggaagtcaatgtcctacctgtggcatttccactagttgaaggaggaagtcacagctcctccactaaaacatggaccacagaagaaaggacaccctggcagcttttagggaacttctgctgttgaacttaggttctaagtcaaaaagttgggcacacaggactctgctccatkgtgtcaatttcagccatggtgagataactggtggagcatggggtggatactgaaagaacaaggccaatggcagggtgggcaaacttcagcaaggagccagttagagtggtctctatagtctctatcatagctactcaactctgccattgttgggagaaaagagtaggctggatttggcacataggtcttagttttctgacctctgatttatatgataatgctctgatttctttataaaagctgtcctcccccaccattgaatggtgtttccagtggtgtttttttttttttttttttccccaggtgaatataaaggaacaggaaagagaaggtgggatgtttctggctgaaaaatagtactattgttttgtacaaatactgctattgctttgtacaaaactgttttcttctctcactatatgagttgaacatatacaaataggcactgacatcaattccttaaaaaattcaagtgcaaatgcaaatatgcatacagatatacaaagacttgtgcaacaccagatgtgtgttcttgaacatgtctgggcacacattagcacacgcatggaacacctctcaggaatccctttgactcgattcccacattggatatttcacccgactttctgaaatcacagctattcttagaaagtcctcaggcatccatgctctttacatggttctttgcttcacatgtggagagaaacatgagtgttgacaccagcaggagcaacattctatatgaaaggtaaaacttttttctatccctgctctgtttttacccatcttgtctgtgggcttccttgagcaatggctgagaaacagcagctttccacttcccctctgatatggtttgcctgtgtcaccactgaaatctcatcttgaattgtagttcccataatccccacgtgtcatggaagggacctggtgtgaggtaattgaatcatgctattctcatgattgtaagttctcaccagatcggatggttttgtaagaggcttcccccttttctcagccttcattcttctctgtcctgctgccctgtgaagaagaacatgttt

SEQ ID NO: 546315 - DNA, 426 bp, Homo sapiens
cagtttgtgctggaaatctgatccaagcacatggacagaactttctatgrttctcggctcctaagcttggcagcttgttttcagcgtattcttaaaaacctaggaaactggcaatcatacttctaagttaaaagattgggaaatcaggccagtgaataaatacttactttggatctgcactattgatgaaaaataaaaaatcactggaaaaaaatgagcccctttcttctatttttgctcaaagcagtccaaagaaaacaagttttggttcactgctgtctgtgagctcagtgttgaacaaattccagcaaaatcacagagaaagttggaaccagatttgcagcgctctatctcatacatgtttcttcttcttctttttttttaagagacagggtctcgctctggtgcccaggctggagtgcaatg

SEQ ID NO: 546316 - DNA, 426 bp, Homo sapiens
cagtttgtgctggaaatctgatccaagcacatggacagaactttctatggttctcggctcctaagcttggcrgcttgttttcagcgtattcttaaaaacctaggaaactggcaatcatacttctaagttaaaagattgggaaatcaggccagtgaataaatacttactttggatctgcactattgatgaaaaataaaaaatcactggaaaaaaatgagcccctttcttctatttttgctcaaagcagtccaaagaaaacaagttttggttcactgctgtctgtgagctcagtgttgaacaaattccagcaaaatcacagagaaagttggaaccagatttgcagcgctctatctcatacatgtttcttcttcttctttttttttaagagacagggtctcgctctggtgcccaggctggagtgcaatg

SEQ ID NO: 546317 - DNA, 813 bp, Homo sapiens
gggaaactccttaggtggccaataggctttttagaagagacatattaataatcaaacttaagttgtttgtattgctgtaagataaatatctttctttgcctcacaacttcaggagagcctgctatgcacatattaaggggagaaagcaaggttgtcatggaagagagagaagagatcastcataggaaaagtgatgcagtcaattttggaacaagaagtaatcttgagaatataagtgaaaccatgggctaaaatctgtatttcccaagtccttgggatatgggccatgagttaagattcttagattttatgtaagttttcaaggacaaggggacggggtaattcctttttttattttaagttccaggatacgtgcacaggatatgcaggtttgttacataggtaaacgtgtgccatggtggtttgctgcacagatcaacacagcaccaaggtgttaagccccacatgcattagctatttatcctgatgctctccctacctccacccccaccagcaggcctcagcgtgtgttgttcctctccttgtgtccatgtgttctcattgttcagctcccacttatgaataagaacatgtggtgtttggttttctgttcctgcattagtttgctgaggatatggcttccagctccatccatgtccctacaaaggacatgatctcattccttttcatagctgcttagtattccatggtatatatgtactacattttctttatctagtctgttattgatgggcattaggctgattccatgtctttgctattgtgaatagtgctgcaataaacatatgcgtg

SEQ ID NO: 546318 - DNA, 813 bp, Homo sapiens
gggaaactccttaggtggccaataggctttttagaagagacatattaataatcaaacttaagttgtttgtattgctgtaagataaatatctttctttgcctcacaacttcaggagagcctgctatgcacatattaaggggagaaagcaaggttgtcatggaagagagagaagagatcacycataggaaaagtgatgcagtcaattttggaacaagaagtaatcttgagaatataagtgaaaccatgggctaaaatctgtatttcccaagtccttgggatatgggccatgagttaagattcttagattttatgtaagttttcaaggacaaggggacggggtaattcctttttttattttaagttccaggatacgtgcacaggatatgcaggtttgttacataggtaaacgtgtgccatggtggtttgctgcacagatcaacacagcaccaaggtgttaagccccacatgcattagctatttatcctgatgctctccctacctccacccccaccagcaggcctcagcgtgtgttgttcctctccttgtgtccatgtgttctcattgttcagctcccacttatgaataagaacatgtggtgtttggttttctgttcctgcattagtttgctgaggatatggcttccagctccatccatgtccctacaaaggacatgatctcattccttttcatagctgcttagtattccatggtatatatgtactacattttctttatctagtctgttattgatgggcattaggctgattccatgtctttgctattgtgaatagtgctgcaataaacatatgcgtg

SEQ ID NO: 546319 - DNA, 813 bp, Homo sapiens
gggaaactccttaggtggccaataggctttttagaagagacatattaataatcaaacttaagttgtttgtattgctgtaagataaatatctttctttgcctcacaacttcaggagagcctgctatgcacatattaaggggagaaagcaaggttgtcatggaagagagagaagagatcactcataggaaaagtgatgcagtcaattttggaacaagaagtamtcttgagaatataagtgaaaccatgggctaaaatctgtatttcccaagtccttgggatatgggccatgagttaagattcttagattttatgtaagttttcaaggacaaggggacggggtaattcctttttttattttaagttccaggatacgtgcacaggatatgcaggtttgttacataggtaaacgtgtgccatggtggtttgctgcacagatcaacacagcaccaaggtgttaagccccacatgcattagctatttatcctgatgctctccctacctccacccccaccagcaggcctcagcgtgtgttgttcctctccttgtgtccatgtgttctcattgttcagctcccacttatgaataagaacatgtggtgtttggttttctgttcctgcattagtttgctgaggatatggcttccagctccatccatgtccctacaaaggacatgatctcattccttttcatagctgcttagtattccatggtatatatgtactacattttctttatctagtctgttattgatgggcattaggctgattccatgtctttgctattgtgaatagtgctgcaataaacatatgcgtg

SEQ ID NO: 546320 - DNA, 813 bp, Homo sapiens
gggaaactccttaggtggccaataggctttttagaagagacatattaataatcaaacttaagttgtttgtattgctgtaagataaatatctttctttgcctcacaacttcaggagagcctgctatgcacatattaaggggagaaagcaaggttgtcatggaagagagagaagagatcactcataggaaaagtgatgcagtcaattttggaacaagaagtaatcttgagaatataagtgaaaccatgggctaaaatctgtatttcccaagtccttgggatatgggccatgagttragattcttagattttatgtaagttttcaaggacaaggggacggggtaattcctttttttattttaagttccaggatacgtgcacaggatatgcaggtttgttacataggtaaacgtgtgccatggtggtttgctgcacagatcaacacagcaccaaggtgttaagccccacatgcattagctatttatcctgatgctctccctacctccacccccaccagcaggcctcagcgtgtgttgttcctctccttgtgtccatgtgttctcattgttcagctcccacttatgaataagaacatgtggtgtttggttttctgttcctgcattagtttgctgaggatatggcttccagctccatccatgtccctacaaaggacatgatctcattccttttcatagctgcttagtattccatggtatatatgtactacattttctttatctagtctgttattgatgggcattaggctgattccatgtctttgctattgtgaatagtgctgcaataaacatatgcgtg

SEQ ID NO: 546321 - DNA, 813 bp, Homo sapiens
gggaaactccttaggtggccaataggctttttagaagagacatattaataatcaaacttaagttgtttgtattgctgtaagataaatatctttctttgcctcacaacttcaggagagcctgctatgcacatattaaggggagaaagcaaggttgtcatggaagagagagaagagatcactcataggaaaagtgatgcagtcaattttggaacaagaagtaatcttgagaatataagtgaaaccatgggctaaaatctgtatttcccaagtccttgggatatgggccatgagttaagattcttagattttatgtaagttttcaaggacaaggggacggggtaattcctttttttattttaagttccaggatacgtgcacaggatatgcaggtttgttacataggtaaacgtgtgccatggtggtttgctgcacagatcaacacagcaccaaggtgttaakccccacatgcattagctatttatcctgatgctctccctacctccacccccaccagcaggcctcagcgtgtgttgttcctctccttgtgtccatgtgttctcattgttcagctcccacttatgaataagaacatgtggtgtttggttttctgttcctgcattagtttgctgaggatatggcttccagctccatccatgtccctacaaaggacatgatctcattccttttcatagctgcttagtattccatggtatatatgtactacattttctttatctagtctgttattgatgggcattaggctgattccatgtctttgctattgtgaatagtgctgcaataaacatatgcgtg

SEQ ID NO: 546322 - DNA, 813 bp, Homo sapiens
gggaaactccttaggtggccaataggctttttagaagagacatattaataatcaaacttaagttgtttgtattgctgtaagataaatatctttctttgcctcacaacttcaggagagcctgctatgcacatattaaggggagaaagcaaggttgtcatggaagagagagaagagatcactcataggaaaagtgatgcagtcaattttggaacaagaagtaatcttgagaatataagtgaaaccatgggctaaaatctgtatttcccaagtccttgggatatgggccatgagttaagattcttagattttatgtaagttttcaaggacaaggggacggggtaattcctttttttattttaagttccaggatacgtgcacaggatatgcaggtttgttacataggtaaacgtgtgccatggtggtttgctgcacagatcaacacagcaccaaggtgttaagccccacatgcattagctatttatcctgatgctctccctacctccacccccaccagcaggcctcagcgtgtgttgttcctctccttgtgtccatgtgttctcattgttcagctcccacttatgaataagaacatgtggtgtttggttttctgttcctgcattagtttgctgaggatatggcttcyagctccatccatgtccctacaaaggacatgatctcattccttttcatagctgcttagtattccatggtatatatgtactacattttctttatctagtctgttattgatgggcattaggctgattccatgtctttgctattgtgaatagtgctgcaataaacatatgcgtg

SEQ ID NO: 546323 - DNA, 898 bp, Homo sapiens
gacctcatgatccgcccacctcggcctcccaaagtgctgggattacaggcgtgagccaccacgtccagcctgtgtgtgtgtgtctctctcattagttctgtctctctggagaaccctgactctcatgatggatgtccctcacggggtccttttccggaagacaccacctatgttctttcctgtctatgcttggaacttgggtgcaaacctaggccggatctgggggactccctctgtgctccctggcccttcctgggatctcctgatttttgttctgtggctttgggttccttacatcagagtccagcacagtcagttagaaatgcgtgttgccttgcaagcggatactagtgcctgtacacctacagcatggatctgtgaaagtaacaggaatagtcacaaccactatttcatccagcgctcgccagggcccagggtgtgaccttcatgcagtaatataactcatttcatcttcacggctaccctgcgcagtggagactctctttgtccctggtttataggtgaggaaaccaaggcccagagggtagctcactccactgaggttgcacagccaggaggtggcagctttgtcccagagtcaggccataagcagggcaggcgcagcgggtccgagtttctcggcacagcactcacccttagctcaggcagtgcaccttggtggtctctctgacttaytatacagagaatgctgggtatgacttgccaaactcattcaccagaaactaacccactagggtaaaaacccttatgtcaggcttcaggctgtcactagcagcggcatttcctgccctggaaacctgacttcccccagctgcctgcatgcctcaggcaggcacggctcccttctgggctgctgctcattgtctgcatgttggag

SEQ ID NO: 546324 - DNA, 898 bp, Homo sapiens
gacctcatgatccgcccacctcggcctcccaaagtgctgggattacaggcgtgagccaccacgtccagcctgtgtgtgtgtgtctctctcattagttctgtctctctggagaaccctgactctcatgatggatgtccctcacggggtccttttccggaagacaccacctatgttctttcctgtctatgcttggaacttgggtgcaaacctaggccggatctgggggactccctctgtgctccctggcccttcctgggatctcctgatttttgttctgtggctttgggttccttacatcagagtccagcacagtcagttagaaatgcgtgttgccttgcaagcggatactagtgcctgtacacctacagcatggatctgtgaaagtaacaggaatagtcacaaccactatttcatccagcgctcgccagggcccagggtgtgaccttcatgcagtaatataactcatttcatcttcacggctaccctgcgcagtggagactctctttgtccctggtttataggtgaggaaaccaaggcccagagggtagctcactccactgaggttgcacagccaggaggtggcagctttgtcccagagtcaggccataagcagggcaggcgcagcgggtccgagtttctcggcacagcactcacccttagctcaggcagtgcaccttggtggtctctctgacttattatacagagaatgctgggtatgacttgccaaactcattcaccagaaactaacccactagggtaaaaacccttatgtcaggcttcaggctgtcactagcagcggsatttcctgccctggaaacctgacttcccccagctgcctgcatgcctcaggcaggcacggctcccttctgggctgctgctcattgtctgcatgttggag

SEQ ID NO: 546325 - DNA, 838 bp, Homo sapiens
ccacactggccctgcacatcttcttgaagggaagaaaacccaggtggagaaagtagaagctagacttgggagctggggtagatctccaccagcctgacccacccagcaactgtcctttctggtcttcactcttgctgtggttttcaaatctgcattcagcaactgaggcaaagcgcgtgtgcttggggatcttacacacccttccataatcagtgacagctgcaaccccgagtgttcgcctcccaccctgcccgtgcttatggttccttccctgccacccaagaagaagatgtaggaagctggaagtgaagaaaaagaaggctaggcagtggctagggagtcaaagakaaggaaggttcagacattttttgaataaaaattctaagccagatatttattctaatgcacaaaagagttaaggatgaatgcagttcttgtagatctggcaaatgatgctaccaaccctgagttaggagagctctgtccattcctggtttctgccccaacttcctttttctctcagtttcctcactctcgaacagagttaatagccggcatcacttttattttgcaaactcaagctggaaggaagagtgtttggatagttaaaatcttgatagagaagtgaggccgtggtgttgccaggactgtcatcagatggcagaggtgggaaagagccaacttttgcttccaaccgtccgtcatatcattccatgcttttcattggaattaaatcctctgtgttctagaacttctttagagtctcattctgcagggctcctcctcaaagtgttttttccaccagcaatccctacctgtccctgttccataagccccc

SEQ ID NO: 546326 - DNA, 1115 bp, Homo sapiens
ggcctgtttctgtgtatgcgtgtgtgtgtgtgtgtgcgtggtgtgtgtgtgtgttctttcaaacacactcacttcctcttctgccgctcactgccataatgctccaagaacccagcacaaggtttccattagtgaagcacatttttgtgctatggatgttgaaccagcggggaaagaaagcagactgttgtctgtgatggatgggttttctagagaacttcccagggtggtccttaagggggctgggacggaggcatgccggacgcacagcctcaaaacattcccttgtttgggtttgacatgtgtgctgggggtctgtctgctctgccgctgggccctgcaattccattcatccctgggccctcctttctgcctcgatccttcccttccccccaacatccctcacttccagtttacctgagttcagaaatccctttttctctttctagaataaaaagtagtttgtcccgtgtgcttgcttttggttgtgtatatggctgcccctaagaggaagggaaggttgggggaccggagctgatgtgatgtcacccgttactccttcatgtgaacagtctctgtgtatctcttcagagtgctgagcttctcacagacgttataagaatgattttccaggatcatcaccctatgggcgaatagagacaaggagagatgaggtggatgacccagaagcaacatctcccacartgcctggaatacaattagcatgtgtcggataaatgactaataaaaataactaggattctatggaaactgagtttataaatcactttccctctgctcagttagccccactgttttaaagcagaaggaaataagcctccaggagcttgagtgatttgtcacgtgaccattaagtggcagagtggggaagcaaatccagttcccagacttgaggttcccccaagatgtttacatcttatcaccgtgttaggggagcctggaaccactatccgaagaagggccactgccctcaaggtgctttcaacccagctggggagacagaagctgcagaggaaataatacagaacaattcagggaaatatcatacagaaacactttggggactccaaaggccccgggaagacaggactgca

SEQ ID NO: 546327 - DNA, 1115 bp, Homo sapiens
ggcctgtttctgtgtatgcgtgtgtgtgtgtgtgtgcgtggtgtgtgtgtgtgttctttcaaacacactcacttcctcttctgccgctcactgccataatgctccaagaacccagcacaaggtttccattagtgaagcacatttttgtgctatggatgttgaaccagcggggaaagaaagcagactgttgtctgtgatggatgggttttctagagaacttcccagggtggtccttaagggggctgggacggaggcatgccggacgcacagcctcaaaacattcccttgtttgggtttgacatgtgtgctgggggtctgtctgctctgccgctgggccctgcaattccattcatccctgggccctcctttctgcctcgatccttcccttccccccaacatccctcacttccagtttacctgagttcagaaatccctttttctctttctagaataaaaagtagtttgtcccgtgtgcttgcttttggttgtgtatatggctgcccctaagaggaagggaaggttgggggaccggagctgatgtgatgtcacccgttactccttcatgtgaacagtctctgtgtatctcttcagagtgctgagcttctcacagacgttataagaatgattttccaggatcatcaccctatgggcgaatagagacaaggagagatgaggtggatgacccagaagcaacatctcccacaatgcctggaatacaattagcatgtgtcggataaatgactaataaaaataacyaggattctatggaaactgagtttataaatcactttccctctgctcagttagccccactgttttaaagcagaaggaaataagcctccaggagcttgagtgatttgtcacgtgaccattaagtggcagagtggggaagcaaatccagttcccagacttgaggttcccccaagatgtttacatcttatcaccgtgttaggggagcctggaaccactatccgaagaagggccactgccctcaaggtgctttcaacccagctggggagacagaagctgcagaggaaataatacagaacaattcagggaaatatcatacagaaacactttggggactccaaaggccccgggaagacaggactgca

SEQ ID NO: 546328 - DNA, 981 bp, Homo sapiens
catctttggtatcattccattgccttttgctgtggaggtgcttaggcctgtgaaaactgtctccatgagaaagatttccccttcatcccccatttgctccaactaggggatccctttggcagaatcctgaactaaagctgtatgtgtgcttctgaaatctgtggccctaggggcctggtaaggaccaatctctctgcatttacttctcaagacactgtcatagattttgaaaagtgccaatcccttgaatactatttattcttgtgacatctttttcygcaattgtggaatattgttctagtgttttatttctcttgactttcccctatttctttcaggaaggcccagttttgtgtcagtttaacctttcgttcaagtcagtccatttatttcatataaaaccagttttattttccaataattgttttttcttaacataatcctctagatttttttctgatgggatttcccataatgagagatataaaatcattaattctgtgtctgttcaaagcaatcgctgttcagccaagccttgcccatcttcaccttgttgagctggaaactcccaccaggaggtcttccatctgtctagcactgatcccaggcctggacttgttctgtttttgtcctctctggctacactttaatatatctcgtctttcctgtgcttgcctttagagaccaaattccatgaatttctcaggtattcccttaggcacaggcatttcctgggtcacaagaaagttcacacaatgatttttttttctagtattttacactgatctttctggtctttcattctaaatctgtctacacttttgtaagcactttagttatcatcccattgtgagactgagcaggatccgaagtttgaatatattcaaacttcagcttaattttaaaacttcagattttggactttgattttagattttcatatctttgatctctcacctctgaaaggatttaaatttgggg

SEQ ID NO: 546329 - DNA, 981 bp, Homo sapiens
catctttggtatcattccattgccttttgctgtggaggtgcttaggcctgtgaaaactgtctccatgagaaagatttccccttcatcccccatttgctccaactaggggatccctttggcagaatcctgaactaaagctgtatgtgtgcttctgaaatctgtggccctaggggcctggtaaggaccaatctctctgcatttacttctcaagacactgtcatagattttgaaaagtgccaatcccttgaatactatttattcttgtgacatctttttctgcaattgtggaatattgttctagtgttttatttctcttgactttcccctatttctttcaggaaggcccagttttgtgtcagtttaacctttcgttcaagtcrgtccatttatttcatataaaaccagttttattttccaataattgttttttcttaacataatcctctagatttttttctgatgggatttcccataatgagagatataaaatcattaattctgtgtctgttcaaagcaatcgctgttcagccaagccttgcccatcttcaccttgttgagctggaaactcccaccaggaggtcttccatctgtctagcactgatcccaggcctggacttgttctgtttttgtcctctctggctacactttaatatatctcgtctttcctgtgcttgcctttagagaccaaattccatgaatttctcaggtattcccttaggcacaggcatttcctgggtcacaagaaagttcacacaatgatttttttttctagtattttacactgatctttctggtctttcattctaaatctgtctacacttttgtaagcactttagttatcatcccattgtgagactgagcaggatccgaagtttgaatatattcaaacttcagcttaattttaaaacttcagattttggactttgattttagattttcatatctttgatctctcacctctgaaaggatttaaatttgggg

SEQ ID NO: 546330 - DNA, 1195 bp, Homo sapiens
acagaggcatgtgtcagccctgcctgttaagaaagtgtgagcacacaccgggcatagtggctcatacctgtaatcccagactttgaggcaggaagatttcttgagtccaggagttcaagaccagcctagacaatgtagtgagaccctcctcactacaaaaattaaaaaaaaattagccaggcmtggtggcatacacctgtaatcccaactactcaggaggccaaggtaagaggatcacttgagcccaggaggctgaggctgcagcgggctatagtggtgccactgcactccaggctgggcaacagagcgagactctaagaaaaaaaagaaagaaagtatgagcacaacctgtgggcaagaggagaggcatctggccagtgtccagtggccagcttgagtctggagtcccagactcagaagcagaggggcactgaaggcatgaagtagggatggtcacaatgccatgtgtgagaggaagagccattcctgtggccctaaatccaataactggtgtctttataggaagagagatacagagacacagaggagacagacacacagagaaggccttgggaagacagaggcagagcctggagtgatgctgctacaagccgaggaacccaagactgaaggcatgggatgcttctccttcagagcctccagaaggaacctaccctgcctacaccctgatcttggacttgcaccctccagaactatgaggcaatacgtgtttttgctgttttaagctgccctgttttttgtactttgttacagcaacaatacacctttgaaatgtacacctttgaaatttttgcatatgccagcatgtgacatgctaaaaagagtccacctagcacagcaggagtctctagggcttcatctccaatgccttggtttcatcccccgcccctccctgccgcccccccgccccacacccagtccccaggtggaatggagacaggagtggcacgtgcagagggcaaacacgtgcctgctgagtgagagatgacacctgaagccccggaatgcagtctgtagggaacccttgcggtcaggaggctggccagccccagcgctgcctctcagggggcctctcattgttatcaggctattttaaaaacttccccaccttctctgggatggactttaagattgcactcattcccagggtcttaactccaaggaaattcataaa

SEQ ID NO: 546331 - DNA, 1195 bp, Homo sapiens
acagaggcatgtgtcagccctgcctgttaagaaagtgtgagcacacaccgggcatagtggctcatacctgtaatcccagactttgaggcaggaagatttcttgagtccaggagttcaagaccagcctagacaatgtagtgagaccctcctcactacaaaaattaaaaaaaaattagccaggcctggtggcatacacctgtaatcccaactactcaggaggccaaggtaagaggatcacttgagcccaggaggctgaggctgcagcgggctatagtggtgccactgcactccaggctgggcaacagagcgagactctaagaaaaaaaagaaagaaagtatgagcacaacctgtgggcaagaggagaggcatctggccagtgtccagtggccagcttgagtctggagtcccagactcagaarcagaggggcactgaaggcatgaagtagggatggtcacaatgccatgtgtgagaggaagagccattcctgtggccctaaatccaataactggtgtctttataggaagagagatacagagacacagaggagacagacacacagagaaggccttgggaagacagaggcagagcctggagtgatgctgctacaagccgaggaacccaagactgaaggcatgggatgcttctccttcagagcctccagaaggaacctaccctgcctacaccctgatcttggacttgcaccctccagaactatgaggcaatacgtgtttttgctgttttaagctgccctgttttttgtactttgttacagcaacaatacacctttgaaatgtacacctttgaaatttttgcatatgccagcatgtgacatgctaaaaagagtccacctagcacagcaggagtctctagggcttcatctccaatgccttggtttcatcccccgcccctccctgccgcccccccgccccacacccagtccccaggtggaatggagacaggagtggcacgtgcagagggcaaacacgtgcctgctgagtgagagatgacacctgaagccccggaatgcagtctgtagggaacccttgcggtcaggaggctggccagccccagcgctgcctctcagggggcctctcattgttatcaggctattttaaaaacttccccaccttctctgggatggactttaagattgcactcattcccagggtcttaactccaaggaaattcataaa

SEQ ID NO: 546332 - DNA, 2720 bp, Homo sapiens
gtactagggccagctatgttttgagtcaaaattagtcttgtttgtggattaaacagatattggacagctagaggacggaaagacactcaattaaaagggcataagagaacagtcttccagctattaccaatgaatagctatggttctgtaacatagcattagccgactcaagaatgattttcttccttttatttctgtgattaaaatagggaatgattaggatgatgactgctaacatccaagttaaaaggagttacttcctcacttcctactgattctgcaaagggtacacttttgggagggaagggcattatactttgcatcaccagtcacaggtagattgatggtgcaaagaataacacctatatccacccttccatcctacctccacccttccaaacctttccatcctatatccacacttccaaaaatgtcaaggaacgaatacctctgtgacatctgcaaagaaaaattctactgatcaaagactgttccacggtgtgatttggaggaaagatcatccccatcactaaacagataagtaaattccctttttattccagaaataaccccctccaaaagttattctctatcttgaacacaaatcaagggcatagttggtaaaaatgataaaagctcattctgttcagattctggagacacactcaatccctgcttactcttctcacaccactggagctaaagaagttggtctataccctcctgggggtgacagcatctcaatgagaagcattgccttgagaactaatgtccagaattcgctgttggttccactagaccttagatccagaattccaaccctattcaattcagtagtaccccaagcaggtattactaaaaacacactctacaatgcagccaagcacagaggcatacaggcgtattcaggtgctatctgcttagagacctaagaccttgcttcagctgtaccagcagagacagtaagcaacatacagggacattaacaacatgtgctcgaagtcagagttcttgggtttaaatctcaattttgcagtttcccagaagtgcaactcagacaacagctctcacctgactgagtttcaggttttcagcctgtaaactggagataacaaaaatgacgcagtatctagcataggacatgtatgtggtttgtcacaaaatcatgtatgtacaatagtatgtatgatgcatggaccttatttgtttaaaatccttgctacccaaagtgtggtccatgacttggtagcatcccatcacttgcagttcagcagaaaagcagaatctcaggctctaacccagaacttccaaatctgaatctatatttgaacaagatctcctaagcaattcttttaacaagatttcccaagcatcaactctacatgactcatatgcacaacataacttgataaacatcgctataaaaaaaccgttcacaccattctgataagcattgttgaccacaaacattttctccataaatttcaacaacatagagatacattattaagacacagtaattttactgtttgtaaactgaatgagagcttcacatctcacctggatgctgcacgcagctaagagttacatcaagtcacaaagtggaacatgtgagccatgttagcagagttccaggtgccttacagatgcttgtttatagacagaaaaggttgaagtacgcaaaatgcaccaacgcttaacactgttcattttttctttagcaagatatcaaaacttagaaaattttaggacaggaaagcatgggtaagctagactgaaaagcttatctgaagatgtgaagttctaccagtatttcctaaagatctttctagattagaaacaatagcataataattttggagttcctccacatataggtaaatgttcttaattctagacaatcagatgacgataaatggagaatggtcttaatatgccatttcatatgtatcacatatatgtatgcttatatgtgtgtgtgcttttatgtatatatgcatacatactctgagctggcgatctgcaagattttcactttcctgttctgattacacatttagtcattcatcaaatgtttactaaagtctaactatgaatcaggcactgccctgtgttagcagttgtgagaatgatgctagatgagcctcatgaacctgtgaataatctagtatttggtattgcagccctaacacctagcatcatctttgacacatgacatgtcctcaaaacacatccattggctaatttaataaatatcatattggcawacaccaatgataatacaggattcttagcaagtttgtttcctactgggaaaacaacgaagatcacttcaagtccgaacaaatagacaagatagagctggcaacaccatgactatttttggtggcactcgttggccattttaaatagtcattagtcactgtgttcccctaacccacttcaacttgaaaacagtaagttcacaaagttcattcttggaggctgaatttgcattcaaatggagttttttgtgcctgtcgttggtaatgatcaaatgactctgaatacccttgggtgaggtgtgccttctttggtttgccatgaactatgctgttcccttatcattttatacccagcccaactcaaaatctgtagatctctgtaggcatttgagtttcagactcacctaaaaccccaactaattcactcttgattgattcctttaaatatatccttca

SEQ ID NO: 546333 - DNA, 2720 bp, Homo sapiens
gtactagggccagctatgttttgagtcaaaattagtcttgtttgtggattaaacagatattggacagctagaggacggaaagacactcaattaaaagggcataagagaacagtcttccagctattaccaatgaatagctatggttctgtaacatagcattagccgactcaagaatgattttcttccttttatttctgtgattaaaatagggaatgattaggatgatgactgctaacatccaagttaaaaggagttacttcctcacttcctactgattctgcaaagggtacacttttgggagggaagggcattatactttgcatcaccagtcacaggtagattgatggtgcaaagaataacacctatatccacccttccatcctacctccacccttccaaacctttccatcctatatccacacttccaaaaatgtcaaggaacgaatacctctgtgacatctgcaaagaaaaattctactgatcaaagactgttccacggtgtgatttggaggaaagatcatccccatcactaaacagataagtaaattccctttttattccagaaataaccccctccaaaagttattctctatcttgaacacaaatcaagggcatagttggtaaaaatgataaaagctcattctgttcagattctggagacacactcaatccctgcttactcttctcacaccactggagctaaagaagttggtctataccctcctgggggtgacagcatctcaatgagaagcattgccttgagaactaatgtccagaattcgctgttggttccactagaccttagatccagaattccaaccctattcaattcagtagtaccccaagcaggtattactaaaaacacactctacaatgcagccaagcacagaggcatacaggcgtattcaggtgctatctgcttagagacctaagaccttgcttcagctgtaccagcagagacagtaagcaacatacagggacattaacaacatgtgctcgaagtcagagttcttgggtttaaatctcaattttgcagtttcccagaagtgcaactcagacaacagctctcacctgactgagtttcaggttttcagcctgtaaactggagataacaaaaatgacgcagtatctagcataggacatgtatgtggtttgtcacaaaatcatgtatgtacaatagtatgtatgatgcatggaccttatttgtttaaaatccttgctacccaaagtgtggtccatgacttggtagcatcccatcacttgcagttcagcagaaaagcagaatctcaggctctaacccagaacttccaaatctgaatctatatttgaacaagatctcctaagcaattcttttaacaagatttcccaagcatcaactctacatgactcatatgcacaacataacttgataaacatcgctataaaaaaaccgttcacaccattctgataagcattgttgaccacaaacattttctccataaatttcaacaacatagagatacattattaagacacagtaattttactgtttgtaaactgaatgagagcttcacatctcacctggatgctgcacgcagctaagagttacatcaagtcacaaagtggaacatgtgagccatgttagcagagttccaggtgccttacagatgcttgtttatagacagaaaaggttgaagtacgcaaaatgcaccaacgcttaacactgttcattttttctttagcaagatatcaaaacttagaaaattttaggacaggaaagcatgggtaagctagactgaaaagcttatctgaagatgtgaagttctaccagtatttcctaaagatctttctagattagaaacaatagcataataattttggagttcctccacatataggtaaatgttcttaattctagacaatcagatgacgataaatggagaatggtcttaatatgccatttcatatgtatcacatatatgtatgcttatatgtgtgtgtgcttttatgtatatatgcatacatactctgagctggcgatctgcaagattttcactttcctgttctgattacacatttagtcattcatcaaatgtttactaaagtctaactatgaatcaggcactgccctgtgttagcagttgtgagaatgatgctagatgagcctcatgaacctgtgaataatctagtatttggtattgcagccctaacacctagcatcatctttgacacatgacatgtcctcaaaacacatccattggctaatttaataaatatcatattggcaaacaccaatgataatacaggattcttagcaagtttgtttcctactgggaaaacaacgaagatcacttcaagtcygaacaaatagacaagatagagctggcaacaccatgactatttttggtggcactcgttggccattttaaatagtcattagtcactgtgttcccctaacccacttcaacttgaaaacagtaagttcacaaagttcattcttggaggctgaatttgcattcaaatggagttttttgtgcctgtcgttggtaatgatcaaatgactctgaatacccttgggtgaggtgtgccttctttggtttgccatgaactatgctgttcccttatcattttatacccagcccaactcaaaatctgtagatctctgtaggcatttgagtttcagactcacctaaaaccccaactaattcactcttgattgattcctttaaatatatccttca

SEQ ID NO: 546334 - DNA, 2720 bp, Homo sapiens
gtactagggccagctatgttttgagtcaaaattagtcttgtttgtggattaaacagatattggacagctagaggacggaaagacactcaattaaaagggcataagagaacagtcttccagctattaccaatgaatagctatggttctgtaacatagcattagccgactcaagaatgattttcttccttttatttctgtgattaaaatagggaatgattaggatgatgactgctaacatccaagttaaaaggagttacttcctcacttcctactgattctgcaaagggtacacttttgggagggaagggcattatactttgcatcaccagtcacaggtagattgatggtgcaaagaataacacctatatccacccttccatcctacctccacccttccaaacctttccatcctatatccacacttccaaaaatgtcaaggaacgaatacctctgtgacatctgcaaagaaaaattctactgatcaaagactgttccacggtgtgatttggaggaaagatcatccccatcactaaacagataagtaaattccctttttattccagaaataaccccctccaaaagttattctctatcttgaacacaaatcaagggcatagttggtaaaaatgataaaagctcattctgttcagattctggagacacactcaatccctgcttactcttctcacaccactggagctaaagaagttggtctataccctcctgggggtgacagcatctcaatgagaagcattgccttgagaactaatgtccagaattcgctgttggttccactagaccttagatccagaattccaaccctattcaattcagtagtaccccaagcaggtattactaaaaacacactctacaatgcagccaagcacagaggcatacaggcgtattcaggtgctatctgcttagagacctaagaccttgcttcagctgtaccagcagagacagtaagcaacatacagggacattaacaacatgtgctcgaagtcagagttcttgggtttaaatctcaattttgcagtttcccagaagtgcaactcagacaacagctctcacctgactgagtttcaggttttcagcctgtaaactggagataacaaaaatgacgcagtatctagcataggacatgtatgtggtttgtcacaaaatcatgtatgtacaatagtatgtatgatgcatggaccttatttgtttaaaatccttgctacccaaagtgtggtccatgacttggtagcatcccatcacttgcagttcagcagaaaagcagaatctcaggctctaacccagaacttccaaatctgaatctatatttgaacaagatctcctaagcaattcttttaacaagatttcccaagcatcaactctacatgactcatatgcacaacataacttgataaacatcgctataaaaaaaccgttcacaccattctgataagcattgttgaccacaaacattttctccataaatttcaacaacatagagatacattattaagacacagtaattttactgtttgtaaactgaatgagagcttcacatctcacctggatgctgcacgcagctaagagttacatcaagtcacaaagtggaacatgtgagccatgttagcagagttccaggtgccttacagatgcttgtttatagacagaaaaggttgaagtacgcaaaatgcaccaacgcttaacactgttcattttttctttagcaagatatcaaaacttagaaaattttaggacaggaaagcatgggtaagctagactgaaaagcttatctgaagatgtgaagttctaccagtatttcctaaagatctttctagattagaaacaatagcataataattttggagttcctccacatataggtaaatgttcttaattctagacaatcagatgacgataaatggagaatggtcttaatatgccatttcatatgtatcacatatatgtatgcttatatgtgtgtgtgcttttatgtatatatgcatacatactctgagctggcgatctgcaagattttcactttcctgttctgattacacatttagtcattcatcaaatgtttactaaagtctaactatgaatcaggcactgccctgtgttagcagttgtgagaatgatgctagatgagcctcatgaacctgtgaataatctagtatttggtattgcagccctaacacctagcatcatctttgacacatgacatgtcctcaaaacacatccattggctaatttaataaatatcatattggcaaacaccaatgataatacaggattcttagcaagtttgtttcctactgggaaaacaacgaagatcacttcaagtccgaacaaatagacaagayagagctggcaacaccatgactatttttggtggcactcgttggccattttaaatagtcattagtcactgtgttcccctaacccacttcaacttgaaaacagtaagttcacaaagttcattcttggaggctgaatttgcattcaaatggagttttttgtgcctgtcgttggtaatgatcaaatgactctgaatacccttgggtgaggtgtgccttctttggtttgccatgaactatgctgttcccttatcattttatacccagcccaactcaaaatctgtagatctctgtaggcatttgagtttcagactcacctaaaaccccaactaattcactcttgattgattcctttaaatatatccttca

SEQ ID NO: 546335 - DNA, 2720 bp, Homo sapiens
gtactagggccagctatgttttgagtcaaaattagtcttgtttgtggattaaacagatattggacagctagaggacggaaagacactcaattaaaagggcataagagaacagtcttccagctattaccaatgaatagctatggttctgtaacatagcattagccgactcaagaatgattttcttccttttatttctgtgattaaaatagggaatgattaggatgatgactgctaacatccaagttaaaaggagttacttcctcacttcctactgattctgcaaagggtacacttttgggagggaagggcattatactttgcatcaccagtcacaggtagattgatggtgcaaagaataacacctatatccacccttccatcctacctccacccttccaaacctttccatcctatatccacacttccaaaaatgtcaaggaacgaatacctctgtgacatctgcaaagaaaaattctactgatcaaagactgttccacggtgtgatttggaggaaagatcatccccatcactaaacagataagtaaattccctttttattccagaaataaccccctccaaaagttattctctatcttgaacacaaatcaagggcatagttggtaaaaatgataaaagctcattctgttcagattctggagacacactcaatccctgcttactcttctcacaccactggagctaaagaagttggtctataccctcctgggggtgacagcatctcaatgagaagcattgccttgagaactaatgtccagaattcgctgttggttccactagaccttagatccagaattccaaccctattcaattcagtagtaccccaagcaggtattactaaaaacacactctacaatgcagccaagcacagaggcatacaggcgtattcaggtgctatctgcttagagacctaagaccttgcttcagctgtaccagcagagacagtaagcaacatacagggacattaacaacatgtgctcgaagtcagagttcttgggtttaaatctcaattttgcagtttcccagaagtgcaactcagacaacagctctcacctgactgagtttcaggttttcagcctgtaaactggagataacaaaaatgacgcagtatctagcataggacatgtatgtggtttgtcacaaaatcatgtatgtacaatagtatgtatgatgcatggaccttatttgtttaaaatccttgctacccaaagtgtggtccatgacttggtagcatcccatcacttgcagttcagcagaaaagcagaatctcaggctctaacccagaacttccaaatctgaatctatatttgaacaagatctcctaagcaattcttttaacaagatttcccaagcatcaactctacatgactcatatgcacaacataacttgataaacatcgctataaaaaaaccgttcacaccattctgataagcattgttgaccacaaacattttctccataaatttcaacaacatagagatacattattaagacacagtaattttactgtttgtaaactgaatgagagcttcacatctcacctggatgctgcacgcagctaagagttacatcaagtcacaaagtggaacatgtgagccatgttagcagagttccaggtgccttacagatgcttgtttatagacagaaaaggttgaagtacgcaaaatgcaccaacgcttaacactgttcattttttctttagcaagatatcaaaacttagaaaattttaggacaggaaagcatgggtaagctagactgaaaagcttatctgaagatgtgaagttctaccagtatttcctaaagatctttctagattagaaacaatagcataataattttggagttcctccacatataggtaaatgttcttaattctagacaatcagatgacgataaatggagaatggtcttaatatgccatttcatatgtatcacatatatgtatgcttatatgtgtgtgtgcttttatgtatatatgcatacatactctgagctggcgatctgcaagattttcactttcctgttctgattacacatttagtcattcatcaaatgtttactaaagtctaactatgaatcaggcactgccctgtgttagcagttgtgagaatgatgctagatgagcctcatgaacctgtgaataatctagtatttggtattgcagccctaacacctagcatcatctttgacacatgacatgtcctcaaaacacatccattggctaatttaataaatatcatattggcaaacaccaatgataatacaggattcttagcaagtttgtttcctactgggaaaacaacgaagatcacttcaagtccgaacaaatagacaagatagagctggcaacaccatgactatttttggtggcactcgttggccattttaaatagtcattagtcactgtgttcccctaacccayttcaacttgaaaacagtaagttcacaaagttcattcttggaggctgaatttgcattcaaatggagttttttgtgcctgtcgttggtaatgatcaaatgactctgaatacccttgggtgaggtgtgccttctttggtttgccatgaactatgctgttcccttatcattttatacccagcccaactcaaaatctgtagatctctgtaggcatttgagtttcagactcacctaaaaccccaactaattcactcttgattgattcctttaaatatatccttca

SEQ ID NO: 546336 - DNA, 2720 bp, Homo sapiens
gtactagggccagctatgttttgagtcaaaattagtcttgtttgtggattaaacagatattggacagctagaggacggaaagacactcaattaaaagggcataagagaacagtcttccagctattaccaatgaatagctatggttctgtaacatagcattagccgactcaagaatgattttcttccttttatttctgtgattaaaatagggaatgattaggatgatgactgctaacatccaagttaaaaggagttacttcctcacttcctactgattctgcaaagggtacacttttgggagggaagggcattatactttgcatcaccagtcacaggtagattgatggtgcaaagaataacacctatatccacccttccatcctacctccacccttccaaacctttccatcctatatccacacttccaaaaatgtcaaggaacgaatacctctgtgacatctgcaaagaaaaattctactgatcaaagactgttccacggtgtgatttggaggaaagatcatccccatcactaaacagataagtaaattccctttttattccagaaataaccccctccaaaagttattctctatcttgaacacaaatcaagggcatagttggtaaaaatgataaaagctcattctgttcagattctggagacacactcaatccctgcttactcttctcacaccactggagctaaagaagttggtctataccctcctgggggtgacagcatctcaatgagaagcattgccttgagaactaatgtccagaattcgctgttggttccactagaccttagatccagaattccaaccctattcaattcagtagtaccccaagcaggtattactaaaaacacactctacaatgcagccaagcacagaggcatacaggcgtattcaggtgctatctgcttagagacctaagaccttgcttcagctgtaccagcagagacagtaagcaacatacagggacattaacaacatgtgctcgaagtcagagttcttgggtttaaatctcaattttgcagtttcccagaagtgcaactcagacaacagctctcacctgactgagtttcaggttttcagcctgtaaactggagataacaaaaatgacgcagtatctagcataggacatgtatgtggtttgtcacaaaatcatgtatgtacaatagtatgtatgatgcatggaccttatttgtttaaaatccttgctacccaaagtgtggtccatgacttggtagcatcccatcacttgcagttcagcagaaaagcagaatctcaggctctaacccagaacttccaaatctgaatctatatttgaacaagatctcctaagcaattcttttaacaagatttcccaagcatcaactctacatgactcatatgcacaacataacttgataaacatcgctataaaaaaaccgttcacaccattctgataagcattgttgaccacaaacattttctccataaatttcaacaacatagagatacattattaagacacagtaattttactgtttgtaaactgaatgagagcttcacatctcacctggatgctgcacgcagctaagagttacatcaagtcacaaagtggaacatgtgagccatgttagcagagttccaggtgccttacagatgcttgtttatagacagaaaaggttgaagtacgcaaaatgcaccaacgcttaacactgttcattttttctttagcaagatatcaaaacttagaaaattttaggacaggaaagcatgggtaagctagactgaaaagcttatctgaagatgtgaagttctaccagtatttcctaaagatctttctagattagaaacaatagcataataattttggagttcctccacatataggtaaatgttcttaattctagacaatcagatgaygataaatggagaatggtcttaatatgccatttcatatgtatcacatatatgtatgcttatatgtgtgtgtgcttttatgtatatatgcatacatactctgagctggcgatctgcaagattttcactttcctgttctgattacacatttagtcattcatcaaatgtttactaaagtctaactatgaatcaggcactgccctgtgttagcagttgtgagaatgatgctagatgagcctcatgaacctgtgaataatctagtatttggtattgcagccctaacacctagcatcatctttgacacatgacatgtcctcaaaacacatccattggctaatttaataaatatcatattggcaaacaccaatgataatacaggattcttagcaagtttgtttcctactgggaaaacaacgaagatcacttcaagtccgaacaaatagacaagatagagctggcaacaccatgactatttttggtggcactcgttggccattttaaatagtcattagtcactgtgttcccctaacccacttcaacttgaaaacagtaagttcacaaagttcattcttggaggctgaatttgcattcaaatggagttttttgtgcctgtcgttggtaatgatcaaatgactctgaatacccttgggtgaggtgtgccttctttggtttgccatgaactatgctgttcccttatcattttatacccagcccaactcaaaatctgtagatctctgtaggcatttgagtttcagactcacctaaaaccccaactaattcactcttgattgattcctttaaatatatccttca

SEQ ID NO: 546337 - DNA, 1668 bp, Homo sapiens
atgttcatctgtgaactatgtccaggctcaagatgagctggaagtgcaattttttttccacttgctgctttatcccttctgtgcattcctcttgctatcatttagcacctggaaaaatgtagaattcaagatcagaaagacaactggagctcatgccccacacacccccaccatcacatgcaaatgaaattactgaggcctggagtgcttaagactctttcccaaatcctgtcactaataaaacgagagctggagattgggaatcctgacttgagccggtgctgttattaccctttttctaatcatcagtgcacccaaggaaaaagaagtttcccaattttatttatttcagtaagtatttactgtcattgtctactcttcatcctagtagcaaaaaaataaaatttgcaagtggaaactaatcatcaccgttgtggtcttagctgaattgttctttacagatctaaagagagaccacagaaagatctgaatggcagcatgccttaagaacaagattgacccagcttacttgtctcagggccaagtatatggcagaactcagtcatctaaaggagagactgaccccggggaaaggcagcccacattgccagagcttctgattttttcaagagaacctggcagttggagtcttgtatgaaatagcttgatgtatacaactaaaggatttaagggaatctgtttcttaaaatttaatatgaaggccaccatctcctgcacaaaacaaaaatctttttgtgttatcaaaatggactgttgatttaagaaccttgctcttgctttagatcagagccctcaaacacattggaatgattcggagagctttagaaaacatgcatgccttagccccactccacactccatgattctgagcctcttggggtaggctctgggcatcagcacttgagaaagcccccccgggcagccgctatgtgcagctgggggttatgcaccactaggctgactgtagtgtgaacattgaggatcctaccccaatcctcttctttcccatgggtaaggacatctggactgtgattgctggacatcaggatggccttaatattagggttaacatctgratcattggctgccttttttatttctcgtcctgctgtttgggtactttatagacatagacagttgtccatgtgaccccatttgcctcgagttgcttctgtagagttttgatcccacactttgtgatgtgtctcagctctggggcgagggggctgttcagtgaagttggtttgtggcttcttccctctgatctccttttcttctcccagccttgggggttctgcagctaactgtggtcctttcatgtagctgcctttggtctgctggggactttgaaggtttgcctttgaaacacccagatccctttttggttccttcctctaccccatctgcttctctccactccccttactgttggcagcatcccctcgccttggcagtccagcttttgagagtcactgtgatcaacccagcaattcctactggggaaaaaaaaaagaaaaagtagggagccatgataggtgcaccatgtctatcaaagccatcaaaatggctattttagaaaaaaacctcaataaatattattgttgatcttgttacacatgataacagcattttcttatttttttaatt

SEQ ID NO: 546338 - DNA, 1668 bp, Homo sapiens
atgttcatctgtgaactatgtccaggctcaagatgagctggaagtgcaattttttttccacttgctgctttatcccttctgtgcattcctcttgctatcatttagcacctggaaaaatgtagaattcaagatcagaaagacaactggagctcatgccccacacacccccaccatcacatgcaaatgaaattactgaggcctggagtgcttaagactctttcccaaatcctgtcactaataaaacgagagctggagattgggaatcctgacttgagccggtgctgttattaccctttttctaatcatcagtgcacccaaggaaaaagaagtttcccaattttatttatttcagtaagtatttactgtcattgtctactcttcatcctagtagcaaaaaaataaaatttgcaagtggaaactaatcatcaccgttgtggtcttagctgaattgttctttacagatctaaagagagaccacagaaagatctgaatggcagcatgccttaagaacaagattgacccagcttacttgtctcagggccaagtatatggcagaactcagtcatctaaaggagagactgaccccggggaaaggcagcccacattgccagagcttctgattttttcaagagaacctggcagttggagtcttgtatgaaatagcttgatgtatacaactaaaggatttaagggaatctgtttcttaaaatttaatatgaaggccaccatctcctgcacaaaacaaaaatctttttgtgttatcaaaatggactgttgatttaagaaccttgctcttgctttagatcagagccctcaaacacattggaatgattcggagagctttagaaaacatgcatgccttagccccactccacactccatgattctgagcctcttggggtaggctctgggcatcagcacttgagaaagcccccccgggcagccgctatgtgcagctgggggttatgcaccactaggctgactgtagtgtgaacattgaggatcctaccccaatcctcttctttcccatgggtaaggacatctggactgtgattgctggacatcaggatggccttaatattagggttaacatctgaatcattggctgccttttttatttctcgtcctgctgtttgggtactttatagacatagacagttgtccatgtgaccccatttgcctcgagttgcttctgtagagttttgatcccacactttgtgatgtgtctcagctctggggcgagggggctgttcagtgaagttggtttgtggcttcttccctctgatctccttttcttctcccagccttgggggttctgcagctaactgtggtcctttcatgtagctgcctttggtctgctggggactttgaaggtttgcctttgaaacacccagatccctttttggttccttcctctaccccatctgcttctctccactccccttactgttggcagcatcccctcgccttggcagtccagcttttgagagtcactgtgatcaacccagcaattcctactggggaaaaaaaaaagaaaaagtagggagccatgataggtgcaccatgtctatcaaagccatcaaaatggctattttagaaaaaaacctcaataaatmttattgttgatcttgttacacatgataacagcattttcttatttttttaatt

SEQ ID NO: 546339 - DNA, 1692 bp, Homo sapiens
attccttccccaggctcccttgagttcaccattcttggagaaagcattgcaactggacagtgatcattgatttactagtctgcctccatcattaaggtagaggccagaaagggactatgtcagattgaacttattttcctcagtttctaatagacaattatcaaatgaatgaacaaatgtacatttcctgaataccctctatgtgccagttactgtatgagggtctggggacaccaagaccttgtccctttgaagtttatggtctagtggaaagttacacactaggttaataatcacacatatcacaatattatcttgaactgataaagggaaaaaacagaatgctttgaaggaaaaaaacagaatgttaggagactgtctgataggagcgcccagagattggataagcaggacttttatctgggaagaagggagagggagggctggaagtgctttcaggacgtcctgaagtgtaccgaatgagtaaactgatgaaagtgagtgggagggggatggaaactcgctctctggtcatcgtgggcatcgatgaattggtttgtcttgtgtcttctccaggtggcaggaccctgatttttggaggatccaagcctccctcattctcatcctgacctacccctctttctaataatgggcacttgacctagccaaattgagtatgtcatctaccagggctcctcccatgtgattaatttaggaatgagtttgaatttaagtcaagtctgggattcttggcataactaggaagaaagacctgcatttctttcagcactttggatattgtgcttgaaagagaagggtagagatagatgaagacaaattgatttctgattttttttgagcacctggatccagccatacctgaaactcgtgtggctacagttgtgtctaaattaacacacctatgacttttaaagctattaactaggctgggtgaagtagctcatgcctgtaatcccagcactttgtgaggctgaggtcagaggattgcttgagcccaggagtttccagcctaggcaacataggaagacctcgtctctaccaaaaacaaaaaacaaaaaacaaaaacaaaaacaaaacaaaacaaaacaaaacaaaaacatggtgagcacctgtagtcccagctactcaggaggctgatgtgggaggattacttgagcctaggaagttgaggctgcagtgagccatgatagtaccactgcactctagcctggatgtctcaaaaaaaaaaaaaaagctattaactaaataactatcccatctttttatatggcttaggctagtttgcacagggcttcaggtacttgcaagaccaatggcactcatttgctaagtccaaagagggtaagggaggccagctaaagcgattatggaggtcatccagccagggagagcccaaacayagcaatctttcctgcaccaggagagttccccctaagtgtctgtattctggtcttctcctcagagaccctgacccttgggtttccatttgtttgagtgtctagcaacaggtgcactgagggagggtggttggagagagataccaataggaaccttcccaggccctgacagggcagggagttccaggtacccaaagtgctggaaaatcacgaactgcctctgcattggaggaatgtggactaaccctgatttgagagtggagagccagcagga

SEQ ID NO: 546340 - DNA, 675 bp, Homo sapiens
tctctggagaaccctaactgataacaaggccctccctgatcgcccttcttcccctgcttcgtattccccatcacacgcactgcagtctgtattgatacttgttttctttctttaccatccatctccatcacgggcattcaggtagagatctggatgttgctggttctgctcactgttgttttccccagcacttggcacggcacaggcacaggcasatagtaggtgctcagtaaatgtccgttgaatgaaagagttaatggtaggtgctcaataaatgcttcccggctgaatcacgaataagcaagtgagttttctgaggcagcagcccattccaccctggacctaacatagtccctggagacctggatctgacttggattcctcagccttttgtccactgcccctgtctgatttaaaatgtaggttttattcttattctgagaaggtgaggcccataggtcaggagacaccagggattgaaaagagagttgctacagttcctgagaggcgagggcagtgccaggccacacagggaagcccagggcaggtcaggaggtggaggggctgggggaagacgggggcaggagcttctctgtcgcttccacagcaaggagcaggattggcttctctgagtaatttagcggttctggggcacaggggctgcccttgttgtct

SEQ ID NO: 546341 - DNA, 1515 bp, Homo sapiens
aaatgttgtaagaacactgaatgtaatacttattttataatacctttcagagaggtaaatttaccctgtaagtttaagaattttattagtctgttctcacgctgctaataaagacatacccgagactgggtaatttataaaggagagaggtttaactgtttcacagttccacatggctggggaggcctcacaatcatggcagaagatgaaggaagagcaaaggggtgtcttacatggcagcaggcaagaaagctcgtgcaggggaactcccatttataaaaccatcagatctcatgagacttattcactaccaggagaacagtttaggggaaaccgcccccatgactcaattatttccacctggccccgcccttgacacatggggattactacaattcaaggtgagatttgggtggggactcagcaaaaccatatcaagcatgtaaattatatgacaattaaaataattataaaattatattgatctgcctatttactgatatgatgtcctagggaaaacactgagaatatttgagaatatttcctttcttatgggttttaaatacaaagttttaaaggaaattttatttttatttttttattatactttaagttctggggtacacgtgcagaacgtgcaggtttgttacacaggtagacacatgtcatggtggtttgctgcacccattaacccatcatctacattaggtatttctcctaatgctatccctctcctagctccctatcccccaacaggccccggtgtgtgatgttcccctccctgtgtccatgtgttctcattgttcaactcccacttatgagtgatttggtatttggtatgcggaaaaccaaatatgtggtatttggttttctgttcttgtgttagtttgctgagaattatggtttccagcatcatccatgtccctgcaaagaacatgaactcatctaaaggaaaaatatttaatctagtttcccttaacatgtttttaggccttaatgtctctagtttaagcgtcttgtggtattaaatggtggacacacattgatatccattttaaactcagatgacttggatccaagcctcattttctatttayatttattagatcagacccctaaatcctttggactataaaataattatctgaaaaatgggagttcaaaatctctacctacatcacagagtagattcaacagagataatgttacgtgagaatattttcaagttttaaagtactgttatcagttggtaccaaaggtcatatttagacatctggttccaaacaagatggtgtagacccaattttcccatttcctcctctccaaatacagctaaataccctggaaacaattcaacagacattcacaaaagaccctgaaaggtggaaagaagaaggcaggaattaggaaatgaaccacagcaaatgtgtaggattttcttttctctcccgtatatcttagagagcacaccaggaagaccttcagcctggaatggacaacaggcatcaacaaaca

SEQ ID NO: 546342 - DNA, 1515 bp, Homo sapiens
aaatgttgtaagaacactgaatgtaatacttattttataatacctttcagagaggtaaatttaccctgtaagtttaagaattttattagtctgttctcacgctgctaataaagacatacccgagactgggtaatttataaaggagagaggtttaactgtttcacagttccacatggctggggaggcctcacaatcatggcagaagatgaaggaagagcaaaggggtgtcttacatggcagcaggcaagaaagctcgtgcaggggaactcccatttataaaaccatcagatctcatgagacttattcactaccaggagaacagtttaggggaaaccgcccccatgactcaattatttccacctggccccgcccttgacacatggggattactacaattcaaggtgagatttgggtggggactcagcaaaaccatatcaagcatgtaaattatatgacaattaaaataattataaaattatattgatctgcctatttactgatatgatgtcctagggaaaacactgagaatatttgagaatatttcctttcttatgggttttaaatacaaagttttaaaggaaattttatttttatttttttattatactttaagttctggggtacacgtgcagaacgtgcaggtttgttacacaggtagacacatgtcatggtggtttgctgcacccattaacccatcatctacattaggtatttctcctaatgctatccctctcctagctccctatcccccaacaggccccggtgtgtgatgttcccctccctgtgtccatgtgttctcattgttcaactcccacttatgagtgatttggtatttggtatgcggaaaaccaaatatgtggtatttggttttctgttcttgtgttagtttgctgagaattatggtttccagcatcatccatgtccctgcaaagaacatgaactcatctaaaggaaaaatatttaatctagtttcccttaacatgtttttaggccttaatgtctctagtttaagcgtcttgtggtattaaatggtggacacacattgatatccattttaaactcagatgacttggatccaagcctcattttctatttatatttattagatcagacccctaaatcctttggactataaaataattatytgaaaaatgggagttcaaaatctctacctacatcacagagtagattcaacagagataatgttacgtgagaatattttcaagttttaaagtactgttatcagttggtaccaaaggtcatatttagacatctggttccaaacaagatggtgtagacccaattttcccatttcctcctctccaaatacagctaaataccctggaaacaattcaacagacattcacaaaagaccctgaaaggtggaaagaagaaggcaggaattaggaaatgaaccacagcaaatgtgtaggattttcttttctctcccgtatatcttagagagcacaccaggaagaccttcagcctggaatggacaacaggcatcaacaaaca

SEQ ID NO: 546343 - DNA, 1515 bp, Homo sapiens
aaatgttgtaagaacactgaatgtaatacttattttataatacctttcagagaggtaaatttaccctgtaagtttaagaattttattagtctgttctcacgctgctaataaagacatacccgagactgggtaatttataaaggagagaggtttaactgtttcacagttccacatggctggggaggcctcacaatcatggcagaagatgaaggaagagcaaaggggtgtcttacatggcagcaggcaagaaagctcgtgcaggggaactcccatttataaaaccatcagatctcatgagacttattcactaccaggagaacagtttaggggaaaccgcccccatgactcaattatttccacctggccccgcccttgacacatggggattactacaattcaaggtgagatttgggtggggactcagcaaaaccatatcaagcatgtaaattatatgacaattaaaataattataaaattatattgatctgcctatttactgatatgatgtcctagggaaaacactgagaatatttgagaatatttcctttcttatgggttttaaatacaaagttttaaaggaaattttatttttatttttttattatactttaagttctggggtacacgtgcagaacgtgcaggtttgttacacaggtagacacatgtcatggtggtttgctgcacccattaacccatcatctacattaggtatttctcctaatgctatccctctcctagctccctatcccccaacaggccccggtgtgtgatgttcccctccctgtgtccatgtgttctcattgttcaactcccacttatgagtgatttggtatttggtatgcggaaaaccaaatatgtggtatttggttttctgttcttgtgttagtttgctgagaattatggtttccagcatcatccatgtccctgcaaagaacatgaactcatctaaaggaaaaatatttaatctagtttcccttaacatgtttttaggccttaatgtctctagtttaagcgtcttgtggtattaaatggtggacacacattgatatccattttaaactcagatgacttggatccaagcctcattttctatttatatttattagatcagacccctaaatcctttggactataaaataattatctgaaaaatgggagttcaaaatctctacctacatcacagagtagattcaacagagataatgttacgtgagaatattttcaagttttaaagtactgttatcagttggtaccaaaggtcatatttagacatctggttccaaacaagatggtgtagacccaattttcccatttcctcctctccaaatacagctaaataccctggaaacaattcaacagacattcacaaaagaccctgaaaggtggaaagaagaaggcaggaattaggaaatgaaccacagcaaatgtgtaggattttcttttctctcccrtatatcttagagagcacaccaggaagaccttcagcctggaatggacaacaggcatcaacaaaca

SEQ ID NO: 546344 - DNA, 1515 bp, Homo sapiens
aaatgttgtaagaacactgaatgtaatacttattttataatacctttcagagaggtaaatttaccctgtaagtttaagaattttattagtctgttctcacgctgctaataaagacatacccgagactgggtaatttataaaggagagaggtttaactgtttcacagttccacatggctggggaggcctcacaatcatggcagaagatgaaggaagagcaaaggggtgtcttacatggcagcaggcaagaaagctcgtgcaggggaactcccatttataaaaccatcagatctcatgagacttattcactaccaggagaacagtttaggggaaaccgcccccatgactcaattatttccacctggccccgcccttgacacatggggattactacaattcaaggtgagatttgggtggggactcagcaaaaccatatcaagcatgtaaattatatgacaattaaaataattataaaattatattgatctgcctatttactgatatgatgtcctagggaaaacactgagaatatttgagaatatttcctttcttatgggttttaaatacaaagttttaaaggaaattttatttttatttttttattatactttaagttctggggtacacgtgcagaacgtgcaggtttgttacacaggtagacacatgtcatggtggtttgctgcacccattaacccatcatctacattaggtatttctcctaatgctatccctctcctagctccctatcccccaacaggccccggtgtgtgatgttcccctccctgtgtccatgtgttctcattgttcaactcccacttatgagtgatttggtatttggtatgcggaaaaccaaatatgtggtatttggttttctgttcttgtgttagtttgctgagaattatggtttccagcatcatccatgtccctgcaaagaacatgaactcatctaaaggaaaaatatttaatctagtttcccttaacatgtttttaggccttaatgtctctagtttaagcgtcttgtggtattaaatggtggacacacattgatatccattttaaactcagatgacttggatccaagcctcattttctatttatatttattagatcagacccctaaatcctttggactataaaataattatctgaaaaatgggagttcaaaatctctacctacatcacagagtagattcaacagagataatgttacgtgagaatattttcaagttttaaagtactgttatcagttggtaccaaaggtcatatttagacatctggttccaaacaagatggtgtagacccaattttcccatttcctcctctccaaatacagctaaataccctggaaacaattcaacagacattcacaaaagaccctgaaaggtggaaagaagaaggcaggaattaggaaatgaaccacagcaaatgtgtaggattttcttttctctcccgtatatcttagasagcacaccaggaagaccttcagcctggaatggacaacaggcatcaacaaaca

SEQ ID NO: 546345 - DNA, 1194 bp, Homo sapiens
gaacatttaatgagataagcttgaacaagatttttggcagataggtactccctagttatttgtactgctactacttctagtayctctgctaccaccaccactatcattattgctaactggcattcctacttgcagcacaatatttgctataagatcgttaggtagcataccagatttaaacataattgaacatgtaagatccactcttacatggttcaccaggtaacatcaaaacataatactctaaattaaagaaaagcataagaaagatagacaagcctgcaggtctaattatcttttctattaattctaaaaattctaaattatagcttaatctaatcgtggcctttctttaagccttggaaaattaaacaattgactgtgttgattagtatattgccaacagctgtgtccccctgtgtcctctcccttagtagaaagaaatggtccttttatcacacccgttgtcaaagatcctcatctctctctctctctctctctctctacctagaagcagtataatttaggattaggagtataacctatggactcaaatagaggcttaaagctgttttgtgccacatagtagctatgtaagttgaagcatgttataacgtctataaaacagggataataacagtgcctaccacacagagttgttctgaagctgttaaatgggatgttgcttacttttgcatagcactcaactttgtgcattggacatggttaagcaactagtaaatactattattgccaagacttgaagtattaacaaagggcatagtctctgcccagggaccatgctcacttaattgtacagtaagttctcacttaatgttgtttatggcttcctagaaactgcaactttaagcaaaatgacatttaatgaaaccaattttactacaggctaatggatataaagaagagattaactcccatgacctatttctggtcataaaaacaacaccaaacttccagataaagaccccaaacacttctaatactaaatattgaaataaatgtgaactatacatacatttaggaaatattaattaaaataagtaagattatttacccaatttctggtgattcagtgagagacagcattcatagtggtggtggattaaggaaaaagtgtttacaagcaacaactgtaaaaaggacctcctatcaccatgcagttcataaacaata

SEQ ID NO: 546346 - DNA, 905 bp, Homo sapiens
attgtgaaaattagtaagttacatggacaggcttagagcccacaggacaaggaggcatagggaatactcttcccaggtattccataagaggactgatggggtgtaaccaatggagggtcagactataccgtctctgagtccgtggagaagtccacactaagtggagaatagactagaggacaagcccaggatagacctgagtaacagatgtcaaatgacttaaacaaagagtgaggtgggtctgagaaatatctgttagccttaacagaacaatagaaatgtaggttaaccaaaaaccacctgtaccccaaaaactattgaaattttaaaaggggaaaaaaaagaaatgtaggttactaccctggtagtggctgtacttaatctagctttggagaaagagcctaaaaaagctattgtgaaatagggttttatctgatcaccacagatgccaattatttacttcttcatttacatctactcctgcctattttcaaaaacaatttgagaaagcgaaggcaattgtggtgagtggaacagtggtgtaaagtgcacacaggatacatgtgctcataaacaccctttcctctgaaacatctgctcagaaatgccttctcccctaaagcatagatcccacaacctgggcatccatttacccaggtgaaggaagtactagtccaataggatgagtctccactacataatctccactatacagtggcccaactgtctagtttggtctattgcaaaaacacaactgtgatcactgagccagaaatccagctctttccccacatgcctgacaaaaccaagaggtaggctgactacgtgtacctggacacamgttgcctccaactgctaaaccagcactcaccttgcctaccttccagctattttactttttctat

SEQ ID NO: 546347 - DNA, 636 bp, Homo sapiens
tggtgaaaccctgtctctcctaaaaatacaaaaattagccgggcttgctggcaggtgcctgtaatcccagctacccaggaggctgaggcaggagaattgcttgaacctggsaggtggaggttgcagtgagctgagatcgcaccactgcactccagcctgggctacagagcgagactctgtcaaaaaaccccccaaaaaacaggaaggtgatttctgccctgctcaccctgcagaattagaggattccatggaaaagggttgattactatgctcagtaaatggtaacttgatcctagggtcatgtaatgcaaacaccattttaaggtgattaaaacccactcagggttaacaaggggcccccatggtcatttctcatggcagtgatatttacatggctgggtatggagcgcaccccattcttccccttcacccgccactcccaccctccccgcttttgagctgcctgaggatgggtggtttgcaactcctcccacaaagacttctgtcactggtttcatctctgaattactgtggttaatagacacttctaagtaatttcatgtactatgtgtggttttaaccaactttaagctttaaaggccaatcatccagggacatctccagatggagggggga

SEQ ID NO: 546348 - DNA, 636 bp, Homo sapiens
tggtgaaaccctgtctctcctaaaaatacaaaaattagccgggcttgctggcaggtgcctgtaatcccagctacccaggaggctgaggcaggagaattgcttgaacctggcaggtggaggttgcagtgagctgagatmgcaccactgcactccagcctgggctacagagcgagactctgtcaaaaaaccccccaaaaaacaggaaggtgatttctgccctgctcaccctgcagaattagaggattccatggaaaagggttgattactatgctcagtaaatggtaacttgatcctagggtcatgtaatgcaaacaccattttaaggtgattaaaacccactcagggttaacaaggggcccccatggtcatttctcatggcagtgatatttacatggctgggtatggagcgcaccccattcttccccttcacccgccactcccaccctccccgcttttgagctgcctgaggatgggtggtttgcaactcctcccacaaagacttctgtcactggtttcatctctgaattactgtggttaatagacacttctaagtaatttcatgtactatgtgtggttttaaccaactttaagctttaaaggccaatcatccagggacatctccagatggagggggga

SEQ ID NO: 546349 - DNA, 1078 bp, Homo sapiens
tcatctccgtgaaaacagagcttgagttttgccagaaagaaatgtactagaggccagaaaaaaatgagcaggccctgtttaagaagcaggtatcctcactcttccattatcaagcatgttaacatacctacaccccatatcacattaatttaagacaacctcaaaaagctgggttgtggtagccttactgctatgtcctacagatctttcaccattaattcacctgtttttgcagttttcttttagtattttggagtctaatttttttttttgtctgaatcatttctttgggcctttgaaaagcttgtaagacctaagcacaaggccttttaatggccatcaataacacagcctgactagttcaacacaaagtattttccttagactacacaaactaaatcccaagctattattcactttgaggcagtacacagcataacacaaggtatcagaggtgtgttggcccatcaattggaatcacatcatagcagaaactcaaaggggagacccccacatcctcccgctcccagtcctaggacagtgccctcctgactgacccctgtgagtatgccccagatatgaaagcagctgctgggaattatatagtgaatggcaccaaaatgtatggaatgggagagggggagggggaggggagggatggatttatttgggaggcccaggaagcttcttgcagagaaggtgactccccacactcttctttttttttttttttttttttttttttttttttttttgagacggagtcttgctctgtcccccaggctggagtgcagtggtgcgatctaggctcactgcaagctctgcctcccgcatccaggccattctcctgcctcagcctcctgartagctgggactacaggtgcctgccaccacgcccggctaattttttgtatttttagtagagacggggtttcaccgtgttagccaggatggtctcgatctcctgacctcgtgatccacccacctcagcctcccaaagtgctgggattacaggcatgagccactgcacctggcccccacactcttctaatggcctcattttccctccttttctgcc

SEQ ID NO: 546350 - DNA, 629 bp, Homo sapiens
actgcctgggagccagagtcggcttagactgtagtggtcatgccttacaactgctttcctctgtagaaaagccaaaaagaaaatatcttgattgaaatgtcttttcttctcagctgtgtccgtgtttttattaaaatatttttttttcaggttaaatgagggacatactgtgtacttggaacgccacatttgcggacgattgtttggtgaaaagttcagacattttaatgctctgggaggatggggagaactacagaattcggtaaaggagtcaaagttttaaaaaccttcatccaaagttgtataggtgttaaaaactgagtttttataaaagcgtctttactgtgtagcaaccaaaaagtcatttttacaagtgtggaaagtgaagtcaatgctggtataacactgtgttgatccacacygttcactgttctatgtaaggtagttttgatgacctggtctaaatagggagctgtgggacctcactgggtctttgctattaatatagctgtttactatgtttgcatcttatttggtatgtcatttttaagtgttgtctcctgaaagccaaatttgctgaccaggcattaaatcatttttctagtctttttataagaataaagcctgta

SEQ ID NO: 546351 - DNA, 1135 bp, Homo sapiens
taatgaaaaagaatgccacaaaactactaacatgatgacttttagcctttttagtgcacaatgggcagtcaacagctttttttaattctgaggcccaaatgtactataaggtttataaaagaaaactctactcccaagttcaaaattctcattgcttaaaagtagtaataaattccctagtaaaacattggattctggttttaattagaagtaaatatgctaagattgccacctcctgctcaagaaaaaggcaagtccttcatgacctatgtcaggtggactttcaaaagacctcagatctgratcctgtcataaaaaaagaaagaggaaggggaatagaagaatatatattttcatgtgtaaacataaatgatgccacttaaactattcaatgctaccaaatgcaaaattctcactcctaaaaatcattaaacatattctttctttgggtccatgtcctcagataaccaatagaatcccttacttaatggcattttcacatttaaaagtcagtaagcacttcctccaataaaatgctaaaatatacttgtcacatattaaattcaaaaccaaaatatatcatcaatgccaaattaaaggagaaaaaatgattatattataaaaccactacttttactaccttccattcaaacaaatttctatgatgaaacaatgaatgttgaaaaaaatcagtatttcccaagaactttttctccattcccttgagactgccattatgccattcaaaccttaaaatgttcagatgtttttacccgtgtctgtatatattcaaatattcatatatacacacatatacatatatgtgcatgtatataaatgtatgtgtgtgtgtgtgtgtggatagatggagggatggagatagataaaaagatatagatatatagatagatatctatatatgatagatgataaatagatttcaagggggacaaagtttcagctatgcaagatgaatagcttctgaagatctaatgtaaaacaatgtgaatatatttaaaaatattgtattgtacatagttgctaagagggtaaatcttaaatactctcacaaaaataggaagggaaggaaaaaatgctaactatatgaggtaatggaacgttaattgcttgattg

SEQ ID NO: 546352 - DNA, 655 bp, Homo sapiens
taatgttgtgaataaacatttataaaaaattcatatattccttccacttcagctatttcttttttccactaggatataatgaaataaatttatattttaaattcatggccacacacggtggctcacgcctataatcccagcactttgggaggcgaggcrggtgactcacgaggtcaggagttcaagaccagcctggccaagatattgaaaccctgtctctactaaaaatacaaaaaaattagccagtcatggtggcgggcacctgtaatcccacatactcaggaggctgaggcagagaattgcttgaacccaggaggcagaggttgcagtgagctgagatcacgccactgcactccagtctgggcaacagagtgagactccatcttaaaaaaaaattaaaaataaaattcatgtggtcctgttttgtaaattttattctatgcctaaatttgcacgtgtgtagagaaaaatatcagggttgatatttaaaagtgccaacaaatgttcattctatttgataagactcatgtaactttaataaaaaggtattttatttttctttgtacttttaaataatagtttttaaaaatgcagttctatactttttgcaaaaaccacaaaggttattattttctctaaaagctattttaaaaac

SEQ ID NO: 546353 - DNA, 643 bp, Homo sapiens
ttaaaaaacaaacaaacgaacaaaaactttacacaaattatctgcccttttgcttgaaaactagagggaaaaaagaaattatcatagattcctatacagaagtcaaaattatctccatacctaccacaaagccatgaaccaaaagcaactctcggtttctaccacagcttgaaatactaatttataagggtgaataaaaatgtactttctgctatgtgacaggaagtgtgctagatgtaacagaaagaaaagcaactagcaagacttaaatatgcactatatacaatttcacgatcaatagattaatacatagtacagcragtagaaaatacctacaatacgcaatgaggaagaaaattatgaaatctaagtggtttttgaagcataaattttatttatgaggcatacacagggaaggataattctcaagaagtctaaaaaagcactttgggaatagcgtgaagactaacaggacctaaaaacagattgggataacgttatttatttatttattttatttattttttgtttttttgagacggattcttgctctgttgccaggctggagtgcatcggcgtgatctcggctcactgcaacctctgcctccttgggtttaaccgattcccctgcctcagcctactg

SEQ ID NO: 546354 - DNA, 643 bp, Homo sapiens
ttaaaaaacaaacaaacgaacaaaaactttacacaaattatctgcccttttgcttgaaaactagagggaaaaaagaaattatcatagattcctatacagaagtcaaaattatctccatacctaccacaaagccatgaaccaaaagcaactctcggtttctaccacagcttgaaatactaatttataagggtgaataaaaatgtactttctgctatgtgacaggaagtgtgctagatgtaacagaaagaaaagcaactagcaagacttaaatatgcactatatacaatttcacgatcaatagattaatacatagtacagcaagtagaaaatacctacaatacgcaatgaggaagaaaattatgaaatctaagtggtttttgaagcataaattttatttatgagscatacacagggaaggataattctcaagaagtctaaaaaagcactttgggaatagcgtgaagactaacaggacctaaaaacagattgggataacgttatttatttatttattttatttattttttgtttttttgagacggattcttgctctgttgccaggctggagtgcatcggcgtgatctcggctcactgcaacctctgcctccttgggtttaaccgattcccctgcctcagcctactg

SEQ ID NO: 546355 - DNA, 629 bp, Homo sapiens
tcatggcttttctgtatccatacattacatgcctccagagagtaggcttcaaacagtaggaaaaattttatctgtgacaaaattctakaaaagggaatggtaaaatgggagaataatttctaaatttctaactgttcatcaatggatttggatgtatttagatatagacaaatatttgcacactgaaagtttgcacgtgtgtataaatttaaatgacatacccatatgtatcagttgtataatcttttaattaatcctcagttttacatgtgggaaatttgaaaagagtttatccttaccaaatactcaatttgaagtactacactcaatgtgatgtaaagccaacaaaatctctattaacattcatttcaattaatccaataatgttaactgcagatagcttcattcttttcattctccttgtcccctgttggcagctgaaagttgattctcataacatcaaactcctgagtaaataaacaacagatgtgtgccatcatgtccaatttaattaattaattgcttacatttgtagagataggtattgctatattgtagagataggtctgtgctggacttgaactctggacttgaagcaatcctcccttctcagcctcccaaagagctgc

SEQ ID NO: 546356 - DNA, 621 bp, Homo sapiens
aactttcaaagctcttatcccttaaagtaactcacttcccatctttcctcccaagctttttggtaagtttattgtttcccccaaggattcacaacaagggactcttttttccactgggatctattctttgtcccaggaggcagtagctaatgcatttgtcttgcattgtaggctaccaccttcaaaactgccatggaactaaagagtggaagagggtgccaaaaatgccactaaactcctctgttgaggttcggcaacttttttctgcagtaaatgtttgattattgtaaagattttattactttccagtgttcagataaagtttattctgacatttttgctagtatatttactgtttttgtggagaaatggggccttggagttccctactccatcattttcttcgatgtcacccacatcctctaaaaacatcatttattatttcttttcttttcttttctttttttttttttttttgagacagagttttgcactgtcwcccaggctggagtgcagtagtggaatctgcaacctctgcttcccaggttcaagcgattctcatgcctcagcctcccaagtagctgggactacaggcacctgccaccacgcctggctgatttt

SEQ ID NO: 546357 - DNA, 663 bp, Homo sapiens
tggatataaaccaatcacacactgaggaagaggcacaactgagttggaggcggggacaggcagaaaggtttcacaggaggagactttgcagccgtgtgttgtaggatgaacaggagaacaagtggcaggtcatactgtctccaggtattgagtcaaccagctaattgctgcacagcccttcactacatgctgtgtggcctgtgtggtgtggtgttctgtctgcttgcaaaagtcatctcctcttgaggaaagtgtttctggcagaagagttctccagcacacaccctcgactttccgattctcagtttcagtgtttgctttcgttaacccggtggaccagtccgtgaagcctgttggtggcagtggtgactgggagygcctctctcccgcctcattaggatgatccacctattgtcagccacagctccttgcaggaagctgtcatgtgagcttggatatgtcactccaccaagtactcattttcagctcctttactccttcctcccatgtgaacccaccacctttcaatccagcgtcctgtgtagaccaggaggagaacacatgcagtggaccaccaagcccttgggaacagggactgtggggaatgctccaagatagaaggagtttcagcagcctgagtcctcatccaggcctgtggagagc

SEQ ID NO: 546358 - DNA, 564 bp, Homo sapiens
ccctgtgaccatgaaactgtatgtgttattctctctcagactgagttatcagataactattattaaaactatgccttcaactgtgtttgcaattttttatgtgtctcccacagacatattttttaaaagatgggttgctaccagcataaactgtagtttgttaaagcgaaccaaatatggcctgaaaaggactccgtactyctatatttgagttgttgtggacaaactgcaaactagactaatagatagacaagactgaaaacctaatttaggagtatgtgcctggaacaacagctgagtcttggctaatcccagcagctctacttcaatcattcatacactgctgagtgttcaaactgcgagtgcagtggcacgatctcggctcactgcaagctccacctcccgggtttacaccattctcctgcctcagccttctgagtagctgggactacaggcacccaccaccaagcccggctaattttttgtatttttattagagatggggtttcaccatgttagccaggatggtctctatctcctgtcctcatgatccacccgcctcag

SEQ ID NO: 546359 - DNA, 1168 bp, Homo sapiens
atggatttagagtattaaaagagtgttggcttgtactgcaaaccaggggaagtctaggagtaaataccagacaccagaggaaatagattaattggaaatggaaacagtcaattctcagttatctgcatgtggcttatctgcaataagttaaaaaaaaataaaaaggaaagaatcccggtgtttcagctcccctgcctggctgtctatcactgtgtgctcagggaattgaaagccattttaataagctggacccaatataatttggaatgtaattctgctgctacagctatatttttaaaaatcaaagaaggcagtccaaaggatatgtaattaattttttttctattattcacagattgggatgcattaacttaagatcatgaactagttcccaaaagccaatgtggagctcctacttaagagggacttaaaagtttgggaaactgttgtcagcccccaacactcacttgcagggggtcagagagacgatttctccaggaggtgggtggtacccagagatcgtctgtctagatccattgtaagtcagaacctgggcagagagaaaggccaggtgctggctgttgggtttggccactgttggtttgttttaggtgattctcaggaatcctaggggtgctgtgtgcaaaccctgcttcccactgcgctctgtggagctgggtgtctgtgaacatgggttctttgccttggtcatgctgtggaaaacccctccctgacacttcatatgactgctcagagtggcgggtacagctcttttggtgaccaaggaacagaagcccacttatgatgattcaagccagaggaaggtttgtggcagagatatgactctcatgggacccaaagtaaagsagcagagatgggctagaatgtcgtggactgaagatggctcgcttgctttctacctaccttccttccttccttccttccttctttcctccctccctcacttccttccttccttccttccttccacaggaaagttcccttgtcctccttgcagggtgtgtgatgggggtgtggcttgcttcttcagtgcccagacctctaggggagcatgtagataggcaggttatagggctctgaccccacggcagtgtctggggtgaatatttacagctgaagccccagtgggcgtgcattacagggtgat

SEQ ID NO: 546360 - DNA, 1267 bp, Homo sapiens
gtgcattctgaatctaaaaactggctcagatctgaaatccttataataatataataataataagcaagaaatccttattgttttttattgaagtcctccctgagccttcttctggtcatccattcatgatttcttctggcggtacaagctgaatagtgcttatgttggctccgtatctgctttgcctccagggatgccaggttttatgaacagtctccctaactctcagaggtcctatactccaactcctgccaatacttcaacctggtagtcacaatgatcattgcattcacccgacacttagcaayagtcacctaactccattgttctcgtagttctccctttctccactcttctcaaaaacctgatgcatgacactgagtaatgcattcctttccactccatcccacttcttcattggtaagagttttaataaccaaccctaccaccttgtgccacaggctggctgtgctccaccaacgactagtgataaaatcctcattgccagccagatggcaagcgatccaactcccatgccctatcttattgcctgccttatcaaaccactcctagcaccatctgtcacaggttgggttctctggaagcaaatgctggaacagagtttgacgtgcagaaataattcatgcaggatgaacccctgtggaaaggaggaggaggaagtagagtggggcacagggagaagttgaattgcaatgcaggctcattaaaacttggccaatatatagcactatgaccagtagaattatatcgcaggggaaccaaagtagccaggcctttttcccctgccatgatcagtcgctggatgttggccacctcaggaagggtgtgtcattgggcaagaaggctttctgcagcttaggcaaaccctgaagaagctgggagcagaaggctgtctatagacagtattcccagcacctcctgaaaaaagttcttccttcaaaaatatttgactgatgtatctttgtgtgcatcacaaacatgctacaaagcaaaagacaactactgcatgtaacattatagtcaaatataatactgaatagaagcagccagaccgaaatgaatatataccataagattccataaggttcagaactcaggcaaaactgattgaaatgttggaattcagaatagccttctctttcaaaagggcatgtggactggagggagtccaagggagctttctggggtgttggtcctgcttcactacttaatctcatactggttgcataggtgtattcactttgta

SEQ ID NO: 546361 - DNA, 928 bp, Homo sapiens
cccggctactccaccctgtctgccgaggataacgtttccttaggtcaaccaccgctgggacttgggaacacgaccctccgcccacaatgccctttattcctttccccgtcgtgggtgggtgggggattgtttaaagatattccaaccggatttggggccaagccttttctgcaaagggaaaaacgggtgagtaggaggagcgtgaggcgttgaaggagcgcccaaacgggctgcggggagatcttcaygcctaaaacgtggtcagtcaaggtgagtagacaggacacgtcaattttttttgacgcaattagaatttttagcctccaggaaacgtaatttagagccatggtattggttcgtttcagctggctccttaaaatctattttaagtgtctaatttatgaccagaaaggaaaaaaaaaatggcagtgctcaccggttaaacgtctgtctcccgagacgagaactgggggaagcgttacttaacctttcattctgcttaagtcggagctaaggtccatttgctgtttttgtactttaaagatagttccctgaattattctggacttttttgaaggatcatagctaaatccacacccccatcccaacagaccacacaacactcacagctgggaggcaggaaaatgttaaaagggtgagagggggtgggaggggtgacagcagaatgctggaaggctggagaggactctaggaattacagccactttttctaaagaagagagctggattcttcggataactggcaaatggtccttcccccttgatagtcagaagatgaaaatattctaatacaaataaatgaatcaaggaggacagggtgatttgtgtttgggcaaatctccttgtgcaaatcttgaaacgtccaattcttgctattctaaactcgaagacagaatgaccaccaggt

SEQ ID NO: 546362 - DNA, 1293 bp, Homo sapiens
ttctctagttttgaagttttgtgactgggactggctttcctgttcttcagcttgcagaaggcctgttgtgagacttcgccttgtgatcgtgtgagtcaatactccttataaactccctttcatctataaatctatcctattaattctgtctctttagagaaccctgactaatacaggttttcagacattactctgaagacctgtgtgggagtcatgtttgcatccttcttcagtaatattagaaaaattaaaataacatagaactttttaaaacaccaaattaattcaaggcaaagagatgtgttttgttcctaattatatcctttctacctttttggtatttgttaagcttttattgtatttaatcatggtcacagtagaaggtaattttatcttctttcatctagttttgtggcctatatttggcaaatgaaaatgatgatgactcaatattggctttccataattttgggtggagaaaatatttactgactcatgacatccaaaggtctgggatccctaatttgaccaactgctatgtctcattaggtagcccccaagctgagcaaccacagtgagaaataaaagggacttccctaaccatttattttcttaagaggatagtggmtttgattctgaatggacttttactacatttggcatgctttaaaaaagctgttttgctgaggatgagatgaagtttgttaattgcactatgggttgctaagggacgtgccactctgaagcgctgcatgcacgtggcaactccttagcacctgtggcctagggaccttatcgccattatcccacgcattcaaaaacacaatacccacttgttagtcaaagcagctgacctaggaataccttctaagtcagttgaaaagctttgacaatttttcaaacaggaaaattagccaggtattgttcagaatggttgacctgtgaatttgatttttatttgtttacctacacagccatgacaccaagttagcaataagcagacttcagccaaacatcatggttggtgacatctgagctgcacatcatccaccacattccaagcatgtgtgacctcccccttcccccaattcctgttagaataagtggaggcagggaggtcatggtgaaggcttattaaaaaaacaatcagacataaaacaattgtttccttggacttagaaggacgaattttctttgcctaagcaggaagcaaggaaatattcaggagaggctattggccattcatcatgtccctatggagaccagagtttatgtgagtgatactattagatc

SEQ ID NO: 546363 - DNA, 608 bp, Homo sapiens
gcctttgttatagctgtcactgtagattgtttccgttgtgcatataattgcttcattgctagtaactggcttaatgttgtcacagaccttattggctcttcttacctcagatttacatatagcatcccaaggctttctttagggcatttatcatttttcctccaaatgatctggtgacagtatacagctattcaagttttcatcagccagcagatgatacggtctttcttctttgctgccacaagccagaaaagagaggaaatcaggggaaatgctttcattactgcacttcaaggaggcgctgtcrtggagtcagggagggaagtttcccaaagttcactgaactgacactggaagaagctcttgtgggcagccccatccctttgtgacaccgcaacgaaagcacttcatcatctcttgccgatcctgctttcatgcagacagcgaggcatcttctaatgccagttgcctttcctgtttacttcttgctccaggaaaaagtctgagcaattttttaggacattaactattactgttgcatactgatatgcaagattttgttatactttcttgaaaaggcccattattttcatttggaaagggaaaaa

SEQ ID NO: 546364 - DNA, 622 bp, Homo sapiens
tttgctctgtaactataggtttatgggggttttgtgtgtttgggttttgttttgttttgtgtttttagacaaggttcatgctgttgcccatgctggagtgcagtggtgtgatcacagctcactgcagcctcaatctccctggctcaggtgatcctcccacctcagcctcctaagtagctggaactgcaggcacacaccaccaygcctagctaattttttggtattttttgtagagatgggattttgccatgttgtccaggctggagtttatgttttagagttcactttttattttaattcgaatcattcaataaaatatacctcatcttacctaattttcatgacttacaaatattcaggataaagcaatagattgcattgcctcaagaagctttagtagttttcaatctgctataagatatctccctcattgataacattgattttctcaggagataggattgggagattatctgtttttttattggaaactttcatattgcttttttttttttttaagaataagcatttgttactgctgaactttaaagcttatttttttaagtaaaagaatttttaagcatcatggagatctcacagtaagaaacaaaagctctctttg

SEQ ID NO: 546365 - DNA, 653 bp, Homo sapiens
aaggattctcatttgtcatttgtcttactacctaatattaggttggtgcaaaagtaattgcagtttttgccatgaaaagtaattgcaaggccagttgtggtggctcatgcttgtaatcccagcactttgggaggccaaggcaggcatatcatttgaggtcaggagttcaagaccagcctggctaacatggtgaaaccctgtctctactaaaaatacaaaaattagctggscatggtggcagatgcctgtaatcctagctactcaggaggctgaggcaggagaatcgcttgaacctgggaggcggaggttgcagtgaggtgagatcctgccactgcactccagcctgggcaatagagtgagactcctcaaaaacaaaacaaaacaaaaacaaacaaacaaagaaaagtaattgcaaaactctgattacttttgcaccaatctaataccatatattgaagctggaagagacactggactgtagctcacccagccctttttaattgagagaaaattgaggcctatagagaggctcaaattcatccactagttagtggccaagtcggagatataattcacatctttcacttaaataatgagcttatttgatgcactttcacaatgtgattactttacaaaactttttttaaccttca

SEQ ID NO: 546366 - DNA, 496 bp, Homo sapiens
acatgtcactgtcagggttaaaatacttccacagttacccacagcctaattaaaactcttttcctcattgaaggaaaaagccatttacaaatcaacatcactttgtttatatagcctcattcccttctattccttctgctcctctcctccattgccaacctcatcacctctactctcataatccttctcttcttcttggttcttccagtccctttcatagaaggatccttttctgttaacatccaatggggtgagctcttcttcctcctgcccctacactgaagccctttcacactggactatgattggtttctttgtctttcttcctaattaagctgtgagygcccccagtagacatgtaatcttaccacacagctgaagactcacagcagctcctcaaatctgtgttaaataaatgggagtaatgttttatttcatttagatttgtcagcagaaaaggacttattgtgtaatatttctaacaagagctcacatg

SEQ ID NO: 546367 - DNA, 1075 bp, Homo sapiens
gggtctgagttcaggagtggtgcatgcagggcactgggcttcagggaggaggttgcagttgccttaacctaccatcaggatgccaacacttgatgcacacagtagtgcgtgcaaggaggaaggggtagagaggagacataagtgttcactgagccctcaccatgcaccatgatgtgtaagacactttcatgcatttactccctacaacaaccttgagaagaatccatcatcatcctaattttatgattgacaacattcataaaattgggggcttagagaaattaaatgatttacacatagtaaataytgactgctggtaaaaggagagctgagacttaaactcaagtcagtatgatttctaaaccagcccattctctaccgaatcaccaaggcttgggtagcttgctggtcaatgcaatagtggtctttatgagtcagggttagggttcattcagcttaaagctgttgtaactactgatgctattgagcctagattgaacactaagaggctgaatattttggagcctgtaccctcaaccctctgtggccttttagcacttcatcctcctcatccttctttgactgggtgttcctggaaagctcaagaggaacataaagatccaacaggagactcctcccccaccgcattccacccaagactctgctcacatcacacttcacttttcaaaaaccttcaccagcggctgggcatggtggctcacgcctgtaatcccagcactttgggaggccaaggagggtggatcatgaggtcaagagatcgagaccatcctgaccaacatggagaaaccctgtctctactaaaaatacaaaacttgctgggtgtggtggtgcatgcctgtaatcccagctactcaggaggctgaggcaggagaattgcttgaactcgggaggtggaggttgtagttagcagagatcgcaccattgcactccagcctgggcgacagagggagactctgtctcaaaaaaaaaaaaaaaaaaacacttcaccagcttccctttcagtacacaacacactggaccaaattttctaatttctgagttggtatttaagtcc

SEQ ID NO: 546368 - DNA, 551 bp, Homo sapiens
gtcatttggttgtgtgtagattttttgtcccagctggtcaagtgtgtctggcctagaaaggagctctcagaggataagtcctgagtctatttaaaacccaataattgcctagttaaactgagtgacttcacagccttgccagcagaccaaaagttggaacagaatctctgcagaycagcttcctggagttctagtcagctcaagagtctgtgaaactgtgaacccagctttcggttcatggtcaagtgtctgtgttccttgtattgatgaggaggtaactccttgggcctggaccaaagaagcagtcactgaataccatttatgctctccttgagtacagagccatcttggatgagagtgaaaaagacagtgaaggagtacaccagtatttctcaaactggagtgatctagagatatattctatgctaattgttttgcaatatatgtgtgtatgtgtcattttgctaataatctcgaaaataaacatattttaggtcatctggatgaccacctaattcagctctagaagacttttttcattttctaaggca

SEQ ID NO: 546369 - DNA, 1543 bp, Homo sapiens
atagctgcttaacatttacagtcttgcagagtaacctctctccatggcccctgtactgctctgccccagggtccggctcccaccacattctcctccycccttctctctaccctttttatcttttctgtgaatgatcccccctccttttacctgtcttcacatattgtattatccagccattggaagtcggctacacaaaaagaggtgtcactagaggccatctctctcagaatacagggtgactggaacgaggcaactcatgtttctttggaaggagtaccacaatttcccccaatcatcttaaaagctaccagtgtgcctgaggcaggctgagctgctaagggtgtgcagaaagaaataggagcagggaagagaacatactgcacacattctgctgccactcttgtagtctgaacttgacacaaatgacaaaataacacatgatttccctcacttctaaaatatttccaccaaagttttgaatattgatttgttcctaccttaccaagccctcagactgagaaaagaagaaattaagatgagccttgctgctattttttgttttaatcattacacacaatgctcctccctctcccagccaccacgtggctaaaccccctttggcaatacaggcaaagacataactttagacgttaaccttgttttaaaatgtgcctttcggcaaatagataagtgagaagagagatcaggatctgggggtgttaacggcataaagtgagatgctcctgaactgaacgagcaagaaaaaatattttcttgaaagcagtcctccagaaagaattcttatcatagataagggtgcagtctagtggcaaacttcatgaaatgcagccccttctccaaaggaaagttagaatacttctcaagggaggaagcacaatgtaaaaggtgtaacagcccacaccaagtccacccagcaggggcagtgacattggtcatttctctctgacttgcctgtgaggctcatggctcactcaggtcaatttcagaaaaagctaaaaccaccaccttcctatttcaaggccttagttttctttcattttattaaagaggttctagtggcatgattcggttcctggtcaggacctcttccaagcaggtcctgtggccctgtcagctcatattcctgggatgtgcctataagcaccaactaacctgtcaacctatcacaaggtctcctccagctactctgccacccactccctccagggatgtggccctgcccaatagaaatacctctgcaaagtgacagagagggaagtgtcactccaatccacctttcttccctctaagaaccccacacacaaggacactttaggccaccatgcaaggttttcagacttagcatttcctccaaagtgtccatctctgcaactcactgctctcaataatgctgttgtatgaatgtccattcctgcagatacacaacacacacacatacacacacacacacagagagagagaaagagagagagaacctccctggccaacgcagctgaaggcaactggtcacctcttcatc

SEQ ID NO: 546370 - DNA, 1543 bp, Homo sapiens
atagctgcttaacatttacagtcttgcagagtaacctctctccatggcccctgtactgctctgccccagggtccggctcccaccacattctcctccccccttctctctaccctttttatcttttctgtgaatgatcccccctccttttacctgtcttcacatattgtattatccagccattggaagtcggctacacaaaaagaggtgtcactagaggccatctctctcagaatacagggtgactggaacgaggcaactcatgtttctttggaaggagtaccacaatttcccccaatcatcttaaaagctaccagtgtgcctgaggcaggctgagctgctaagggtgtgcagaaagaaataggagcagggaagagaacatactgcacacattctgctgccactcttgtagtctgaacttgacacaaatgacaaaataacacatgatttccctcacttctaaaatatttccaccaaagttttgaatattgatttgttcctaccttaccaagccctcagactgagaaaagaagaaattaagatgagccttgctgctattttttgttttaatcattacacacaatgctcctccctctcccagccaccacgtggctaaaccccctttggcaatacaggcaaagacataactttagacgttaaccttgttttaaaatgtgcctttcggcaaatagataagtgagaagagagatcaggatctgggggtgttaacggcataaagtgagatgctcctgaactgaacgagcaagaaaaaatattttcttgaaagcagtcctccagaaagaattcttatcatagataagggtgcagtctagtggcaaacttcatgaaatgcagccccttctccaaaggaaagttagaatacttctcaagggaggaagcacaatgtaaaaggtgtaacagcccacaccaagtccacccagcaggggcagtgacattggtcatttctctctgacttgcctgtgaggctcatggcycactcaggtcaatttcagaaaaagctaaaaccaccaccttcctatttcaaggccttagttttctttcattttattaaagaggttctagtggcatgattcggttcctggtcaggacctcttccaagcaggtcctgtggccctgtcagctcatattcctgggatgtgcctataagcaccaactaacctgtcaacctatcacaaggtctcctccagctactctgccacccactccctccagggatgtggccctgcccaatagaaatacctctgcaaagtgacagagagggaagtgtcactccaatccacctttcttccctctaagaaccccacacacaaggacactttaggccaccatgcaaggttttcagacttagcatttcctccaaagtgtccatctctgcaactcactgctctcaataatgctgttgtatgaatgtccattcctgcagatacacaacacacacacatacacacacacacacagagagagagaaagagagagagaacctccctggccaacgcagctgaaggcaactggtcacctcttcatc

SEQ ID NO: 546371 - DNA, 554 bp, Homo sapiens
aaataaagatcttttgttagacattcaaggtctttttacctcctgggtaatctcagttagtttgctgcaaccctgttagcatataaggggaatgtagtcatggtattggcccttggacaaacctgaataaaatgtgttaaccagtaattgacgcagtcctgttctagggtctgaaacacaccagggagcagcctataacatctggtctgcattttttatagaaaatgtgcatactaatgattggcagctggatctattatcttcacttctattattaagtctgggctcacaygtgtttttgactacataaacagagatataaaaggctcctcctcagataagagagcagcttgagaccacgatatgccatattttggtggtttataatccataaatgaactgtgtcctatgtgactgagactctgaaagctgcccctggatatcttgagtgtctcaaatgatcacctgtgctttctttagccttccatgccttatcctttctttgtgaagtctcgtgagtactctgaaaaattagaacctctaatacacccttt

SEQ ID NO: 546372 - DNA, 1242 bp, Homo sapiens
tcagcaaggcattttaaagaaccagtataaaccctcagggcacttggagtatctttcatttattagtttctaacctaacaggatgcctcccacttcttaagagtccaactgcttatataaataaaggagtttaaataaatgtcaccagagtggtatgatgtgaaagttttatttgtgatccaaaatttgtcttcacctacttctagtactttcacaatataagcatattgaatattctagggtaaccaggataatcataaagttgaatatcttagtgtttatcatggaaagacaccataatgattctctaaattagcctttttatgttggtatcatgtaccctggcctcctctcttctcttcccttctcttttattctcttctcttctgtcacatttatacccaggtaatagcgatggtcccaggttgtaccctctggtgataacaaactaactttaaacattgtcacaaatgtggaataggctgaggacatctgcctaagtctgtgttcatcccatatgctaaatagaaaacatttcccctgcttgtgttgtaaatagcaccacatattggcttatatagaaaagaagctaaataatcatcttattttaaagctaacctaacatttgtcttttaatctagtcatttgatttgtgaatatgatatgtagtagtcccaaagaatagaaaatccaacaatctggcaagtacttaacagtgtgtgttattttttactgttgttcctttttttctttttctgttacatatatcccagtcacttttttttttttttttttttttgagatggagtcttgctsttgttgcccaggctgcagtggcacaatctcggatcactgcaacctccacctcctgggttcaagtgattctcctgcctcagcctctcgagtagctgggattacaggtgccaccaccacgcccggctaattttttgtatttttagtagagatggggtttcaccatgttggccaggctggtctcaaattcctgacctcaggtgatctgcctgcttcggcctcccaaagtactgggattacaggcgtgagccacagcacccacccctggtcacgtttttaaagccactttcatatccagtttcaatggctcacacctgtaatcccagctacttaggaggccgagcagtagggattgcttgaggccagaagttcaagaccagcctaagcaacatagcaagactctgactctaaaaataaaaaaataaaaaa

SEQ ID NO: 546373 - DNA, 1242 bp, Homo sapiens
tcagcaaggcattttaaagaaccagtataaaccctcagggcacttggagtatctttcatttattagtttctaacctaacaggatgcctcccacttcttaagagtccaactgcttatataaataaaggagtttaaataaatgtcaccagagtggtatgatgtgaaagttttatttgtgatccaaaatttgtcttcacctacttctagtactttcacaatataagcatattgaatattctagggtaaccaggataatcataaagttgaatatcttagtgtttatcatggaaagacaccataatgattctctaaattagcctttttatgttggtatcatgtaccctggcctcctctcttctcttcccttctcttttattctcttctcttctgtcacatttatacccaggtaatagcgatggtcccaggttgtaccctctggtgataacaaactaactttaaacattgtcacaaatgtggaataggctgaggacatctgcctaagtctgtgttcatcccatatgctaaatagaaaacatttcccctgcttgtgttgtaaatagcaccacatattggcttatatagaaaagaagctaaataatcatcttattttaaagctaacctaacatttgtcttttaatctagtcatttgatttgtgaatatgatatgtagtagtcccaaagaatagaaaatccaacaatctggcaagtacttaacagtgtgtgttattttttactgttgttcctttttttctttttctgttacatatatcccagtcacttttttttttttttttttttttgagatggagtcttgctgttgttgcccaggctgcagtggcacaatctcggatcactgcaacctccacctcctgggttcaagtgattctcctgcctcagcctctcgagtagctgggattacaggtgccaccaccacgcccggctaattttttgtatttttagtagagatggggtttcaccatgttggccaggctggtctcaaattcctgacctcaggtgatctgcctgcttcggcctcccaaagtactgggattacaggcgtgagccacagcacccacccctggtcacgtttttaaagccactttcatatccagkttcaatggctcacacctgtaatcccagctacttaggaggccgagcagtagggattgcttgaggccagaagttcaagaccagcctaagcaacatagcaagactctgactctaaaaataaaaaaataaaaaa

SEQ ID NO: 546374 - DNA, 1242 bp, Homo sapiens
tcagcaaggcattttaaagaaccagtataaaccctcagggcacttggagtatctttcatttattagtttctaacctaacaggatgcctcccacttcttaagagtccaactgcttatataaataaaggagtttaaataaatgtcaccagagtggtatgatgtgaaagttttatttgtgatccaaaatttgtcttcacctacttctagtactttcacaatataagcatattgaatattctagggtaaccaggataatcataaagttgaatatcttagtgtttatcatggaaagacaccataatgattctctaaattagcctttttatgttggtatcatgtaccctggcctcctctcttctcttcccttctcttttattctcttctcttctgtcacatttatacccaggtaatagcgatggtcccaggttgtaccctctggtgataacaaactaactttaaacattgtcacaaatgtggaataggctgaggacatctgcctaagtctgtgttcatcccatatgctaaatagaaaacatttcccctgcttgtgttgtaaatagcaccacatattggcttatatagaaaagaagctaaataatcatcttattttaaagctaacctaacatttgtcttttaatctagtcatttgatttgtgaatatgatatgtagtagtcccaaagaatagaaaatccaacaatctggcaagtacttaacagtgtgtgttattttttactgttgttcctttttttctttttctgttacatatatcccagtcacttttttttttttttttttttttgagatggagtcttgctgttgttgcccaggctgcagtggcacaatctcggatcactgcaacctccacctcctgggttcaagtgattctcctgcctcagcctctcgagtagctgggattacaggtgccaccaccacgcccggctaattttttgtatttttagtagagatggggtttcaccatgttggccaggctggtctcaaattcctgacctcaggtgatctgcctgcttcggcctcccaaagtactgggattacaggcgtgagccacagcacccacccctggtcacgtttttaaagccactttcatatccagtttcaatggctcacacctgtaatcccagctacttaggaggccgagcagtagggattgcttgaggccagaagttcaagaccagcctaagcaacatagcaagactctgactctaaaaatwaaaaaataaaaaa

SEQ ID NO: 546375 - DNA, 611 bp, Homo sapiens
aataaccataaaagtggacaaccagcagccctcggggctgctctatggagtagccattcttttatttcttcacttgtttttttgttttgagacggagtcttgctctgtcaccaggctggagtgcagtggcgcgatcttgtctcactgcaacctccgcgctcccgcccccctggtttaagcggctcccctgactcagcctcccaactagctgggactacaggcgcccgccaccacgcccagctaattttttgtattatagtagagacrgggtttcaccatgttaggccaggatggtcttgctctcctgacctcgtgatccgcccgcttccacctcccaaagtgctgggattacaggcgtgagccaccgtgccaggcccctttacttgcttaataaacttcctttcactttactctatggattcgccctgaattcattcttgcgtgagatccgagagccctctcttggtgtctggattggagctcctttcctgtaacagtgtggtccacaatgacagcaactgatgtgcagagcaaaggaggccacagtcacgctggccctgcctgccctgccctctgtctgcagccctggacaatatcgtaagagaaactgg

SEQ ID NO: 546376 - DNA, 2163 bp, Homo sapiens
gttctcaactgcgatcacgtcctggttatggaaaatgggaaggtataggaagctcttttggcttcacctccccagaaagtccagtggtttgagctttacagtgggtagatattttccgatgatttcagttcttcttctctgactttcaggtgattgagtttgacaagcctgaagtccttgcagagaagccagattctgcatttgcgatgttactagcagcagaagtcagattgtagaggtcctggcggctgattctagaggaggaagaggctctgtgagatgaataggaggagtcttcaggaggaggggctgtcctctccgcaggcagccctggtcttcagcccctcccatccacggagtgagctggggctgaagttgtccccactgccatactcagtccatgtcaccccacttggtgggcttggggttggttctgggtggtgaaccggggcagacccagctaatggattaaaaaactgcccttcacctcccaaatccccaagggttcctcatgtgttttcaccaaaaccaccccagtgcctgagattgaaaatattgtaactttcagttagaaatcagccacaataaacaacatgggaaaatgccttaggatggagtttgcaaggtttccttgcccattatcagaaggaaaaagagcagaattttcttctcgtttaaccccactcacttccatcttgactgggtgacaagtggtaatgacacagatttgtagcgtgaaagactgaatacagtgtttggccaaaaatttttttaaaaatcatattatatgtttcaattgatctgttagaataaccaagaaaacaaaatgctggagtttctctataaatgacacttttatatcttctttattcgtcgttaaaacgcggtaggaaattaccctgaaatgtcgccttgcaattatttcactgaagatattccaatttccatactatttcctccaatagacccttgttgccttctcccttcrctcagtaatgaaccttcacagtcgcttaccaaacaaaaagctttctctccaacctggaggctggttctgatggaagcagtaaagatgtattcccagcagccccaggagtgagcgctgctaactcatggtgacatttgggaaaaaaatatttatagaaaatccagcaagctcttgtgtagtagccgccaaggggcacgctgggagttctggctgtttttcattcatcaggaatgaaggccccatgaggttccctgggcctgctttccaggccccaggctgagctctaaatgtagctcagggcagtgtggtcagcaaagcttccagaccacaaccccccaccccacttcccttgtaagtgttggtcacgtacttgcttccccagacgtggaggaaggagtgcctggcacctggaagcactcgggaaacacttgtggcagccatgaatgacagcatctaatgaactcgctgaaacacagctgtggagcctggcggacacccctcccaggtgtgtgtgcatgttaagagcttaatctggatttctggccaaaaagccaacagccagcaattcaagggctgggcatgtgaggttaacctccaaccgattattctccagccctcctccggccaggcctgggcaggggtctacccaaccagcggggaggtgagcacacctggccttaggtagagcttataacctggcaactgcatgaaagccctggcccagcagcttggcagcaatggatcctgccctcagcagagggtgcactaagacatgtggctgagaaggacgtgagccagggggttccttctgtgggcagctccaggccaagtgtggatctctctgtgaagggacacagtgtatctttgcctgatctgagctttcccccatggtgcatgaccctgactgaaggtcattaaacccacatccacagcgttctgagcagctgctcccagctgagtgtgggcatcacctttatggacataagataacttccccaatatgacaagcagactgggcagtctgtgctggccatgggaatccatgacagttgtgcaatgtcagggagggatgctttactttctaccaactggacaccagccagataatcagtctgtgatttcaagaggtggtgttttcatgaggacagaggatagactacaatgatccctgctgc

SEQ ID NO: 546377 - DNA, 512 bp, Homo sapiens
atctttgttgtatttgtaacttccttctctgatagttagaaactctgattccattatctttaatatatttacttagtagattaatccttctcgatgtaaccaatattcttttttttttttggttttttttttttttttgagatggagtctcactctgtyacccaggctggagtgcagtggtgcaatctcggcttactgcaacctctgcctcccgggttccagtgattctactgcctcagcctcctgagtagctgagattacaggcacctactaccacacccagctaatttctgtagtttttagtagagacggggtttcaccatcttggccaggcagatcttgacctcttgaccttgtgatccacccacttcggactcccaaagtgctaggattacaggcatgagccaccatgccaggctggatgtaaccaatattctaacaccgccatcatcctctcccctgaatggactccctcctctgttttctctggctccgcttcccttttccaggtt

SEQ ID NO: 546378 - DNA, 911 bp, Homo sapiens
ggtgcactctcagctcactgcaacctccgcctcccrggttcaagtaattctcctgcctcagcctcccaagtagctgggactacaggcatgggccaccacatccagctaatttttgtatttttagtagagatggggtttcaccatgttggccaggatggttttgatctcttgacctcgtgatccaccagccttggcctcccaaagtgttgggattacaggcgtgagccaccgtgcctggccaaaaattatttttaatggtctgtaccagtgacaggcttgagggtaggaagaaggattctggttttctcataatccccctcagccatccctcccattctttaacatgaacaaatgatatttcttcaattttaggtaaaagctatggagccaatacaggtgcagcattcccttctacccattggcaattctggaacttcccttgctctgttaatagaccaaaaagaaaaagttgttattatgttgagtatttactgactacaatgtaatccagttagaaatccacaacaaatagataaccacaaaaaacatctgaaaacagattttcaaataactcccaagcttgataagaaatacaagaaaattacaaactgtttacaactcaagaacactacatgacaaaacttatgggatgcagccaaagtggtacttagaagccaatgaatagcagtaaacaagtttattagcacaaaagattgaagttaaatgaacttaactttcaaatcaggaagtgcaaaaacaacaacaacaaaattatccaaggaaagtagacgaaaggaagtaaaaataattttaaaagaaattataaattaatcaacaaaaacaatgcttgtcctttgacgagacgaatctttggtaaatttcactaagaaagagagaaagtatacaaacac

SEQ ID NO: 546379 - DNA, 911 bp, Homo sapiens
ggtgcactctcagctcactgcaacctccgcctcccaggttcaagtaattctcctgcctcagcctcccaagtagctgggactacaggcatgggccaccacatccagctaatttttgtatttttagtagagatggggtttcaccatgttggccaggatggttttgatctcttgacctcgtgatccaccagccttggcctcccaaagtgttgggattacaggcgtgagccaccgtgcctggccaaaaattatttttaatggtctgtaccagtgacaggcttgagggtaggaagaaggattctggttttctcataatccccctcagccatccctcccattctttaacatgaacaaatgatatttcttcaattttaggtaaaagctatggagccaatacaggtgcagcattcccttctacccattggcaattctggaacttcccttgctctgttaatagaccaaaaagaaaaagttgttattatgttgagtatttactgacyacaatgtaatccagttagaaatccacaacaaatagataaccacaaaaaacatctgaaaacagattttcaaataactcccaagcttgataagaaatacaagaaaattacaaactgtttacaactcaagaacactacatgacaaaacttatgggatgcagccaaagtggtacttagaagccaatgaatagcagtaaacaagtttattagcacaaaagattgaagttaaatgaacttaactttcaaatcaggaagtgcaaaaacaacaacaacaaaattatccaaggaaagtagacgaaaggaagtaaaaataattttaaaagaaattataaattaatcaacaaaaacaatgcttgtcctttgacgagacgaatctttggtaaatttcactaagaaagagagaaagtatacaaacac

SEQ ID NO: 546380 - DNA, 911 bp, Homo sapiens
ggtgcactctcagctcactgcaacctccgcctcccaggttcaagtaattctcctgcctcagcctcccaagtagctgggactacaggcatgggccaccacatccagctaatttttgtatttttagtagagatggggtttcaccatgttggccaggatggttttgatctcttgacctcgtgatccaccagccttggcctcccaaagtgttgggattacaggcgtgagccaccgtgcctggccaaaaattatttttaatggtctgtaccagtgacaggcttgagggtaggaagaaggattctggttttctcataatccccctcagccatccctcccattctttaacatgaacaaatgatatttcttcaattttaggtaaaagctatggagccaatacaggtgcagcattcccttctacccattggcaattctggaacttcccttgctctgttaatagaccaaaaagaaaaagttgttattatgttgagtatttactgactacaatgtaatccagttagaaatccacaacaaatagataaccacaaaaaacatctgaaaacagattttcaaataactcccaagcttgataagaaatacaagaaaattacaaactgtttacaactcaagaacactacatgacaaaacttatgggatgcagccaaagtggtacttagaagccaatgaatagcagtaaacaagtttattagcacaaaagattgaagttaaatgaacttaactttcaaatcaggaagtgcaaaaacaacaacaacaaaattatccaaggaaagtagacgaaaggaagtaaaaataattttaaaagaaatyataaattaatcaacaaaaacaatgcttgtcctttgacgagacgaatctttggtaaatttcactaagaaagagagaaagtatacaaacac

SEQ ID NO: 546381 - DNA, 516 bp, Homo sapiens
agataatgatatttagttattggcttcctggaagactgatgacaggaagattcagtattacacaaactaggtataaagaagcaatttaggtctacttattttatttctcctttgaacctctcacttgcctgacagtagcattgcattgattgagattttatgatcattttatcttgaattggttaaactaaaatttatatctttgtcttctttataaagaaagatattactagctgggcacagtggctcacacctgtaatcccagtgctttgggtggccaaggtgggaagatcacttgaggccaagagttcaagaccaacctgggtaaccgagtgagaycccatctctacattatatatatatatttttaatttaaaaagaaaaaatattaccaaacagattaattatgcaaacataattttgggacacagagttaacttgaggacaaaatagtttttaaagattttaactgtgtatatataaattaatatcctgaaccacaagtgcgtattagtg

SEQ ID NO: 546382 - DNA, 645 bp, Homo sapiens
ttgaacagttggctacatttgattggccaaactcagtgactggcacaggtgtgggatatggtcggtttacacctccacttgtatagttcatgatgtacagagaaacctttaggctgaacttaaatatataatgaggcagctttaggctaaacttgatttaacagacctttaggaatacacattctggaagagtgaatttataaaaataaatgtttatggctgtctcataactgcattatcagcaatttttgcactatagagatttttatgttaggtcttggtcctttatatcattaaaatattaaataggaaaaatcatggaatttattcataaatagatgtacatctatttccccagactacaggtaaagaactatttgggtaagaatgggctgctgacctgcaaggagaaaaatgagagcttcagtttaaaactgtcatagtttataaaagatataaaccattcagttcctttagtttttaatatttagaagagtaaacaaaaatttgattcaattaaatgtaacaaatacaattaaatggagatgcaatttgatttattgaaaatarcatgattttaatgcagattaactgtaggcagtaccttaccagaatataatgcattctggaaaatatctactgact

SEQ ID NO: 546383 - DNA, 629 bp, Homo sapiens
gtctcaaaacaaacaaacaaaaagaaggtaaatcactaggggatatatagaaattatatgataaaatagactttagaaaaaacctttttgaaaccatttacaaaaggaaactgaatagacctctgacactcttgtctccaataagctgtgaaaatagtactggttccatcacttaagaggcattcagctgttctctggtaaatatttactcatacctttaaaaggaaaaattagctaaaggtaggctcgagttagaaacttaatctaactagttaaatcctttgaaatttggcaaaattcctcttcacacataaaccacttaatacaaaaccatgttttgtattaagacccccaaatctgaagggcaattagccaactcctagatcatctcatgttatatcctgtccaaaaataaacaaactgggctctggcatattctaaaaatatcttcctgtctaaaaaaacatttaacagagtttgtctaagaagcagactcccaattttattctaaatataattatatttgcatatatgtaatttacaaacaactttcctggaacacaagcattacacaaagtgaagtatacctgtatatttatttaaaagcaaacaaacaggayatatatata

SEQ ID NO: 546384 - DNA, 597 bp, Homo sapiens
cataggcaggcccaccaggaggagcgcatagcccacatgcagtgttgggaaggccccttcgggaagtgttatttcctctgataccattatgtatttgctcatgcacaatgtatgagtgagtgctatccaggctcaacgaaggggtaggaagaaaaggaagcactaagactaagtaacccacagaaagaccagcatgtgtgaaagcccagsggagcagagtgaactttctaagaactaaaagaagatcagcatgtctgtgggtagtcaaagggatgaagttggatagatgaacaaagatcacttcctgcagagccttgccagctttgtaaggagtttgtgcattaccttacgagtgatgtctaatcattaaaatgtcgttagtagagcattgatataatctatgggaagaaatggagtggtgataggagtagggtcccaaacaaaactggacacgggaagcctaatcagaaagctgttgaagttgtccaggtgagagagaatgggtttggaagtagagtagtggcagagtagatggccagaaatgagaaggtcgaaagatatatgttaactgtagacaccaggtgaaggaggaaggga

SEQ ID NO: 546385 - DNA, 597 bp, Homo sapiens
cataggcaggcccaccaggaggagcgcatagcccacatgcagtgttgggaaggccccttcgggaagtgttatttcctctgataccattatgtatttgctcatgcacaatgtatgagtgagtgctatccaggctcaacgaaggggtaggaagaaaaggaagcactaagactaagtaacccacagaaagaccagcatgtgtgaaagcccaggggagcagagtgaactttctaagaactaaaagaagatcagcatgtctgtgggtagtcaaagggatgaagttggatagatgaacaaagatcacttcctgcagagccttgccagctttgtaaggagtttgtgcattaccttaygagtgatgtctaatcattaaaatgtcgttagtagagcattgatataatctatgggaagaaatggagtggtgataggagtagggtcccaaacaaaactggacacgggaagcctaatcagaaagctgttgaagttgtccaggtgagagagaatgggtttggaagtagagtagtggcagagtagatggccagaaatgagaaggtcgaaagatatatgttaactgtagacaccaggtgaaggaggaaggga

SEQ ID NO: 546386 - DNA, 531 bp, Homo sapiens
gagagacccaggcccccatagaatggatgggtgtccatcaccctctagcccatttcctcttccagctccctccctccaaagtcaaagctggaatgaccagccgggaccacccacatccacttctggccccttcctctccggccataaccgagaggatcgcattcccagagtgcgtgcacacactggggactcttccgataacatctgacttggcttttaattattgggaaatgattgttggtttacagagcaatatttatccagcaaattgctaattaatgcactgaaaaatgccaagtggtatcaaatatttgcttttatttgcactaccaaaatatttttatttttggtgaggcccagaatggatgagaaggtgctgaaatgtttaaacagggtgtgtaaagtttaagctgaatattgaacagggaggagggctaggctttgtgactttgtggctggggctctggggrtgttctgtggactggacgatgctcggagttggccctgagagcagtgtgcaacccttgagat

SEQ ID NO: 546387 - DNA, 657 bp, Homo sapiens
tcatccagttgttcacaattccagcaggctccggttgccgatggtgacaccatcgtttcaggaactgcccttggagtcaaggagacaaatttcaaagagagggtgagcttgacagatacccaaagggcagcactccctccctcagctcctgtcccccactttgtgaagagggattaacaatagcacctcctgtggttgtcgtgaatgtcaaatgatctagtagatcatcatttttattattgtctcagaagccaccatgcactgggctcgctctgtgccagggactgtgccaggcactttccctgtgtgatctgatggaatcctcagaataagtccttgggggtgatgccccagtggctgccactctcagaggaggaagctgggaacagagggttagcaacagtccaaggccacacagggctgggattccacagcaagtctccccctcccccaggctgcctaggcacacgctgctctgctccctcttttgccaggaacatcctggaggtcggagctgcccctggaggagggtagatgagaaagcacctcacaaaycccaaggacacagggccacatgttatcgaatcttgctgaagaccctcattacggacatgaaataacccctggggggctccccggggatatggagattatacc

SEQ ID NO: 546388 - DNA, 659 bp, Homo sapiens
ccatttcaaaaaaaaaaaaaaaaaattcatagttgtgttaagttgctaagtattggagtcatttgttatacggcaattcttaactagaacataaacagaaacaatgaaattaaataaaaagggaggccttgaatgggtgaatgttgatgatgtcctattatacagcaggcagtatatcagagtgaaggtgactgagacgtacagggagtgacagggaatgtgttgacaaagagagcacaggattgtccagagagggcaactcattcaaactccaaagaacaatgagcacatcaaaggaaacctgtgagctaaatgcagcttccaaggcccagggtttgttctcaactctgatctaggtacatatttacccagctcccccatctctaaatcaaagcagacacacaagtgcttggcacattccaattggtgaacacagattttaagataatccccatcttgaagcactcaaaaatatcaggcaagcagccccctatttccartgaaaagatcaatgcaattgctaatgtaaatatttagatcttagagatctaggtacaaaaataaaatattgattttatagttttagctctatatagttttaagacacatattatacaaaataacacaggaacgtagatataattttccacttaattaaa

SEQ ID NO: 546389 - DNA, 659 bp, Homo sapiens
ccatttcaaaaaaaaaaaaaaaaaattcatagttgtgttaagttgctaagtattggagtcatttgttatacggcaattcttaactagaacataaacagaaacaatgaaattaaataaaaagggaggccttgaatgggtgaatgttgatgatgtcctattatacagcaggcagtatatcagagtgaaggtgactgagacgtacagggagtgacagggaatgtgttgacaaagagagcacaggattgtccagagagggcaactcattcaaactccaaagaacaatgagcacatcaaaggaaacctgtgagctaaatgcagcttccaaggcccagggtttgttctcaactctgatctaggtacatatttacccagctcccccatctctaaatcaaagcagacacacaagtgcttggcacattccaattggtgaacacagattttaagataatccccatcttgaagcactcaaaaatatcaggcaagcagccccctatttccagtgaaaagatcaatgcaattgctaatgtaaatatttagatcttagagatctaggtacaawaataaaatattgattttatagttttagctctatatagttttaagacacatattatacaaaataacacaggaacgtagatataattttccacttaattaaa

SEQ ID NO: 546390 - DNA, 677 bp, Homo sapiens
caaatagaaaatcagttaatatcaataatgagccaatttttttttctttttttttttgagacagagtctctctgtcacccaggctggagtgcagtggcactatctcagctcactgcaagctccgcctcctgggttcacgtcattctcctgtctcagcctctcgagtagctgggactacaggtgcccgccaccatgcttggctaattttttgtatttttagtagagactgggtttcactgtgttagccaggatggtctcgatctcctgacctcgtgatctgcctgccttggcctcccaaagtgctgggattacaggtgtgagcccccgcaccctgccaataatgagccaattctttaaaaaattcaactcatagattcaaagtttttggaaggtgaaataatggacattgttgtgaatgttatcatgggtccatttcaaaattcagcagtgaagattaatttgttttggtactaatatgaatacattatgataaaaataatgcacttactaaattaagaaacccatggaacagaaatgtacttgtaataggttgtgatacacrtaatttgcaactatgtacaaataaactgtggtatcttactaattgaaacagaagcagtagttgaaatttataaaaagttttgtaggtatacagtaacggaactaatttattttgg

SEQ ID NO: 546391 - DNA, 677 bp, Homo sapiens
caaatagaaaatcagttaatatcaataatgagccaatttttttttctttttttttttgagacagagtctctctgtcacccaggctggagtgcagtggcactatctcagctcactgcaagctccgcctcctgggttcacgtcattctcctgtctcagcctctcgagtagctgggactacaggtgcccgccaccatgcttggctaattttttgtatttttagtagagactgggtttcactgtgttagccaggatggtctcgatctcctgacctcgtgatctgcctgccttggcctcccaaagtgctgggattacaggtgtgagcccccgcaccctgccaataatgagccaattctttaaaaaattcaactcatagattcaaagtttttggaaggtgaaataatggacattgttgtgaatgttatcatgggtccatttcaaaattcagcagtgaagattaatttgttttggtactaatatgaatacattatgataaaaataatgcacttactaaattaagaaacccatggaacagaaatgtacttgtaataggttgtgatacacataatttgcaactatgtacaaataaactgtggtatcttactaattgaaacagaagcagtagttgaaatttataaaaagttttgtaggtatacagtaackgaactaatttattttgg

SEQ ID NO: 546392 - DNA, 530 bp, Homo sapiens
gggagcatgcgcagtgtgtttgtacgcatgcaggagttgtacacatgctcacgtgaggcgttcttcccttatcagtcgaatgtccctagaaggtcatataccagttaaactctggcattctgcctgttagtgctcatgcttgagtmcactcgcccaactgctaagatcttaccgggaagctgcttatcacccgtttcaggtgttttctatctactgggagcctgtctttccctagcaccggctgcgaccaattattattttagagcgacagactaacagccgcctgaccatcacctgatggtcacctgaggttcctgctattggaacagaccctctcctgccctgctcatacctgacagctacctactgtaacacacctaggcagataaagatgagattgtggagttccaacagaagcagacattagggaatgagctgaaaggtggaggtggaagttgttcagggagatgagattgcgcggggtacgtaagaagagagcctcagtaggcttcgcggtggagcaggctgtc

SEQ ID NO: 546393 - DNA, 530 bp, Homo sapiens
gggagcatgcgcagtgtgtttgtacgcatgcaggagttgtacacatgctcacgtgaggcgttcttcccttatcagtcgaatgtccctagaaggtcatataccagttaaactctggcattctgcctgttagtgctcatgcttgagtacactcgcccaactgctaagatcttaccgggaagctgcttatcacccgtttcaggtgttttctatctactgggagcctgtctttccctagcaccggctgcgaccaattattattttagagcgacrgactaacagccgcctgaccatcacctgatggtcacctgaggttcctgctattggaacagaccctctcctgccctgctcatacctgacagctacctactgtaacacacctaggcagataaagatgagattgtggagttccaacagaagcagacattagggaatgagctgaaaggtggaggtggaagttgttcagggagatgagattgcgcggggtacgtaagaagagagcctcagtaggcttcgcggtggagcaggctgtc

SEQ ID NO: 546394 - DNA, 633 bp, Homo sapiens
agggtttggcctccgtatgacttactgtcttatggggctgatttactaagaagtaaatacataattgtgctatcaaactaattatcttgtgtgcaaagccagacaataaaaagcaggcatgataaggctgaggggagttcttctgacattcttttacattattctgatggcataaacaccttagcacctcaacagttcaaaaatcacatcgcagatatcattgactgcagagctgggaatcagaatcgagcttcctcatccattaacacaggccaagttcatttgcagctctcatacttgtcacaatggagataactgttttactaagaagtcagcatctgattgggaataagaagaagactacagaagttggagagcgtggttttatcagttaggcctacagaattccatgcagttctaggatagtgactctctggggcctgcaagtraaagaatttcttaaagaatctctggtaaaggagcatgagaagaaagtagggggccagatgaaggatcattcaatacagccagctgatcatttgttatgccagctttaatgctatctgcatgtgaagtttctgtcctacccgccatttgacagaaacagtatgtacaacagctttagaacttgac

SEQ ID NO: 546395 - DNA, 556 bp, Homo sapiens
gaaataacttaagtcttttaactcaagtgcaactcttcgctttgaacttagtgaaaggattctctttgttttggctttggagatgactcattttgcagaaaaagaaaaaaaaaaaagcccaacattgtctcgcctactgcccataactcaccttaatccttagttcgtaaatcagggttttcgcctttctcagcttctgaaaacaaatccaaaccttcataaatgcattttctattgatcyggtggttatgaaaacctttacattttcactagggtctaccattcatgcctatctcccaagataaattacagtttcaaactgagatgagctaaactggttcaaacacattttgaaatgggatctccctccatggaaaacagtttggctttgaagggaagatcagtcttgaaaaaaagttctatattttcccaagatcaccaagtaagattttgccacgttcattttcttagatgtacttggttaggatagaaaaaatgtcaatctgttaaaattggagtgagctcacagaaagtcaaaagttcacaggatgaggca

SEQ ID NO: 546396 - DNA, 614 bp, Homo sapiens
tccatatgtttagttggtttttctccttacagtttgtcgaactcatttgtaaatgaagaagaatacctcaatccctattggggctacttcttttagtatacaaaatgttcgttaacttcaaagtgctccagaactttttggtgataaagtaagtagataagacaataaaagccctcccacttctaactttttttgtttcttgttttttaatgacgttaataattttctcagcatagttgacttcactgatcttagaaattcaacaatatgctcctgaatgaccagtgagtcaatgaagaaattgaacagtaaatggaaaattttcttgaaacaaatgataatggaacaccacataccaaactctgcgagatacagtgaaagaaataccaattggccagtttacagctgtaagtgcctccatcagaaaagaggcaaaacttcaaatgagcaatctaatgatgctcaggtaacatcagaatgtataaataccaaaaataaacacttaacaatatcataattaaattktagaaaaccaaagaccaagattaaattttatttatttattttaattgttatgggttgatagtaagtgtatatattgatgagttacatga

SEQ ID NO: 546397 - DNA, 604 bp, Homo sapiens
ctgagtatagaaatcagaaaacttcctttaataaccatcaaccatgaaaatcatttaagaataacttttttccatttatttggaaaaaagtctgactttacagcaaaacataattttctctcccttttgactactgagcctcagtttcattccatttgacttgtgcatacactttccaaggattctgagatgccgagaaggaccactatctcartgtataatgttttaatgactatttggaggctcagacacctctgaattgacaaagacagaacaagtgtctttccccttcagtacctcattgaactagtagctctgtgttttattctcgccttaccttttaaaacatttgattttagctaagatcagatttatttaccaggaaacctttataagagctccctttctgctacgtgcaaatgtgttaatgtttattcattacatggcaatgtgcctatggttttcctttagtccttcttaggctgtagcacatcacctcagtaaaccaaaaattaaatgctaagccccccagccaacagaacggagccctcctgtcagccgagggcattccaaaagaaacctaagaaactagttcaggccatga

SEQ ID NO: 546398 - DNA, 604 bp, Homo sapiens
ctgagtatagaaatcagaaaacttcctttaataaccatcaaccatgaaaatcatttaagaataacttttttccatttatttggaaaaaagtctgactttacagcaaaacataattttctctcccttttgactactgagcctcagtttcattccatttgacttgtgcatacactttccaaggattctgagatgccgagaaggaccactatctcagtgtataatgttttaatgactatttggaggctcagacacctctgaattgacaaagacagaacaagtgtctttccccttcagtacctcattgaactagtagctctgtgttttattctcgccttaccttttaaaacatttgattttagctaagatcagatttatttaccaggaaacctttataagagctccctttctgctacgtgcaaatgtgttaatgtttattcattacatggcaatgtgcctatggttttcctttagtccttcttaggctgtrgcacatcacctcagtaaaccaaaaattaaatgctaagccccccagccaacagaacggagccctcctgtcagccgagggcattccaaaagaaacctaagaaactagttcaggccatga

SEQ ID NO: 546399 - DNA, 521 bp, Homo sapiens
ataatctaaggctgtgaaaccaaagaaaaggctaaattcagggccataagagcacaagatggcaggagggtaactaaaacagttctcctgaaggcaggacmaaggaaacaccagtaaagttaggaagtacatgctggctgctgctttgtgagatttcaggtagataaacatggcatcaagaaagaaaaggaccctgttcttctagaatttaaaaagaataactgcacacacacacacacacacacacacacacacacacactcacctgacctctaaagtcttagctcagaaaggcctgtgagccaaataaggataataaagagcctaggaacaccaagcacacaatacacttgtatctagctggataacctgacctggacttttcatttgattccaggttatgaagacagcgctctgaaattaggtcccatcaaaggaaagattagttatatatctccccagaggtacagctctgggtctacagtacaccatgacactggaaacagaaataaagcatcatc

SEQ ID NO: 546400 - DNA, 1094 bp, Homo sapiens
cagacttggccgggcatggtggctcacgcctgtaatcctagcactttgggaggccaaggcgagcggatcacctaaggtcaggagttcaagatcagcctggccaacatggggaaatcccttctctactaaaagacaaaaattagccgggcatgatggggggtgcctgtaatcccaggtaatcgggaggctgagatgggagaatcgcttgaacccgggagacggtggttgcagtgagccaagaaagccgcagacatcatgcttactttagacagagctaagagaaacttcttcagactctaagatctaccctgaaacatctygcatataaaactagaagctggatatgacctaaatcagagagataaacacagctaaattcctacagatatgaactaatgtgtctaatatgtacgagtaacttctacctcactttactttttatagattatgggataatcatcatagcatatattagtgccactgatatggacagaatttcatggggtggcgggtgcagaacagaaactagatctggcccatctcatgcctctatgttcagttattatgctctatggtgccttaggctccttatttgtgaaatgtggccaataatacaccaactgttctccttactaggtcctgcagagagaataaagggctgatagactaggtagatggacaataaatggaaggaaaggcatatccacagtactgcataagctgttctacacatacaaactggtttaatgtctggtgccatataaaccagtaagttgacttcatttaaagaaaaagaaactactactttgttgggttaaatcacagttacacactgcagtatatattaaatgctaaaaataaaattcacagaggattactattattgctaaagatttcttttcaaaagtacatcttcattagtttattttcaacactaaaatctttaatagtttgttgttttagaacataatttgaaatcaatatattttttgacaaattcattatcaaaatgaacacatatcatgtttgattatgttgtgtttcaacttttctagatttcttccctcactgaaaaaatatttgagtgcccacta

SEQ ID NO: 546401 - DNA, 1094 bp, Homo sapiens
cagacttggccgggcatggtggctcacgcctgtaatcctagcactttgggaggccaaggcgagcggatcacctaaggtcaggagttcaagatcagcctggccaacatggggaaatcccttctctactaaaagacaaaaattagccgggcatgatggggggtgcctgtaatcccaggtaatcgggaggctgagatgggagaatcgcttgaacccgggagacggtggttgcagtgagccaagaaagccgcagacatcatgcttactttagacagagctaagagaaacttcttcagactctaagatctaccctgaaacatcttgcatataaaactagaagctggatatgacctaaatcagagagataaacacarctaaattcctacagatatgaactaatgtgtctaatatgtacgagtaacttctacctcactttactttttatagattatgggataatcatcatagcatatattagtgccactgatatggacagaatttcatggggtggcgggtgcagaacagaaactagatctggcccatctcatgcctctatgttcagttattatgctctatggtgccttaggctccttatttgtgaaatgtggccaataatacaccaactgttctccttactaggtcctgcagagagaataaagggctgatagactaggtagatggacaataaatggaaggaaaggcatatccacagtactgcataagctgttctacacatacaaactggtttaatgtctggtgccatataaaccagtaagttgacttcatttaaagaaaaagaaactactactttgttgggttaaatcacagttacacactgcagtatatattaaatgctaaaaataaaattcacagaggattactattattgctaaagatttcttttcaaaagtacatcttcattagtttattttcaacactaaaatctttaatagtttgttgttttagaacataatttgaaatcaatatattttttgacaaattcattatcaaaatgaacacatatcatgtttgattatgttgtgtttcaacttttctagatttcttccctcactgaaaaaatatttgagtgcccacta

SEQ ID NO: 546402 - DNA, 1094 bp, Homo sapiens
cagacttggccgggcatggtggctcacgcctgtaatcctagcactttgggaggccaaggcgagcggatcacctaaggtcaggagttcaagatcagcctggccaacatggggaaatcccttctctactaaaagacaaaaattagccgggcatgatggggggtgcctgtaatcccaggtaatcgggaggctgagatgggagaatcgcttgaacccgggagacggtggttgcagtgagccaagaaagccgcagacatcatgcttactttagacagagctaagagaaacttcttcagactctaagatctaccctgaaacatcttgcatataaaactagaagctggatatgacctaaatcagagagataaacacagctaaattcctacagatatgaactaatgtgtctaatatgtacgagtaacttctacctcactttactttttatagattatgggataatcatcatagcatatattagtgccactgatatggacagaatttcatggggtggcgggtgcagaacagaaactagatctggcccatctcatgcctctatgttcagttattatgctctatggtgccttaggctccttatttgtgaaatgtggccaataatacaccaactgttctccttactaggtcctgcagagagaataaagggctgatagactaggtagatggacaataaatggaaggaaaggcatatscacagtactgcataagctgttctacacatacaaactggtttaatgtctggtgccatataaaccagtaagttgacttcatttaaagaaaaagaaactactactttgttgggttaaatcacagttacacactgcagtatatattaaatgctaaaaataaaattcacagaggattactattattgctaaagatttcttttcaaaagtacatcttcattagtttattttcaacactaaaatctttaatagtttgttgttttagaacataatttgaaatcaatatattttttgacaaattcattatcaaaatgaacacatatcatgtttgattatgttgtgtttcaacttttctagatttcttccctcactgaaaaaatatttgagtgcccacta

SEQ ID NO: 546403 - DNA, 1094 bp, Homo sapiens
cagacttggccgggcatggtggctcacgcctgtaatcctagcactttgggaggccaaggcgagcggatcacctaaggtcaggagttcaagatcagcctggccaacatggggaaatcccttctctactaaaagacaaaaattagccgggcatgatggggggtgcctgtaatcccaggtaatcgggaggctgagatgggagaatcgcttgaacccgggagacggtggttgcagtgagccaagaaagccgcagacatcatgcttactttagacagagctaagagaaacttcttcagactctaagatctaccctgaaacatcttgcatataaaactagaagctggatatgacctaaatcagagagataaacacagctaaattcctacagatatgaactaatgtgtctaatatgtacgagtaacttctacctcactttactttttatagattatgggataatcatcatagcatatattagtgccactgatatggacagaatttcatggggtggcgggtgcagaacagaaactagatctggcccatctcatgcctctatgttcagttattatgctctatggtgccttaggctccttatttgtgaaatgtggccaataatacaccaactgttctccttactaggtcctgcagagagaataaagggctgatagactaggtagatggacaataaatggaaggaaaggcatatccacagtactgcataagctgttctacacatacaaactggtttaatgtctggtgccatataaaccagtaagttgacttcatttaaagaaaaagaaactactactttgttgggttaaatcacarttacacactgcagtatatattaaatgctaaaaataaaattcacagaggattactattattgctaaagatttcttttcaaaagtacatcttcattagtttattttcaacactaaaatctttaatagtttgttgttttagaacataatttgaaatcaatatattttttgacaaattcattatcaaaatgaacacatatcatgtttgattatgttgtgtttcaacttttctagatttcttccctcactgaaaaaatatttgagtgcccacta

SEQ ID NO: 546404 - DNA, 1094 bp, Homo sapiens
cagacttggccgggcatggtggctcacgcctgtaatcctagcactttgggaggccaaggcgagcggatcacctaaggtcaggagttcaagatcagcctggccaacatggggaaatcccttctctactaaaagacaaaaattagccgggcatgatggggggtgcctgtaatcccaggtaatcgggaggctgagatgggagaatcgcttgaacccgggagacggtggttgcagtgagccaagaaagccgcagacatcatgcttactttagacagagctaagagaaacttcttcagactctaagatctaccctgaaacatcttgcatataaaactagaagctggatatgacctaaatcagagagataaacacagctaaattcctacagatatgaactaatgtgtctaatatgtacgagtaacttctacctcactttactttttatagattatgggataatcatcatagcatatattagtgccactgatatggacagaatttcatggggtggcgggtgcagaacagaaactagatctggcccatctcatgcctctatgttcagttattatgctctatggtgccttaggctccttatttgtgaaatgtggccaataatacaccaactgttctccttactaggtcctgcagagagaataaagggctgatagactaggtagatggacaataaatggaaggaaaggcatatccacagtactgcataagctgttctacacatacaaactggtttaatgtctggtgccatataaaccagtaagttgacttcatttaaagaaaaagaaactactactttgttgggttaaatcacagttacacactgcagtatatattaaatgctaaaaataaaattcacagaggattactattattgctaaagatttcttttcaaaagtacatcttcattagtttattttcaacactaaaatctttaatagtttgttgttttagaacataatttgaaatcaatatattttttgacaaattcattatcaaaatgaacacatawcatgtttgattatgttgtgtttcaacttttctagatttcttccctcactgaaaaaatatttgagtgcccacta

SEQ ID NO: 546405 - DNA, 677 bp, Homo sapiens
ttgggtatccttaaaaatcctcaccagctattaagtatcatggagttacgcaaagaggtctgcagggaacttgatggcttcccaaagtggatcagagaacctcacaggaggccctaggcttgaaaggtgagcagctctattttgttgctctcatgtgtgtgatgtacttttatgttagaaaactgaggtttggaggatttaagagagtgaggtgaatcttccaaaaatatctaacaaagtatgctgagaaggtaagttagagcggaaaatacgtgaccattccttggccttgggtcacttaagttataacctcccttcagagagtagagaacaaacattgcctctgagacaaaaataacttcttttttgtttgtttgtttgtttgttctgagagagggtcttgctccgtcacccagggtaaagtgcagtggcatgatcatggctcactgcagcctcaacctcctgggctcaggcaatccttccactttaacctcccaagcagctgggactacaggtgcataccaccacgkctggctactttttaaattttttgtagagacagggtctccttatgtggcccaggctgctctcaaagtcctgtcctcaagccatcctcccaccttgtcctccccaagtgctggcattataggcatgagccaccatgcctggccaaaata

SEQ ID NO: 546406 - DNA, 1211 bp, Homo sapiens
agaaagaaacattaaggggactgcatgttatctctccaaatacacataaaaccaacactgattagactagcgtgtgagcacactatctgtatatctgatatggtctgagtcttaaacatacatgtccatgactgtatgttatttaaatagatttaatagctatctaatgaaactttattagctttagaatccagtgaggtagagtaaccccccacgatgtaagtaggcatttgtaaattaaagacccaatatagtgtaaagttgtggttttaaggaatctgagtatcaaaataaaaagaacacacctgttttgtatattaattatacataaacacaaactctctggataaagagtcataaatttgcagagctgagtagctctttccatatcacctgtgacaattttcttttatagacaagctatataaggcttagagaggttaagggtgtcctcctggtctaaaaactgattaaagacagagccaggcaaagaactagttcttgaaacccctatttggtgttatttctagcaattcacagtgcctctccgaattactatcagagtccaaagtcactgctatgtctcagcttcctaaacatggctcagttatgttttgcttatttttcatacaatgacagcttttcaaatgtaatttaagaaagtcttgccaggggcagtggctcacacctgtaatcccagcactttgggaggccaagggaggaggatcacttgaggccaggagtttgagaccamcctggccaacatggtgggaccccgtctctattaaaaatgcaaaaattagctgggcgtggtggcgcgtgcctgtaatcccagctactcaggaggctgaggcaggagaatcactcgaaccagggaggcggagattgcagtgagccgcgatcacaccactacactccagcctgtagagcgagtgcctgtctcgaaaaaagaaaaagaaagactcaaatcacttaaaaatgtattcacttaaactgtcttatattgtcaaagaatatagatctttatgtatatgacatttcggatctatattatgtttatatttaggcaatatagatattgcatatattacatttatatttgtctactttatatgtaaaggatacagaaggcaccaacttaaattactaatgcgttatatttataagcatgttcactttcctcaggctacaggaaagaaaacaaaaaatga

SEQ ID NO: 546407 - DNA, 557 bp, Homo sapiens
cttgccaacattccgtctgaatccaggtgtcccaacaccaagctgaccccctagtgtagctggcctacagaatttcaccaagctgggaaaattctgacttcaaactaaggagggaagttgggattagttgctccctcagttattctagttacatacattcattctcacaggtcctatacacctactgcctgcctcaaagagggaattctcactgttatccataatatgaaatacactgcctagcacacagcagagtctcaaatatattttatttgagaaggtttgagttgcttgtgtgcattcatccatctaaacactacccctttgcaaaatttacaaatcccacctatctttcaagagctggcccttatagccttctattttggcagagcccccactgactaaatcagcctgtaagggtcagtcccatctctgaattcataccatactttcccttaactcaatggaatakcatacagattaacactgaatcccattctaattgattccatatggtggtcttacctactcagttacatgcattacttgagggcatt

SEQ ID NO: 546408 - DNA, 911 bp, Homo sapiens
caatagaagcagatgtggggaggctgactttaagaccaacaccaggctctgggaagggaaggaggaacaattacagtctctatccacaccctttcctctaagtgatgatctgggaaccagggaccaagtgctccagtgctgggagacaggaaactccaaacagcagtagcgtctatactataactctcaagaggaaaaggagaaggaaataccaagttaaagttgtgggaagggaaggaaccttctgtggccacccaactggacrgcctcataaatgcatgggtatgctcaaatggcaggcatctgagaaatcagtgagtccagtcttttccaagctatatcccttccaattccagaatccctcaccaaatcaacaaactgggggaagaaatattccatggtcaatcagtttcagaattgctagactaaataaaatcatagtgcatcactggctattttaagataataatgagcattataaatcttggcaatgatgggggaacatacactatgcagcacttccaaaactattttaacacaaaatgctttttggaaaggaaaactctacacaagtcatacgttgcaaaatacacatcaacccacccttctcattccacagatgaggaaactgaggcctagagaagcaaaaagaaaaaaaaacttcctaaagattgcaggcttagtatgtggaagagcagggatcagaagtcaaaattttctactctaggtcagtactatctcttctataccatcacacatctgaccccagctctgaccacaggttcaattctgctcggcagctatgccttagccctgccttctctcctgacaatcctgaggctctgcttccaccctcccactatggctaagtgcccgagctcattcaagactgcccttgattcccgtccctg

SEQ ID NO: 546409 - DNA, 1464 bp, Homo sapiens
tgcacacactttttttcttaatcaagatcccctacaagtcacaattgttttatttctgccccaatatagaggagagaatctgatgaagctaatttttgtaaaattattagagttattttgtataattattagaattccttccaaataatcatcctgcattgatgtaatgataaaaataggcacaaacaggagtatttctccaacaaagtttttgtttctttgatttctggagcaatggaactggcaattgctaactgtggcgtggaggtgaactgcttggcctctggcctgaccgtgctgaagatgtgcttaaaagccaattatgctgtagctgtgtgcctgcaaaaacagagttagctctgattttaaagatttggttcggcaggggctcaaggtttctgggagaaaataagatatagtggattatggatgagcctttcctcactcttgagatttcattgattgttacaacatgtttataataaatgatataaacaactttgtttataaattatattttccccagtgatgctggggtgaattttactgcataatccatttttctagcaacatcagatatagagtaattacgtgttaaatgctttcacagtaacattaatgaatgtttccataccgtaatattcccagctggagactggagccactgctataccacatttgaaaagaccagttccagatgcaagggccagtgatgaaacgtatcctccataggactgtagagacattgttatgagtcagactcagatttactttcataagctttcctccatatgtttatagcaactctactcacaatccggactgaagggagctggagaatatggctaagggtggattacatgtctatcttgcatcctcggcagcaagcttcagataaatgaccagacataatggtaatttcttccctaattcattagaaatacttggtgtgctgatcagaacagaccctcttaaaacatggtaggagcagtttaagagatagacagaatttcaattttcttttgcaaaaaaaaaattctcatttttttctctatatctttccaactaggaccatgctggaacaaaaacaagattttacttgaaagagatgcacagaaaaaaaattaccaaaatttaaatgtaagatacatcctcgcagtttgcaaaagttctgtgaggcagaacatgtatctttgtatttacttatttattttcacaacagaataccaaaggaaggccataagaactttttggataatttaagacatggccatagtttgtgtatgwtgtagtggtacatgttctaaggatttctgacatagcagctcaaaggaggaaaagtcattggtgtctttaaaaaccttatatttcttcctgcaaatttaaggaaaaggaaataaatacaaaacaggatgcaatttgcagagtcaggagtaagtttagctctcatagattttcttctcc

SEQ ID NO: 546410 - DNA, 2005 bp, Homo sapiens
cattttgatgattaggaaacagcctagaaaaactggataacttgcccaagattttaacaggacccagtgttaccaccttacattgcttctttgtgatacttcctaaagttttattccaaagtgataaattttttttaaaattataattgacatttcactgatttgctgttgggggacacttaaggttgtgagggtaaaataattaaggctaaaatattaatgatgttcacatcctcaaagtactttgttacacatatctcaaaagaacacaatttcactctacaaggactgtgttcaaaatattaatttgtttacagtttttttttaatcggggtctattaatccgatgattatttatatagtgcctgggttaaaagctcttcctccagggacttgcttaaatgaaaggattcaacaaaatacccatcgtcaaagagatttttgagttccaagctagaaagagtcctgaggtcttcaaagctcaaaataactatcacatagttatagatctggaagaagtggcataatatagcatcagtgggaaatgatatagctcaaactattttttgaatctgatctcttttctaaaaccacaattgttacataaggaagaatataaagccacatgcctcctagtttgtaattggcatctactaccttcataaatgttataattagatgtcagtgtttcattatcctatcataattagggcaagtgctccttggagacccaaagggttaactatcaaaatggggttagaaaagaaacagaacagagacacaacccatttctttgagtgctgaggacacaaagactcagaagataaatcagtgcttcattgtcatttaaatagggaaatactacatctttttagaagtggttaaccaacaagaagactgtttaaatagtataaatagaatgtgtaagcacctatagactaacataacttgttaacrcatattgttttttcactagcatttttagattagagaatattactactactagttcatgtctattgaatactcttattgatcatgacgtttttttctcagcacttgcacgtgctatctccttttatccccagaacattcgtactattattatcctcattttacagatgaggacatggatgcacacaaaatctaaataacttccccaaagtcccataacttttgagtggtagggatgggataaacccagatagtcttacattataacacaatttaacctatgtttagggctctcagaggagggtatatattggcacagtgattggcatgtgtgatccagctggaactaggaggagttgaagatggaaggaaaaaatacatgggctaaaaaactggacattttgatgagttcaaagtatgagtcctagtagtaactagtaataaggtgggaaataaaagaggtttttaccagatagcagcaggttgtatttaagatttcagttcaagttacaacgaggcctaaggtatggtcacagaagtaagtagctgagatagaagaaagaagtgaaggtccttagagatatagttggcaaagcagtgagaggctaagatatcctttgggatgttcatctgggaacttaattcacctcaaattatggcaataattaagggcagcagataaatgccttgagttatatccccaattctttataaaacagatggagagatttccagtttaagatgccatactgaacatatacactgatctctttgcctttggaaactccattaagctgattgtaaaggaggaaaaggattctcacatgacaatgaagagactgaagaagtatcatcaatggataaagcagaatagaaatagcagccgcctggaccatacctagaaaggaatcattttgcctggcagaagcatgaaacagttccatatttgagatggcatttaccactgagggtaagaaagggagatggggctgaaaaaagagaactggttggaaatccatacatggactcttcacctctgggtgcaaaaaaa

SEQ ID NO: 546411 - DNA, 2005 bp, Homo sapiens
cattttgatgattaggaaacagcctagaaaaactggataacttgcccaagattttaacaggacccagtgttaccaccttacattgcttctttgtgatacttcctaaagttttattccaaagtgataaattttttttaaaattataattgacatttcactgatttgctgttgggggacacttaaggttgtgagggtaaaataattaaggctaaaatattaatgatgttcacatcctcaaagtactttgttacacatatctcaaaagaacacaatttcactctacaaggactgtgttcaaaatattaatttgtttacagtttttttttaatcggggtctattaatccgatgattatttatatagtgcctgggttaaaagctcttcctccagggacttgcttaaatgaaaggattcaacaaaatacccatcgtcaaagagatttttgagttccaagctagaaagagtcctgaggtcttcaaagctcaaaataactatcacatagttatagatctggaagaagtggcataatatagcatcagtgggaaatgatatagctcaaactattttttgaatctgatctcttttctaaaaccacaattgttacataaggaagaatataaagccacatgcctcctagtttgtaattggcatctactaccttcataaatgttataattagatgtcagtgtttcattatcctatcataattagggcaagtgctccttggagacccaaagggttaactatcaaaatggggttagaaaagaaacagaacagagacacaacccatttctttgagtgctgaggacacaaagactcagaagataaatcagtgcttcattgtcatttaaatagggaaatactacatctttttagaagtggttaaccaacaagaagactgtttaaatagtataaatagaatgtgtaagcacctatagactaacataacttgttaacacatattgttttttcactagcatttttagattagagaatattactactactagttcatgtctattgaatactcttattgatcatgacgtttttttctcagcacttgcacgtgctatctccttttatccccagaacattcgtactattattatcctcattttacagatraggacatggatgcacacaaaatctaaataacttccccaaagtcccataacttttgagtggtagggatgggataaacccagatagtcttacattataacacaatttaacctatgtttagggctctcagaggagggtatatattggcacagtgattggcatgtgtgatccagctggaactaggaggagttgaagatggaaggaaaaaatacatgggctaaaaaactggacattttgatgagttcaaagtatgagtcctagtagtaactagtaataaggtgggaaataaaagaggtttttaccagatagcagcaggttgtatttaagatttcagttcaagttacaacgaggcctaaggtatggtcacagaagtaagtagctgagatagaagaaagaagtgaaggtccttagagatatagttggcaaagcagtgagaggctaagatatcctttgggatgttcatctgggaacttaattcacctcaaattatggcaataattaagggcagcagataaatgccttgagttatatccccaattctttataaaacagatggagagatttccagtttaagatgccatactgaacatatacactgatctctttgcctttggaaactccattaagctgattgtaaaggaggaaaaggattctcacatgacaatgaagagactgaagaagtatcatcaatggataaagcagaatagaaatagcagccgcctggaccatacctagaaaggaatcattttgcctggcagaagcatgaaacagttccatatttgagatggcatttaccactgagggtaagaaagggagatggggctgaaaaaagagaactggttggaaatccatacatggactcttcacctctgggtgcaaaaaaa

SEQ ID NO: 546412 - DNA, 2005 bp, Homo sapiens
cattttgatgattaggaaacagcctagaaaaactggataacttgcccaagattttaacaggacccagtgttaccaccttacattgcttctttgtgatacttcctaaagttttattccaaagtgataaattttttttaaaattataattgacatttcactgatttgctgttgggggacacttaaggttgtgagggtaaaataattaaggctaaaatattaatgatgttcacatcctcaaagtactttgttacacatatctcaaaagaacacaatttcactctacaaggactgtgttcaaaatattaatttgtttacagtttttttttaatcggggtctattaatccgatgattatttatatagtgcctgggttaaaagctcttcctccagggacttgcttaaatgaaaggattcaacaaaatacccatcgtcaaagagatttttgagttccaagctagaaagagtcctgaggtcttcaaagctcaaaataactatcacatagttatagatctggaagaagtggcataatatagcatcagtgggaaatgatatagctcaaactattttttgaatctgatctcttttctaaaaccacaattgttacataaggaagaatataaagccacatgcctcctagtttgtaattggcatctactaccttcataaatgttataattagatgtcagtgtttcattatcctatcataattagggcaagtgctccttggagacccaaagggttaactatcaaaatggggttagaaaagaaacagaacagagacacaacccatttctttgagtgctgaggacacaaagactcagaagataaatcagtgcttcattgtcatttaaatagggaaatactacatctttttagaagtggttaaccaacaagaagactgtttaaatagtataaatagaatgtgtaagcacctatagactaacataacttgttaacacatattgttttttcactagcatttttagattagagaatattactactactagttcatgtctattgaatactcttattgatcatgacgtttttttctcagcacttgcacgtgctatctccttttatccccagaacattcgtactattattatcctcattttacagatgaggacatggatgyacacaaaatctaaataacttccccaaagtcccataacttttgagtggtagggatgggataaacccagatagtcttacattataacacaatttaacctatgtttagggctctcagaggagggtatatattggcacagtgattggcatgtgtgatccagctggaactaggaggagttgaagatggaaggaaaaaatacatgggctaaaaaactggacattttgatgagttcaaagtatgagtcctagtagtaactagtaataaggtgggaaataaaagaggtttttaccagatagcagcaggttgtatttaagatttcagttcaagttacaacgaggcctaaggtatggtcacagaagtaagtagctgagatagaagaaagaagtgaaggtccttagagatatagttggcaaagcagtgagaggctaagatatcctttgggatgttcatctgggaacttaattcacctcaaattatggcaataattaagggcagcagataaatgccttgagttatatccccaattctttataaaacagatggagagatttccagtttaagatgccatactgaacatatacactgatctctttgcctttggaaactccattaagctgattgtaaaggaggaaaaggattctcacatgacaatgaagagactgaagaagtatcatcaatggataaagcagaatagaaatagcagccgcctggaccatacctagaaaggaatcattttgcctggcagaagcatgaaacagttccatatttgagatggcatttaccactgagggtaagaaagggagatggggctgaaaaaagagaactggttggaaatccatacatggactcttcacctctgggtgcaaaaaaa

SEQ ID NO: 546413 - DNA, 2005 bp, Homo sapiens
cattttgatgattaggaaacagcctagaaaaactggataacttgcccaagattttaacaggacccagtgttaccaccttacattgcttctttgtgatacttcctaaagttttattccaaagtgataaattttttttaaaattataattgacatttcactgatttgctgttgggggacacttaaggttgtgagggtaaaataattaaggctaaaatattaatgatgttcacatcctcaaagtactttgttacacatatctcaaaagaacacaatttcactctacaaggactgtgttcaaaatattaatttgtttacagtttttttttaatcggggtctattaatccgatgattatttatatagtgcctgggttaaaagctcttcctccagggacttgcttaaatgaaaggattcaacaaaatacccatcgtcaaagagatttttgagttccaagctagaaagagtcctgaggtcttcaaagctcaaaataactatcacatagttatagatctggaagaagtggcataatatagcatcagtgggaaatgatatagctcaaactattttttgaatctgatctcttttctaaaaccacaattgttacataaggaagaatataaagccacatgcctcctagtttgtaattggcatctactaccttcataaatgttataattagatgtcagtgtttcattatcctatcataattagggcaagtgctccttggagacccaaagggttaactatcaaaatggggttagaaaagaaacagaacagagacacaacccatttctttgagtgctgaggacacaaagactcagaagataaatcagtgcttcattgtcatttaaatagggaaatactacatctttttagaagtggttaaccaacaagaagactgtttaaatagtataaatagaatgtgtaagcacctatagactaacataacttgttaacacatattgttttttcactagcatttttagattagagaatattactactactagttcatgtctattgaatactcttattgatcatgacgtttttttctcagcacttgcacgtgctatctccttttatccccagaacattcgtactattattatcctcattttacagatgaggacatggatgcacacaaaatctaaataacttccccaaagtcccataacttttgagtggtagggatgggataaacccagatagtcttacattataacacaatttracctatgtttagggctctcagaggagggtatatattggcacagtgattggcatgtgtgatccagctggaactaggaggagttgaagatggaaggaaaaaatacatgggctaaaaaactggacattttgatgagttcaaagtatgagtcctagtagtaactagtaataaggtgggaaataaaagaggtttttaccagatagcagcaggttgtatttaagatttcagttcaagttacaacgaggcctaaggtatggtcacagaagtaagtagctgagatagaagaaagaagtgaaggtccttagagatatagttggcaaagcagtgagaggctaagatatcctttgggatgttcatctgggaacttaattcacctcaaattatggcaataattaagggcagcagataaatgccttgagttatatccccaattctttataaaacagatggagagatttccagtttaagatgccatactgaacatatacactgatctctttgcctttggaaactccattaagctgattgtaaaggaggaaaaggattctcacatgacaatgaagagactgaagaagtatcatcaatggataaagcagaatagaaatagcagccgcctggaccatacctagaaaggaatcattttgcctggcagaagcatgaaacagttccatatttgagatggcatttaccactgagggtaagaaagggagatggggctgaaaaaagagaactggttggaaatccatacatggactcttcacctctgggtgcaaaaaaa

SEQ ID NO: 546414 - DNA, 526 bp, Homo sapiens
acctgtattcctgactcctggcagggcctgctgtagagcacatgyttcatgaataaatatgattgagttgaataaatatttgaattgtgttttgagtgtagctttgaaggccagcaacgatttagatggcaagatcgagggcaggctgggcacaatggctcattcatgtaatcctagcactttgggagtccaaggcggggaggatcgcatgaggccaggagttcagtaccagcctgggcaagatagggagaccccatctttacaaaaaataattagccaggtgtagtagcacatgcctgtagtccagatactcgggaggctgaggtggatcacctgagcctgtggaagtagaggctacagtgagccgtgatggtgccgctgcactccagcctgagtgacagtgagaccctgtcttggggggaagaaaaaaaaagggagggcatgctaatagagggaaaatggcataagtaaaggcatttcagcatggatgagcacggggtgtgttggggagaaggcactgacgttg

SEQ ID NO: 546415 - DNA, 526 bp, Homo sapiens
acctgtattcctgactcctggcagggcctgctgtagagcacatgcttcatgaataaatatgattgagttgaataaatatttgaattgtgttttgagtgtagctttgaaggccrgcaacgatttagatggcaagatcgagggcaggctgggcacaatggctcattcatgtaatcctagcactttgggagtccaaggcggggaggatcgcatgaggccaggagttcagtaccagcctgggcaagatagggagaccccatctttacaaaaaataattagccaggtgtagtagcacatgcctgtagtccagatactcgggaggctgaggtggatcacctgagcctgtggaagtagaggctacagtgagccgtgatggtgccgctgcactccagcctgagtgacagtgagaccctgtcttggggggaagaaaaaaaaagggagggcatgctaatagagggaaaatggcataagtaaaggcatttcagcatggatgagcacggggtgtgttggggagaaggcactgacgttg

SEQ ID NO: 546416 - DNA, 626 bp, Homo sapiens
ctgtctttcttttgaggcagaaggagattctggtgcatgtcctgcagtacattcagtacctccagagaaacatcgatgccgccaaggccttgttcaaatgccacatcaccactggggaaggtggacttgcgggtaagtagttcagccagtgtttcctggtgcctgtgatgttccaagtgttgttccagccatcagggatactgagtgacccttctgtcaaggcctggtataggggacaaagagagatatgcaagatgcctcagagaagaggggccttggagctgggccttcaggactgtaggagatgcagggaagcccagccaggcagaagaaacaggccgggcacagtggctgatgcctgtactcccggcactttgggaggccgaggcgggcggatcgcttgaggtcaggagttcgagaccagcctggccaacatggcaaaaccccgtctctactaaaaatacaaaaattagctggtgtggtggctggcgcctgtaatcccagctacttgggaggttgaggcaggagaatcacttgaacctgggaggcggaggttgctgtgagccragatcacgccactgcaccctagcctgggcaacagagcaagactgtgtctcaaataataa

SEQ ID NO: 546417 - DNA, 658 bp, Homo sapiens
attttaaattgggactgagggtggagaaaaggaaaagatatttgaggaatgtctgccagatgtgtgtgtattgagagtggcaaaaggagaagaaatatttatattttgctatgcattgagaatgtaccctgtcctccctayatacacgggcacaatttccctgtagaggcttccccagaggtgtacataaattacaattgctttcagctatattttgctgtcagactacagattccttgaattgatcctgcacagggactggtccatttgggcctccagttatatttggaatatgctgataagccagggttgtgtggaaatggcagcaggtgtgagctgggaaacccttcaccacctggtggaggcatttcacagactcatgagctctcagagtgggaagagatcttaaaaatgggggccttcaaaatggtctaatgtgcccgggcgcggtggctcacgcctgtaataccagcattttgggaggccaaggcaggtggatcacctgatgtcaggagtttgagaccagcctggccgacatagtgaaaccctgtctctactgaaaaatacgaaaattagctgggtgtggtggtacgtgcctgtagtcccagctactcaggaggctgaggcaggagaatcgcttgaacccgggaggcagagg

SEQ ID NO: 546418 - DNA, 658 bp, Homo sapiens
attttaaattgggactgagggtggagaaaaggaaaagatatttgaggaatgtctgccagatgtgtgtgtattgagagtggcaaaaggagaagaaatatttatattttgctatgcattgagaatgtaccctgtcctccctatatacacgggcacaatttccctgtagaggcttccccagaggtgtacataaattacaattgctttcagctatattttgctgtcagactacagattccttgaattgatcctgcacagggactggtccatttgggcctccagttatatttggaatatgctgataagccagggttgtgtggaaatggcagcaggtgtgagctgggaaacccttcaccacctggtggaggcatttcacagactcatgagctctcagagtgggaagagatcttaaaaatgggggccttcaaaatggtctaatrtgcccgggcgcggtggctcacgcctgtaataccagcattttgggaggccaaggcaggtggatcacctgatgtcaggagtttgagaccagcctggccgacatagtgaaaccctgtctctactgaaaaatacgaaaattagctgggtgtggtggtacgtgcctgtagtcccagctactcaggaggctgaggcaggagaatcgcttgaacccgggaggcagagg

SEQ ID NO: 546419 - DNA, 658 bp, Homo sapiens
attttaaattgggactgagggtggagaaaaggaaaagatatttgaggaatgtctgccagatgtgtgtgtattgagagtggcaaaaggagaagaaatatttatattttgctatgcattgagaatgtaccctgtcctccctatatacacgggcacaatttccctgtagaggcttccccagaggtgtacataaattacaattgctttcagctatattttgctgtcagactacagattccttgaattgatcctgcacagggactggtccatttgggcctccagttatatttggaatatgctgataagccagggttgtgtggaaatggcagcaggtgtgagctgggaaacccttcaccacctggtggaggcatttcacagactcatgagctctcagagtgggaagagatcttaaaaatgggggccttcaaaatggtctaatgtgsccgggcgcggtggctcacgcctgtaataccagcattttgggaggccaaggcaggtggatcacctgatgtcaggagtttgagaccagcctggccgacatagtgaaaccctgtctctactgaaaaatacgaaaattagctgggtgtggtggtacgtgcctgtagtcccagctactcaggaggctgaggcaggagaatcgcttgaacccgggaggcagagg

SEQ ID NO: 546420 - DNA, 658 bp, Homo sapiens
attttaaattgggactgagggtggagaaaaggaaaagatatttgaggaatgtctgccagatgtgtgtgtattgagagtggcaaaaggagaagaaatatttatattttgctatgcattgagaatgtaccctgtcctccctatatacacgggcacaatttccctgtagaggcttccccagaggtgtacataaattacaattgctttcagctatattttgctgtcagactacagattccttgaattgatcctgcacagggactggtccatttgggcctccagttatatttggaatatgctgataagccagggttgtgtggaaatggcagcaggtgtgagctgggaaacccttcaccacctggtggaggcatttcacagactcatgagctctcagagtgggaagagatcttaaaaatgggggccttcaaaatggtctaatgtgcccgggcgyggtggctcacgcctgtaataccagcattttgggaggccaaggcaggtggatcacctgatgtcaggagtttgagaccagcctggccgacatagtgaaaccctgtctctactgaaaaatacgaaaattagctgggtgtggtggtacgtgcctgtagtcccagctactcaggaggctgaggcaggagaatcgcttgaacccgggaggcagagg

SEQ ID NO: 546421 - DNA, 626 bp, Homo sapiens
acagcagtctttctgcctttgccatcatcctgtgcatatgcttcttgataattaatatgtgcattcagttaaccattcatgggatcttttcttttatccgattctccgctccttaaggacatgggctgtgtcttgtttgtccctgtatcccaagccctgagcactatgtctggtgcttagggtgctcaatatttattttctttttcttttcttttctttttttttttttttttgagatggagtctcggtctgttgcccaggcgggtgtgcagtggtgcgatctcggctcactgcaacctccacctcccaggtttaagtgattctcctgcctcagcctcccgagtagctgggatcacaggtgtgtgccaccatgcccggctaatttttgtatttttaatagagacggggttttgccctgttagccaggctggtctcgacctcctgacatcaagtgatccgcccgcctgggcctcycaaagtgctgggattacaggcgtgagccaccatgcccggcctcaatatttattttcaatattccacagatgagggcaataaggagaggaagcggaagaaaaaggatgagacatgtggcttgtgggcagaaagggaggcaggagaacattccc

SEQ ID NO: 546422 - DNA, 1945 bp, Homo sapiens
atgactggaaaatgccaggtaaaaactggttatattgtatggtgagccccttatttataaaagggagctgggcatggtcgctcacgcctgtaatcccagcactttgggaggccaaggtgataggattgcttcgggccaggagtttgagaccatcctgagtaacatagtgagagcccgtcttcacaaaaattgaaaaattagccaggaatggtgatgcatgcctgcagtcctaactacacaggaggctgaggtaagaggatcgcttgagcccaggaattggaggttgcagtgaaccatgagtgccacgccaccacacgcgagtctacaagacaaagtaagaccttgtctctaaaaattacattaaagtaaaaaaacaaaaataaaggaaatacacatatacagacacagaaacaaagacacacaaacacatgcacacacagagaaagaatgtcaaagggtattgaaggtatttctggtcattgttttactctttattctttccccattttcttaactctctatgttgaacatacattagaacagatatttacttcataatcagaaagaatgctgtacgtcatcactacttctggaaggatccccaaaggcttagctgttatctttccacttcccactggctgggtgcaagagtgtggtacttctggcagcctcagtcagttctgcagtacttctttggttttaagcttagtctaggcaaagccaaaaatcttgaattaaggaagcaaatgctttgtgtttcagattagattaaaagaactaaatatattaactatacctgctgatttaaaggccgtggttaggaggcacagtaggatgaggctaccatgcagaggggtacaatcccataaggtagttcattatattatccccattttacagatgagaaacttgaggtagcttactgtggccatgcttcaaattacagcaagaaggtgtaaggcactggagagggattgaagggaaggaaaatgatttaaaaataaacaagaaggtagtgtgggatagtggttagggctgtctggactctggaatcagaaaagagtcgtcctaagcttggtgccaccacttcctagacatttaatcttggatgagttactcagtcatttgaaaaacctttactaagtaactaccaggtgccatgcagtagtccaggtgctggagatacagcaatgaagcaaggccacagaaagccctgtcctcatagaattaacattataatagaaaaatcagatcatacattagaaaaacaagtacagcatagtttctcagatgatcttaggtgcaatgtagaaaatgtgtggaagtttcmgttgctttgtctgcaaaaatgagataataaaattgctatttcattgagtactgtgaggattcctgagatcacgtacagagggctgagcactgttcccagtccaataactattaatcatgaccattattttgagatgaagaaggccaaatctattcttgttgtctgagtgacaatgcagggaaattttaagaaatggctgcaaccattcagaagttgcagaggcaatgtgatagggaaaaattaaaccaatagcactgtagcagggtcttgagtttcctaatggctaaaacaaggagcaaaattctcttcactttggggcttatccaaccctacaagaagtcagagaaatccccaaacatttctatcagttaataaaggtaatatctgctcctctggtatctccactccaggatggaatttaacaaggtactaagtctgggtttcacctgtttccatgctgctccaccatgatttcctctgccatgtttctctaaggtggtctagacaccaaaccgtgttcttggagaggcccagaggaacagctgtctgttgctcttctaaatccacatattttggaccatctgggagtcaagagattagttaaggtactggagt

SEQ ID NO: 546423 - DNA, 417 bp, Homo sapiens
  misc_feature 315, 316, 317, 318, 319, 320, 321, 322, 323, 324, 325, 326,327, 328, 329, 330, 331, 332, 333, 334, 335, 336, 337, 338,339, 340, 341, 342, 343, 344, 345, 346, 347, 348, 349, 350,351, 352, 353, 354, 355, 356, 357, 358, 359, 360, 361: n = A,T,C or G
  misc_feature 362, 363, 364, 365, 366, 367, 368, 369, 370, 371, 372, 373,374, 375, 376, 377, 378, 379, 380, 381, 382, 383, 384, 385,386, 387, 388, 389, 390, 391, 392, 393, 394, 395, 396, 397,398, 399, 400, 401, 402, 403, 404, 405, 406, 407, 408: n = A,T,C or G
  misc_feature 409, 410, 411, 412, 413, 414: n = A,T,C or G
gcctcgccttctgtctccctgaaacaagtggagaaatacgaccctggggccaacaagtggatgatggtggcccccttgcgggatggcgtcagcaatgccgcagtggtgagtgccaagctgaagctctttgttttyggaggaaccagcatccaccgggacatggtgtccaaggtccagtgctatgacccctcggagaacaggtggacgatcaaggccgagtgcccccagccttggcggtacacagccgctgccgtcctgggcagccagatcttcatcatgggaggtgacacggaattcacagccgcctcggcctannnnnnnnnnnnnnnnnnnnnnnnnnnnnnnnnnnnnnnnnnnnnnnnnnnnnnnnnnnnnnnnnnnnnnnnnnnnnnnnnnnnnnnnnnnnnnnnnnnngtc

SEQ ID NO: 546424 - DNA, 647 bp, Homo sapiens
tttgtgcactaacaagctcattacaagtgggttttaattagaggtgtaacagatggttcccaataaatatgggcagcggcgactccttggcttttttttttcctttgaaagacaaaaattgcaggtaattgagagactcagaaccttagtttgggtttaatagtatgtgttcaattaaaacaaagtgccaagtgccaggaatgtgactcagatagttggacactgtaaaacaaacaaaccagggttaaaaatgcctttcctgtttagaagtgggcttccagatgccgaagcggggacaagccacgtgcagcccgtgactcaccacagctttcttcttggggctttgtttttaagcattgcctgtcgatgcgttatgaagaattaataagacatttcggagtgttcttgaactccagcactgaaccttctcggcgctgtgacatttaacaaacacatttaagcagaaaataaagggamggttctaaaagccaccagtgcctctctcgcaagcattttagtactatttggggacatgagaagagaaggggaacagataaactgggcaatgagttccactctgagagttttcattttaaatgaactagatttgacatttgtgttgtgtatgggataaggaatttggtaaa

SEQ ID NO: 546425 - DNA, 544 bp, Homo sapiens
cagagttcacaagtagcagggaattaaaggtttatcatttaccttctacttgtacatcttaggataattttccaatatcaagactttttgacctccagatatcctggttgctgccatacagacctactgcttgtgyacctggtaaaagagtgtgatgtgtcctggtgttgaacttctcatccacaataattcactaagacacaatgacacaatcactcatggacccaatgcaaatgacagctcctcaggaacagactcaccagttgtagctgtaggtacctgagccttggtgattattaactgatgtttgacacacttgaaaaataagaagctcccaatttgtactcccttcaaccactgaggctgggatttcatcatttcgggctgcttctctgaaaggtgatttttggactgtcactctagtcacatggattttctcattagtaaatgatttccatcagcccttctcagaggactcatttccgtgtctgctctgctcttttctttctcctggtgtctttgatcatggcacgtgccatctgtc

SEQ ID NO: 546426 - DNA, 555 bp, Homo sapiens
aatttaataaatatgtaaataaatgtctacaaaatctaacattatgcaaactttttaaataagcatatttaattttatttaaaaattgacacttaattttagaaacaacttattggttagatttttctcattgtatgagtatgaacacatactcaggaattcttgcaatgattgttgctaaattgtaaacagtagtaagttacattataggaagccaaattatttaaaagcaaaaatattagaagttctttcaaacaattattaacagaatgtgatatttaatgtaagacatgatgctttttaatycgtctcataatatataaggataactgtaaaatggagagttgcctaggtttatgagtgttcaaacagcagcacacatttcttaaactgaaagatgtgttgaaaagatttgaaatcatgccgggcacggtggctcacgcctgtaatcccagcactttgggaggctgaggcgggcggatcacctaggtcaggagttcgagacctgcctgaccaatatgctgaaacctcatctctgctaaaaatacaaaaatt

SEQ ID NO: 546427 - DNA, 600 bp, Homo sapiens
aatagtgttgagcactattctgagaagttgccccagtttttaaatttgatcttcacarcacccctatgaggtgtgaactacccatttcccaggtaaggaaactaaggcagggagtagtttgtccagcagaaagtggcaaagatgggattcgaatcaggatctctggttgcaggccctagaaaaccaagaatgtactaaggaagtattctgaatgaaaaagtttaatattgttaacctataaattcaatgcaatcccaataatctcactagaattacttcaagtgaatgtacaaagctgattccaaaattatctagaagagcaaaagtattctcaaaaaggaacaatagtgaaaatgttttttcccaaagataccaaattacaagataaagctacaagacagtatcattactcatattaaaaaaaataaaatagtactttatagtaaagaatctagacctatgtacttatgggaactttgtattatacaagttctaactcttgggtaaattataacattcaataactggtgctaagaaactgaatatgaataccacatagaaaataattgttaaatccctatctctctactgggggggaaa

SEQ ID NO: 546428 - DNA, 600 bp, Homo sapiens
aatagtgttgagcactattctgagaagttgccccagtttttaaatttgatcttcacaacacccctatgaggtgtgaactacccatttcccaggtaaggaaactaaggcagggagtagtttgtccarcagaaagtggcaaagatgggattcgaatcaggatctctggttgcaggccctagaaaaccaagaatgtactaaggaagtattctgaatgaaaaagtttaatattgttaacctataaattcaatgcaatcccaataatctcactagaattacttcaagtgaatgtacaaagctgattccaaaattatctagaagagcaaaagtattctcaaaaaggaacaatagtgaaaatgttttttcccaaagataccaaattacaagataaagctacaagacagtatcattactcatattaaaaaaaataaaatagtactttatagtaaagaatctagacctatgtacttatgggaactttgtattatacaagttctaactcttgggtaaattataacattcaataactggtgctaagaaactgaatatgaataccacatagaaaataattgttaaatccctatctctctactgggggggaaa

SEQ ID NO: 546429 - DNA, 579 bp, Homo sapiens
agtaaatatctgaatttttttcccttcattgttatctttagtgaacggctcttgcaggaagtttatcagtgtcaactcactcatctgcatctgaaacgttcgatgatggattgtcactcaagggaaccattatatttccatacgtagagaagttcctttgccaatcacaacaaaatgatacaataaccgttaatacagaaagaatgagtrtgcctctacctgctcttatcttactgcttctctttaggtcctactcagtacttcctttctaaagagacagcttcctaatttccctacctcctaatgtatccactgtcttccctctccatttccttcaaatacataactgccagatacatttttcttaactagaggtatgatagtcattttcttactcaaatctttcagtggatctctatttctaactcagatgtgtccttctgacttggatatttgtaaagaacttcacgctctcgcccagctttcccttcccgaagcttgtcctgctcacctttacatgaggctccagcttattgtgcctattaggtgcactttcaatacagcacattctttcctgcc

SEQ ID NO: 546430 - DNA, 536 bp, Homo sapiens
ggtatcatggcttttctgaataactgatttttaatagaaggcataagtcatcactacactatatataggaagggtatagatttacttattcatttttgacaattttatttgatttcaaaatatttcattgaatgttcactatgtgcacatgaataagcttaagtccctattyttaaggagcttaaaatccatttaggaaaaggacatgtctgtaactagagtttaaagcccaatgtcgtatgtgttgagtacagatacaaatcacttggatgggaaatgagtgggaaaaacaaaaagctcaggccagaactagggaagaaaagaggactttgtagagaagggagcatttggctccaactttgttggctgtgcaggatttgtttcatttaggtggtaaaacactgcaaggcatttgatgccaagaagataggatgggcaagaaaattatgaaggtaaataaatgccagtttggggaattgggaagtaattaggcattgctattgatcagtgcttctcaaccctggctgcacactgga

SEQ ID NO: 546431 - DNA, 536 bp, Homo sapiens
ggtatcatggcttttctgaataactgatttttaatagaaggcataagtcatcactacactatatataggaagggtatagatttacttattcatttttgacaattttatttgatttcaaaatatttcattgaatgttcactatgtgcacatgaataagcttaagtccctatttttaaggagcttaaaatccatttaggaaaaggacatgtctgtaactagagtttaaagcccaatgtcgtatgtgttgagtacagatacaaatcacttggatgggaaatgagtgggaaaaacaaaaagctcaggccagaactagggaagaaaagaggactttgtagagaagggagcatttggctcsaactttgttggctgtgcaggatttgtttcatttaggtggtaaaacactgcaaggcatttgatgccaagaagataggatgggcaagaaaattatgaaggtaaataaatgccagtttggggaattgggaagtaattaggcattgctattgatcagtgcttctcaaccctggctgcacactgga

SEQ ID NO: 546432 - DNA, 536 bp, Homo sapiens
ggtatcatggcttttctgaataactgatttttaatagaaggcataagtcatcactacactatatataggaagggtatagatttacttattcatttttgacaattttatttgatttcaaaatatttcattgaatgttcactatgtgcacatgaataagcttaagtccctatttttaaggagcttaaaatccatttaggaaaaggacatgtctgtaactagagtttaaagcccaatgtcgtatgtgttgagtacagatacaaatcacttggatgggaaatgagtgggaaaaacaaaaagctcaggccagaactagggaagaaaagaggactttgtagagaagggagcatttggctccamctttgttggctgtgcaggatttgtttcatttaggtggtaaaacactgcaaggcatttgatgccaagaagataggatgggcaagaaaattatgaaggtaaataaatgccagtttggggaattgggaagtaattaggcattgctattgatcagtgcttctcaaccctggctgcacactgga

SEQ ID NO: 546433 - DNA, 680 bp, Homo sapiens
ttcagctttaaaatcacactgtagaatacaattttggggggcaactaggagaaatcattagaataaagtctgacatcctaaaaatgtatacaggaaaaggtgatttctgtgagtcaggaaaacaagttaacacgaagaaaatggcagggtggtgggggatgaaaatggggatgacgaatatgtctgggaattcaatggcagaattgaaatctgcattgctgtagtcaagagaaaaaacggccttgaggaaaagtaagataatgatgtgaaataaatttggaagacatgggaaactgcaggagaagaaagatatgaaagttattagcatttatctgataaaaacagaaggacaaaaattgagaactcgtgaaacaatttttgttttgtattattttttccagaaaaaagagcatgagaatagcatcyaaatacacacaaaagtctccaaaatatttatattttagttttgacatcaagaatatatatttttactactatctttctcctcctttcacttttatgtttcgtaggacatttcacatgtgaaccactgcacccaagcatgcttatctatctttcaaggctctggtctcaatgaattgcagcagccttcacccctaaaccttctgaaacatgggccccatcaatgactcttttcttcctttcttatcccaacacta

SEQ ID NO: 546434 - DNA, 2180 bp, Homo sapiens
caattttgttgatcctttcaaaataccagctcctggattcattaattttttgaagggttttttagttttaaacttagaagttggcccctgcatacaagctgagattaagctggtaaatttattctattttctaatgactgatctcctcttgattttttggtttgtttttggtcttatgctaggaaaggcttgatgttccttgcctaaagaggagaaaatcaccttaaaagtccaaatagtaggccagacacagtggttcatgccagcactttgggaggccaaggcagatgactgcttgagcctaggagtttgagatcagcctgggcaacatggcaaaaccctgtctctacaaaaaaaatacaaaaattagccaggtgtggtggcgcatgcctgtagttccagctagtccggaggctgaggtgggaggatcagttgagccctgctaggtcaaggttgcagtaagccataattgcaccgccgtactctagcctcggcaacagagtgagaccctgtctcaaaaaataaaataaaataaaataaaataaaataaaataaaaagagggtccaaatagttttctgtatataaactaggcttctaggcttggtgcggttgggatccattagttaatggcttaatgatgatatctcttgtaagtgatttctgaaaattggaaacaaatggaatgattcaaaactgagaaagagacaactatttatttacatgtacttctcactccgaagcccggacactggtaaagtatttcattgtggggaatgagatgcattttcactttgtactgctcagcagatgcccctatgccttctatcctaactttcccaaggataaaaagtatctaaaaattaatgtcatttcttttctctttttcccatactttttttccaaaccaccccccacccaccccaatagctttaggagtacaagtggttttggttacatggataaattgtgtagtggtgaggtctgggcttttagtgcacccatcacccaaatagtgtgcattgtacccaacaggtgatttttttgttcctcaccccttcttttattgttgacttaattttctttttcattctctcactcaacatttccttaatatactccagtccatcatccagattaaactttagaactctcttaaactaaacaaaatggcctttcaaattacttgccttcctttcaaaacccccattctgctttacttaataaatatcccttctgccatcagttctcccattacagcttattagtcttyctgtactatgctcttgctttggggtaatcaaacaatctgagccttcactgaaagaaatgagttcctggcacatgtagatacatcttgaacttctagaatattaatttaagtctagagatgtagtgtgtattgctgacagtttagggcaaatctgtctttcacaaaccactcacaggagccttgaggatctaggcctttgtttttgtaagcagtaagttatattatgttggtcattagggcctgtaattttgtttccttgacagttacgtgagactaattcaagtcacttcactgatgaagaaaactaaaaccaaaacaataaatcttgaacataatcttccacatacctgaggcaattgggacttcatattgtttttattttagcaacaatattgtttagcaacattactcaagaaaatggttcctatctttattaatgcttcctagtctgtttttctcccattatagcttcagtttttagtatgtttgttgaatgaattaatgaataactaaatgaataaaaagctattatttctttcttagatgtagtgacagtcctagaaaaagtaagacttggccaggcacgttggctcatgcctgtaatcccagcactttgggaggccaaggcaggcagatcacaaggtcatgggcttgagaccagcctggccaatatggtgaaaccccatctctactaaaaatacaaaaaaactagctgggcatggtggtgcacgcctgtagtcccaactactcaggaggctgaggcaggagaatcacttgagcccaggaaatggaggttgcagagagccaagactgtgccactgcacttcagcctgggcaatagagggagactctgtctcaaaaaaaaaaaaaaaaaaaaagaaagaaagaaagaaaaagtaagacttgtcc

SEQ ID NO: 546435 - DNA, 1223 bp, Homo sapiens
gatcctcccctccagatgcctagaggtatctcctgggaccatgatgggtctcagtcataccccttcattcattggttcatgtcttcatagtcattttctttttttttttttaaaccactgaaataaccctcattgtttgtcattatttctaatactcaatgtagttttaaattttctccccatgctcaagaagagaaatggaaatatggcaaacatctccatgaacccacattttctcacatctttagatcaaaaactcttattcttcarataaacaggttgtaaaattttcagtgttgaagagaatgaaatatgacatttgattttattgattcattgcttatttttggcagaagttatcctttattcagtttcatctctttatgtcttaccacctctttgtgaactagccacttgccttgagggtttacaaattcaagatttctcagcacgattagccctaatagtatgctttccttccaaggtttccagattatccaatacagtattatttctatcccaatcatgtttaaggattattattttacatagaaataaataaagaaaggggaaccaatacaaagtgttagaaagacagctacgattaatatattggactggcccattatcagaccctctagattttacaggtagctttctgatcagaaatctcgggtgagaaatagtaagaatgatggccttagttaaatcctctatcaatatgacaggttaaaaaaaagacatatgagttagttaaaagcacctctcccttggtaactctaagtgttttagtttttcagatggcaatttgtgactttctatagctttttcttgagatgaatttgtggaccagttgaatagtgatagaaatacaggacttgctaaaaattacaaagtgtttatggcagttctggcaaatatcctctagatcaccagataatgccaagtcagcaatattatcaataatgagttgcctactaagaaccaggggaatgggggcatggactgaaactttaccatagacatctttgctattctggactgttggtttgcttcctagtgtacttctgcttatcctttcttccctttggcttcattgagatcctcagccactgagttctatcttggtgcattccagccacaccccaaaagaataacaagaatgaataagccatccatctctgaatgtagagcaggttggaaaatgataaccttattcatta

SEQ ID NO: 546436 - DNA, 632 bp, Homo sapiens
aagttacagacacaagacccggcgtggtggctcacgcctgtaatctcagcactttgggatgccaaggtaggtggactgcttgagcccaggagtttgagaccagcctgggcaacatggcgaaatctcatctgtaccaaaattacaaaatacaaaaattcactggggcgttgtggcgcatgcytgtagtcccagatactcaggaggctgagatgggaaggatcacctgagcctgggaggttgaggctgcagtgagccgtgatcatgccactgtactccagcctgggtgacagagtgagaccctgtctaaagaaaaaaaaaattacacagaagaccctagagtcactgatctttccccaagtagagatgagatgggagaattatgttgcctctgctctgactgcctcccaaggcttatgacaaagaagacaacttaaccatagtagctgataaattattgctaacccttgaaggagctattaccatcaccaccaacaaatatttgctcccccatgatagatgctatggtggaataggatcttaaagtctacctcctttacaaaggctttcccggtctctccagctaaattttctttcttgcacattctaactcttccatggcatttattacatta

SEQ ID NO: 546437 - DNA, 632 bp, Homo sapiens
aagttacagacacaagacccggcgtggtggctcacgcctgtaatctcagcactttgggatgccaaggtaggtggactgcttgagcccaggagtttgagaccagcctgggcaacatggcgaaatctcatctgtaccaaaattacaaaatacaaaaattcactggggcgttgtggcgcatgcttgtagtcccagatactcaggaggctgagatgggaaggatcacctgagcctgggaggttgaggctgcagtgagccgtgatcatgccactgtactccagcctgggtgacagagtgagaccctgtctaaagaaaaaaaaaattacacagaagaccctrgagtcactgatctttccccaagtagagatgagatgggagaattatgttgcctctgctctgactgcctcccaaggcttatgacaaagaagacaacttaaccatagtagctgataaattattgctaacccttgaaggagctattaccatcaccaccaacaaatatttgctcccccatgatagatgctatggtggaataggatcttaaagtctacctcctttacaaaggctttcccggtctctccagctaaattttctttcttgcacattctaactcttccatggcatttattacatta

SEQ ID NO: 546438 - DNA, 633 bp, Homo sapiens
ccaccatgcctaatttttgtatttttggtagagatagggttttgccatgttacccaggctggtcttcaactcctgagctcaagcaatccaccccgctcggccttccaaagtgctgggatcacaggcatgagccactgcacccggcctgtatttccattttaaaattgacttctcaattcctataaaaatgcttgctaagatattgatagagatgacatttaatctatagattagaggtcttatgcttgttttctaaaatttattcttaaatattgtcttctttctcatgttattataagtggaattgggtttttgttgttgttgttgtttttgtttgtttgtttttctgagacggagtcttgctctgtcacccaggctggagtgcagtggcgcaatctcagctcactgcaacctccgcctcccaagttcaagcaatcctccagcctcagcctcctgagtagctgggattrcaggtgcccgccaccacatctggctaatttttgtatttttagtagagacagcatttcaccatgttggccaggctgctcttgaacttctgactttgtgatttgcccacctcagcctcccaaagtgctgggattacaggcatgagccaccgtgcccgaccggaac

SEQ ID NO: 546439 - DNA, 683 bp, Homo sapiens
ttgaatgcttttttttttccattttgaaacaatcacaaacataaaaagttgcaatgtcaatacaaataaattttttttctggracaatttaagactgccagcctgatgccccatcactaccaaatagtttagtgtgtatctcctacaaccaaggacattctcatgcatgactacagtactaccatcacaaggctgggcatggtggctcacgcctgtgatcccagcactttgggaggccaaggcgggcagatcacgaggtcaggagatcgagaccatcctggctaacacagtgaaaccccgtctctactaaaaaaaaaaatccaaaaaaaaaaaaaaattagccaggcgtggtggcaggcccctgtagtcccagctgcttgggaggctgaggcaggagaatggcgtgaacccgggaggcggagcttgcagtgagccgagatcgtgccactgcactccagcctgggcgacagagctagactctgtctcaaaaaaatacatacatacatacatacatactaccatcacaatcaagaaattaaccttgatacattgctgctatagtgaatcttttggactctgttaaagtagatgactcacaatcatcccagtagcaacctttataggaaggagaccaagtgctgcgtttacttctcatgtctctttattcttcttcttcaatctga

SEQ ID NO: 546440 - DNA, 643 bp, Homo sapiens
cttctcccacccttttcagatagttccattttgtgggcacattaaaggtggcatgagaccaggcaagaaggtgttagtgatgggcatcgtagacctcaacccagagaggtaaggcagagtctttgtcaggacagaastatcaggctgtggctgagccctgcccacttctgttgtggtttagcactcctcttcctctccttgtggacagtgttgctagttgccagtgccaagaaagtaccatgttcccatgaaacgaatatgtatgaatcccagccatcatttctccagacagctatttatatcagagattataaatataggcccacattttctctttgacccttagggaggccagaggatttttttttttttttttaatggttttgaaacatggtgccaggagcaagaactatcaagatgaataagaacccaacttaacattatttcccctggtcaatttctgtggctgtttttgagaattccgaagtggaattctctaattttagtcattttcaacaccaaagttttcaccagagcttgctttaggtaacaaaataagctggtttgacttacttctccataatctaacctctcttgaagagtagtggcctcttaaaaatggacaaacccagaggaggaagaa

SEQ ID NO: 546441 - DNA, 631 bp, Homo sapiens
tcactcactcaacacatgtttattgaacacttaacttttgtcagaactggactgggtgctgaggatatgacagtggaaagacagactcagctccttccctctggaggcctggaggccattagaacacgtctcggagtcctcgccatcctgtcattcttttctcctctatcttcctttcaaagactagtggctctcaccttcccttggaacttgcaaacattagtctagctaagcaaaaaacaaaaacaaaaacagttaaatttgtctgggttcatcatggttctgccatttagtagttttatgactttgggcaagttaagaaccctgtctcaacctataccctgatctgcgaagaatcataacacctaactcatagtgcagtgggaagatgagagataaatgtagtacaaaactgaataaagtgcctggcatttggtagccattagataaatagtagctgtcattatcattatcacaccatcaatttccccaccctcacacatatctttaatgtttctttcccagttgttcttatcctccttactataaggacaaggccacatcacacaaacctgcccaaaagatcttgggagtcacacaggaaactctctcctcagctcccrggtaaccc

SEQ ID NO: 546442 - DNA, 1028 bp, Homo sapiens
gggtgttgaattctccaggaaaagagagatcctgttttctcagtttgttgttggggttttgtttttgacattttttgacagctaagatcaagatctcatgacttgtgttctggccagaggaccctcagctttttgtgatgagtcatttcctaatgcatccggaggcactgggcttggaacccccatctcagagttgggggcagcagatccagccactgcagctgggagggagtccaggtgtcaggaggaaggggctgaggtcttcagggctggtggctcagggtatatgagtagcctgacacaggcacccatgtccccagaccttctctggccatatggagtcagagtgacctccagtcccctggaagattgccaagagcaaggcagctcctcagcccctgaggagttagcagcagattatccagagagggtctcaggctccttatcagaactgagctaragggtgatttaggcctgtggaatgcaggagcaagaaagccaagttactggatacaaggtcagggcctgcctgttaagcagcaagagcaacttagccagagctatttaaatctctatcttagaaattcccgctgggttgagccagcaaggcgagtgtgggggcaagggttaagaggcttcagctgtggggaaggaagggccatggacactgaaaacaacaggccaggcctggatgtcctgacagcctagacctaaatagagaggtttttagtgtcctggtaggtcatttcagcctgcttgcaagtgaatgggtcttagggtgtaaggtacatattcaatcatgagcttgaaaactgagaattacttatgtgaatctggaagtggatgtagttttaaattcaatttagacaacacaaattcctcaatttttcccaagtgtaaattataaccctatattacagaactgtcagttaaattcatgaaagtactctttaccaagcctgaagcaaattggtgcttttgagtgctattacttatcgagaaataaatatataaatcagaaagctgag

SEQ ID NO: 546443 - DNA, 1028 bp, Homo sapiens
gggtgttgaattctccaggaaaagagagatcctgttttctcagtttgttgttggggttttgtttttgacattttttgacagctaagatcaagatctcatgacttgtgttctggccagaggaccctcagctttttgtgatgagtcatttcctaatgcatccggaggcactgggcttggaacccccatctcagagttgggggcagcagatccagccactgcagctgggagggagtccaggtgtcaggaggaaggggctgaggtcttcagggctggtggctcagggtatatgagtagcctgacacaggcacccatgtccccagaccttctctggccatatggagtcagagtgacctccagtcccctggaagattgccaagagcaaggcagctcctcagcccctgaggagttagcagcagattatccagagagggtctcaggctccttatcagaactgagctagagggtgatttaggcctgtggaatgcaggagcaagaaagccaagttactggatacaaggtcagggcctgcctgttaagcagcaagagcaacttagccagagctatttaaatctctatcttagaaattcccgctgggttgagccagcaaggcgagtgtgggggcaagggttaagaggcttcagctgtggggaaggaagggccatggacactgaaaacaacaggccaggcctggatgtcctgacagcctagacctaaatagagaggtttttagtgtcctggtaggtcatttcagcctgcttgcaagtgaatgggtcttagggtgtaaggtacatattcaatcatgagcttgaaaactgagaattacttatgtgaatctggaagtggatgtagttttaaattcaatttagacaamacaaattcctcaatttttcccaagtgtaaattataaccctatattacagaactgtcagttaaattcatgaaagtactctttaccaagcctgaagcaaattggtgcttttgagtgctattacttatcgagaaataaatatataaatcagaaagctgag

SEQ ID NO: 546444 - DNA, 1081 bp, Homo sapiens
aataactatattaaactgctcttgagggaatcattgtcctgttaggaatatatgaggttaagtactaagacttyttttttcttcctattccccacaggccctagccatttaaatatttgtggattatttagctaggatgtagataaatgtacgaaagacctgtgaattattatttttcttttttttttccatctgtgaatactttttaaagaagataaggaaagcaacatggtgtagggaaaggaacatgggctttagattcacggacttaattctgaatcccagcctgctgctctgtgctagctgaatgaccatgggcatgttattgactctttaataataattagaacaataatagaagcaactaccgtttgtttagggcccagtacttaataaaatgctaagcattgcaatgcattatctcatttaatacccccagcaacactacagaaaatactataaaatgaatgagtaaaataaagcttaaagaggttaaataagttgcttaaactaataaaataactaaacgatgaagtcagaattcaagcccagttctgcctgttgcaaatctcatgtatttccactgtattattaatatatcttttttttttttttgagagggagtcttgctctgtctccaggctggagtgcagtggcgcaatctcggctcattgcaacctttgcctcttgggttcaagtgattcctctgcctcagcctccccagtagctgggactacgggcacgtgccaccacactcggctaattttttgtattttagtagagacggggtttcaccatgttggccaggatggtcttgatctcctgacctcgtgatccacctgcctcggcctcccaaagtgctgggattacaggcgtgagccaggtgcacccggcctaatatatcatctttcacaatgtcatacagtttcatgatctttaaagtgagagcaatgatacccatcagagagttgttttgagaattaaattagttctccagcaacatggtagtttacatgtacataccaagctccccactgaaaactattaaagagggagaatacataggttgaggactcggtgt

SEQ ID NO: 546445 - DNA, 553 bp, Homo sapiens
catataggacaagagtcacagcggtcaacctgcatgaatataaaaagtacacaaacacaagcacaagacaggaacataatggaaccattatggctccctttattctgaagagattgctatagcctttgatgatggagtcaaaggaggtaattgctgccggttcatctttattcccaccttccactagaactctaggagtctgcctgtcttccactgagggagtgatctgtgatcttaagctcactgttgaaaccaccaatggaattcagcatcttaccgctctgaaactggcctcctttaatattacctgatggctctaacttttgttattttgttataaaagctacactgggagaaaaataccctaaaagtatttgctcctgatttagcttttctaaaaacagaactcaaagttcaaggcccttagctgggaaagaagctgcttgtcaagatctttcaccaagaccscggcggccactccctccgcgcggccactccctcggcagcgcctccaggctcccaacattgttttctcctgaaaaggccaaggccc

SEQ ID NO: 546446 - DNA, 553 bp, Homo sapiens
catataggacaagagtcacagcggtcaacctgcatgaatataaaaagtacacaaacacaagcacaagacaggaacataatggaaccattatggctccctttattctgaagagattgctatagcctttgatgatggagtcaaaggaggtaattgctgccggttcatctttattcccaccttccactagaactctaggagtctgcctgtcttccactgagggagtgatctgtgatcttaagctcactgttgaaaccaccaatggaattcagcatcttaccgctctgaaactggcctcctttaatattacctgatggctctaacttttgttattttgttataaaagctacactgggagaaaaataccctaaaagtatttgctcctgatttagcttttctaaaaacagaactcaaagttcaaggcccttagctgggaaagaagctgcttgtcaagatctttcaccaagaccccggcggccactccctccgcgcggccactccctcggcagcgmctccaggctcccaacattgttttctcctgaaaaggccaaggccc

SEQ ID NO: 546447 - DNA, 1490 bp, Homo sapiens
ggaaaggttctagactcagcatgacctgagtttgagtccagatgctgctatacttacaaaaagatatcgaacaagtttcttagccttgctgagcctcagtttcctcatttgcaaaacaagaaggaaaaaattatctacctcacagggttattttcaaagctaaatgagatcatacatgtaaagcatacatgcactaagcatagtaaatgcttactaaatggcagctattaatgtttcttactccttattccaaccctgaatatataaaactgctggagtcaggcaggcgtggtggctcacacctgtaatcccagcactttgggaggccgaggtgggcagatggcttgagttcaggagctcgagaccagcctgggcaacatgatgaaaccccatctcgacaaaaaatatgaaaaaattagctgggagtggtggcgcacaactgtagtaccaagtacttgggaggctgaggagggaggattacctaaacccaggagattgaggctgcagtgagccaggattatgccactacactccagcctgggtaacagagcaagaccttgtctcaaaataaatgcaaaagaaaacctgctggagtcacatctctcccttcaacaaagtatgatactgtatagcccctaattttgttcttttttaggtttggaataccttgtagcaggacatgaggatataagaacaggcaaactaattgtgaatatgaaaagctttgtccagcactggaaaccttctcttggaagaaaagtcatggatattttaaaaagagagtgcaagtagcattaagatggatagcacataatggcacttgtctatgtacaaaacacaaactttagagcaagaagacctcagacaggaaactggaattttttaaagtgccaaaacatatagaaatgtttgaatgcatgggtcttatctaayttatctcttctggacccatgtttaaatacagttttatttcatgaagagaaatgaaaacccctacactgatatctgttttctatgggactgattctgaaattcttaactattaagaatattttaatagcagcatgacatttagcagtaatccattaagggcagtacctctaacaaggacgccttccagcttcagcgatgttacttacgtttgatgctacttaaagtaatgaatgacgttttaaggaatccctaaccctactatcagaaaaggtgtttgttaaagagccttctcttgtgtgttacgcatgaactttggtctgtaggtgttaaatggaacctctccatgtgtatatagtatttccttgtataaagcactttactacctaccacttgtgttgtgaacgtttggtgactgctgttgaaagaaggaaaagggtgtgtgagaaagcctactgaagcagcagcactgccactacatgtggacaaaagtgaccatataaaagaagttgtgctatttaactctgaatacttggagaaactaggtgaagatgcaacca

SEQ ID NO: 546448 - DNA, 1490 bp, Homo sapiens
ggaaaggttctagactcagcatgacctgagtttgagtccagatgctgctatacttacaaaaagatatcgaacaagtttcttagccttgctgagcctcagtttcctcatttgcaaaacaagaaggaaaaaattatctacctcacagggttattttcaaagctaaatgagatcatacatgtaaagcatacatgcactaagcatagtaaatgcttactaaatggcagctattaatgtttcttactccttattccaaccctgaatatataaaactgctggagtcaggcaggcgtggtggctcacacctgtaatcccagcactttgggaggccgaggtgggcagatggcttgagttcaggagctcgagaccagcctgggcaacatgatgaaaccccatctcgacaaaaaatatgaaaaaattagctgggagtggtggcgcacaactgtagtaccaagtacttgggaggctgaggagggaggattacctaaacccaggagattgaggctgcagtgagccaggattatgccactacactccagcctgggtaacagagcaagaccttgtctcaaaataaatgcaaaagaaaacctgctggagtcacatctctcccttcaacaaagtatgatactgtatagcccctaattttgttcttttttaggtttggaataccttgtagcaggacatgaggatataagaacaggcaaactaattgtgaatatgaaaagctttgtccagcactggaaaccttctcttggaagaaaagtcatggatattttaaaaagagagtgcaagtagcattaagatggatagcacataatggcacttgtctatgtacaaaacacaaactttagagcaagaagacctcagacaggaaactggaattttttaaagtgccaaaacatatagaaatgtttgaatgcatgggtcttatctaacttatctcttctggacccatgtttaaatacagttttatttcatgaagagaaatgaaaacccctacactgatatctgttttctatgggactgattctgaaattcttaactattaagaatattttaatagcagcatgacatttagcagtaatccattaagggcagtacctctaacaaggacgccttccagcttcagckatgttacttacgtttgatgctacttaaagtaatgaatgacgttttaaggaatccctaaccctactatcagaaaaggtgtttgttaaagagccttctcttgtgtgttacgcatgaactttggtctgtaggtgttaaatggaacctctccatgtgtatatagtatttccttgtataaagcactttactacctaccacttgtgttgtgaacgtttggtgactgctgttgaaagaaggaaaagggtgtgtgagaaagcctactgaagcagcagcactgccactacatgtggacaaaagtgaccatataaaagaagttgtgctatttaactctgaatacttggagaaactaggtgaagatgcaacca

SEQ ID NO: 546449 - DNA, 626 bp, Homo sapiens
caagagtttttttgggggtcatgccgacttcaacattttgttttatcataaaaccaaagttatgaagtatagctatgatttcatctcacagatctttttttcttcttttattaccctgagttcagaattctaacatttttgaatgaatagcaacttcttagacaccagctgtgctcaacatgtttaaacctcttcacagtcctcttaccttataaagaaggatctatcactttgggaatgttcattgtctttgacctagtgttgtcagtgggaaaagctgtcaagcttgttctaaaagccatttttgtttctagttctagacactcagacacattttgaatcatttgtaaaattcacttaaacaacttgttgacaaaaaattaaataatatacctctgatggaatactgcctgataagtctcaaattgccaatcctacrgagatctgtcatttgattttttaaaacatcttttctatatctatcatatgatgattattttctcatctttgcattatgtaaatcttgagatatttagagctgtgcactataaatatacttcagatattattcatagagtcaaaatattcttgttgtttgtttcataggtcagattcaagcaatgccc

SEQ ID NO: 546450 - DNA, 1481 bp, Homo sapiens
atggagaaggacaacttgatttatgaagaaagatttaaagagctgaataggtagagctcagtaaatgatgatctggaggaactctgggaccattcacttatagctgaaagttgtaaacagtcagcaagtaagaattatttcggttagagctaagaaatataacaaagagtaatgaagagaaatttatamtaataatggactgtaatgttatacctatttccaacccaaggaaccttaagacattttatggctaagtataatatacatactacaatgaggcatactcagactgtaaagtggcttgtaatttagctaaagccttttcaaaaaaaaatttagtgggagggtaatgggcactttgtgtgtaaagcacagggccttggctttgttttgcctgctgcccactcaaagacagtgtaggtggagaatggtgttgctttgcataaacaagaccactttcaaagtttcctgctgccattttcagagaggcacagaatccaaaccccactgtatagaaaaaagtagaaggatcttcactgtcagagaattgcaggtctgaaaaaacagtggaagtctgctacagcttagttcttaacactaggcgatggcgtcagtccattcaggcagctgtaacaaaataccatggactgggtggcttataaacaacagaaatttatttcttacggttctggaggctgggaagtccaagatcaaggtgccagcagattgggttcatagacggattcacagatggtgtcctcctgttgtgtcccacatggcagaagaggcataggagctccctggggcctgatttataagggtgctaatctcattcatgagggcctagcccttgtgacctacttacctcccaaaggccccacttcctattaccatcaccttgggagttagatttccaacatatgaattttggagacacaccaaaatttagaaccagagcactgatggagtaggtgggactgtagccggaactgcaactttttttttttttttgccttgcttctgtccagactgtgaaatggtgtggatttgaccacgtctccccttctctgaacctcagcatcctcagcctctgtctgaggaagcaaacctttgtcccttttctgattggaatattgagggatgggtgagcctttgcattttgctgctctctctgcttggattgcttcgtcctcaaatatccacatcacccacttcctcacttcattcagattctgctcaaatgaactcattagagagactgtacctggtcatcctgcctaagatagcaggacttttccccgttcatcattctccagtaacttactcttctttattttatttttattttttactttttggctttagctttctttcttttttttaattgtactttaagttctagggtacatgtgcacaacgtgcaggtttgttacatatgtatacatgggccatgttggtgtgctgcgcccattaactcatca

SEQ ID NO: 546451 - DNA, 537 bp, Homo sapiens
cacacacatatatatatatgtcttgaccagaggcctttccctaccctttgttagggaatccttagtgtaccttagagtatcttagagtaccagatggatttgggctgtgaagactgaaagcctacagcttttcaccttcttgccttgaccttgagttcacatgtgcctcttgatccctggcaacctccttgcctaggtactaacctattgcctagtctaagcccttactttaacatattgctggctctctggatcctggctttctgccctggatcttcctgcctatgtccttagtactaggagatttcataaaaccacatattgaaagaatktcatatgtggccaatttcagtgaggccaaaaccagcgctgtgataaaacaccacaccactatggttgcattattgggtcagtaccagtactatgaggtaggattttctctttccgtgagctactatgatgtagtatttcctctttctgttagatactgcagttggggctgttgaaagtaagtagaatttactctagctctgctcc

SEQ ID NO: 546452 - DNA, 1634 bp, Homo sapiens
tataaacggccgctctgggagtgtctgtcttatgtggttgagataaggactgaaatttgccctggtctcctgcagtaccctcaggcttagtagggtagggaaaaaaaaacccaccctggtgaatttgaggtcagaccaattctctgctctcgaaccctgttttctgttgtttaagatgtttatcaagacaatacgtgcacagccgaacatagaccctcatcattaattctaattttgccctttgccttgtgatctttgctttgccctttgccttctgatctttttgccctttgaagcatgtgatctttatgacctactccttgttcttgcaccccctccccttttgaagtccttaataaaaacctgctggttttgtggctcaggggcatcatggtcctaccgatatgtgatgtcatccctggaggcccagctgtgaaattcctctctttgtactctttctctttatttctcagccagctgacacttagggaaaatagaaagaacctatgttgaaatattgcgggtgggttcccctgatagttctttaaggaatctccacagtattttccacacacaaaggcataagaatgatacattggagtttggggacttgggggaaagggagggatgggggtgaaggataacagactacacattgggtatagtttacactgcttgggtgaggggtgcaccaaaatctcagaaataaccactaaagaacttattcatgtaaccaaacaccacttgctccttaaaaacctattgaaatagaaaataaatttagaaatacaaaaagaaaagaaattaaaaataaataaataaaatttggccactagaaaatttaaaaaaatatatattttcaattggtggttggttgaatccaaaaaagtaaaataaatttgagctgctgtcatgcagtcggcttgcatcagctagctctatatctaagactttaaatactctagggaaaacagtctggtgatgagagagtttccttgtaacatggtttttgtttggaaaggcatgcattcctcttgaaggggattttccaagggatccctaccaaacaccactcttacattcttatattggagagaccaaacaatagcakttgccactcccaaccctgatctggcacagtttccctagtccaattcaggagaaaatgtcccagaatttccagaggattatcgaatacttttctggggactgacagagcaacttgctctaccaacattatatgtatactgctttttttttttttttttgagacagggtttcaccatgttggccaggatggtctccatctcttgacctcatgatccgccctccttggccacccaaagtgctgggattacaggtgtgagccaccatgcctggccaatttttgtgtttttagtagagacggggtttcatcatgttggccaggttggtctcaatctcttgacctcatgatccacgctccttggcctcccaaagtgctgggattacaggcgtgagccaccatgcctggccaatttttgtgtttttagtagagacggggtttcaccatgttggccagggtgatcttgatctcttgaccttgtgatccaccctcctcggcctcccaaagtgctgggattacaggcgtgagc

SEQ ID NO: 546453 - DNA, 641 bp, Homo sapiens
taatctttccaatagcccccacaaatgatatttcttcacgaattgtgcaactgatcctgaaaacaaaagacaagaacaattgttcattttgcagccttcgatatggaaaacttggtgtggcracagctccatataatacagtaaccatcaaatatatggattattataagaaaaagtgtcaaaaataactaactggttgttagtaggcagtagccagctgatagactaattgagatcacattcacaaacaggcttgaaggaattcaggctggaaggccgcaaatgacctttctctttggcttcattatctgggacatttatgaaactagcattgtccctcacccccattgctccttttacttcccctacatgtcatctgactccttgtctcccccagccatcttccagcacccatactgatatggtttggctgtttccccacccaaatctcatcttgaattgtagttcccacaatacccacgtgttgtgggagggacctggtgggagatgattgaatcatgggggcaggtctaccccatgctgttcttataatagtgaataagtctcaccagatctgatggttttataaggggaggtttccctgcacaagctctcttctcttgtttgctgccatgtgagac

SEQ ID NO: 546454 - DNA, 1196 bp, Homo sapiens
tatagacatatgtagccacacacctgtcactctctacacagtcatactacaatgttactagaatatgctccacgtctttcgtctgtgtctgcctcaatactggtaatctctcccctcctcctggcattactcttggagtgaaaggtagttgactaagattaaaagggaatatgagtgggacctttacaagcttcctctcctccctacttgccagattgtgttgtttgctttggaatttatataggagaaataatttgaaaatttttgagcagtgcacttcaattttcttcttcatrtatgcccccaaattttgaaaacgaatatataccctcatataaaattgatagctcaaattatttttataaatttaaatggctacaaagactattatatacccttgtatacaattgatagctcaaattatttttacaaatttaaatgactacaaaggctattatctccagcctgttgtatatgatatatcatcacagatcaaatctttatgtctgcctcaaattcatatgttgatgtcctacccccaaatgtgatggttttcagatgtgcggccttaggtttagatgccattatgagagtgggggccccatgatggcatcaatgtccttataagaagagaaagagcctggagctccctcttcaccttgagaggacacagaaagaaggtggccttctgcaaaccaggaaggcgccctcaccagatctcatgatagcaccctgttcttggacttccagcctccagaactgtgagaaataaactgttgttgtttatcagctaattggcgtatggtactttgttacagcagcctgagctaagatagaaaagtgctgtaaatacatatttgtcaaaagcttgtagcgacaggtttagattattcaatttatagtaaatggtaaaaagccagtcctcattatcaaaccagtctgccaaatcaggcttactatgggtcagaaaagcctacctcaattatccattcttcttctgaattctagatagaatcacagaatgacagaattgtagaagaggagaatgatcaatcaatagatggacagataggacagagaccacctagcagaagcaggggtccttcactgagatatttttgatttagtgagaaaaaaggcacagccactttcaataatgcttatcagaactctctttggttcccttgctagactct

SEQ ID NO: 546455 - DNA, 657 bp, Homo sapiens
gtcattctgtgccccgggtcaggtcaccgcccggagggtatgggaagagaaatgaagaagactggtactcccagacccttccgtatcgaggaccccaatcaacaacccacctggtgagcgccatcttcttccgcttcttccagcgcgagcgacagcaccgctgggcgggtctttccagatgatgaggagcggaaaggaaggagtgcgcgatgcgcaggcgctctggccgaaaaggccttctgggatttgtagttctttgaacaggagtaccgtttgtattctgaccagaccaagcggttatcaaggaataatctcttcagctagcaacaaatgcataactcgatcgcttatatgcgacatgatagggcgttccctaggcaaaatatcaaagatacagggagatgccttttaggccgctttattacgttccttactcagtcccgttccccgagaaggggtacaaaatacaaaagcttcccggggacagctactttaagtaagagtgatagggcgtttaaaacgacaggtaataatgagactagctaatggagagtycttggactctctgaaaacattcacactcaaaacttttctttaaaccatatcctctcacccgccaaaacactctcttggggagatatttcgtaatccttggta

SEQ ID NO: 546456 - DNA, 612 bp, Homo sapiens
ttggctccctacaacctctgcctcctgggttcaagagattctcctgcctcagcctcctgagtagctgagattacgggcatgcaccatcacacctggctaatttttgtatttttagtagagacggggtttcgccatgttggccaggctggtctcgaacccctgaactcaagtgatctgcctgccttgggctcccaaactgttgggattacaggcgtgagccactgcttttggccaggaacactgtttagattttaacttattaaaatcttccttcatatctttcaataacattttgaagttgtctttatatagattgtacacatctttcaggatattaattttggtatttcatttttaaaatcatgaatgcaatctctgtttttatatgattactaaatagaacagtaatttttattaagtaagtcaaaaatgttctgaaacatgtcagtcattttataggcagaatcaatttttttaatttttattttttwttttttacaggcatgatcaaccaggtacagaatcagttttttggctgtagatgatttaagagttagggtcaacttgtctttggtgagatgtgctcctctatcttcttctggaattaagcag

SEQ ID NO: 546457 - DNA, 1061 bp, Homo sapiens
tggaatattaatgactctacttggaagtaacggaccaacttttctgstctgcttgagactgaggggtctcctggggcaaggcattttcagaacccaaaccaggaaattcccagacaaactaggaggagtgaatcacaccgcgtagagggcaggagaaatgagatgaggctacagctggaattgctaaagaagcagtcattcatactagccaggatttgctcatttttgtggtttgggcaatgttcattattttgtctagattctgacatgattacaacgtggtcttgtcactctcttggttcatcatggtgacagagtggccttgtctaatttcgatgttgttggtgctcagtagaaaaccagattccgcctctgagtagcaggctaacttccggaaaagcaaggcattctcatgttgccagcctagtttctaactgtcaggggctgcttttcttttttccagttcccttcttggggggtttcagggctgcttttgggtgggcatgagtttatagatgtgaccttctcatttcaagagttttaattttagccacattggttctgtgccatagtgaaacattttgggctttgagacactgaataataataaaacatgatctatttctcttaacacattttttcaaatagagaacaatgttttaatgattaagactaaatgctaaattactgttaaaatttttaaaatcagatgctatgctgcttctttgagattcaaaatttacattagcatatttcagtgttcttagtaatactgctataaggaaacccaatttatttgatatagacacttatttccatagaatgcattaacattttggtaagtactagtatttcactattaaaccagtatttcctagaaataaatactagtctaatttatttagtgattgtcccataattgtgctttctgttttttttttaaattagaaatatgtaaggggcaaataactattctgatttaaattgttctgacttaaaataaatgtccttaataaccgtcatggaaaacaaatggttttatgttttacagatctactgtt

SEQ ID NO: 546458 - DNA, 1061 bp, Homo sapiens
tggaatattaatgactctacttggaagtaacggaccaacttttctgctctgcttgagactgaggggtctcctggggcaaggcattttcagaacccaaaccaggaaattcccagacaaactaggaggagtgratcacaccgcgtagagggcaggagaaatgagatgaggctacagctggaattgctaaagaagcagtcattcatactagccaggatttgctcatttttgtggtttgggcaatgttcattattttgtctagattctgacatgattacaacgtggtcttgtcactctcttggttcatcatggtgacagagtggccttgtctaatttcgatgttgttggtgctcagtagaaaaccagattccgcctctgagtagcaggctaacttccggaaaagcaaggcattctcatgttgccagcctagtttctaactgtcaggggctgcttttcttttttccagttcccttcttggggggtttcagggctgcttttgggtgggcatgagtttatagatgtgaccttctcatttcaagagttttaattttagccacattggttctgtgccatagtgaaacattttgggctttgagacactgaataataataaaacatgatctatttctcttaacacattttttcaaatagagaacaatgttttaatgattaagactaaatgctaaattactgttaaaatttttaaaatcagatgctatgctgcttctttgagattcaaaatttacattagcatatttcagtgttcttagtaatactgctataaggaaacccaatttatttgatatagacacttatttccatagaatgcattaacattttggtaagtactagtatttcactattaaaccagtatttcctagaaataaatactagtctaatttatttagtgattgtcccataattgtgctttctgttttttttttaaattagaaatatgtaaggggcaaataactattctgatttaaattgttctgacttaaaataaatgtccttaataaccgtcatggaaaacaaatggttttatgttttacagatctactgtt

SEQ ID NO: 546459 - DNA, 515 bp, Homo sapiens
aaataagaaaggtagaataagaggcccaatatctgtatacttggaattctacaaagaaagagcagagaaaggaaggcatgacatcaaaacattcaagaacatttcagaactaaaggactttagttttgacactgaaaaggtccactgagtgaccagcacaatggatgattttgracccacattaacaacagacatatacaataatatcctcatgaaattttatgacaccaggaacataacgaaggtgttccaagccttcttatggagagaataagcagacttcacaaaaaagaagagtctgaatggaatctgagtcttcaacacccatttgagaagctatagaacaaagacagaatgccttcaaaattctgaaagaaaaaagattccctaagtgtaatcctcaaactagctgaactaaaatttagtgtaaagttagaagaatggtttctgcagatatatgcatatgctatatcaaaagaaaaaggaaaacaaaactactccaaatgaggttattc

SEQ ID NO: 546460 - DNA, 681 bp, Homo sapiens
tgcaatatcaaatgtaacaaatattrttttctcactctctcattttatggctaaagactttgatagaaaagaataaaaattatgtataaattctacaatttggaatcttactatattttatctctagtttgcaggcaacttagcagtgatgaaatggattaccccgggagaaatgggagctctctagaacgatgaccagtcaaacctcagtgtgcatcagcatcacctggagggtagaatgcacaaagctggctgggctccacccccagagtttctgatttgctgggcctggagcagacccagtatgtgcctttttagtacattcttaggcaatgctgatgctgcttctccaaggaccacactttgagtaccactgtcttagaatagagaaaggaagagaatgagaacaatgcttaactgagtgttctcctgacttatttctgaaaaacagtgaataaaggaagagagactacatatcctatttatgaaaagaatttatcactcttttaaggcaatattaatagtgcagaggacatttagaaattttattaggaagtcatcggccagaactatgtcatctgaggatgtcatctgctgcttgcatttgcttattctgaagaaagaaagaatttcatttttgctttacttcttttcaactcattttttactatacttaggtat

SEQ ID NO: 546461 - DNA, 611 bp, Homo sapiens
gaaaaggtcagtaggtaaaaactaaacctgaatacattatggacttcagttaataataattgctatgatttagatatttatcccttccaaacctcacgtttgatccccaatattagagatgggcccaatgggaggtcttaggtcatggggttagatccctcatgaatagattaatgcctctccttgggcttaagtgagttctggytctatttgttcctagttgtaaaaagagcctggagcctcctcctccccttgcttcctctatgaccatgcaatctctacacacatcagctctcctttaccttcagccatgagtagaggcagcctgaagccctcatccaatgcatatacccaatcataaactttccaaccagccaaatcatgagcaaaatacacctttttgtctgtataaattacccaggcttaagtatttctttatagcaacacaaaatggactaagacaataacataccaatattaatacattaattagtattgactgtatgaattatattgtctggtgagatataaaatgcacatagaataaaatatgtgacaacaataacatattagttgggaacttggtaaaggtgttatacatagggaaaaag

SEQ ID NO: 546462 - DNA, 917 bp, Homo sapiens
ccagcacctaggctggtcttccctgggtgcctgcttgagcacgtggcccaaaacagccgttgcatggggcactcagaacccaccacaccctcgccccttcccagcccgccaccctgtggctgaggccctgtgccttgagcaagctgctgcccctcctcctcctggtccagttctgcccacacctgggtgcccacctcccctccctgtggtctccaggagctgcccccaacatgccctgggcagcagtgctcatcgtagccccgtctgtggcctggacaggctctgaccactcctgcgttggcacagcttcctcgggaggctcctgccaacaccactcggcacggtgggctcaacacggcagcggcaacgggtgggagtacttgcctctgcctggcccgaatggcggttttccatttggatttggggatgagcagccaatgagcctatctcattcccgttaacgtgagagaaacatccagacgctatcctcaggtctcacacacccccgccgtgctctgcaccacacctggcaggggcacccccgactgtatgctgggcatcagctcccaggcccgagcgcctcacctcacactggggattggagccctcaggccctagagacactggcttgagaaacttttgagatggagtctcgctctgttgcccaggctggagtgcagtggcatgatctcagttcacagcagcctctgcctcctgcgggttctggaaattcttgtgcctcagcctcctgagtagctggaattacaggcgtgtgccaccatgcccggctaatttttrtatttttaagtggagacaggatttcaccctggtggccaggctggtctcgaactgataacctcaggtgatccacctgcctcggcctctcaaagtgctgggattataggtgtgagccaccg

SEQ ID NO: 546463 - DNA, 544 bp, Homo sapiens
tcctaagtagctgggattacaggcatgtgccatcacacctaactcatttttgtatttttactagagacggggtgtcgccctgttggccagactggtctcaaaactcctgacctcaggtgatccgcctgccttggcctcccagagtgctgggattacaggcatgagccaccacgcccagcctccttactaatattttgagctactttaccaaattctcttctcctccttaggtaaatatgagggcaaacatcaatgggtccctgtcagactcagcccagattctggatagaattgaatgacattttcttgctatttttcactttttttgtgtgctgtttttgaaacaatagctgtattatttctaggtgtatttagagtctttttatctaataagtataggacctttaagagatgaattcctgcatagtattccatggcgtatatgtgccacattttctttgtccagtctatcattgatgggaatttgggttggtaaaaggatgagttcatgtcctttgyagggacatggataaagctggaaaac

SEQ ID NO: 546464 - DNA, 930 bp, Homo sapiens
ggccccggtatgtgatggtcccctccctgtgtccatgtgtttctcattgttcaactcccacttatgagtgagaacatgtggtgtttacttttctgttctgacttccaggagtttcattttccctaaggactcacaacagccaccaaggctgctacctcctctggaaagttttgatttaaaggttctttcaacaggaagtgttgccagctcagatagtaccttgatcagtgcagtggctggaagcttttgcagccatgtcaagaggacacaagtaatatcattgtcaggcttgaaatattatctaagaggcacctgacggtcatcctccaggctactgatgtggccatcggagtgcgttagtgatgaacagtgtcagcctacattaggcccctgagacccatttactgttactctccacatgtcctattagaacattgtaaatcgtagttccatctctagtgatgtatccttctggagcagggcgcggctgacatttaacatgctattgacctagagcaggcttctaagtctcttggcgctgcctgtttgcacttgtgaaataaaagtggagaattaaggctacatggcaggcacggtggctcatacctgtaatcccagcactctgggaggccaaggtgggaggactgcttgagcccaggagttcgagaccaacctcggcaacatagggagatgctgtctctacaaaaaaattaaaaattagccaggcttaatggtgtgcacctgtagtctcagctactagggagactgaggcgggaggatcacctgagcccaggaggtccaggctgcagtgagccatgatcgcaccactgcactccagacttggtgatggaatgaractctgtctcagaaaaaaaaaaaggctacatgtatttatgggttgttgcccaggtttgggaaatgtgtgttgag

SEQ ID NO: 546465 - DNA, 567 bp, Homo sapiens
cgctgaataattcgttctaatgattgtctgttcacattttcactcatgttttccaggcattttccaacatcatttgttgaccaaaaaaatgtatcttggtttgctgccatcttgttttccagtctgtaatccatttaagcatttgcctactggtattacctcttagattttctctattgaaaaaaaaatccacctcagggctgggtgtggtggctcatgcctgtaatcccagcacactgggaggctgagataggagcattgcttgagcccaggagttcaagaccagcctgggcaacatggcaagaccttgtctctacagaaaattaaaaattagctagctgggcttagtgacccccagcaatttttatgagaacttcttctctgcactataagccctccaaatgtatagatttgtgcttcttttgttcaccgttgtgtcacagagcctggcacatagggggtactcaataagtttgtatayagctgggcatggtaacatgcacctggagtccccgctactcaggatactaaggcaggaggaccacctgcacccaggagttcaagacc

SEQ ID NO: 546466 - DNA, 529 bp, Homo sapiens
ccccccatgcagaactccagatccaggtgggctctttccatggagcctgagacttatgatgccaggtgcctggacaaagcttccaggtaagcaatagtggttgccggtgttctgtgagctgtcccagaaggccaggtaagaaggcacttcatcctaatatttggaagtatgagcttccccgtggtgagaggggaatagagaagcccatgyatttattctttctttaatgaaacattgagtgtctactatgggtcgggtgtgttctagccactgggcactacaatggttacttgacatgtttactgctttggttccctaaagatgaatggtaaaaagtgccacatgagctcagagatgaaagagccatttgtcactggttaagaagtccccaacttcctttggcaaatactctatgttgtgccgcagaaacagatgcctgtgacaagctcactgggatcagtactgacagagcctgtgctcactcagcccctgcatccagcctttcagacaacagcttgatttcctctag

SEQ ID NO: 546467 - DNA, 425 bp, Homo sapiens
attgcttgagctcgggagttcgagaccagcctgtgcaacactatgaaacccccatctctacaaaaatacaaaaattagctgggtgtggtgccacacacctgtagtcccagctactcaggaggctgagatgtgaggatcagttgagccctggaggtcaaagttacagagctatgattttgccactgcactccagcctgggtaacagagtgagaccctgtctccaaaaaaaagagagagaaaggaaattatttctgagctttattgctatgaagaggatggaaccagggaatgagatggaaccactggggggtagcagtgaggtcatttcagccaaggagggccagaaggaaccctcagaggaggtaataggatagcagggaggtgayagccagagaaggccacaaggagaaagtgacagttcaccc

SEQ ID NO: 546468 - DNA, 549 bp, Homo sapiens
caatatatttttataatcatgtgcaggcaaatccaaaaaactgatttggtaattaacaattaagcatacttttatgcctcctttaagtctctacttttacaacagaataaatagatgtatttttaaaaagaaaacacaggaattccctctcagtaatgctaatcagaaacaaataaatattttaacttccattctctgtattttctcccatcttcatcttttttttgtgtactataattcaatccattctcctagacctcactcatcccccaaagccacatttctggaacacatttcatttcttacatttgttgactatcacatctgcaacatgattaactatagtctgagtcttctatcttctacagtggttcttaaaccttagtttcacaagtattacctaatgtacttgtgaaargaaaaaaataaaatgttgtcctgttttcttctccatcctgattcagtgtattcaatatagacagaggcccaggaatcagcagtttaagtcaagccctaaggaaaatgtgatgaccttcctgaatcactact

SEQ ID NO: 546469 - DNA, 968 bp, Homo sapiens
tctgaaagtgctgggattacaggtgtaagccaccgtgcccagccaataaaagccagttttaaaactgaaaaaacagctttgaaattgagggctgcatttttacagagaatattttccagcatgtgcaatctaacatagtagcactatactcctcacttaaacagactagcttttataatgaatgattttgttttaaaatgtgagtaacagcacaccaggggctgtgacagcatgatcgcttctgttaacatctctttctaataccgtagtcccacgtaagctgcatttggctttcacggtttcacttacctacaggcaatcctggtctgaaaacattaaatgaaaaatccacagataaacaactgacaagttttaacttgctgtgctgttccaagtagtgtggtrggagctcctgtcatccccctctactcaaggcccacccaggacgtgaatcatctctgcccacaacatctacctgtctaccttcccacttgttagtcacttagcagctctctgggtcgtcaaatactctgttgagatatcacggtgtttgtgttcaaagaaatcttgttttacttaatggccccaaagtgcaaaagtactgatgctggcaattcaaaaatgccaaagagaagccataaagtgttccttttaagtgaaaaggtgaaagttaatcatagggcatgcatgtgtagaaacaaagataatctatattggatttagtactatctgtggtttcaggcatcctctgaagatcttgaaatgtatcccctatggataaaggaggactactatattctcaatggattttgcaagaagaaaattaatcattcacaaaatattttaaccttagaatttaaataaatgtgtatattctctacaagttaaacacaaatattgtaataacctatggccactttttcttatttttatgccatttgagtaatgactggtattgatttgctgag

SEQ ID NO: 546470 - DNA, 968 bp, Homo sapiens
tctgaaagtgctgggattacaggtgtaagccaccgtgcccagccaataaaagccagttttaaaactgaaaaaacagctttgaaattgagggctgcatttttacagagaatattttccagcatgtgcaatctaacatagtagcactatactcctcacttaaacagactagcttttataatgaatgattttgttttaaaatgtgagtaacagcacaccaggggctgtgacagcatgatcgcttctgttaacatctctttctaataccgtagtcccacgtaagctgcatttggctttcacggtttcacttacctacaggcaatcctggtctgaaaacattaaatgaaaaatccacagataaacaactgacaagttttaacttgctgtgctgttccaagtagtgtggtaggagctcctgtcatccccctctactcaaggcccacccaggacgtgaatcatctctgcccacaacatctacctgtctaccttcccacttgttagtcacttagcagctctctgggtcgtcaaatmctctgttgagatatcacggtgtttgtgttcaaagaaatcttgttttacttaatggccccaaagtgcaaaagtactgatgctggcaattcaaaaatgccaaagagaagccataaagtgttccttttaagtgaaaaggtgaaagttaatcatagggcatgcatgtgtagaaacaaagataatctatattggatttagtactatctgtggtttcaggcatcctctgaagatcttgaaatgtatcccctatggataaaggaggactactatattctcaatggattttgcaagaagaaaattaatcattcacaaaatattttaaccttagaatttaaataaatgtgtatattctctacaagttaaacacaaatattgtaataacctatggccactttttcttatttttatgccatttgagtaatgactggtattgatttgctgag

SEQ ID NO: 546471 - DNA, 565 bp, Homo sapiens
caggtggtcgggggaggggggatgagatgaaactgttccacctcagatcatcaggcattagttagattctcataaggagtgtgcaccctagatcccttgcatgcacagttcacagtagggttcatgctcctatgagaatctaatgcccccgctgatccgacctgctgtgtggctggttcctaacaggccacagaccgtttccccgcggcccrggggttgagggcccctgtgctagaggacagggacagggttcagagcaagtggttgtactccaaagtgccaggagtttagtggtaggtgagggggagtgcaaggagatgctacagcttcgtgatgacacttcagacatgaattaaggtggaagactaaagacatacaattgattcttgacagtgggaaaacattcatttttagtaattgctttgcaaatacctatggaatactttatagaagagaatgtgaattttaataaagttgtctatttgattactggtacatttctgtcatcttaatttgtgttttctgtttatcaaacttaattcctgtctctctctctcctctcttc

SEQ ID NO: 546472 - DNA, 637 bp, Homo sapiens
ggaccacaggccggcgccaccctagctttaattaaggccgttttgttgttgttattcccctgctccacacaaggggcgctgccgctccaaggctgccagggcgggagtcaggatggcggaagtctgtctagccacgaccaccgccatcatggaatacaggcccacctcaccccgcgggtgtagccgcttcgtactgtcgcttaggccgacccgctcgcagcgacaaccasccctctacctcttttcgctctcccttaagtaataaaccgtctttccttatgacgagtcttaaactctttgggaggaataatgccggcgtcttccggaacccgacctcgccccgtgacctcagaggtatacttccgggacacggaagtgacccccgtcgctccgccccctcccactctctctttccggtgtggagtctggagacgacgtgcaggtaggaggcccgggcgcgacaatcggggggcatcctgcggcgaggggaccctgtggggcttgggacgagagacgggggtctttccgtgggaaccgagctaggtgccgggcaagagacgcgcggctggcccacctggatcctggccaactcgggattgagttcgttcctggtctcagaaggcccgttttgctttca

SEQ ID NO: 546473 - DNA, 679 bp, Homo sapiens
taatgggtacagagtgtctgtttggggtgatgaaaaagttttggaatagtggtgatggtggggactatagtaaataataatgtattacatatttcaaaataggtaaaagaggattttaaaagttctctgcacaaaatgataaatatttgaggtcacagataagctaattagcctgacttgctcactccactatgaatacacttgtcagaacatcacattgtatcccataaatataattattatttgtcagtcaaaagaaaaattaaaaatagtttaaaatgtctggacacagaataaaaaatgtgttttaaatcattaaaatggcaaattttataagatatttatatttgtgtgtatayacacacacacacatatacatacacacacacatatatatacaccacaatttttcttttttttttttttttttttatgagacaaagtctggttgtgttgcccaggctagagtgcagtggttaaatctcagctcactgcaacttttacctcccaagttcaagcaattctcctgcctcagcctcccgagtagccaggattacaggcatgtgccaccacgtccagctaatttttgtatatttagtagagacagggtttcaccacgtggccaggctggtgtcgaactcctgacctcaagtgatctgcctacctcagtctcccaaag

SEQ ID NO: 546474 - DNA, 619 bp, Homo sapiens
tttctttgatatgttttcctggcattgaaaaactcaagtaaatataatacagaaaggaagaccttacagaaaacttttcaagttgacaaaaaggtagatactattaaattcagaaattacatctaagtcacataaagaatcctgtttagtcatgaaattaagaaactaattagggctgggcacagtggctcacgcctgtaatcccagcactttgggaggccgagacgggcagatcacctgaggtcaggagtttgagaccagcctgaccaacgtggttaaaccccgtctctactaaaaatacaaaaaaattagccgggtgtggtggcacatgcctgtaatcctagctacttgggaggctgaggcaggagaatcacttgaacctggttggcagaggttgcagtgagctgagatcgygccattgcactccagcctgggcaaccagagcgaaactccatctcaaaagaaagaaagaaagaaagaaactaattagatggaacaacggtactgcttaggtttgcctctggtgtaagttaagaattctatgtagagtttacttcatttaccaaacatatttgtttgtatcatcctgttaaaaaataacagcaatgtagaaccaata

SEQ ID NO: 546475 - DNA, 634 bp, Homo sapiens
aaatgactttagaatatctggtacaaagatgttcaaagacttaaaagacaatatagtcataatgagtgaagatatgggaaaactcacaagatagatggaatgaagaagacatctagtacaaagatgttcaaagacttaaaagaaaatatagttatgagtgaagagatgggaaaatgaagaagagaaagaaaatgaagaagagaaagaaaatgaggaagatgcaggaggaggagaaagagaaggaaggaaggggagaagaagaataaaactgaaatctggaatttaaaactacaatgcctgaaatgaaaatttcattttaatgattttgacagcagattggagattatagaagaaagagtcagtaaatttgattagagtttgattgaaataattcaatgtgaataagagaggaaaaayagaagaaaaatgaacagtctttaacaacctatggggaagtatcaactagtcaaatatatctacagatagagtcccagaaaaagaggagataaataaaaaggcatgaaatacatatatcaatatataatggttgaagttgttccaatttgatgggaaaaaaagtcaaattacagatacaagaagcttcctaaacccagaataaaaaaaaaacacacac

SEQ ID NO: 546476 - DNA, 2349 bp, Homo sapiens
gaatgccccatcactataatactgttaattttaaaaaagcatagagaaaatgataatttatgatagtatctctcaaaatgaggtcatacttttaagggttctcaattcttcaataaaaatttgtatactgtgttttcattttgatattactctaacatgcaatctgagcatatattcaattatctagatgaccatatgtatcaaatactaccacttgatttcagagaccatattggtactagtactactttaattgctacaggctattaaaaacagaaataaagctaatctacaaatgatgcattacaatcaaatgacatacgacataatatagaaaggaatgtttcataacagagagcagagaaaggtggtgttagtacaggtacaccaaactcaaaacaccctcaaagaagtcggcattatattcattcacattgtgatgaaaagtctggtttaaaaaaaaaaatcacattaaattcattttattaatttgaattttacatgttctacaattctgtaatttaaaatttgtttcatagttgtagtacaaatgaaataggtcctcagagcccaagtcaagtcagccatatataacaacactgtaatttggccaggtgtggtggctcatacctgtaaccctagcactttgggaggccaaagcaggaggaatgcttgagcccaggagttcaagaccagcctgggcaacatagtaagaccctgtccctacaattttttttttaagacaagcgcaaagttaatctcaatataattagtgcatgccttcatttggggaggggaaaaaaaagatgaaagcttggatacaacattaaccattccatgaagctctatggttctataagggcctggtaagattctaaaaggtattaaaattctggctttacatgtttagtaaaatccctagcagaacttcagccaaggagcaaatgtgggatactcttgtctgtatccacgttgctgagtgcttactgaaggaaaaaaaatcaaagactatgcataatttacaaaagagaaaacagaggcatagacaagttccacaatttacccaaggatacatagctagtaagtggcagagaaaggatgctaactcaaaggatgtggctcgagaacgtatgctcttatcaaagtatgcagtcttctctactgcaatatcccacatgtaccatcaactcaactggcccataacagaacccatcaattccctacatttctcattttcttgccaatgagatggccaagtaaacgatttacatgtacaaatatatgtgcttctcaaacttaccctttgaattaggcactattagtaaccttatttttcaggaagaaactgggatcctcaactgctcatactagaaacctgggtaccatcctttcttctacttctcctcagatatccaaatcatcaccaatcttacctcctaaatagctctcaaatttgatctcttctattcatttctactaccacaggttttctctctctagtaaattaataaaatagcatgttaactggattctcagaatccaatcttgccttcccccagttcactgttcacactatttcacagcagtcttgaaaaatacccctatacggagaaataagcaaatgtaggaaaacgttaataatgaatgaatacagatgaagggtatgatggcagttgtcatgttctttggccatctccgaaagttttttcccaaaataagtttttttaatctgttttttaaagaaatatggcctacaagacccctacatgttttagcctctgaattactctgtagcatcatctcttatctttcccatttagtctaaaatacagtaacttttttcatttcctccgattttcctcacataaatcactatctcagagaaggcttctatttagctcccaaatctttttttttttttggagtaatagttaacatttattacattaacatttattgatcactgtgccaagtaaacgacttacatgtacaaatatatgtgtttcttaaacttaccctttgaattaggcactattaataactttgtcaggaagaaactgggatcctcatctaagatgatttaaataacctacccaagattttcgagtggccaagatgggaatcaaactcacagcctccaaatcgtaagtgggtatccctcttctgttcccactgaacactgtgcttctgtatcacatcctaccacactgcactgtaatcatttcctttsctgtcttttctcatcttcttgaagatactgagtctactctcttcactgcataaggcctggcacagagtaaccatgaagttacttaatgaagtgtaccacattaaacattccttctccat

SEQ ID NO: 546477 - DNA, 2349 bp, Homo sapiens
gaatgccccatcactataatactgttaattttaaaaaagcatagagaaaatgataatttatgatagtatctctcaaaatgaggtcatacttttaagggttctcaattcttcaataaaaatttgtatactgtgttttcattttgatattactctaacatgcaatctgagcatatattcaattatctagatgaccatatgtatcaaatactaccacttgatttcagagaccatattggtactagtactactttaattgctacaggctattaaaaacagaaataaagctaatctacaaatgatgcattacaatcaaatgacatacgacataatatagaaaggaatgtttcataacagagagcagagaaaggtggtgttagtacaggtacaccaaactcaaaacaccctcaaagaagtcggcattatattcattcacattgtgatgaaaagtctggtttaaaaaaaaaaatcacattaaattcattttattaatttgaattttacatgttctacaattctgtaatttaaaatttgtttcatagttgtagtacaaatgaaataggtcctcagagcccaagtcaagtcagccatatataacaacactgtaatttggccaggtgtggtggctcatacctgtaaccctagcactttgggaggccaaagcaggaggaatgcttgagcccaggagttcaagaccagcctgggcaacatagtaagaccctgtccctacaattttttttttaagacaagcgcaaagttaatctcaatataattagtgcatgccttcatttggggaggggaaaaaaaagatgaaagcttggatacaacattaaccattccatgaagctctatggttctataagggcctggtaagattctaaaaggtattaaaattctggctttacatgtttagtaaaatccctagcagaacttcagccaaggagcaaatgtgggatactcttgtctgtatccacgttgctgagtgcttactgaaggaaaaaaaatcaaagactatgcataatttacaaaagagaaaacagaggcatagacaagttccacaatttacccaaggatacatagctagtaagtggcagagaaaggatgctaactcaaaggatgtggctcgagaacgtatgctcttatcaaagtatgcagtcttctctactgcaatatcccacatgtaccatcaactcaactggcccataacagaacccatcaattccctacatttctcattttcttgccaatgagatggccaagtaaacgatttacatgtacaaatatatgtgcttctcaaacttaccctttgaattaggcactattagtaaccttatttttcaggaagaaactgggatcctcaactgctcatactagaaacctgggtaccatcctttcttctacttctcctcagatatccaaatcatcaccaatcttacctcctaaatagctctcaaatttgatctcttctattcatttctactaccacaggttttctctctctagtaaattaataaaatagcatgttaactggattctcagaatccaatcttgccttcccccagttcactgttcacactatttcacagcagtcttgaaaaatacccctatacggagaaataagcaaatgtaggaaaacgttaataatgaatgaatacagatgaagggtatgatggcagttgtcatgttctttggccatctccgaaagttttttcccaaaataagtttttttaatctgttttttaaagaaatatggcctacaagacccctacatgttttagcctctgaattactctgtagcatcatctcttatctttcccatttagtctaaaatacagtaacttttttcatttcctccgattttcctcacataaatcactatctcagagaaggcttctatttagctcccaaatctttttttttttttggagtaatagttaacatttattacattaacatttattgatcactgtgccaagtaaacgacttacatgtacaaatatatgtgtttcttaaacttaccctttgaattaggcactattaataactttgtcaggaagaaactgggatcctcatctaagatgatttaaataacctacccaagattttcgagtggccaagatgggaatcaaactcacagcctccaaatcgtaagtgggtatccctcttctgttcccactgaacactgtgcttctgtatcacatcctaccacactgcactgtaatcatttcctttcctgtcttttctcatcttcttgaagataytgagtctactctcttcactgcataaggcctggcacagagtaaccatgaagttacttaatgaagtgtaccacattaaacattccttctccat

SEQ ID NO: 546478 - DNA, 884 bp, Homo sapiens
tgttatataaagtttaaaaaaaaatggtgcacacctgtagtcccaggtatcctgattcccagctactctggaggccaagacaggaggatggcttgagcccaggaattcgaggcttgcagtgagctacatgatctgtgctccagcccgggcgacagagygagacccaatctcttcttttaaaaaattaaataagtaaataataacattaaaaaatgagcaacactgatcacctttagaagtcaaaggagtagtcgctttgagggtaaagggatacattctggaagcatctccatctgggtgacagtggcatgggtgtgctcactttttaagttttgttcattttgtaccttttcactgagctgcacgtgactgatttgtgcagttttgtgtgtgctgcctacttaaataaaaaatatttgtaggctgggcatggtggctcaagactataatcccagcactttgggaggccaaggtgggcagatcacctgaggccaggagttcgagaccagcctggccaacatggtaaaaccctgtctctacttaaaatgcaaaaattagccgggcatgctggtgcatgcctgtaatcccagctactcgggaggctgaggcaagagaatcacttgaatccaggaggcggaggttgcagtgagctgagatcatgccactgcactccaacctgggtgacagagtgagactctgtctcaaaaaaaaaaaaaaaaattcgtgatgctcctgaagtacagcccaagcagcaccacttgtcatgatgatttgtgattgttctctttgcacactttgaccatgaagcccctatacaacaaaatcagacatctttactggaggacaaagaacagtcctccaggatgccccaaaccgtgcctagg

SEQ ID NO: 546479 - DNA, 884 bp, Homo sapiens
tgttatataaagtttaaaaaaaaatggtgcacacctgtagtcccaggtatcctgattcccagctactctggaggccaagacaggaggatggcttgagcccaggaattcgaggcttgcagtgagctacatgatctgtgctccagcccgggcgacagagtgagacccaatctcttcttttaaaaaattaaataagtaaataataacattaaaaaatgagcaacactgatcrcctttagaagtcaaaggagtagtcgctttgagggtaaagggatacattctggaagcatctccatctgggtgacagtggcatgggtgtgctcactttttaagttttgttcattttgtaccttttcactgagctgcacgtgactgatttgtgcagttttgtgtgtgctgcctacttaaataaaaaatatttgtaggctgggcatggtggctcaagactataatcccagcactttgggaggccaaggtgggcagatcacctgaggccaggagttcgagaccagcctggccaacatggtaaaaccctgtctctacttaaaatgcaaaaattagccgggcatgctggtgcatgcctgtaatcccagctactcgggaggctgaggcaagagaatcacttgaatccaggaggcggaggttgcagtgagctgagatcatgccactgcactccaacctgggtgacagagtgagactctgtctcaaaaaaaaaaaaaaaaattcgtgatgctcctgaagtacagcccaagcagcaccacttgtcatgatgatttgtgattgttctctttgcacactttgaccatgaagcccctatacaacaaaatcagacatctttactggaggacaaagaacagtcctccaggatgccccaaaccgtgcctagg

SEQ ID NO: 546480 - DNA, 884 bp, Homo sapiens
tgttatataaagtttaaaaaaaaatggtgcacacctgtagtcccaggtatcctgattcccagctactctggaggccaagacaggaggatggcttgagcccaggaattcgaggcttgcagtgagctacatgatctgtgctccagcccgggcgacagagtgagacccaatctcttcttttaaaaaattaaataagtaaataataacattaaaaaatgagcaacactgatcacctttagaagtcaaaggagtagtcgctttgagggtaaagggatacmttctggaagcatctccatctgggtgacagtggcatgggtgtgctcactttttaagttttgttcattttgtaccttttcactgagctgcacgtgactgatttgtgcagttttgtgtgtgctgcctacttaaataaaaaatatttgtaggctgggcatggtggctcaagactataatcccagcactttgggaggccaaggtgggcagatcacctgaggccaggagttcgagaccagcctggccaacatggtaaaaccctgtctctacttaaaatgcaaaaattagccgggcatgctggtgcatgcctgtaatcccagctactcgggaggctgaggcaagagaatcacttgaatccaggaggcggaggttgcagtgagctgagatcatgccactgcactccaacctgggtgacagagtgagactctgtctcaaaaaaaaaaaaaaaaattcgtgatgctcctgaagtacagcccaagcagcaccacttgtcatgatgatttgtgattgttctctttgcacactttgaccatgaagcccctatacaacaaaatcagacatctttactggaggacaaagaacagtcctccaggatgccccaaaccgtgcctagg

SEQ ID NO: 546481 - DNA, 884 bp, Homo sapiens
tgttatataaagtttaaaaaaaaatggtgcacacctgtagtcccaggtatcctgattcccagctactctggaggccaagacaggaggatggcttgagcccaggaattcgaggcttgcagtgagctacatgatctgtgctccagcccgggcgacagagtgagacccaatctcttcttttaaaaaattaaataagtaaataataacattaaaaaatgagcaacactgatcacctttagaagtcaaaggagtagtcgctttgagggtaaagggatacattctggaagcatctccatctgggtgacagtggcatgggtgtgctcactttttaagttttgttcattttgtaccttttcactgagctgcacgtgactgatttgtgcagttttgtgtgtgctgcctacttaaataaaaaatatttgtaggctgggcatggtggctcaagactataatcccagcactttgggaggccaaggtgggcagatcacctgaggccaggagttcgagaccagcctggccaacatggtaaaaccctgtctctacttaaaatgcaaaaattagccgggcatgctggtgcatgcctgtaatcccagctactcgggaggctgaggcaagagaatcacttgaatccaggaggcggaggttgcagtgagctgagatcatgccactgcactccaacctgggtgacagagtgagactctgtctcaaaaaaaaaaaaaaaaattcgtgatgctcctgaagtacagcccaagcagcaccacttgtcatgatgatttgtgattgttctctttgcacactttgaccatgaagcccctatacaacaaaatcagacatctttactggaggacaaagaacagtcctccaggatgccccaaaccrtgcctagg

SEQ ID NO: 546482 - DNA, 1091 bp, Homo sapiens
cgctgggtcccatcagattttggcattcccagcaccggcagtcctggggtgactcacgatggctggcaactttttgtcctgtctttaagttaaaaactgtcgtatgtgccttcatataaaacagaatgcagaaataagccaaaaggagaaaatggaaatccctgcagtgccattagctttcaacatttttgtgtgtctcccacgtccatgcacatatgtgtaaacatacttaatgacaaaagggtcgtattgtaccttccctttgtgatctgcctctgcccatgccacayataatggaaatatttctggatcatccagtgttctgccggaacatctttcaatagaggcagcataatctactcaggaaacatggagaggccgggatctccaggcacttgggtctgtgggcctgggggctgagggagaggctgaggaaaagcactccccagcttttgacttgcacagatgggtggtagagaggaagggtagcttggagagagggtttgtcactggggctgtctcttggaaggagtctggcagctggaaatgcaggtcctaggtgcaggggcaaggtctgggtagaattcgggttgggagcgctctgtatggagggctgtggattccacatcctggggtgggtgggcgggcaccaaaggaagagggaggcagaaggggaaggaagtgctccttggccccccaccatgtgcagacaagtggaggaggcagtggggtcttaggagcggggctgcccacctgctaaaggatgagagaggttcaagaggagggggttcagggaattgggatggcagggggcatcaggcccagcagccaagagggggctttgcagggtcgctggggagttggtggaagctagactgaccaggtgaggggccagtgagaggcaagggagtggagggaagctggtgcgcatggcacacatgctgtggtggggcagacatcagctgcggagggtgtgcagtcttagatgtgagtgcagtgtttacgtgtgcgcttgtgtagatgtgtgtgtggccctgcctcgagcacagaggattttaggtggcttgagtttgctcagggaccgaggatga

SEQ ID NO: 546483 - DNA, 835 bp, Homo sapiens
cagcatgagttctggagaacatggacatccaaaccatattatagaccaactaggcttcacagacacacacaaaactctccagtcaaaaccaagataatacataatattcccacttgcatctggtgtattctgttatgacatataccaagttttattaaatttaaaagtactgactaggtgcagtggctctcgcctataatcctaacactttgggagaccaaggtaagaggatccactggggccaaaagtttgagactagcctgggcaamatagtgagatcctaacattacaaataagcaaacaattagccagacatggtagtgcatgtctgcagttctagctactcagaaaactgaggtgaaaggataacttgagcccaggaggctgaggctacagtgagccaaaattatgccactgcactccagcctcaatgtccataagatcttgtctcaaaacaacaacaaatcaattaaaaaacactaaaattacacactcttgtgttttctaacaaaaactgaatgaaactaggaattaaaagcacaagccaaacaggcaaattcaaaaatatgtgaatataagacacattcttcaacatattcttgctcaggggtcaaaaaactttatttttcaaagatgtcaatacaacctacagttaaaagctacagtaacataaacaatgtgatactgacacaaagataaacagatgaaagaacagaatagagagctccggaatgaacccttctgtatatgatcaaatgatcttccaaaaggttgccatgagtacaaaatagagaaaaatcatctcttcaaaaaatgatgttgaaaactgaatatc

SEQ ID NO: 546484 - DNA, 620 bp, Homo sapiens
acataaagtgctctgctttgtatatattcccagcatccagcataagcccagcacctagtaggcttttattatatattattatatatagtattaatataggattaatgaaagaaggaaggaattcttcattctgtgagggtatatttcattggaaattgccaaaaggtcattggaaaccaagattaataaagatagtgatcaaactggtactctagttttgcttaaaaacgaaatgtggtgttcatgagtggcatgtaatttgaagatcattctaaaagagtaattctgtagtgcttatattttgcaaaaataatgttgcttcttaaggtgattactttggaaaaatgaatattctccttgtagatgaaaaattcagttgcattattttataaacatactttatgctgctgaagttttggacttttatttacaaagctatgttatcaaggggaaaataaatttcacttgagttgacttgtttagtaaatgctttcacaaacgttgctgcatatttcataaaaatcatgatatacgtttatttaaaggtccttgtgccattagaatakaattttagatagtttgagaaaatataccatttcagaaattattcttaaggatga

SEQ ID NO: 546485 - DNA, 656 bp, Homo sapiens
ctgatggctgaatgtgcttcaaagcacctttcctttactccaaggatcactccaggacagcttaggaatctacacggacagaggtaacctccattctctttatccagggttaacggtatcctgtttgtataaatcattaatcaacaagcattacttatcagtcatcagacatcattagcactctctctgcagagcatatagaggaaaagacactgaaaacggtgtacactacaaatagtaggaagaccaacttccactactgaggaacagtgtgtgtcagaagtcacactagcagctttatatactcgcttaattatcataaccaccctttacagtagataycaatgacccctatttgataaagaaaaaatcaggccgggggcggtggctcacgcctgtaatcccagcactttgggaaaccaaggcaggtgtgtcagttgaggtcaggagttcaagaccagcctgggcaatgtggtgaaaccccatctctactgaaaacacaaaaattagctgggcatggtagtgcatgcctataaatcccagctactgaggaggctgaggcaggagaatcgcttgaacctgagagacagaggttgcagtgagccgagatcacaccacggcactccagcctggcaacagagtgaaactctctctca

SEQ ID NO: 546486 - DNA, 656 bp, Homo sapiens
ctgatggctgaatgtgcttcaaagcacctttcctttactccaaggatcactccaggacagcttaggaatctacacggacagaggtaacctccattctctttatccagggttaacggtatcctgtttgtataaatcattaatcaacaagcattacttatcagtcatcagacatcattagcactctctctgcagagcatatagaggaaaagacactgaaaacggtgtacactacaaatagtaggaagaccaacttccactactgaggaacagtgtgtgtcagaagtcacactagcagctttatatactcgcttaattatcataaccaccctttacagtagataccaatgacccctatttgataaagaaaaaatcaggccgggggcggtggctcacgcctgtaatcccagcactttgggaaaccaaggcaggtgtgtcagttgaggtcaggagttcaagaccagcctgggcaaygtggtgaaaccccatctctactgaaaacacaaaaattagctgggcatggtagtgcatgcctataaatcccagctactgaggaggctgaggcaggagaatcgcttgaacctgagagacagaggttgcagtgagccgagatcacaccacggcactccagcctggcaacagagtgaaactctctctca

SEQ ID NO: 546487 - DNA, 656 bp, Homo sapiens
ctgatggctgaatgtgcttcaaagcacctttcctttactccaaggatcactccaggacagcttaggaatctacacggacagaggtaacctccattctctttatccagggttaacggtatcctgtttgtataaatcattaatcaacaagcattacttatcagtcatcagacatcattagcactctctctgcagagcatatagaggaaaagacactgaaaacggtgtacactacaaatagtaggaagaccaacttccactactgaggaacagtgtgtgtcagaagtcacactagcagctttatatactcgcttaattatcataaccaccctttacagtagataccaatgacccctatttgataaagaaaaaatcaggccgggggcggtggctcacgcctgtaatcccagcactttgggaaaccaaggcaggtgtgtcagttgaggtcaggagttcaagaccagcctgggcaatgtggtgaaaccccatctctactgaaaacacaaaaattagctgggcatggtagtgcatgcctataaatcccagctactgaggaggctgaggcaggagratcgcttgaacctgagagacagaggttgcagtgagccgagatcacaccacggcactccagcctggcaacagagtgaaactctctctca

SEQ ID NO: 546488 - DNA, 656 bp, Homo sapiens
ctgatggctgaatgtgcttcaaagcacctttcctttactccaaggatcactccaggacagcttaggaatctacacggacagaggtaacctccattctctttatccagggttaacggtatcctgtttgtataaatcattaatcaacaagcattacttatcagtcatcagacatcattagcactctctctgcagagcatatagaggaaaagacactgaaaacggtgtacactacaaatagtaggaagaccaacttccactactgaggaacagtgtgtgtcagaagtcacactagcagctttatatactcgcttaattatcataaccaccctttacagtagataccaatgacccctatttgataaagaaaaaatcaggccgggggcggtggctcacgcctgtaatcccagcactttgggaaaccaaggcaggtgtgtcagttgaggtcaggagttcaagaccagcctgggcaatgtggtgaaaccccatctctactgaaaacacaaaaattagctgggcatggtagtgcatgcctataaatcccagctactgaggaggctgaggcaggagaatcgcttgaacctgagagacagaggttgcagtgagccgagatcacaccackgcactccagcctggcaacagagtgaaactctctctca

SEQ ID NO: 546489 - DNA, 962 bp, Homo sapiens
cttacgtctcagaattattgtttggaagtttggaagttcagtcttcgtgaattgagatatttcagagtcttgcaagctgctggcttagtatcaagtttttgacctttgggtatacatttaaatttttaaaagcatgagtctaatgtagaaaatttcctcaaatgttatatattcttaaatttttcatctccattcatatagtgtgaacattaatttacaaataaaagaacatttaaattttaatgctttatttttttaattaaataaatgattttgagagaaaaacamatatgtattaacattgtctcccaagaaaattataagtgaaatcctttaaggataaaggagagatgttaatctaaaaatgatttatgtttaaggagttattttaagatagcttcaaatgactaaaaagggtttccgagttgtgttcatcaggaaagcttgatgtctacagctgtgtgggcttcattataaactactcgtggatacaaatggctagtttctttgtttttctttatatagacatgagaaaaagcttttgctaccgaagctataatggaaccacttgtgagaatgagttgcctttcaatgtgacaaaaaggatgtgctgctgcacatataatgtgggcaaagcctggaacaaaccttgtgaaccatgcccaactccaggaacaggtaagcacacggctcgtgcatctgctgactgccacatcagtgatacacgcatatatctaacagtatagtcaaagtcactgcatgctaaaactagagatgctcagttccaaaaattcccaagagcatcatatggttctgtttcccaagtgatcctctttgggattcaaacactaacttctgagacattatgttggataggcttgtgaatcctgaaaataagatccattgctgaagagttagagttgatagcattagtccatttaaactcattatcttaaactgtg

SEQ ID NO: 546490 - DNA, 1577 bp, Homo sapiens
ctggaggagatgacatctgcagtagatattccagggtaagcagcaggtggccagaaggagaaagaggtgaggaacattccaggcaaggggaacagcacgtgcaaaggccctgaaggagaaccacaacacgcatctgagaartagtgaggggtctgggtggctgagccacaaagggaacaccaggggtcagggaggatttgtagaagaagccacaggccacaaaaaagacctcataattcatgttcaatggtttggattttattttggtgacttcactttatacctactgttcagaggcagccaattgcaaacacgtccagaagcactttgctatttctgatctgcaaaatggagcaagtcatctgtactctgcttcttcagtgggttgtggggaagcagaaatgagaggatgacattctagccttttgtgacctctcaagtgctgtccttatggtcattcaggtaccatgaaaattagcagagccccaagggggaagtagcttggtgctcacccagtggtatccctgacaagttggcaaagacacccagggtggcttaactttctcctcagcaaagagctctcctctgttccctgaatcctggatatcccactgggtcctctagtgaccccaagcttcagcctcgcatgccctcttctcgaacagagaaggcaggagggaagcagggaccagcccctgctccatcttccaggattccaggcctccctggcctggacaagccctgagctggcagttaggagagcagaggttgtgaatctggtgggacccccagcaggtctttctggctcagtgccctcatctgtgagcaggggttccccaggagaccacgacagaggcctggaacccaagttctaatcccacatcctggctgggcaacttcaggcaaatttctaacacaaggtaagcctcaatttctctctggggtaatgatcaggcacctgcttaattcacaggggtttggtgggcatcacgtggacaatgtggttgcacagcagtgggcaatgcaaaggaaaggaagtatgttagtaagtgcccctcccctgttgcacaaaacaggacacatgctgggattgcagaaaagcaataaatgctgcacaggtgaagaaaactattcaaggaccctggccaagtcacaggctacctgtggccctgaggggacagctcatgggttggcattaggggaagcagctctcaaggggcctgtatcctggggattcaactctgtgcctatgtggcattgagcctgtgtgaatgtggtgactgtcatgctgttttgctgtgtgtgcgtctgcatgcctgtgtgtttgtgtgtctctccaccttcgtggggggcaactgtaggtgtattatgagccttgggtctgtctgtgtgtacaatagcaatgtctgtgcggacttaaggacctgcgcccatatgtttgtgggactttctgggcatgcatgcttgtttatgaggccatacatccgggtattctgtgaactgctagcatggtgtgtatctgtgtggcagacagaaaatggctgggtgggattgtagggggcagcttgggcaaagga

SEQ ID NO: 546491 - DNA, 545 bp, Homo sapiens
aacattagattgtctatttctcctcagagtgttgttcctgcttccaataaatcatactacatttgcttacatgagacctttattggtgcctttccccttttttctccttctttctgtggagttttcttcttaccatacgttagcctttgtcagattactaggaatactctgtctctgactttcttggtttctcccaaatctatgatggcttctcccacatcatttacatcttgctccactataagattcaacaaagacagcaaatggccatgccattctcttggtgcaccctgtagcaattagtttttaatactggcagtaacaacttccttatcagatcctgcaaaaacctgagcatagatrgcttgtctcattcttaatcctttgagaggcccctgggcctttttgattaactgccaagaggttgtccctcctggtaaacctccttcattaggcaagcctctctcacagctacaatgatccagtccataagtttataattcccttgcattatgaaggtgttgccacagagctgagcaggtggt

SEQ ID NO: 546492 - DNA, 671 bp, Homo sapiens
gggattcggtcaatactatccatattttaccattggtcatgatttgaggtatttgatcttaagaaactaagggcaaaaaaaaaaaaaaaagaaagagagaaagaaaagaaaatgttcttcttcctgaaaagaaattatattggtattaaagttcagactaagggtatttttggtttcatttggttttggctttgaaaactttgctgaccagagatttagattgggataaatgagtttaattatgctggtttattttgtgtcatgaatttgctaaaataaactaaaggaaaacataccttatatttaaacaaggaaaaacagaaaaataaataagatttctctcctgagaagagggttactataatacttctgtctgccaattcagtatcactgttaattttctctttaggagttttccatccttatgagagcatgtccccacctcctacagtgcagctttataaaaagatataaagcatatagaaaacacacaaaagcatgtgttgctcccaactcttyaaaactatatcacaatgttctatgtgaggtaagttatttttttttcttcaacttatttttgtgttctgctgtagaaaaaaagtctaaaacacacagctaggatttagttgtgtagctctgttatttgacctatttttccaagattgaggact

SEQ ID NO: 546493 - DNA, 549 bp, Homo sapiens
tcttagcttagacacatgagtgacagagaactctgcctcccagggcatttactccttgttggtcgatttgtggtttcagaatatgcctctctgtagtttcctcccattgatcttagtctggacactagaataatccagaacaagagaccctacctgtccacatgatagcagtttaaatatttaaagacattatcctgrcctccattctcaagttaccctctccacttcctttcactctatgtaaatgattttcagacacctcaacatctttcttgcctatgcggggctcctccctagtttatcaatgcccatcttaaaatgtagttgcccaaattaaattgtatatccttgtgatctcagcagatagctcaaagactatctctagtaatctcagaaactgcttctccgaatgttttggttttattagtagtgaaacaacagcatgcactggctgttgatgtggtgctgatggtggtggctgatgtttaaaccagctacattatactgttgcttctcagaggtggggttccagctgagcctgaactggat

SEQ ID NO: 546494 - DNA, 612 bp, Homo sapiens
agggacagaatctagagatcaaagagatgaagacaaggtcagtgttaaaggaacaggtcacactggacagaaaaagtcctgtttgggggtgtctgagtttgaaggtcaatgttaggattggcattagggtatcagaactggggagaaagaggggaggaaatcagaggactattttgggggacaggtctaaggttggggtcagtttggttcagaagacagtygggcagagaagaaagaaccaccagaatatgggtagtcaaaaggagggagagtgagactggcttgcgggaccgtccgctctggctttgtttggggaaacagaggctgggagtattggtttggagaaagaatagagggtcagagctggggacagagtgtcagtgtttgaggtcagacaggtggggatctgggaggtccctgaggatgaagtcggtcccagcgtccttgtctgtgcctccagaccagcacctgctcctgggggcagaggaaggcatcttcatcctgaaccggaatgaccaggaggccacgctggaaatggtgaggaaccataccgggccagggcaagggcaagggccggagtcgggggttgctggggtgtcaccagagccatct

SEQ ID NO: 546495 - DNA, 612 bp, Homo sapiens
agggacagaatctagagatcaaagagatgaagacaaggtcagtgttaaaggaacaggtcacactggacagaaaaagtcctgtttgggggtgtctgagtttgaaggtcaatgttaggattggcattagggtatcagaactggggagaaagaggggaggaaatcagaggactattttgggggacaggtctaaggttggggtcagtttggttcagaagacagttgggsagagaagaaagaaccaccagaatatgggtagtcaaaaggagggagagtgagactggcttgcgggaccgtccgctctggctttgtttggggaaacagaggctgggagtattggtttggagaaagaatagagggtcagagctggggacagagtgtcagtgtttgaggtcagacaggtggggatctgggaggtccctgaggatgaagtcggtcccagcgtccttgtctgtgcctccagaccagcacctgctcctgggggcagaggaaggcatcttcatcctgaaccggaatgaccaggaggccacgctggaaatggtgaggaaccataccgggccagggcaagggcaagggccggagtcgggggttgctggggtgtcaccagagccatct

SEQ ID NO: 546496 - DNA, 914 bp, Homo sapiens
aagctccgcctcccggattcacgccattctcctgcctcggcctcccgagtagctgggactacaggctaatttttttagatttttagtagagaccgagtttcaccgtgttagctaggatggtctccatctcctgacctcgtgatccgcccrcctcggccttccgaagtgctgggattacaggcgtgagccaccgcgcccggcctcgttttcctttttattaaacaggaataaaccatcagccctgcctacttcatgttccgggggaaaaaatgaggctttttatgaaatgctgagcctatttttgctttgggaaggcaatctggtaaaatggaatgaagcaaatctggtgcccaccgtctgcgtgacatggaagactgacttatcccctctgatcctcagtttctttatctataaagtgagagtaataatatcacagctgagcatggtggctcacacctataatcctgcacttttagaggccgaggagggaagactgcttgagctcaggagttcaagaccagccttggtaatgtagtgagacccgccacatctgtacaaacattttttaaaaaacattagccaggcatggtggcatatagctatagtcccagctacttaggaggctgaggttgaaggatcacctgagcctgggaagtggaggctgcagtgagctgtaattgtgccattgcacttcagcctgggtgacaaagcaagaccctatctcaaaataataatgataaaaatacacatttcacaaagaggtgtgagaattaaatgagctacatagtaacatagtaggcattcattaaaatgaattatccatcatgattaaaaatcattatctggccaggtgtggtggctcacgcctataatctgagcactttgggaggccgaggtgggcagatcacgaggtc

SEQ ID NO: 546497 - DNA, 914 bp, Homo sapiens
aagctccgcctcccggattcacgccattctcctgcctcggcctcccgagtagctgggactacaggctaatttttttagatttttagtagagaccgagtttcaccgtgttagctaggatggtctccatctcctgacctcgtgatccgcccgcctcggccttccgaagtgctgggattacaggcgtgagccaccgcgcccggcctcgttttcctttttattaaacaggaataaaccatcagccctgcctacttcaygttccgggggaaaaaatgaggctttttatgaaatgctgagcctatttttgctttgggaaggcaatctggtaaaatggaatgaagcaaatctggtgcccaccgtctgcgtgacatggaagactgacttatcccctctgatcctcagtttctttatctataaagtgagagtaataatatcacagctgagcatggtggctcacacctataatcctgcacttttagaggccgaggagggaagactgcttgagctcaggagttcaagaccagccttggtaatgtagtgagacccgccacatctgtacaaacattttttaaaaaacattagccaggcatggtggcatatagctatagtcccagctacttaggaggctgaggttgaaggatcacctgagcctgggaagtggaggctgcagtgagctgtaattgtgccattgcacttcagcctgggtgacaaagcaagaccctatctcaaaataataatgataaaaatacacatttcacaaagaggtgtgagaattaaatgagctacatagtaacatagtaggcattcattaaaatgaattatccatcatgattaaaaatcattatctggccaggtgtggtggctcacgcctataatctgagcactttgggaggccgaggtgggcagatcacgaggtc

SEQ ID NO: 546498 - DNA, 914 bp, Homo sapiens
aagctccgcctcccggattcacgccattctcctgcctcggcctcccgagtagctgggactacaggctaatttttttagatttttagtagagaccgagtttcaccgtgttagctaggatggtctccatctcctgacctcgtgatccgcccgcctcggccttccgaagtgctgggattacaggcgtgagccaccgcgcccggcctcgttttcctttttattaaacaggaataaaccatcagccctgcctacttcatgttccgggggaaaaaatgaggctttttatgaaatgctgagcctatttttgctttgggaaggcaatctggtaaaatggaatgaagcaaatctggtgcccacygtctgcgtgacatggaagactgacttatcccctctgatcctcagtttctttatctataaagtgagagtaataatatcacagctgagcatggtggctcacacctataatcctgcacttttagaggccgaggagggaagactgcttgagctcaggagttcaagaccagccttggtaatgtagtgagacccgccacatctgtacaaacattttttaaaaaacattagccaggcatggtggcatatagctatagtcccagctacttaggaggctgaggttgaaggatcacctgagcctgggaagtggaggctgcagtgagctgtaattgtgccattgcacttcagcctgggtgacaaagcaagaccctatctcaaaataataatgataaaaatacacatttcacaaagaggtgtgagaattaaatgagctacatagtaacatagtaggcattcattaaaatgaattatccatcatgattaaaaatcattatctggccaggtgtggtggctcacgcctataatctgagcactttgggaggccgaggtgggcagatcacgaggtc

SEQ ID NO: 546499 - DNA, 928 bp, Homo sapiens
ttgttcctaatggatctgcttctttttccctcttattcagccaagcagaaaatgaagaaaagaaaaaggctgaagcacgagctagaaacaaaagagaatctggaaaagcaacctcatatgcagtgagtggaatccatccaataaatcctatttggtgctataatttgaacaaattttaagagcctaaagggtgagattttgccctgcagaaatccccagaatatcttaactcttcaatctggggatggtattgagatgaattatatgggaagattgatccattcttgctgattaaaaactaactctgcaaaaaaaaaaaaaaaaaattgtttaaaagctgaaaaactgagttctacttctagttttatcacttatagactgttagcttttgctaactactttccagagaaattctacatgtatgctttctacatatgagtttctgatatttcacatctaatttgagataaaaaataccttgattcccccaccaamgcatgatttttatccctgaaatattacaatattagtttccaaagccttagctcagttatcatcaccaatggttttgatgataaaagtctcctaattttcactctggattttatcctttcccttgcccaaccagtctccctaacatagttggagtaatgtttcaaaatgtaaataagatcataatattgctcttaaaacccacaagcagctcatcatcatatacaggatatgctttaatcctgttatctctcctcttatttgtatccttatctccattcagaaaatcatgctctgctatgtgccatgtcttttcctacctgtgtttttcagctagttttattttcataaacctgtgtgcgtatttcccaattcacttttttttgcccagtcaaatcctatttacacttccacagtctcacctaaattgttcttg

SEQ ID NO: 546500 - DNA, 928 bp, Homo sapiens
ttgttcctaatggatctgcttctttttccctcttattcagccaagcagaaaatgaagaaaagaaaaaggctgaagcacgagctagaaacaaaagagaatctggaaaagcaacctcatatgcagtgagtggaatccatccaataaatcctatttggtgctataatttgaacaaattttaagagcctaaagggtgagattttgccctgcagaaatccccagaatatcttaactcttcaatctggggatggtattgagatgaattatatgggaagattgatccattcttgctgattaaaaactaactctgcaaaaaaaaaaaaaaaaaattgtttaaaagctgaaaaactgagttctacttctagttttatcacttatagactgttagcttttgctaactactttccagagaaattctacatgtatgctttctacatatgagtttctgatatttcacatctaatttgagataaaaaataccttgattcccccaccaacgcatgatttttatccctgaaatattacaatattagtttccaaagccttagctcagttatcatcaccaatggttttgatgataaaagtctcctaattttcactctggattttatcctttcccttgcccaaccagtctccctaacatagttggagtaatgtttcaaaatgtaaataagatcataatattgctcttaaaacccacaagcagctcatcatcatatacaggatatgctttaatcctgttatctctcctcttatttgtatccttatctccattcagaaaatmatgctctgctatgtgccatgtcttttcctacctgtgtttttcagctagttttattttcataaacctgtgtgcgtatttcccaattcacttttttttgcccagtcaaatcctatttacacttccacagtctcacctaaattgttcttg

SEQ ID NO: 546501 - DNA, 928 bp, Homo sapiens
ttgttcctaatggatctgcttctttttccctcttattcagccaagcagaaaatgaagaaaagaaaaaggctgaagcacgagctagaaacaaaagagaatctggaaaagcaacctcatatgcagtgagtggaatccatccaataaatcctatttggtgctataatttgaacaaattttaagagcctaaagggtgagattttgccctgcagaaatccccagaatatcttaactcttcaatctggggatggtattgagatgaattatatgggaagattgatccattcttgctgattaaaaactaactctgcaaaaaaaaaaaaaaaaaattgtttaaaagctgaaaaactgagttctacttctagttttatcacttatagactgttagcttttgctaactactttccagagaaattctacatgtatgctttctacatatgagtttctgatatttcacatctaatttgagataaaaaataccttgattcccccaccaacgcatgatttttatccctgaaatattacaatattagtttccaaagccttagctcagttatcatcaccaatggttttgatgataaaagtctcctaattttcactctggattttatcctttcccttgcccaaccagtctccctaacatagttggagtaatgtttcaaaatgtaaataagatcataatattgctcttaaaacccacaagcagctcatcatcatatacaggatatgctttaatcctgttatctctcctcttatttgtatccttatctccattcagaaaatcatgctctgctatgtgccatgtcttttcctacctgtgtttttcagctagttttattttcataaacctgtgtrcgtatttcccaattcacttttttttgcccagtcaaatcctatttacacttccacagtctcacctaaattgttcttg

SEQ ID NO: 546502 - DNA, 650 bp, Homo sapiens
agagtttaacttcagaggccagtgctcttaaccacatctcaaatggtggagatgacaaggacaggaaaggatttgtcagggaggaccttgcacacctctcaagtgacttcaaaaagacagctgtgttcatatgttctctgcagctatggaggcgttgatgcccatgtgttccttgaggcgtgaggtttgcctaattttrtttcagtctagaaatcatcaaggagaaaaatacatgactcggagggataacagagactctcagagggcttgcactgaatgcaggaaacacccttacttacggcacagaattaaatgaagagagctagggggaaaaaaaagaggcctccagaactccagaaaggaaaggctattggctcctggagggaaaagcacaactgagatagataggaaagaagacttcgtttctttagtcagctgagaggacatctagtgatagaagtacaccagatccatattttccagagcatggggcacacacctctgactgcttgcaggatgagatggggcagtagatgggattgtaccaggtagcacaggtgataggagttagtgttaccagttgagggtagttgtccaggttcttggaattttgaacaaagaactggacaagtacataagcaaggcagcca

SEQ ID NO: 546503 - DNA, 1222 bp, Homo sapiens
tgaatgaaccttgaagaccttatgctaagggaaagaagtcacatgcakaaggtcatgtactatgtaattccatttgtatgaaatatccagactagacccatagagatagacagcagattagggttgccaggggttgtaagaaggggaggatggagactgactgctgatgagtatggggtttctttatgggatgatgaaaatattctggaattaggcagtggtgatgattgtaaaaaatagaaaatatatgaaaaaccactgaagtgtattattctcaaaggtgaattttatgttatatgaattatagctcaattaaaaaaaagaattaacaggtaggtataggatgggtctgggcaggtgctcaaatacatcaaatcagggaaacttattccaagtgtgggaacaagtgattttagagcatcttaaagaagaaacacttttgaaaaacttagtacctgctatggtttgaatgtttgttccctctaaacctcgtgttgaaatgtgatccctactgatggaggtggggcctactgggaggtgtttgggtcatggggttggatccctcatgaacagatgaatgccctccattgggggtgagtgacttctcactctgctattttccacaagggctggttgttagaaagagcctggaatctctccacctctcttgcttcatctctgaccatgtgatctccacacacgctggctgcccttcgccttttggaagcagcctgaggctcatacctgaggcagatgctcaatcttgaacttgccaaccatcagaatcatgagccaaggaagcctttttttcttcataaattacccagccttaggtatttctttatagcaacactaaatggactaagaccatactctttaaggtggaaggagctaaagatgaagttagatttgggacgggtttaaagcaatggatgaaaaggtattctgaaaacaaatctaaaaatattttgggctgaagacaaacagaggacagctgtgccctactatataacagtctatactacttttattggtattattatcattaataatattattgctatctcagggagaaataacagatgtggtatcctacaatgactgcaggaggatgttcttattttcaaatgagctgacccttattcttggtaggatgttcctccattcacaggggctccacatccattggtacttgtttgtacaaggtggtaggcaaagaaaa

SEQ ID NO: 546504 - DNA, 523 bp, Homo sapiens
tcaagaccagcctggccaacatggtgaaaccccatgtctactaaaaatacaaaaaaagaaaaaaaaaattagccggacgtggttgcaaacgcctgtaatcccagctacctgggaggctgaggcaggcgaatcgcttgggggcaggagaatcgcttgaagccaggaggcagaggttgcagtgagccaagattgcaccactgcactacagtctgggggacagagtgagacttcatctcaaaaaaaacaaaacaaaacaaaactcctgggctcaagcaatcctcctgcctcagcctcccaagtcatgctytctttaaaaaaaatggttttataaaatggacggggaacagaacaagtactctgtatttaatcacattacacatacaatgaacatgcctactgctttttacaaacctgtgacgtatgtctaattattaacctcatttcgtagatgggaaattgagcctcagagaggtgacttgcccacgatgaaggagctcacaggaggcagagctgggatctgagt

SEQ ID NO: 546505 - DNA, 643 bp, Homo sapiens
tggagtttttgaaatagtgtgattttgaaggctgggcatggtggctcatgcctgtaatcccaacactttgggaggccaaggcaggcagatcacctgaggtcaggagttccagacccacccggccaacatggtgaaaccccaaatctattaaaatacaaagattagctgggcgtggtggtgcgcgcctgtaatcccagctactcgggaagctgaggtgcgagaatcgcttgaacccgggaggcagaggttgcagtgagccaagatctcaccactgcactccaccctgggtgacagagcaagactctgtcctaaaaaaaaaaaaaaagaaaaggaaagaaaagaaaaatcgtgattttcttgaggagagasaccttccctgaatgtggagcaggttaaaactaggagaggggatggcaactctctgagagggaacagctaagagatcaatgtagctttcatgaaggaacagagctgtaagggtacgtgtgaaggaggcacgcctgtgatacctaagcatcagtccaatacttgggccaaggagaaacccacctatagggaagttgctgaaagcatttattggtgatggccctttttgcagctcaggtgtagtgtggggcatgacattgtcaaggaaagacttcat

SEQ ID NO: 546506 - DNA, 546 bp, Homo sapiens
aactcagaggcatatttgaccccaataataggagaaaaagattgaatagtgagcttagagataaggaaacgttagtaattttttaaattaaatgttaagtattaagactttaaaaaaagataatagaataaggacataaaaattctattcagaacttagagaaaaacattcagacttttatttatttatttatttttcctttttgagacagagtctcactgtattgctcaggctggagtgcaatggtgcaatctcggctcactgcaacctccgccttcygggttcaagcaaacctcctgcctcagcctcccgagtagctgggattacaggtgcctaccacacacctggcttatttttgtatttttagtagaaatggggtttcactatgttggccaggctgatctcatttcctgacctcaagtgatccacctgcctcggcctcccaaagttctgggattacagatgtgagccactgcacctggcctattttttaatttattttttgagatggagtctcactctgttgcccaggctggaataaagtgg

SEQ ID NO: 546507 - DNA, 557 bp, Homo sapiens
ccaaatcccagctctgtgaatttgggtaacttgacttttctctgtatctcagttttcccatctgtagaatggagctagtgttagtacctaccatgagatggggctctaaggattgaattttggtaatatttgtaaagcaactaagaagagcgagctctacaagtgttaagtaaaatatgaaattcagaatgggagtagagcttggggagggatggatggacagatgaatgaatggatggatggatagatggatggatgtatataaatggatggttggatgaatgaatacgagtgaatggatgaatgaatgaatgggtaaacagataaatggatgagcagrtgaatgaatggatggatagatggatagatggttggttttatgaatgaatggatagatggatgaatgggtggaaaggtgaatgaatggatggatgaatgaatatgtggattcacaatcactttctatcctgacccctccccgacccacaaggctcttccaggcaaaaccccagttctcaggctgagggaggccccaggcggttcccaggcttccagca

SEQ ID NO: 546508 - DNA, 1884 bp, Homo sapiens
gcaccagggtccagcacagagtaggccaggaccgatggtgataccagcaaaacagaatcacatggtggcagcccgcrgttcctcctggtctcccacaggccagatgctgtgcccagcacctcacaagcgtggcatcaatcctgcaaccatgcggtaccaactcctagggatggtggtacctggtgggcacaggtgagagcaggcccctgatgagccctgagttaaccctttcattacaagagggtctcggccgggcatggtggctcgcacctgtaatcccagcactttgtgaggccgaggcgggaggatcacttgaggtcgggagttcgagaccagcctggccaacatggtgaaaccccatctctactaaaaatacaaaaattagccaggcatggtggtgcgcgcctgtaatcccagctactcgggaggctgaggcacgagaatcacttgaactcgggaggcctccagaggttgcagtgagccgagatcacgttattgcactccagcctgggtgacagagcgaaactcagtctcaaaaaacaaaccaagagggtctcaggtgagaggccaagccgtgtcaggtggggccgttagagaagcagggaagtattccaatatttgaacaaccagcgaaccctcttggtccatgcagctaagtctcagccctgcctggagggtatgactgcccctgttttactgaaggagaaatgatttgccgtcaacctccagagctcatcaagggtcttcagcaccgggcactgttcagggctttgagagcccggccggagaacagtaaggagacagcccctgtccccgtggaactgacccctcaaggtcctatttccaagagcagtgtgagcaatgaagaaaataagaggacaattagggaggagagaagttggtgggcggtcaggaggacagacttgaggtgatcaggggaggcctcctggaggaggtgtcttttgtggcgaggccaaaataaggagatagctcattgcgtgcacaggggcaagcacctggggcagaggcccccagatggcagcaagccgggcccgtttgagagatgggagccagataggtgtggcgtggaggaagaagagaagcagagtggaaaaagatgaggatgcggccccaggtttggctcaaacacaaaaccaaatcttaacgcttcccactgtcccctaaaccttgccctaaggcttaactctaatctcccactcaggtgactgtcctgagcaactggaacactgatcctcagttttgattcatgttgtcaacatggattggggactctgatgtcccagaaatggtattaggtaagagacagggacagtgaccctccacagtaatgagtgctcaaaggtattttcaccatttcaaaaaataaaaccaaaaaacaaaaacagacaaaaaaaaaatggaagttgtacatttccttcgggatgggatttcagaggttaaatttcaaatttctttgcttcaggctgtaaaaaaaattatccactcagtgtgttcactgcctgtctcaccccaatcagaagctatgatcggcagtttggtatacctttgataaataaaatatgggaaaatgaatgaacttttcacttaatgtagtttggtttgctcagaaaaatctctcaaagtgggactcatgggggacaatggctaaaggaatcacagccactcagatgttcctgttatttagttccacacagttgcactggacaactcccaggcacctttcacctgggctgtgatataacaagactgccacccatgataggaagctatgggaaggtggctcgcaccaccatgggtgctaagctgcttggccttatgccttaccccaattctccttttttattttttttgagacagggcctc

SEQ ID NO: 546509 - DNA, 1272 bp, Homo sapiens
tgtgcttttctttgaggatccattccaaggagcacttcaaggagaagtatgccgtggacgacgtccagtacgtagatgaggtgggtagccggctcctcctctgagcagcccagggcttccagcatgccttccactcctggagttcctctccttccactgccacaaccttgctggatgtcagggacactaccacctggccaccagtccctgcgccgcaggtgctcccatttggaaggagtaggcagcaacccatgcctcaggcttctctacggagccattgctttgcctgggaaggcccctgactctgtgggtagaagtgtctggtgacctgggttgtggccgctgagattacatgaggtgtctctgagaggcgggcctgcctgcagcggtggcacacggtctaagtcaccacaaggctgggccggggtcttcgtgtgtctcgagccctggttgactgcagatgccactgtcagaaaagcccgaggctgtgaaagscttgtagagtagcattggaggtcccctgacttcaatccacttctcagtggggttgtccagcaggtgtcgtgtggcctgggtaggcatgtggctgtcctcttggggttttgaatctgtgccaaccaagttcaggcaggtcaaaggggctgccctgactcctcgactccagctctccttcctgccagtggggcagggctgggacagaggcgagagcacagctgggagcccctgtggtctacttgaccaaaggccctgacactaaaccactgcctggcacacaggaggcctctgtgctctggccctgggcgctgtcacaaccccacgtcctgtgcaggtcagtgccgtgtagaatgtgaagcacccagaagtcaatgcctgccactgggagtccaacctggacctggcagcatcagctttggacagggccatcctgtagccacatttccccagacagagattatgtgtcggccatgctaagagccggggctgcagtgtggaagtggccaggggagccagttctggcggccaagcagcttcccccttcccctgggcaggacacagcctggttgaagatgacggcactgggtgagaagcaggttcccagggatcatggccagacacagtgctgtgagagaccagttgtctctgcccagcatgtgggggcccagcccggcccatccagctcgggggtggccagccctctttgactgcaggtgggccagtaccatgtgcccagccctgcccccggtactgctgtcctggaatatgttttccatt

SEQ ID NO: 546510 - DNA, 1377 bp, Homo sapiens
ggataatttttgtatttttagtagagacggcattttgccatgttggccaggctggtctcaaactcctggccccaagtgatccacctgccttggcctcccaaagtgctgagattacaggtgtgagccactgcrcccagcctactctttcatttattttatactacttgcttatatctgaaaatgtcctatttacttgtttttaacttatttataatgtctgtctctcctcagtaaatccttagctctcaaggacaagcaccttgctttctcattcaccactgtgtccccagcacctacacctggtgcataataggtgcccaataaatgcgtgaaatgaattaatgttgagcaccggggccattcttctcttgtgctttgcccagggatggcccctcaggaaagataataataatctcttcatcctttagcaacggctaactatatgccaggctcgctacccaggtgtgatgttgtttattcctccagagccctactctataagtaccatttttatgcttctttttcaagtgaagaaatggaggcccagagaggtaaagtgacttgcccgaagtctcataattagaaacagggctggagtcagaatccaagctccaaggcccacgctcctaactgcttggctattctgtctgctggagcacctgggaaatggtgcacctcaaaccttgcatcttgccattgaaaagtaaaaagtctaggatctttgtaaaacccagtcttctgccttgtagaagcctcggtgagagaaattcctggctgtttctccatggattttatgggttatgcctttctgtcccccgcctcaaatgtttatgttgaaattgtaactagtgccttagaatggtaacttatttggcaatagagtctttgcaaatataattagttaagacgagatcatgctagagtagggtggggctctaatccaaagactgggctgggtgtggtggctcctgcccagtgtaatcccagcactttgggaagccaaggcaggtggatcacctgaggtcaggagtttgagaccagcctagccaaaatggagaaaaccctgtctctactaaaaatacaaaaattagccaggcttggtggtgggcacctgtaatcccagctactcaggaggctgaggcaggagaatcacttgaacccgggaggtggaggttgcagtgagccaagatcattccactgccctccagcctgggtggcagagcgagactccaactcaaaaacaaaacaaaacataaaacaaagactgccgtccttataaaaagaggaatctggacacagacatgcttttaggaaaaatgccatgtgtgaggaaggtagaaattggggtgatgcatctccaaaccaagaaacaccaaa

SEQ ID NO: 546511 - DNA, 1377 bp, Homo sapiens
ggataatttttgtatttttagtagagacggcattttgccatgttggccaggctggtctcaaactcctggccccaagtgatccacctgccttggcctcccaaagtgctgagattacaggtgtgagccactgcgcccagcctactctttcatttattttatactacttgcttatatctgaaaatgtcctatttacttgtttttaacttatttataatgtctgtctctcctcagtaaatccttagctctcaaggacaagcaccttgctktctcattcaccactgtgtccccagcacctacacctggtgcataataggtgcccaataaatgcgtgaaatgaattaatgttgagcaccggggccattcttctcttgtgctttgcccagggatggcccctcaggaaagataataataatctcttcatcctttagcaacggctaactatatgccaggctcgctacccaggtgtgatgttgtttattcctccagagccctactctataagtaccatttttatgcttctttttcaagtgaagaaatggaggcccagagaggtaaagtgacttgcccgaagtctcataattagaaacagggctggagtcagaatccaagctccaaggcccacgctcctaactgcttggctattctgtctgctggagcacctgggaaatggtgcacctcaaaccttgcatcttgccattgaaaagtaaaaagtctaggatctttgtaaaacccagtcttctgccttgtagaagcctcggtgagagaaattcctggctgtttctccatggattttatgggttatgcctttctgtcccccgcctcaaatgtttatgttgaaattgtaactagtgccttagaatggtaacttatttggcaatagagtctttgcaaatataattagttaagacgagatcatgctagagtagggtggggctctaatccaaagactgggctgggtgtggtggctcctgcccagtgtaatcccagcactttgggaagccaaggcaggtggatcacctgaggtcaggagtttgagaccagcctagccaaaatggagaaaaccctgtctctactaaaaatacaaaaattagccaggcttggtggtgggcacctgtaatcccagctactcaggaggctgaggcaggagaatcacttgaacccgggaggtggaggttgcagtgagccaagatcattccactgccctccagcctgggtggcagagcgagactccaactcaaaaacaaaacaaaacataaaacaaagactgccgtccttataaaaagaggaatctggacacagacatgcttttaggaaaaatgccatgtgtgaggaaggtagaaattggggtgatgcatctccaaaccaagaaacaccaaa

SEQ ID NO: 546512 - DNA, 539 bp, Homo sapiens
gatggaaaaggcattagatttgtgggtggaagacgtgaacagaaacatgttccaattaacggggccgggcatggtggctcatccctgtaatcccagtacttcgggaggccaaggcgggcagattacctgaggtcaggagtttgagaccaatatggccaacatggcgaaacctcgtctctactaaaactacaaaaattagctgggtgtggtggtgcactcctgttatcccagctattcaggaggctgaggcaggagaatcgcatgaatccgggaggtggaggttgcagtgagccaagattgtgctattgaactccagcctaggcgacagggcaagacttcatctmaaaaaaaaaaagaaagaaaaaaaagaaaaggaaagaaagaaacgtggggtttggcacatatgccccatggatgggggctccgttgtagatgaggagttacaactgaaggaccacataataagcatttcaggctttgctagccaaacagtctttgtttcaactgctcacctctgcctttgtactttgaaagcagcc

SEQ ID NO: 546513 - DNA, 539 bp, Homo sapiens
gatggaaaaggcattagatttgtgggtggaagacgtgaacagaaacatgttccaattaacggggccgggcatggtggctcatccctgtaatcccagtacttcgggaggccaaggcgggcagattacctgaggtcaggagtttgagaccaatatggccaacatggcgaaacctcgtctctactaaaactacaaaaattagctgggtgtggtggtgcactcctgttatcccagctattcaggaggctgaggcaggagaatcgcatgaatccgggaggtggaggttgcagtgagccaagattgtgctattgaactccagcctaggcgacagggcaagacttcatctcaaaaaaaaaaaraaagaaaaaaaagaaaaggaaagaaagaaacgtggggtttggcacatatgccccatggatgggggctccgttgtagatgaggagttacaactgaaggaccacataataagcatttcaggctttgctagccaaacagtctttgtttcaactgctcacctctgcctttgtactttgaaagcagcc

SEQ ID NO: 546514 - DNA, 539 bp, Homo sapiens
gatggaaaaggcattagatttgtgggtggaagacgtgaacagaaacatgttccaattaacggggccgggcatggtggctcatccctgtaatcccagtacttcgggaggccaaggcgggcagattacctgaggtcaggagtttgagaccaatatggccaacatggcgaaacctcgtctctactaaaactacaaaaattagctgggtgtggtggtgcactcctgttatcccagctattcaggaggctgaggcaggagaatcgcatgaatccgggaggtggaggttgcagtgagccaagattgtgctattgaactccagcctaggcgacagggcaagacttcatctcaaaaaaaaaaagaaaraaaaaaaagaaaaggaaagaaagaaacgtggggtttggcacatatgccccatggatgggggctccgttgtagatgaggagttacaactgaaggaccacataataagcatttcaggctttgctagccaaacagtctttgtttcaactgctcacctctgcctttgtactttgaaagcagcc

SEQ ID NO: 546515 - DNA, 539 bp, Homo sapiens
gatggaaaaggcattagatttgtgggtggaagacgtgaacagaaacatgttccaattaacggggccgggcatggtggctcatccctgtaatcccagtacttcgggaggccaaggcgggcagattacctgaggtcaggagtttgagaccaatatggccaacatggcgaaacctcgtctctactaaaactacaaaaattagctgggtgtggtggtgcactcctgttatcccagctattcaggaggctgaggcaggagaatcgcatgaatccgggaggtggaggttgcagtgagccaagattgtgctattgaactccagcctaggcgacagggcaagacttcatctcaaaaaaaaaaagaaagaaaaaaaagaaaaggaaagaaagaaacgtggggtttggcacatatgccccatggatgggggctccgttgyagatgaggagttacaactgaaggaccacataataagcatttcaggctttgctagccaaacagtctttgtttcaactgctcacctctgcctttgtactttgaaagcagcc

SEQ ID NO: 546516 - DNA, 727 bp, Homo sapiens
tatgtcagttaataaaatttaagatagaattatgtccctacaactattaaaattagcacagaagatgctccaggacgtcaaataattcatttctatcacaaaactcaattaaaggaaggacatttagaacccataggaattataaaattatcttcctttatggaaactagccttctaaaaaagacagatggatctttgatctttgtacttttcaggagattcaattracatttgtaattctcataccttaggaaattcatctaacatctctgagttttgatttgttatttctaagatcaggatgacagtaagtctgtaattcaaataattttctgaacaataacatgagatgaggcaggagagcacagtggttaggaaaacagagtctagattttgatgtcagctgtattccttactagctggcaaacttgaaggcacttcatctctatgctttcatttccccatctgagaaatggacatgtaataatacttatctcataggttgctgtggtgattaaatgagttgatacatgtaaagtacttagaaggtgcttggtaaataatgagtgctatataaatagtaattatcaagtacatttatatcatctgaatataatgtttaaaattatattttgatagcataggattataattttaatcaaacagagtaagttactctttttttaatttgtaaattgatcaaactggatatttcctcattgccctg

SEQ ID NO: 546517 - DNA, 615 bp, Homo sapiens
cactacctggaagaagttacaagctagatgcttccccaccaaaggggatttctcagttagcttctccttttaggctccacctaccaccatctttttctatctttcctccagccctttattcttcatcytacctttgtttatctggcctcacatgcttgtttcaatgacaccgtctaataattccctaactgttgaggcatgtctacttttcttcattcccaagtgttgaccccttgaagggaagcaactggtcttcgatctttctgccccacttctcttgcagtatcatctggaaatgccttatgaattgtactgaaagacctccacctggtggtctattcttaagggcagaaagataagaccagttgctcgggtgccctcagccactcatctgagctaagagccagagaccatgaacattttcaggctggtaggcctcataagaacctgtcctcttctttcaaggagttagggtgtctgctttaggcctgcaaacctcttagagttctgtatcagtggtctccagggtagcggtatgtacaacacagatgacccccacaaagatattgggaagcaaacttagaatgtttttttacggctactggataactatat

SEQ ID NO: 546518 - DNA, 623 bp, Homo sapiens
ttttaaagacctctattcataatattgaaagctcgttctgtactccaagccctttctcaaagacatttgcccgtctaagtgaattctggtgaatgcaattttccccatcttgttaagagagagtagagtggtggttgctgagagctggtgggagggggaaatggggaggtaacagttaaaaggtacaaaatttcagttatgtaagataaataagttctagagatctactacacagcaaagtgcctacaggtaatgatattctcttattgtatacttaaattttgctgaaaggatagatcttatatatttttctttcttttgagacggagtttcactctgttgcccaacytggagtgcagtggcatgatctcggctcactgcagtgtccacctcccgggttcaagtgattctcctgcctcaggctcccgagtagctgggcctacaggcgcgtgccaccacaacctgctaatttttgtatttttagtagagagggggtttcatcatgttggccaggatggtctcgatctcttgacctcttgatccacccatctcggcctcccaaagtgctgggattacaagtgtgagccaccgtgcccagtggatagatcttatattaagtgttc

SEQ ID NO: 546519 - DNA, 623 bp, Homo sapiens
ttttaaagacctctattcataatattgaaagctcgttctgtactccaagccctttctcaaagacatttgcccgtctaagtgaattctggtgaatgcaattttccccatcttgttaagagagagtagagtggtggttgctgagagctggtgggagggggaaatggggaggtaacagttaaaaggtacaaaatttcagttatgtaagataaataagttctagagatctactacacagcaaagtgcctacaggtaatgatattctcttattgtatacttaaattttgctgaaaggatagatcttatatatttttctttcttttgagacggagtttcactctgttgcccaacctggagtgcagtggcatgatctcggctcactgcagtgtccacctcccgggttcaagtgattctcctgcctcargctcccgagtagctgggcctacaggcgcgtgccaccacaacctgctaatttttgtatttttagtagagagggggtttcatcatgttggccaggatggtctcgatctcttgacctcttgatccacccatctcggcctcccaaagtgctgggattacaagtgtgagccaccgtgcccagtggatagatcttatattaagtgttc

SEQ ID NO: 546520 - DNA, 623 bp, Homo sapiens
ttttaaagacctctattcataatattgaaagctcgttctgtactccaagccctttctcaaagacatttgcccgtctaagtgaattctggtgaatgcaattttccccatcttgttaagagagagtagagtggtggttgctgagagctggtgggagggggaaatggggaggtaacagttaaaaggtacaaaatttcagttatgtaagataaataagttctagagatctactacacagcaaagtgcctacaggtaatgatattctcttattgtatacttaaattttgctgaaaggatagatcttatatatttttctttcttttgagacggagtttcactctgttgcccaacctggagtgcagtggcatgatctcggctcactgcagtgtccacctcccgggttcaagtgattctcctgcctcaggctcccgagtagctgggcctacaggcrcgtgccaccacaacctgctaatttttgtatttttagtagagagggggtttcatcatgttggccaggatggtctcgatctcttgacctcttgatccacccatctcggcctcccaaagtgctgggattacaagtgtgagccaccgtgcccagtggatagatcttatattaagtgttc

SEQ ID NO: 546521 - DNA, 554 bp, Homo sapiens
aagagctgtggggaatgaattgaaatgttctggtctctcattgttttagcttgttgtttttattaattttcatactaaatacatataaattaaatatgagtcaatatgtaagatttcattcaaattgacccacccagttatctgaataccaagatacctaccaccagaaagacattttaagcagaagcttggaatctgctgcaacttyccatatcaatgctattccatataacatgccatattttcaggatcaccttccctttattaaccattgcaataatatatataattgatgttttcgtcaacagttagtagcaactgcacaattaccaacttaagttgacaaaattctagatgtacaactaaatattttacatcacaacccagatagcataggcaaatcttttgtatatgtaaatcagattatcatttagaaaatattaataaagtcattattccatgtagagcactgtccaaagtgctatgaaaacatatgacaagataaggtcaacttcctgaagttcacatcacaatttttaaagaatattgcatgt

SEQ ID NO: 546522 - DNA, 1319 bp, Homo sapiens
gttatatattactgcagcttaaaataacaaatatttactctttcatttagtaaatttagcagtttaaacttagaagcttaaaacaaacaattatggtctcagtttctgtaggtgaagcgttcaggaacactttagttgtgtgtttttttctagggtctctcatgagggcatagttgggaagatccacttccaagatgccatactcacaggactgtcagcagcaggcttcagttccttgctggcatttggcaggaggtctcagttcctcactgcactctccttagggctgttggtgtgtcctatcaacatgacagctggctcctcccagagtggacgatctgaagagagtgcaagggagacacaatgccttgtatgatctaggcctggaagccacatactgtcgcttccaccactgtttatttattaaaagcaaatcaccaagcacatttttcattcaagggaagagaaatgagacctcacctttcagagaagaagcaaagattttgtagacatagttttaaattgctgtaagcatatttggctttcggccaggatatatagatcattctcatcatgatttaataattgtcactgcagcggtattctgggcctgcaaggtcacatttccgctagttaataatcttgaaccattctgtatcttccaggaaatgactttgtttagtgctaggagtagaaattggccaaggaagttctgcttctctttttttcctttcttcccctcccctttctcccattctctttttccgttttctgagtcccccttgcccctggggcccctagaacaagttgtagatatgtgggttgagggaatggattatttacgcagctctaggaagatgtgtgttttctgtaacaatagctggcttgtagataatgagctataacctkcaatacaactatctacaaaccttgagagaaaatctctaggcattcagacctttgacatacagcacactgccctttgtagtttacactcagccatggaatgacatatgctaaatacatgactttctgtttcatctggcctgacagtgactgagcctgcactgttttactatttttttatatgatgcacattttttttttttcatttatgccattactttctcatttgtttactgtattataaaaaaaactcaaatattcctttaggtatatacccagtaatttaaatcattccattataaagacacatgcatgcatatgttcactgcagcactactcacaatagcacgatgtggaatcaacctaaatgcccatcaataatagactggataaagaaaatgtggtacatatat

SEQ ID NO: 546523 - DNA, 545 bp, Homo sapiens
agcagcacaactgtactaagacctctggaatgcaatatttattttagaagggcattttccaaggggaaacttattgaggaactatgggtttttgccatctaccgtgtagtaatagctagtttattgaatrgactaaagccagtgcagatggtttaattttttccattaattgccttcagacatggtctgttgtatatctcttctcatacctggatgacatttcaagtattgaaaggtccaccaagtcttaatcaaaatttcaatcttatacccagtttccaagtacagagataaagagcaaaagccacatcaagttccccatccctatgggggactggtctcagtgctcaggatcaagcccgagctagaagaaatagggaatgttttgtcttggatgagaatttaaaagaaggcaaatgttttccaccttctcggaactagcttgatgccctacaagcctcatcaacagctgcctactgtatacctttctcctttcttctctccccatagtaaaatgttttcaaagcacatggaatcattatagc

SEQ ID NO: 546524 - DNA, 653 bp, Homo sapiens
tacagttattgtttagttctataataatttttcaataagtaaattataactaggtaaatatgaacattaaaatttaatacctctttgacttgtgcctggtataatttgttatttgaattgtaaaggatgctaattttatctacctcttttgatcaggaatagttatctaataactacagcctgttttcttaatggaaaattgatattaattgttcctctgttaggaagaagaaagcatgtaggccattttgaagcacaaatacagtttagagtccttaaaaatggtgttagcatcatggatttatgtgaccacatgattgtcaactcacatcttttggaacttagtctaggcatttataaagcaaattattttacatattaagcttaaaaatggtagagtaagtaagataatctctaagcattaaattcatgatctataggacaaccaggttatcagcaagcagaatggagtgagttcagatatatagaatcttaagttggagggaattttgctccygtgagccatagtacagtgaataaattaagtgtaatctggattagaactgaataccaagacagacagacgtttgacgatgtttgtgatgtcctgatgttctttaatcatatatctgatattcttatattctattccc

SEQ ID NO: 546525 - DNA, 1399 bp, Homo sapiens
agaagacttaggcaagaagaacttctttaggctctcatcattgcaagttgaggaacagagcttgctccaagtatgtttaaaaagtgggttatctatgtcctctgcaattccttctaaggcatttacaagtattagaccatatattattttactgagatagaatagtaaatattgaaataatcacattatgataattattgttacagctacgtatacaattattatttaaaagacccttagatagactagggtttacttaatttgctgtaaaatttgcaaatatataactttttccactaacacaagggtaaaaccgtagtcaatctcacagcgtattaagacaatttttcttcttgtccttctcttttacttgtattttcttatttaattaacttataagctattctattttaaaattatcagtgctttgttagagttaaaaataagggaaagtcataaatatacttactagtagcttcttaataaagtgattatcattaacatgttttgaggtccattctgggtacttatctttaattagttctgttcattggttttatatttgtggttagaagattcctttgaatgctatttgtaactcttttggcgtattgcattgtttttgaagcttaattctgcttttatgttggcgttacctcaggaggaataaagaaataatataaatttttaaaaatgtaattcatgaagagaataatttgtacatttggaaaatgtttcaatattccactcaggaggatcatctgatattatttggtaacattataggttaatccatattttatgccctttggatagaggtagtggtgccttgcccttggaaacattgtttactgacctgctgttagagaaatccacttggcctgaattatggagttmgtccagccctgaagatatgaaatcattcaggtttttaaaaaggagtaagaatagcattgcccctaagccctcatttcacacatcatctctccaaataacttcaagtttacaatctatgttaaatcacatttatcagcattcttaatattagattcagggcatgttttgtttttgttgttgctgctattgctgttttgttttaattactatgatcagtattatagtgcaattattatttttattactcttcgtattcggtcaacttaaggaaagctagagtatgagttattggcagcgactcttcctcttattacattaaatttttctaattttgcatacagattgagtagtcatctgtcccaattttctatctcccaatttcagtgcagctatgccctgcataatgctccagaccacattaacaatggtgatttcctaagattagaatgacacatttcactgtacgttttctatgtttacaagtgtttagatatacacaccc

SEQ ID NO: 546526 - DNA, 1399 bp, Homo sapiens
agaagacttaggcaagaagaacttctttaggctctcatcattgcaagttgaggaacagagcttgctccaagtatgtttaaaaagtgggttatctatgtcctctgcaattccttctaaggcatttacaagtattagaccatatattattttactgagatagaatagtaaatattgaaataatcacattatgataattattgttacagctacgtatacaattattatttaaaagacccttagatagactagggtttacttaatttgctgtaaaatttgcaaatatataactttttccactaacacaagggtaaaaccgtagtcaatctcacagcgtattaagacaatttttcttcttgtccttctcttttacttgtattttcttatttaattaacttataagctattctattttaaaattatcagtgctttgttagagttaaaaataagggaaagtcataaatatacttactagtagcttcttaataaagtgattatcattaacatgttttgaggtccattctgggtacttatctttaattagttctgttcattggttttatatttgtggttagaagattcctttgaatgctatttgtaactcttttggcgtattgcattgtttttgaagcttaattctgcttttatgttggcgttacctcaggaggaataaagaaataatataaatttttaaaaatgtaattcatgaagagaataatttgtacatttggaaaatgtttcaatattccactcaggaggatcatctgatattatttggtaacattataggttaatccatattttatgccctttggatagaggtagtggtgccttgcccttggaaacattgtttactgacctgctgttagagaaatccacttggcctgaattatggagttagtccagccctgaagatatgaaatcattcaggtttttaaaaaggagtaagaatagcattgcccctaagccctcatttcacacatcatctctccaaataacttcaagtttacaatctatgttaaatcacatttatcagcattcttaatattagattcaggrcatgttttgtttttgttgttgctgctattgctgttttgttttaattactatgatcagtattatagtgcaattattatttttattactcttcgtattcggtcaacttaaggaaagctagagtatgagttattggcagcgactcttcctcttattacattaaatttttctaattttgcatacagattgagtagtcatctgtcccaattttctatctcccaatttcagtgcagctatgccctgcataatgctccagaccacattaacaatggtgatttcctaagattagaatgacacatttcactgtacgttttctatgtttacaagtgtttagatatacacaccc

SEQ ID NO: 546527 - DNA, 616 bp, Homo sapiens
actccttacactcagtagcggctgagagctaagtatgagcttatacaaccaggttacatattagcagagatgagcacttgtactccaaacttactgagtcaggctgaaccagatgtttaccacggcctattcttgaccactgcacatccatttatcttacaccctttttctgaatagtttctctttgtttatactttgctttggaaaatgaaggctgtcatttttgtttactggtcatatacactgggataaaacccaggttctatcagttactagatgttttacaaagtattttccttaagctagaatgattgacatcactggtgagtttgtttgcaatatagtaactcaggtctcatcccayatcccttgaattagaatacgtattttaacaaaatctccaggttattgatgtatgcattaaaatttgagaggtatctcctaagttactgtgacttctccatgtgagaactgtacacagcttactctgtataatgtaaatatggcattcagaactgtatatatttgtgtttatgccataagttctatgccgtattattcagaaaactatagtaattacactggttttttggatcttattttatcctctttgttc

SEQ ID NO: 546528 - DNA, 616 bp, Homo sapiens
actccttacactcagtagcggctgagagctaagtatgagcttatacaaccaggttacatattagcagagatgagcacttgtactccaaacttactgagtcaggctgaaccagatgtttaccacggcctattcttgaccactgcacatccatttatcttacaccctttttctgaatagtttctctttgtttatactttgctttggaaaatgaaggctgtcatttttgtttactggtcatatacactgggataaaacccaggttctatcagttactagatgttttacaaagtattttccttaagctagaatgattgacatcactggtgagtttgtttgcaatatagtaactcaggtctcatcccatatcccttgaattagaatacgtattttaacaaaatctccaggttattgatgtatgcattaaaatttgagaggtatctcctaagttactgtgacttctccatgtgagaactgtacacagcttactctgtataatgtaaatatggcattcagaactgtatatayttgtgtttatgccataagttctatgccgtattattcagaaaactatagtaattacactggttttttggatcttattttatcctctttgttc

SEQ ID NO: 546529 - DNA, 587 bp, Homo sapiens
gagcatgttcattttcccatggaaatttagaaggtactaccccagcccctgagtctctcatggagagcagtctttagggtcatgtaaacttccagcatatttgaaatctatttgggattttggtttaacaagatcttcccctgtttggcaagggaccctgaaatattcaacctggaagagaagctgtaataattgtctagttcaggtgattcaaactgtatcccccartggaatctcttttgggatcatggagtgggctgggggaagcccaggagtctggggctcttaccttaactcacctgttaacatgagaaagaccttctgaccaaagattgcaaagtaaaacaacctagagaagcttcaaggaattctgcattacctggaaggaaactaagggaactaagagaaaaagaacttgcaaattgatcatcagtgaattagaatacaggcctctgtgcttcccctccagggctcagccccgtgctgtgagctttctcttgcagattttctatctcccctgtcagatggcccggggagaacaggcacctgctctgcggatgagaagcgtggcctggagacattgccca

SEQ ID NO: 546530 - DNA, 587 bp, Homo sapiens
gagcatgttcattttcccatggaaatttagaaggtactaccccagcccctgagtctctcatggagagcagtctttagggtcatgtaaacttccagcatatttgaaatctatttgggattttggtttaacaagatcttcccctgtttggcaagggaccctgaaatattcaacctggaagagaagctgtaataattgtctagttcaggtgattcaaactgtatcccccagtggaatctcttttgggatcatggagtgggctgggggaagcccaggagtctggggctcttaccttaactcacctgttaacatgagaaagaccttctgaccaaagattgcaaagtaaaacaacctagagaagcttcaaggaattctgcattacctggaaggaaactaagggaactaagagaaaaagaacttgcaaattgatcatcagtgaattagaatacaggcctctgtgcttcccctccagggctcagccccgtgctgtgagctttctcttgcagattttctatctcccctgtcagatggcccggggagaacaggcacctgctctgckgatgagaagcgtggcctggagacattgccca

SEQ ID NO: 546531 - DNA, 2204 bp, Homo sapiens
tagtttggtgagaagtttttctattttttgagacggagaaaaaatatatatattttttctgagatggagtctccctcttgatgcccaggctggggtgcagtggtgtgatctcagctcactacaacctccacctcctgggttcacgtgattctcctgtctcagcctcccgagtagctggaattacaggcgcccaccaccaagcctggctaattttttgtatttttagttgagacggggtttcaccatgttggccaggctgctcttgaactcctgacttcaggtgattcacctgcctcggcctcccaaagtgctgggattacaggcatgagccaccactcctggccagaaaaatatttttataatttgagttccaggagataaatagccctttttaaattgagtacctacagttttaaaataatttcctattaaagtattttaaaaattaaataccagccttaagaattgtggagggtagagctaaggtaaaatgagctgaaagcattttttaaagaaatcctggccaggcgcagtggctcatgcctgtaatcccagcactttgggaggccgaggcgggcggatcacgaggtcaggagattgagaccatcctggctaacatggtgaaaccccatctctactaaaaatacaaaaaattagctgggcctggtggtgggcacctgtaatcccagctactcaggaggctgaggcaggagaatggagtgaacccgggaggcggagcttgaagtgagccgaaatggcaccactgcactccagcctgggcaacagagtaagactccatctcaaaaaaaaaaaaaaaaaaaaaagaattaaatctcaggtctatgcatcaaataagaattatttattgcaataatacagcaaattcatgggggactaggtattattttatatataattaaaattgattatataaaatgttttatatagaattaaaactaatttcccttataaagaataactgtaaaaaagaaggaawaagtttaaaattgttaactgtgaataataagaaaaagacaaataacctaataggatcatgggcaacagacagttcctagaaatataaatgggtcttaaaacatacaaaaagacacgtcacttggttcataatttaaaaaacctgcaaattcgaattatgctgaaacaccatttctcacttatcagatttctcatcagaatatcacttatcaatgatccttcagtctgataacgcctttgcaggtgaaaagtgtggaaataaagtactctcatacattgctggtgggactgctaaatgccgcaactccatggagggaaatttggcaggatctatcaaaattacaaaagcacacactgtctgagacagcaactccactttcaggactttgtcctccagacacctgcttctatgagaagtgacacatgtcgaaagttgtttgctgcagcaatgtttgtaacagtgcagcatgacaggggaccaataaaataaaatatggttcatctgttcaaagtaaaacacatagctctgacaaaggagaaagttcctgtgcattaatatgcagtgaactccaagacataagtgaaaaaatgcaagatgcacagcatatgcgtagtaattatgtattagagagggtgggcatagacattttgctggtgtataatacatataaaatctctctggaagaatacacaagaaactggtaatgtctgtctctagagaagaaaacacggtagggagatagaggtaggaaggaaaattccctttgtatatcgttttttattgtctgaattttgaaccaagagaacaattttacttatttcaaaacattaaatttaaaataattaaagagaaaactaactaaatacctaatgaatacaagtacagcaattcttaggaagcagaagcacagcagcagaaagacatgcgacactcactcttcagtccttctgccagcgcctctctaaggcatgataccataaaaactatgggatctaatttcaataaatgccttcatttcacaaaatatatattaatataaatgtctttctgaaaataaaaaggattgctttaatatcatatgtaactcaatgaaatatagcttcttatttgagcaacttgtcagagcgcaatcactactgaaatcaagaacacatgcacttgaaaagagaagctgccaggttcattacctggggctctggggctcctc

SEQ ID NO: 546532 - DNA, 2204 bp, Homo sapiens
tagtttggtgagaagtttttctattttttgagacggagaaaaaatatatatattttttctgagatggagtctccctcttgatgcccaggctggggtgcagtggtgtgatctcagctcactacaacctccacctcctgggttcacgtgattctcctgtctcagcctcccgagtagctggaattacaggcgcccaccaccaagcctggctaattttttgtatttttagttgagacggggtttcaccatgttggccaggctgctcttgaactcctgacttcaggtgattcacctgcctcggcctcccaaagtgctgggattacaggcatgagccaccactcctggccagaaaaatatttttataatttgagttccaggagataaatagccctttttaaattgagtacctacagttttaaaataatttcctattaaagtattttaaaaattaaataccagccttaagaattgtggagggtagagctaaggtaaaatgagctgaaagcattttttaaagaaatcctggccaggcgcagtggctcatgcctgtaatcccagcactttgggaggccgaggcgggcggatcacgaggtcaggagattgagaccatcctggctaacatggtgaaaccccatctctactaaaaatacaaaaaattagctgggcctggtggtgggcacctgtaatcccagctactcaggaggctgaggcaggagaatggagtgaacccgggaggcggagcttgaagtgagccgaaatggcaccactgcactccagcctgggcaacagagtaagactccatctcaaaaaaaaaaaaaaaaaaaaaagaattaaatctcaggtctatgcatcaaataagaattatttattgcaataatacagcaaattcatgggggactaggtattattttatatataattaaaattgattatataaaatgttttatatagaattaaaactaatttcccttataaagaataactgtaaaaaagaaggaataagtttamaattgttaactgtgaataataagaaaaagacaaataacctaataggatcatgggcaacagacagttcctagaaatataaatgggtcttaaaacatacaaaaagacacgtcacttggttcataatttaaaaaacctgcaaattcgaattatgctgaaacaccatttctcacttatcagatttctcatcagaatatcacttatcaatgatccttcagtctgataacgcctttgcaggtgaaaagtgtggaaataaagtactctcatacattgctggtgggactgctaaatgccgcaactccatggagggaaatttggcaggatctatcaaaattacaaaagcacacactgtctgagacagcaactccactttcaggactttgtcctccagacacctgcttctatgagaagtgacacatgtcgaaagttgtttgctgcagcaatgtttgtaacagtgcagcatgacaggggaccaataaaataaaatatggttcatctgttcaaagtaaaacacatagctctgacaaaggagaaagttcctgtgcattaatatgcagtgaactccaagacataagtgaaaaaatgcaagatgcacagcatatgcgtagtaattatgtattagagagggtgggcatagacattttgctggtgtataatacatataaaatctctctggaagaatacacaagaaactggtaatgtctgtctctagagaagaaaacacggtagggagatagaggtaggaaggaaaattccctttgtatatcgttttttattgtctgaattttgaaccaagagaacaattttacttatttcaaaacattaaatttaaaataattaaagagaaaactaactaaatacctaatgaatacaagtacagcaattcttaggaagcagaagcacagcagcagaaagacatgcgacactcactcttcagtccttctgccagcgcctctctaaggcatgataccataaaaactatgggatctaatttcaataaatgccttcatttcacaaaatatatattaatataaatgtctttctgaaaataaaaaggattgctttaatatcatatgtaactcaatgaaatatagcttcttatttgagcaacttgtcagagcgcaatcactactgaaatcaagaacacatgcacttgaaaagagaagctgccaggttcattacctggggctctggggctcctc

SEQ ID NO: 546533 - DNA, 2204 bp, Homo sapiens
tagtttggtgagaagtttttctattttttgagacggagaaaaaatatatatattttttctgagatggagtctccctcttgatgcccaggctggggtgcagtggtgtgatctcagctcactacaacctccacctcctgggttcacgtgattctcctgtctcagcctcccgagtagctggaattacaggcgcccaccaccaagcctggctaattttttgtatttttagttgagacggggtttcaccatgttggccaggctgctcttgaactcctgacttcaggtgattcacctgcctcggcctcccaaagtgctgggattacaggcatgagccaccactcctggccagaaaaatatttttataatttgagttccaggagataaatagccctttttaaattgagtacctacagttttaaaataatttcctattaaagtattttaaaaattaaataccagccttaagaattgtggagggtagagctaaggtaaaatgagctgaaagcattttttaaagaaatcctggccaggcgcagtggctcatgcctgtaatcccagcactttgggaggccgaggcgggcggatcacgaggtcaggagattgagaccatcctggctaacatggtgaaaccccatctctactaaaaatacaaaaaattagctgggcctggtggtgggcacctgtaatcccagctactcaggaggctgaggcaggagaatggagtgaacccgggaggcggagcttgaagtgagccgaaatggcaccactgcactccagcctgggcaacagagtaagactccatctcaaaaaaaaaaaaaaaaaaaaaagaattaaatctcaggtctatgcatcaaataagaattatttattgcaataatacagcaaattcatgggggactaggtattattttatatataattaaaattgattatataaaatgttttatatagaattaaaactaatttcccttataaagaataactgtaaaaaagaaggaataagtttaaaattgttaactgtgaataataagaaaaagacaaatmacctaataggatcatgggcaacagacagttcctagaaatataaatgggtcttaaaacatacaaaaagacacgtcacttggttcataatttaaaaaacctgcaaattcgaattatgctgaaacaccatttctcacttatcagatttctcatcagaatatcacttatcaatgatccttcagtctgataacgcctttgcaggtgaaaagtgtggaaataaagtactctcatacattgctggtgggactgctaaatgccgcaactccatggagggaaatttggcaggatctatcaaaattacaaaagcacacactgtctgagacagcaactccactttcaggactttgtcctccagacacctgcttctatgagaagtgacacatgtcgaaagttgtttgctgcagcaatgtttgtaacagtgcagcatgacaggggaccaataaaataaaatatggttcatctgttcaaagtaaaacacatagctctgacaaaggagaaagttcctgtgcattaatatgcagtgaactccaagacataagtgaaaaaatgcaagatgcacagcatatgcgtagtaattatgtattagagagggtgggcatagacattttgctggtgtataatacatataaaatctctctggaagaatacacaagaaactggtaatgtctgtctctagagaagaaaacacggtagggagatagaggtaggaaggaaaattccctttgtatatcgttttttattgtctgaattttgaaccaagagaacaattttacttatttcaaaacattaaatttaaaataattaaagagaaaactaactaaatacctaatgaatacaagtacagcaattcttaggaagcagaagcacagcagcagaaagacatgcgacactcactcttcagtccttctgccagcgcctctctaaggcatgataccataaaaactatgggatctaatttcaataaatgccttcatttcacaaaatatatattaatataaatgtctttctgaaaataaaaaggattgctttaatatcatatgtaactcaatgaaatatagcttcttatttgagcaacttgtcagagcgcaatcactactgaaatcaagaacacatgcacttgaaaagagaagctgccaggttcattacctggggctctggggctcctc

SEQ ID NO: 546534 - DNA, 2204 bp, Homo sapiens
tagtttggtgagaagtttttctattttttgagacggagaaaaaatatatatattttttctgagatggagtctccctcttgatgcccaggctggggtgcagtggtgtgatctcagctcactacaacctccacctcctgggttcacgtgattctcctgtctcagcctcccgagtagctggaattacaggcgcccaccaccaagcctggctaattttttgtatttttagttgagacggggtttcaccatgttggccaggctgctcttgaactcctgacttcaggtgattcacctgcctcggcctcccaaagtgctgggattacaggcatgagccaccactcctggccagaaaaatatttttataatttgagttccaggagataaatagccctttttaaattgagtacctacagttttaaaataatttcctattaaagtattttaaaaattaaataccagccttaagaattgtggagggtagagctaaggtaaaatgagctgaaagcattttttaaagaaatcctggccaggcgcagtggctcatgcctgtaatcccagcactttgggaggccgaggcgggcggatcacgaggtcaggagattgagaccatcctggctaacatggtgaaaccccatctctactaaaaatacaaaaaattagctgggcctggtggtgggcacctgtaatcccagctactcaggaggctgaggcaggagaatggagtgaacccgggaggcggagcttgaagtgagccgaaatggcaccactgcactccagcctgggcaacagagtaagactccatctcaaaaaaaaaaaaaaaaaaaaaagaattaaatctcaggtctatgcatcaaataagaattatttattgcaataatacagcaaattcatgggggactaggtattattttatatataattaaaattgattatataaaatgttttatatagaattaaaactaatttcccttataaagaataactgtaaaaaagaaggaataagtttaaaattgttaactgtgaataataagaaaaagacaaataacctaataggatcatgggcaacagacagttcctagaaatataaatgggtcttaaaacatacaaaaagacacgtcacttggttcataatttaaaaaacctgcaaattcgaattatgctgaaacaccatttctcacttatcagatttctcatcagaatatcacttatcaatgatccttcagtctgataacgcctttgcaggtgaaaagtgtggaaataaagtactctcatacattgctggtgggactgctaaatgccgcaactccatggagggaaatttggcaggatctatcaaaattacaaaagcacacactgtctgagacagcaactccactttcaggactttgtcctccagacacctgcttctatgagaagtgacacatgtcgaaagttgtttgctgcagcaatgtttgtaacagtgcarcatgacaggggaccaataaaataaaatatggttcatctgttcaaagtaaaacacatagctctgacaaaggagaaagttcctgtgcattaatatgcagtgaactccaagacataagtgaaaaaatgcaagatgcacagcatatgcgtagtaattatgtattagagagggtgggcatagacattttgctggtgtataatacatataaaatctctctggaagaatacacaagaaactggtaatgtctgtctctagagaagaaaacacggtagggagatagaggtaggaaggaaaattccctttgtatatcgttttttattgtctgaattttgaaccaagagaacaattttacttatttcaaaacattaaatttaaaataattaaagagaaaactaactaaatacctaatgaatacaagtacagcaattcttaggaagcagaagcacagcagcagaaagacatgcgacactcactcttcagtccttctgccagcgcctctctaaggcatgataccataaaaactatgggatctaatttcaataaatgccttcatttcacaaaatatatattaatataaatgtctttctgaaaataaaaaggattgctttaatatcatatgtaactcaatgaaatatagcttcttatttgagcaacttgtcagagcgcaatcactactgaaatcaagaacacatgcacttgaaaagagaagctgccaggttcattacctggggctctggggctcctc

SEQ ID NO: 546535 - DNA, 559 bp, Homo sapiens
accacccccctggaacggccccaaggctgacccgaggggtccctgaccacccccctrgaacggccccaaggctgacccgaggggtccctgaccacccccctggaacggccccaaggctgacccgaggggtccctgaccacccccctggaacggccccaaggctgacccgaggggtccctgaccacccccctggaacggccccaaggctgacccgaggggtccctgaccaccccccagaacggccccaaggctgacccgaggggtccctgaccgcccccctgcacggccccggtcctcctgctgctctcagccgcccgtgctcatgcgcagttttgcgaactcagcatcaggcacatcctgttttgtgctgagccagctccaggcgtcccctcaggctgtgagctgcagaccttccaggcagctcagccaggtgtcctccagttccgtgaaaggctctgctggccgaggggcgggcagagggttgggctttccagggaggcaaggaccgggcatcctggggccgtgggggcaaacgtggcctgggccagggtctgacccc

SEQ ID NO: 546536 - DNA, 559 bp, Homo sapiens
accacccccctggaacggccccaaggctgacccgaggggtccctgaccacccccctggaacggccccaaggctgacccgaggggtccctgaccacccccctggaacggccccaaggctgacccgaggggtccctgaccacccccctggaacggccccaaggctgacccgaggggtccctgaccacccccctggaacggccccaaggctgacccgaggggtccctgamcaccccccagaacggccccaaggctgacccgaggggtccctgaccgcccccctgcacggccccggtcctcctgctgctctcagccgcccgtgctcatgcgcagttttgcgaactcagcatcaggcacatcctgttttgtgctgagccagctccaggcgtcccctcaggctgtgagctgcagaccttccaggcagctcagccaggtgtcctccagttccgtgaaaggctctgctggccgaggggcgggcagagggttgggctttccagggaggcaaggaccgggcatcctggggccgtgggggcaaacgtggcctgggccagggtctgacccc

SEQ ID NO: 546537 - DNA, 559 bp, Homo sapiens
accacccccctggaacggccccaaggctgacccgaggggtccctgaccacccccctggaacggccccaaggctgacccgaggggtccctgaccacccccctggaacggccccaaggctgacccgaggggtccctgaccacccccctggaacggccccaaggctgacccgaggggtccctgaccacccccctggaacggccccaaggctgacccgaggggtccctgaccaccccccrgaacggccccaaggctgacccgaggggtccctgaccgcccccctgcacggccccggtcctcctgctgctctcagccgcccgtgctcatgcgcagttttgcgaactcagcatcaggcacatcctgttttgtgctgagccagctccaggcgtcccctcaggctgtgagctgcagaccttccaggcagctcagccaggtgtcctccagttccgtgaaaggctctgctggccgaggggcgggcagagggttgggctttccagggaggcaaggaccgggcatcctggggccgtgggggcaaacgtggcctgggccagggtctgacccc

SEQ ID NO: 546538 - DNA, 521 bp, Homo sapiens
acttctcgtctgataatgggcagagggtccttctgcagccccaaaacatccctaggcaggagccctggggccccaagcagccagggaggtgagcaccaaggacctcccagagagcgtcaccttccgtcgagggaggcccagcctgggggcggtgtctgagacttggaatcaacgcttccgttggtggcagtaaatcctgtccctaaccctgcagtayagctgtgccgtgtacaggagggtgctgtctgacgccagacacctggactacagatcgcagcctgattcctggtcattgctccactgaaccccagaccccagcctcgttctgggccctcatcccctagatccagggaccccagccccatttcagcccttgggcccttgtaggatgcgaggccctgggccccagcccccagcccatccgtggcccaggcactggggggctgaggtcctctgagaagggacacagggcctggggggctctctcagcccatcagcaggagaggactgactccagaaaa

SEQ ID NO: 546539 - DNA, 521 bp, Homo sapiens
acttctcgtctgataatgggcagagggtccttctgcagccccaaaacatccctaggcaggagccctggggccccaagcagccagggaggtgagcaccaaggacctcccagagagcgtcaccttccgtcgagggaggcccagcctgggggcggtgtctgagacttggaatcaacgcttccgttggtggcagtaaatcctgtccctaaccctgcagtacagctgtgccgtgtacaggagggtgytgtctgacgccagacacctggactacagatcgcagcctgattcctggtcattgctccactgaaccccagaccccagcctcgttctgggccctcatcccctagatccagggaccccagccccatttcagcccttgggcccttgtaggatgcgaggccctgggccccagcccccagcccatccgtggcccaggcactggggggctgaggtcctctgagaagggacacagggcctggggggctctctcagcccatcagcaggagaggactgactccagaaaa

SEQ ID NO: 546540 - DNA, 521 bp, Homo sapiens
acttctcgtctgataatgggcagagggtccttctgcagccccaaaacatccctaggcaggagccctggggccccaagcagccagggaggtgagcaccaaggacctcccagagagcgtcaccttccgtcgagggaggcccagcctgggggcggtgtctgagacttggaatcaacgcttccgttggtggcagtaaatcctgtccctaaccctgcagtacagctgtgccgtgtacaggagggtgctgtctgacgccagacacctggactacagatcgcagcctgattcctggtcattgctccactgaaccccagaccccagcctcgttctgggccctcatcccctagatccagggaccccagccccatttcagcccttgggcccttgtaggatgcgaggccctgggccccagcccccagcccatccgtgkcccaggcactggggggctgaggtcctctgagaagggacacagggcctggggggctctctcagcccatcagcaggagaggactgactccagaaaa

SEQ ID NO: 546541 - DNA, 605 bp, Homo sapiens
ctggttttcccctagtagccttcaaagctaatcatgtgaatgttttataatgattctccgatccagttcttgtatgtcatggaaagcctggaatccaacatcattattggaaatgtgggattatttctgcatgatatacttctgggtattatcattagtttgagttaattgctcccttctctgttccttcctaaccatggtcatacctctgtgacaggtgtatcacatcatatagtagctgtcatatgtcgctatctgattatgctaattgcttctacaactagactttgggaaccttgaggcaggaattttattttatctatctttatatattctcagcttacaacccagctgcaggcatgaggaaggtgctcaataaatgcttgctgacttattggatgaaatgcagatgggtgccaggagggcaattagtcaaggaggagagaagcaaagaggcaaagagaatactttagcaccattatcagctatggtggtcagtttgcctgctctgtccctggcctttcttggacagtctttattyccactgaaggatcagtggacctgacttgactctgccctttgggtcaaagtcgttcagatcaggg

SEQ ID NO: 546542 - DNA, 892 bp, Homo sapiens
catagctgcatcttccacctaagggtcagggactagctccagatgaacccccctaggaacacagggtaggctctgmcacccctacttctctccagcattaactccagaacctgtggaaggccagctagctccataccagggcactgacactgaagacatgataggcacctttctgccctctacggatggaaggggccccctgctccttagcacagcataccttaatggttaataaccttagtcagattcttattattattattattattattattattattactattatttttgagacagagtcttgctctgtcacccagattggagtgcagtggcctgatctcggctcactgcaacctccacctcccaggttaaagcaattctcctgcctcagcctccccagtagctgggactaaaggcgcatgccgccacacccagctaatttttgtattttcagtagagacggggtttcaccgtattgcccaggctggtcgccagcttttgagctcaggcaatccgcccgccttggcctcccaaagtgctgggattacaggtgtgagccaccacacccggccaccttagtcagattattaattgacacattggtgggaagctgaggaaagaagtggctacttcccagtgctttgatcatttaaaaaaattaaaaagacatagactttacagctgatgccggaatgagttaagattttggggatatttggatgtaataaatgtatttagcatgtcagaagaacatgaattttggagggctggggtagaatgctgtgaattgaatgtttgtgtctgatatggtttggctgcgccccaccgaaatctcaacttgaattatatctcccaggattcccacatgttgtgggagggacccgggggg

SEQ ID NO: 546543 - DNA, 892 bp, Homo sapiens
catagctgcatcttccacctaagggtcagggactagctccagatgaacccccctaggaacacagggtaggctctgacacccctacttctctccagcattaactccagaacctgtggaaggccagctagctccataccagggcactgacactgaagacatgataggcacctttctgccctctacggatggaaggggccccctgctccttagcacagcataccttaatggttaataaccttagtcagattcttattattattattattattattattattattactattatttttgagacagagtcttgctctgtcacccagattggagtgcagtggcctgatctcggctcactgcaacctccacctcccaggttaaagcaattctcctgcctcagcctccccagtagctgggactaaaggcgcatgccgccacacccagctaatttttgtattttcagtagagacggggtttcaccgtattgcccaggctggtcgccagcttttgagctcaggcaatccgcccgccttggcctcccaaagtgctgggattacaggtgtgagccaccacacccggccaccttagtcagattattaattgacacattggtgggaagctgaggaaagaagtggctacttcccagtgctttgatcatttaaaaaaattaaaaagacatagactttacagctgatgccggaatgagttaagattttggggatatttggatgtaataaatgtatttagcatgtcagaaraacatgaattttggagggctggggtagaatgctgtgaattgaatgtttgtgtctgatatggtttggctgcgccccaccgaaatctcaacttgaattatatctcccaggattcccacatgttgtgggagggacccgggggg

SEQ ID NO: 546544 - DNA, 903 bp, Homo sapiens
aatctttgaacccacttgtgaccaggaagcccatccctgccttggagttgtcccgcctttcttggcagaaccaacaaatacctttcatgtactgactgatgtctgcctgtracttctgtccttgtacaaggtatgaactccagctgtggcccagcccctggggcacatgtcctcagggcctccaggccttggtcctcacatttgactccggataaacctcttcaaatattttacagactctggctttctcgttaacaagcagctcacacatatagtgtctcagcagtgacagatgctggcccaccccgaggtcaggatgactcagcagggattgagtttgcgggcgtcatgctccaaggcccggaataggaggttggtgctcattcctcacatagtgggcaaatcctagggcaggggagggggggcaatgccagagaatggtccccacctggggcggtctgacggccagagatgcagagaaagagacgcctcccacgctcctggagggcaggtgctgtggccaccccggagggtccgccttccagagggagagttcaggatttggccacaatcagggaaggaggcactgggggggggccctcctgttggaaaagggcagcggcaggaagggggtgctgccacagggcctctggggagcgcgcgggcacacagtaccaatctgcgtgcatacacatgccctgtccctgcagatgggccacgcaaggcctgcccatggccagccatccaggtgatgctccagggagggccaggcctacttgggggcagaaccctgtggctgtccaggatacctggatgtgagtctgggaaggatggagaagggtggaggagtgcgaagggcccctaggggttgctggggaacacagatgagcctctgacccacct

SEQ ID NO: 546545 - DNA, 1453 bp, Homo sapiens
atggcaaaaccccatctgtaccaaaaagacgaaaaaaaaaaaagccaggcatggtggcacacacctgtaatcccaactactcrggaggctgaggcaggaaaattgcttgaacctgggaggcaaggctgaggcaggagaatgcttgaacccgggaggcagaggtgcaggagccgagatgtaccactgcactgtggcctgggtgacaagagcaagactctgtctcaaaaaaaagaaccccaaaaaacagaacaaaactgaggcttacctagggtcacagatttgaaaagtggtaagagctaatacttaactgaatttaagtctgactctaaattcaatgctcattttaccacatacccgcagttgttcatttgttcagggatcatgagtgctggctctggattaagataacctacattaatgtataattccagggctgggcatcgtggctcacgcctgtaatcccagcactttgggaggccgaggtgggtgaatcacgaggttaagaggtcaaaaccatcctggccaacatggtgaaacttcgtctctactaaaaatacaaaaattagctgggtgtggtggcgcacaactgtagtcccagctactcaggaggttgaggcaggagaatcgcttgaatccgggaggcagagatcgcagtgagccaagatggcgccactgcactccagcctggcaacagagagcgattccatctcaaacaaacaaacaaaaaaaaatacacaaaattccagctccctacttcctagctatgtgtaactgagcaagttattccatctttctgagcctcagtctcttcatctgtgaaaagggataacagctgggcacagtggctcatgccagtaatcccaacactctgagagggtgaggtgggaggatcacttgagcctagaaggtctaggcttcagtgagctgtcatcgtgccacggcaatcccacctgggtgacagagcgagatcctgtctcaaaaaaaaaaaaaaaaaaaaagacaaaagggataatagtaccaaccttagaaggtgaattaatgcctccaaaatttttagcagcgcacctgacaattagcagagcattcaataaatgagtaaggcaaccactacgtgtctggccctatgctgtgttgttgccgggtacagaggacacagtgatgaatcacaagaagtgctgccctccagaagttcccagtatgatggaggaagacagagagagaaaattacaacataatgttacaaaaactatgactgaggtaggaaaaaaatgttgcaggaacatagagaagggaaccactcactttgcctgaaggggaatcaaggatgacatcacaaaggatatgaagctaagaggatgagtaggagctaggcaggcaaacaaggagaaagggaagaaaaagcattccaagcaaagggcacaggtggtaaagggcgtgtggtcttcagagggca

SEQ ID NO: 546546 - DNA, 1453 bp, Homo sapiens
atggcaaaaccccatctgtaccaaaaagacgaaaaaaaaaaaagccaggcatggtggcacacacctgtaatcccaactactcgggaggctgaggcaggaaaattgcttgaacctgggaggcaaggctgaggcaggagaatgcttgaacccgggaggcagaggtgcaggagccgagatgtaccactgcactgtggcctgggtgacaagagcaagactctgtctcaaaaaaaagaaccccaaaaaacagaacaaaactgaggcttacctagggtcacagatttgaaaagtgrtaagagctaatacttaactgaatttaagtctgactctaaattcaatgctcattttaccacatacccgcagttgttcatttgttcagggatcatgagtgctggctctggattaagataacctacattaatgtataattccagggctgggcatcgtggctcacgcctgtaatcccagcactttgggaggccgaggtgggtgaatcacgaggttaagaggtcaaaaccatcctggccaacatggtgaaacttcgtctctactaaaaatacaaaaattagctgggtgtggtggcgcacaactgtagtcccagctactcaggaggttgaggcaggagaatcgcttgaatccgggaggcagagatcgcagtgagccaagatggcgccactgcactccagcctggcaacagagagcgattccatctcaaacaaacaaacaaaaaaaaatacacaaaattccagctccctacttcctagctatgtgtaactgagcaagttattccatctttctgagcctcagtctcttcatctgtgaaaagggataacagctgggcacagtggctcatgccagtaatcccaacactctgagagggtgaggtgggaggatcacttgagcctagaaggtctaggcttcagtgagctgtcatcgtgccacggcaatcccacctgggtgacagagcgagatcctgtctcaaaaaaaaaaaaaaaaaaaaagacaaaagggataatagtaccaaccttagaaggtgaattaatgcctccaaaatttttagcagcgcacctgacaattagcagagcattcaataaatgagtaaggcaaccactacgtgtctggccctatgctgtgttgttgccgggtacagaggacacagtgatgaatcacaagaagtgctgccctccagaagttcccagtatgatggaggaagacagagagagaaaattacaacataatgttacaaaaactatgactgaggtaggaaaaaaatgttgcaggaacatagagaagggaaccactcactttgcctgaaggggaatcaaggatgacatcacaaaggatatgaagctaagaggatgagtaggagctaggcaggcaaacaaggagaaagggaagaaaaagcattccaagcaaagggcacaggtggtaaagggcgtgtggtcttcagagggca

SEQ ID NO: 546547 - DNA, 1453 bp, Homo sapiens
atggcaaaaccccatctgtaccaaaaagacgaaaaaaaaaaaagccaggcatggtggcacacacctgtaatcccaactactcgggaggctgaggcaggaaaattgcttgaacctgggaggcaaggctgaggcaggagaatgcttgaacccgggaggcagaggtgcaggagccgagatgtaccactgcactgtggcctgggtgacaagagcaagactctgtctcaaaaaaaagaaccccaaaaaacagaacaaaactgaggcttacctagggtcacagatttgaaaagtggtaagagctaatacttaactgaatttaagtctgactctaaattcaatgctcattttaccacatacccgcagttgttcatttgttcagggatcatgagtgctggctctggattaagataacctacattaatgtataattccagggctgggcatcgtggctcacgcctgtaatcccagcactttgggaggccgaggtgggtgaatcacgaggttaagaggtcaaaaccatcctggccaacatggtgaaacttcgtctctactaaaaatacaaaaattagctgggtgtggtggcgcacaactgtagtcccagctactcaggaggttgaggcaggagaatcgcttgaatccgggaggcagagatcgcagtgagccaagatggcgccactgcactccagcctggcaacagagagcgattccatctcaaacaaacaaacaaaaaaaaatacacaaaattccagctccctacttcctagctatgtgtaactgagcaagttattccatctttctgagcctcagtctcttcatctgtgaaaagggataacagctgggcacagtggctcatgccagtaatcccaacactctgagagggtgaggtgggaggatcacttgagcctagaaggtctaggcttcagtgagctgtcatcgtgccacggcaatcccacctgggtgacagagcgagatcctgtctcaaaaaaaaaaaaaaaaaaaaagacaaaagggataatagtaccaaccttagaaggtgaattaatgcctccaaaatttttagcagcgcacctgacaattagcagagcattcaataaatgagtaaggcaaccactacgtgtctggccctatgctgtgttgttgccgggtacagaggacacagtgatgaatcacaagaagtgctgccctccagaagttcccagtatgatggaggaagacagagagagaaaattacaacataatgttacaaaaactatgactgagrtaggaaaaaaatgttgcaggaacatagagaagggaaccactcactttgcctgaaggggaatcaaggatgacatcacaaaggatatgaagctaagaggatgagtaggagctaggcaggcaaacaaggagaaagggaagaaaaagcattccaagcaaagggcacaggtggtaaagggcgtgtggtcttcagagggca

SEQ ID NO: 546548 - DNA, 543 bp, Homo sapiens
gggtcaggtgccctatctctgtactctagtctcttctttttataatatttacaatcctttcatgtaatagctagtaacattgttttccacaacaaatggaaggaaagayggttgtttgtcttgttttacagtattttgcacagtgtttggcaaatgtaaaattctgaatatagatgtatgactccaatacacattaaaatccactttatgatctggctttctgtattattaatagttaacttttgctgttttcaataacaccccaagatctaatggtttaagacaatgaagattcacttagtttaggtctctgagggcccgctgtgtgatcatgctggtcctttaatctcctttcatctctgctggaatccctaatgggtcagcagttacctgcaggttagcctgggacttttcacaaggtacttgcagggttcccaagagcagcataagcagaaagaccctagcgtgcaagtactcatcacgtttctgtttgtatggagacatcccgttggccacagcaagtcacacaaccgagacaaacca

SEQ ID NO: 546549 - DNA, 734 bp, Homo sapiens
cagccaagtacctatcttaatgctagtcagtggctactgttgctgctggtagggctggatttgtaccaccaacgtgcagggcacaggactcatttcaccctaggtcttgcacagcatcctggagctagaagcttggaaatgagcatggccttttgcaagctgggaagaggctatctgggtgggagcaggtagctggtgcccaggtactgctgccgttagcgagctgggtggcaggcaggctgccgatacacacacagtgaggacaaaagccagaggcagtgatagctccacctcctagcaaatccccacagagagagggaatgagggccccagaatgatggtgaatgggatgcaaacaactgtctcactcattacacatgaccttaccactcacaaatgayaggtagacacagagccacaaataagtgacaatatattgcatttgtagtgcctcttccttgtttggagatgctgatctttccagcaacaaaatttagttctttttaggttttgccctctactttcctttggcttgttcttcttctcctctttttttgctttaattaaatattgctgcctaactctttcaggtcagcagcaatgtcaccagcatcagccatgaatcatggctgagctgacattttaaaaatggcatcgtcagggtagcaagtgcaggccagacacccaggcacaatgactggaccccgtaaattacactaaaagtctaatcagaa

SEQ ID NO: 546550 - DNA, 542 bp, Homo sapiens
cagttctgcaaagccagcrttatcatcccttttcagaaggagtgggcactcaggtggaatgcctcaccccagtcctgcggctggaaagcgatatggccaggactgcaccccacccctcatccctgcaccccttccctgcctgggattcctccagccctgtgcactgtggagcgcctctgccttccgctcatggaggtttcccaagggcacgcgctgagggcagctggtctcagcctggggccgggtcctagtaactgtctctctttgctttccagccagtgttttggggtttgaagttggaatcttcagctactgtcaagaacagccacaaaaatgtgtcacgatcaagatctttgagagtccaccaatcaggaggcgtctgtgacagtcgctgtcttctcagaacagaatccacacccaggattcaacccaaatgatttctcatcaggtgattcttggttgtagcaaagttcatgtgaatgtgggtgagtttctgttatgaatgtggtcaataaatgttatttgtgaaactctaaactggc

SEQ ID NO: 546551 - DNA, 542 bp, Homo sapiens
cagttctgcaaagccagcattatcatcccttttcagaaggagtgggcactcaggtggaatgcctcaccccagtcctgmggctggaaagcgatatggccaggactgcaccccacccctcatccctgcaccccttccctgcctgggattcctccagccctgtgcactgtggagcgcctctgccttccgctcatggaggtttcccaagggcacgcgctgagggcagctggtctcagcctggggccgggtcctagtaactgtctctctttgctttccagccagtgttttggggtttgaagttggaatcttcagctactgtcaagaacagccacaaaaatgtgtcacgatcaagatctttgagagtccaccaatcaggaggcgtctgtgacagtcgctgtcttctcagaacagaatccacacccaggattcaacccaaatgatttctcatcaggtgattcttggttgtagcaaagttcatgtgaatgtgggtgagtttctgttatgaatgtggtcaataaatgttatttgtgaaactctaaactggc

SEQ ID NO: 546552 - DNA, 1267 bp, Homo sapiens
tccaggcctttgcacatgctcttcccttcacctggatcccttctctccctcatctgcagggtgatcccccacttacactttcaaataccattcmaacaactctcctcaatgtttatacatcatgagtaaattcaccttatcccaggattccaggaaagtgtagggtttctttttaaagttagtagaatttaccatccccagagcaaaacagaaaagtctccaggaggcagagatgtgtgtgtgactgacagcagcagcaagcctgtatcagtcacttgtttatggcacctcagtcaccgtgctgagatctatgtcataacttgctaaatcctccctgcaacacttgaggtaggccctattgtaacccttacctcacagaggaggaaagggaggcacagagaggctttgtaacttgcccaagctcacacagctggcaagcggcagaagcaagggtcgatctcagaccatctttacaccagcatgctgtactgaatgaatgactgaattaatgcaaccagcaacaccaaaatgatgcaagatctagagagaagagagccctactgagccagttcctgcagcgtgagagaaggtcctggatggccagttaaagggtctggctacagatggcagagatggcagtcgaggatgggcacctgctgtgtgaagcaggctcccagggccctgcagtcctccttcgcttgggttcccatggccaaaggccagcctctgccttcctatatctcacgatactgcaattgcatgttcatgcgcctgcctctcccacttcagacgcagggccagggttccactcagccctttcagccaggactgtttgcctcgcctagaaacaacccatttttctttctttctttcttttgagatggagtttcgctcttgtcacccaggctggagtgcaatggcgcaatctcagctcactgtaaccgccacctccaggggctcaagcgattctcctgcctcagcctcccaagtagttgggattataggcacccaccaccatgcccagctaatttttgtatttttaatagagacggggtttcaccgtgttggccagactggtctccaactcctgacctcaggcgatctgcctgccgcggcctcccaaagtgtgggattacaggtgtgagacatcacgctaggccccatttttcttttgcccaggctggagtgcagtggtacgatctcggctcactgcaacccctgcctcccgagtagctgggattacaggcatgcaccaccacgcccagct

SEQ ID NO: 546553 - DNA, 802 bp, Homo sapiens
atccgttaacagctggtagacccctcagatagccatgccctgactaagaaggtgggaagctcccaaaatgcacgtcagcagaatactggagacgttgtctgaggagggctatcaggcagaagcagtatatgaaaaccaggattaagtgaacatttctcactgaatgttgagaacaccattcttttttttccccttagaatgctgatagccaggccaatactcaccaggcaggagaatgaaaaaccatttctgaggaacataactgacacaaaagaaaagatctgaagattctggcttcagggctaccccaaataagcagtccagccagatcattcttcagtgaaacccaagctcagtaagccacatgatgcagtgatgagatgatcaccagacatgaggaaagcctttaacatgaaaggcagaggccaaacggactaacagaaacaaataaatgaataacagggaagaaacaggcagagtgaaaaacacttgacaattattaatagccttagagaagagtttcggggtgaggggaggggggagggatagcattargagatatacctaacgctaaatgacgagttaatgggtgcagcacaccagcatggcacatgtatacatatgtaactaacctgcacattgtgcacatgtaccctaaaacttaaagtataataataataaaataaaataaaataaaaaaagaaagagaagagtttctgtataatgaaacataaagagaatgctgtaaaaaagaagattcacgaaaaaaaagaactctggaaatgtcaaaaatgaaaaactc

SEQ ID NO: 546554 - DNA, 392 bp, Homo sapiens
atatatacatatacatatatatatayatatatacatatatatacacacatatatatgagttaattgttcaattttattcttttgcatatagctatccagttatcccagcataatttgttgaaacaactgctcatttctcattggatgaccttggcatctttattaatactttccattctttcactcgtgactttttaagtcttctctcttttttgttttctttttttctttttttttttttttttttttggtcagccttgctaatgatttgcctttttttgttgctgttctaaacagaaaccaacactggatttgctgaatttttgtattgttttagtatcctatacttatttttgaactaatatgcattacttttttctactgcttgcttt

SEQ ID NO: 546555 - DNA, 661 bp, Homo sapiens
aaaagcaatgtgactgcggaacttttgcctaagtgacagtcagtggattcttttggggttggtgcccattcagggctagtccttcctccagctgcacctgcatcttcagctggattcaacacacggtggcccgcctgagcactggccttgagtcacccagaaaggtatcagttgtggtcagcactgatgattaaggtgattggggaagtatgagaaacccctgaaaagaatgtctaacgaagaaggtttcactaatgtctggagtttgcccatctgtgttatttaagaggcattcccccatgaactcagacttccacttttctgagggcagagtagtcacctcacctatacccagttgtcctctcaatttcttgtctgtagtttgtacgcaaaccatcattcacctgccaaaccttcctctaaacctgccctgaatgcaacgcctgctcatttgccactcccacttcctcatgtgtggcaaggcatcctcttcctgaattgtctatcctgagatgacggttayaccctgagaagacggtctaaggctttgaggctgagttatttctcagccccctctgacccacatcaatatcgggtacctggggagggtaggtgggtgattacctacttctgtgacttcacgggcatgaaaagggccctt

SEQ ID NO: 546556 - DNA, 2010 bp, Homo sapiens
ggaatatcaaaattgtcatggccttttaaagtacttatgtccagtgtcctgatattacagataatgtatgaggcccagtgaggctaacttgtccaaggtatggatcccatcagaaataatttcagcattgttgtatttctgttttctttgacacctaagatttggacttagaatcacctgcctcttcaaagagagcttcctttgtaatttttcttcttgacttaatgaaagcctgtcccagtgttctctgtttagggttttgctcactaatcataatgacgccattgttcttttctcttttgctagaattgcttcagtgccttaacaggcaaattagacaatgagaagaagaaattttttattttagatccctttttatcctatttggtcatttagagcaccaggcagtctatctcctaaagaatgagtttcacagtgcactggggatttagttgcctaaggtgtcctatggctgaaaagtgaattctttatgattttggcagcatttagaattcttctgagctacggaaaactcaagttttatgacctctttgttaggctgcattgcagagacactgtaatattgcctagtcagtgagaaagatgactaggtttgttctgcgggacatcaaagaataaaagtaggatcagatatatgggaacatatttctgctcaatgtgaagaaaataactttctaagaaaagtgtctggtagaagagagtgagctgcttcaggagaaggtaggaacatggagaagattttacagtacatgggaagctgaacttaaaagactttgaagttctcatccaacccacagaccctgtgatcctatgaccttataaaaatgaagagaccaattagttcaccatagaagtaatacgttattattagtatttccacacatggcttgcaagtgacttagctggttcttgttgaagctgccttcactatgtggcaatcatcgttcctccccgcccccccttcattatactaatatatataattgaacacagaattcatcgagaaaaatggaaaactgattttattgccttgtgatattgacttttctttataattgtaactcctcccagttatgccaagttgctggggcagagacaatagcagtgctttggctccataggagttaagaaaggaagaagaaacttttttgttcatttgatttttttttttccacttggaatagaaatccggttctgaaccttgtttcatggtttgatttataagtccttccttttagccaaggaatatctttttgctaaccttagagcaaattagccagatgcttatatatttgatagagcttttccttctgttattaataattaaartaaaagcaatcataatgaaatgtcaattcagtaataatgaaaatgttccaaagcatgttcagatttgtaatctcatagaatacatgagaataattacctggattattcccagtaatcgtttcatagaggggaagcccaagatactgaactttggtataattatttgcagtacttagtccagattcccctttttcacttaagacaacatcccataaaattttcgcttgggttatatacaattaatctgagtggtgaccagtttcttgatgatcaagctgtaatatctgatcctagttaggttgcatatctttgaggaggcagagaatagtttcatgccctgcctggctggatcctcagtaactattcttagtccagtgccttatttacctgtctgacttcctattgtttcttgattgtctctcccaagcaggggagattaatctaaacacactgacctcctttgtggttgttgaggatgatcacagttgaggtctggttgttttccaggcagaaaagggaagttaatttaataggatcctaatcacaatagtggtttctgtgatatatgtgcatgagtttgaaaagcagtcctggggtcctgcattctcacattggcctgcactgccttttgccagggactctgataagataactggtctt

SEQ ID NO: 546557 - DNA, 601 bp, Homo sapiens
caacacctagtgtagtaatgtatgtggcagtgatttcctctttaattcagcaaacatgctgcaggagaatggggactcatggtaagattctgcacattggaaattggggacagatatcaattctggatatatttcctttaaagggtagttagttatcacatgccttctgaggattgcatgagtcaccttctagtgtggcaccccttttcatttgggtatgtagagccatggttactgttcaacagacgttgaaccagatgtgcctgctattacagaagtgaaatctgacagctgttacctaaactcttcagtggctcttattctatctacctcagcctgttttgatttttgaagccttattagatacaacaatttttgcccatggggaacaggctttccctttttggtgattgacaggatactggtcagtagacagtgataagcaggattctgtgattctttttcccctgatgaatattgtgttaacagactacagcagctttgtgstacagcagattcgtttgatgtcatagggagatggatttccttccactttagcttttatctgcttgtattaatacctatgattagagaggctgca

SEQ ID NO: 546558 - DNA, 547 bp, Homo sapiens
gccacccacagaaggggctttcctcgaactgcacagcccctcttcagtctaccctggccccaccagctttcttccctaaagagcagtgtgaaatgcctgatactgtgcctacctctacatwgttggaggttctcgtcttcttcctcttgtcctaattcaccaggaacttgctctctgctgtgggctgattggagtggtgaatagggggctggcagtagcttctttgttgtttaacaagggcttttccaaagcagtgacccacttagaatctttaaattatagaaagctgatggtgatggggcaggggagcaggaggccttcactttcagtgctggtaaagctgacatctgtgtggtaggggtgtcaagactctggcctgcagttagcttgcgcctggacgtgaatcccagctcttccactttctagctgagtaaacttgaataaatggaaacttaagcatcattctttcatcggtaaagaggactatcaggatgagtcattgaaaaagattatgaaatgcactttgcatagtttctggaatttaata
